United States Patent Application Publication US 2017/0114356 A1 - sequence listing, part 99

SEQ ID NO: 177288 - protein, 520 aa, Zea Mays
MAPPARPPRAGEDLEEGTGESSPPPRSPRASNPDCHEVQRKICERLRQTGRHDRTLADPTFNARFARHLERLPRRYLLDLDLDDKLEDVLLHWGILDECADPNKRPVFRARFIKYKTVPREDDGIGHDQDHEEPCQKLLEDLSLERRKIADRNDSLSISSRGDLKTVLLHEIIFSSIDKPKLLSRLTALLSEVGLNIQEAHVYSTKDGFCLDVFVVDGWKTEETDELIAAIKETLTQKNASPSNSTNSSTPEKIVDLQQQVGDYEIDLSMLTRGDKIASGSSADLYRGTYKGHDVAIKCLRSLYLNNPSEVEFLQEVLILSGVNHENILQFYGACTKHPNYCIVTEYMPGGNIYDFLHKQNNFLDLHKILRFAIDISKGMDYLHQNNIIHRDLKSANLLLGHDQVVKIADFGVARHGSQQGQMTAETGTYRWMAPEIINHKPYDHKADVFSFAIVLWELATSMVPYDNMTPLQAALGVRQVRISVPDTCQANFLGIALGHSGQRAPKIDQADSTVLERRS

SEQ ID NO: 177289 - protein, 329 aa, Zea Mays
MAPPARPPRAGEDLEEGTGESSPPPRSPRASNPDCHEVQRKICERLRQTGRHDRTLADPTFNARFARHLERLPRRYLLDLDLDDKLEDVLLHWGILDECADPNKRPVFRARFIKYKTVPREDDGIGHDQDHEEPCQKLLEDLSLERRKIADRNDSLSISSRGDLKTVLLHEIIFSSIDKPKLLSRLTALLSEVGLNIQEAHVYSTKDGFCLDVFVVDGWKTEETDELIAAIKETLTQKNASPSNSTNSSTPEKIVDLQQQVGDYEIDLSMLTRGDKIASGSSADLYRGTYKGHDVAIKCLRSLYLNNPSEVEFLQEVLILRQDFAIHNC

SEQ ID NO: 177290 - protein, 81 aa, Zea Mays
MVPYDNMTPLQAALGVRQGLRLDIPGSVHPRLTKLIRQCWNEDPDARLTFAEITKELQDSLHHIEAPKGASRRSRAKMQKK

SEQ ID NO: 177291 - protein, 455 aa, Zea Mays
MSPDVDAAVATAVAPGGGCGGDGEAGAGTSSSPASAANGRALVRWDQILPRRSLRVLLVEHDDSTRQVVTALLRKCGYRVAAVADGMKAWGVMRERAYAFDLVLTEVAMPSLSGIQLLSRIVAADECKNIPVVMMSSQDSIGTVLKCMQKGAVDFLVKPVRKNELRNLWQHVWRRHAMNCQTNGSENNAASNHISANVANGSKTGENSDEESDAQSFGSKRDTEIHSVEAVQDIRRDEVAGSSKNNELQNKSYDGVNTKVDVSKYTNGAPSGSEKNVRSKCLNGITSAKVAEQIMDNALRITDASSRRPTNLGNGLAMTEPAADRKCQSSVMENNAVTENNPGDKSKGAAIGHADSCPSEFMVTNLGKEHHLNGYKNQEFREKDIFNHSNSSAFSRYGNKRIEPSGEIQFFPSPCVIGQGHVNGKNPVFQPNGVLLPPNEHNTARILPTESSYAL

SEQ ID NO: 177292 - protein, 143 aa, Zea Mays
MAAAVDARVFYLKMKGDYHRYLAEFKTGAERKDAADSTLAAYQAAQDIAVKELPPTHPIRLGLALNFSVFYYEILSSPDRACSLAKQAFDEAISELDSLGEESYKDSTLIMQLLRDNLTLWTSDMQEDGGDEMRDANKPDEEQ

SEQ ID NO: 177293 - protein, 363 aa, Zea Mays
MGESDVKEQQPNRLQEELRKEKEKARALDEIQDLQGELEAARDSEKKMLLSLQAQTKQLEQTKVSLEEAKIEIASLRDSRQPFKNFRRRGLMSFSFADPGEAETWSLQRELRLAVESEEKCNKAMDDLAIALTEQTTEAREANVKLSLAQAELNNARTQVETLKASLESTEGKLQLALEEADRLKVESDELAAASKEKERGLVDCIKMFEEDLSKGKEENDKLIESQRVTRDENSRLREMLKHAVGEANVARESLEIARVENSRLNEEMFKKESTLQSINQEYESLKISEAAAQSSIKELKDMIDAMFSSESTKTSAEASPREAKGSKMKETSVAADYVYSDVERSTRLDDIKNPLRTAHYNL

SEQ ID NO: 177294 - protein, 84 aa, Zea Mays
MTRRGGSGWAVAQLSVVVRDFGEGVMRLERRRMEVQWEIERGWQEADARHARMLKDALRQFRDTAAAAACVLPPKKARRDHGDS

SEQ ID NO: 177295 - protein, 857 aa, Zea Mays
MKAQDNITRVPTMVMVLGFKDQIGLITDKTNVQHHLSCHEKRAKRRRTSKFGEPVVGKDGKFECPICFKTFEEESRYFGHVGAHARYEGLTPEAFVDKTTYRRATNNHLAEISFGLQELPESHGQNNKVSYGETVFRHHNHSNEHVDNNSTATELFSTNYPDNFIRPNKTWGRSEEGPSFNDASSVCRYTNFTGHADLTVPERASISNNQSVSNINGFLGVSMFSDQPGSNHVIRPTVFGTNNTVEGRDVNLNSCVNTISFPIANANNETSAGLNEANRLSTTAKCFSGSSNNNDGASSASSHCGSTNKIYSSYGTTSKTQAVGSRCISGSYEPYGEDCGALKVNPFASKNNTAVYQSKLGTQPVYVVATRANCFASGSMQTNNSDKELASSAMERIDSVKNRTSKETGFVTEAYNNDAFSGGITEKGFAQFSNSSTHIKPNASGHCSLPESKTPTNGSDINCIKGSSVNRGDVSFTNGSFVNRPINNNEPNVARLEVMEKLNNVMQNRYNDHAPGFDPHAAASASRNANGLMPMHANFGCMSSTVQSVANVSTTSTSQDQCDLQLGFGVQKQHIFSRHGELRTATARSPLPGSIAKRNSVPTESSQFESMDGPKSFPNGTSQFGGFARPTFVPAAPSQFGSMAQPNYVHSSQSSQFTSLVQPNSVPPAESSQFGSKAQSSSAPLAKTSQFKGMAGPNSVPPAEPSQFGSMIRPNLVPPASSQFLGSMVRPNSVTPESSQFGSMTRPNSVPPVSSQFVNMPSQNFVSASEPTLVLGYAPQIGSDPPHQVQLGWDLSLPRMVTGGSMVTCLCIWCNSQFHHFGPVDGQQASSFGFICPTCKDRMSGHHSMPSNGSWQP

SEQ ID NO: 177296 - protein, 1122 aa, Zea Mays
MATELLPVVDLRVLSQPDLDALAAASAHALAPRTCPDADPLPPLKIDRAVFNESAGSRKQTFSRRRLAASPSSARHSSSAQTSTGRKNDPEGDLVAYHLRRLFVPDDPSLPPPPEPQTLALLQEPSPPPPPAPDPDRETTNAKGVSVDLLGLAAMPEPYDAELHRRTAGMASGTDLQGFIDSLAGEWVSQKKRRKNVDASFFGDHLPRGWKLQLGLKRNSGSIWVRCFSYVSPKGRHFSTCKEVSAYLMSLLGYPELKPAANQYESTGQHYSSANNGDGSVLGFKDQIGLITDKTNVQHHLSCHEKRAKRRRTSKFGEPVVGKDGKFECPICFKTFEEESRYFGHVGAHARYEGLTPEAFVDKTTYRRATNNHLAEISFGLQELPESHGQNNKVSYGETVFRHHNHSNEHVDNNSTATELFSTNYPDNFIRPNKTWGRSEEGPSFNDASSVCRYTNFTGHADLTVPERASISNNQSVSNINGFLGVSMFSDQPGSNHVIRPTVFGTNNTVEGRDVNLNSCVNTISFPIANANNETSAGLNEANRLSTTAKCFSGSSNNNDGASSASSHCGSTNKIYSSYGTTSKTQAVGSRCISGSYEPYGEDCGALKVNPFASKNNTAVYQSKLGTQPVYVVATRANCFASGSMQTNNSDKELASSAMERIDSVKNRTSKETGFVTEAYNNDAFSGGITEKGFAQFSNSSTHIKPNASGHCSLPESKTPTNGSDINCIKGSSVNRGDVSFTNGSFVNRPINNNEPNVARLEVMEKLNNVMQNRYNDHAPGFDPHAAASASRNANGLMPMHANFGCMSSTVQSVANVSTTSTSQDQCDLQLGFGVQKQHIFSRHGELRTATARSPLPGSIAKRNSVPTESSQFESMDGPKSFPNGTSQFGGFARPTFVPAAPSQFGSMAQPNYVHSSQSSQFTSLVQPNSVPPAESSQFGSKAQSSSAPLAKTSQFKGMAGPNSVPPAEPSQFGSMIRPNLVPPASSQFLGSMVRPNSVTPESSQFGSMTRPNSVPPVSSQFVNMPSQNFVSASEPTLVLGYAPQIGSDPPHQVQLGWDLSLPRMVTGGSMVTCLCIWCNSQFHHFGPVDGQQASSFGFICPTCKDRMSGHHSMPSNGSWQP

SEQ ID NO: 177297 - protein, 1061 aa, Zea Mays
MATELLPVVDLRVLSQPDLDALAAASAHALAPRTCPDADPLPPLKIDRAVFNESAGSRKQTFSRRRLAASPSSARHSSSAQTSTGRKNDPEGDLVAYHLRRLFVPDDPSLPPPPEPQTLALLQEPSPPPPPAPDPDRETTNAKGVSVDLLGLAAMPEPYDAELHRRTAGMASGTDLQGFIDSLAGEWVSQKKRRKNVDASFFGDHLPRGWKLQLGLKRNSGSIWVRCFSYVSPKGRHFSTCKEVSAYLMSLLGYPELKPAANQYESTGQHYSSANNGDGSVLGFKDQIGLITDKTNVQHHLSCHEKRAKRRRTSKFGEPVVGKDGKFECPICFKTFEEESRYFGHVGAHARYEGLTPEAFVDKTTYRRATNNHLAEISFGLQELPESHGQNNKVSYGETVFRHHNHSNEHVDNNSTATELFSTNYPDNFIRPNKTWGRSEEGPSFNDASSVCRYTNFTGHADLTVPERASISNNQSVSNINGFLGVSMFSDQPGSNHVIRPTVFGTNNTVEGRDVNLNSCVNTISFPIANANNETSAGLNEANRLSTTAKCFSGSSNNNDGASSASSHCGSTNKIYSSYGTTSKTQAVGSRCISGSYEPYGEDCGALKVNPFASKNNTAVYQSKLGTQPVYVVATRANCFASGSMQTNNSDKELASSAMERIDSVKNRTSKETGFVTEAYNNDAFSGGITEKGFAQFSNSSTHIKPNASGHCSLPESKTPTNGSDINCIKGSSVNRASASRNANGLMPMHANFGCMSSTVQSVANVSTTSTSQDQKQHIFSRHGELRTATARSPLPGSIAKRNSVPTESSQFESMDGPKSFPNGTSQFGGFARPTFVPAAPSQFGSMAQPNYVHSSQSSQFTSLVQPNSVPPAESSQFGSKAQSSSAPLAKTSQFKGMAGPNSVPPAEPSQFGSMIRPNLVPPASSQFLGSMVRPNSVTPESSQFGSMTRPNSVPPVSSQFVNMPSQNFVSASEPTLVLGYAPQIGSDPPHQVQLGWDLSLPRMVTGGSMVTCLCIWCNSQFHHFGPVDGQQASSFGFICPTCKDRMSGHHSMPSNGSWQP

SEQ ID NO: 177298 - protein, 468 aa, Zea Mays
MQTNNSDKELASSAMERIDSVKNRTSKETGFVTEAYNNDAFSGGITEKGFAQFSNSSTHIKPNASGHCSLPESKTPTNGSDINCIKGSSVNRGDVSFTNGSFVNRPINNNEPNVARLEVMEKLNNVMQNRYNDHAPGFDPHAAASASRNANGLMPMHANFGCMSSTVQSVANVSTTSTSQDQKQHIFSRHGELRTATARSPLPGSIAKRNSVPTESSQFESMDGPKSFPNGTSQFGGFARPTFVPAAPSQFGSMAQPNYVHSSQSSQFTSLVQPNSVPPAESSQFGSKAQSSSAPLAKTSQFKGMAGPNSVPPAEPSQFGSMIRPNLVPPASSQFLGSMVRPNSVTPESSQFGSMTRPNSVPPVSSQFVNMPSQNFVSASEPTLVLGYAPQIGSDPPHQVQLGWDLSLPRMVTGGSMVTCLCIWCNSQFHHFGPVDGQQASSFGFICPTCKDRMSGHHSMPSNGSWQP

SEQ ID NO: 177299 - protein, 635 aa, Zea Mays
MFSDQPGSNHVIRPTVFGTNNTVEGRDVNLNSCVNTISFPIANANNETSAGLNEANRLSTTAKCFSGSSNNNDGASSASSHCGSTNKIYSSYGTTSKTQAVGSRCISGSYEPYGEDCGALKVNPFASKNNTAVYQSKLGTQPVYVVATRANCFASGSMQTNNSDKELASSAMERIDSVKNRTSKETGFVTEAYNNDAFSGGITEKGFAQFSNSSTHIKPNASGHCSLPESKTPTNGSDINCIKGSSVNRGDVSFTNGSFVNRPINNNEPNVARLEVMEKLNNVMQNRYNDHAPGFDPHAAASASRNANGLMPMHANFGCMSSTVQSVANVSTTSTSQDQCDLQLGFGVQKQHIFSRHGELRTATARSPLPGSIAKRNSVPTESSQFESMDGPKSFPNGTSQFGGFARPTFVPAAPSQFGSMAQPNYVHSSQSSQFTSLVQPNSVPPAESSQFGSKAQSSSAPLAKTSQFKGMAGPNSVPPAEPSQFGSMIRPNLVPPASSQFLGSMVRPNSVTPESSQFGSMTRPNSVPPVSSQFVNMPSQNFVSASEPTLVLGYAPQIGSDPPHQVQLGWDLSLPRMVTGGSMVTCLCIWCNSQFHHFGPVDGQQASSFGFICPTCKDRMSGHHSMPSNGSWQP

SEQ ID NO: 177300 - protein, 1619 aa, Zea Mays
MATELLPVVDLRVLSQPDLDALAAASAHALAPRTCPDADPLPPLKIDRAVFNESAGSRKQTFSRRRLAASPSSARHSSSAQTSTGRKNDPEGDLVAYHLRRLFVPDDPSLPPPPEPQTLALLQEPSPPPPPAPDPDRETTNAKGVSVDLLGLAAMPEPYDAELHRRTAGMASGTDLQGFIDSLAGEWVSQKKRRKNVDASFFGDHLPRGWKLQLGLKRNSGSIWVRCFSYVSPKGRHFSTCKEVSAYLMSLLGYPELKPAANQYESTGQHYSSANNGDGSVLGFKDQIGLITDKTNVQHHLSCHEKRAKRRRTSKFGEPVVGKDGKFECPICFKTFEEESRYFGHVGAHARYEGLTPEAFVDKTTYRRATNNHLAEISFGLQELPESHGQNNKVSYGETVFRHHNHSNEHVDNNSTATELFSTNYPDNFIRPNKTWGRSEEGPSFNDASSVCRYTNFTGHADLTVPERASISNNQSVSNINGFLGVSMFSDQPGSNHVIRPTVFGTNNTVEGRDVNLNSCVNTISFPIANANNETSAGLNEANRLSTTAKCFSGSSNNNDGASSASSHCGSTNKIYSSYGTTSKTQAVGSRCISGSYEPYGEDCGALKVNPFASKNNTAVYQSKLGTQPVYVVATRANCFASGSMQTNNSDKELASSAMERIDSVKNRTSKETGFVTEAYNNDAFSGGITEKGFAQFSNSSTHIKPNASGHCSLPESKTPTNGSDINCIKGSSVNRGDVSFTNGSFVNRPINNNEPNVARLEVMEKLNNVMQNRYNDHAPGFDPHAAASASRNANGLMPMHANFGCMSSTVQSVANVSTTSTSQDQGMSCGGCAASVKRILESEPQVRSATVNLATEMAVVWAVPEDSVVQDWKEQLGEKLANQLTTCGYKSNLRDSSKVGSQTVFERKMQDKLEQLKQSGRELAVSWALCAVCLVGHISHLFGVNMPLMHVIHSTGFHLSLSIFTFVGPGRRLILDGLKSLLKGSPNMNTLVGLGALSSFAVSSIAAFIPKLGWKTFFEEPVMLIAFVLLGKNLEQRAKLKATSDMTGLLSILPSKARLMVDNDAEKSSLIEVPCDTLAVGDYVVVLPGDHIPADGIVKAGRSTVDESSLTGEPMPVTKITGAEVSAGSINLNGKLTVEVRRPGGETVMSDILHLVEEAQTRAAPVQRLADKVAGNFTYGVMALSAATYMFWSILGSQLVPAAIQHGGAMSLALQLSCSVLVIACPCALGLATPTAVLVGTSLGATRGLLLRGGDVLEKFSDVDAVVFDKTGTLTIGRPVITKVIPSRGMGDANTKDLGANQWAEADILSFAAGVESNTNHPLGKAIMEAAGAANCVIMKANDGSFMEEPGSGAVATIGEKQVSVGTLDWIRRHGVIHNPFPEAEHFGQSVAYVAVNGALAGLICFEDKLRGDSRQVIETLSKQGISVYMLSGDKESAAMNVASVVGIQADKVLAEVKPHEKKKFISELQKEHKVVAMVGDGINDAAALASADVGIAMGGGVGAASDVSSVVLMGNRLSQLIDALELSKETMKTVKQNLWWAFLYNIVGLPIAAGALLPATGTILTPSIAGALMGFSSVGVMANSLLLRVRLSSRRKREPLKAISDEVEKNYSSKWST

SEQ ID NO: 177301 - protein, 792 aa, Zea Mays
MSCGGCAASVKRILESEPQVRSATVNLATEMAVVWAVPEDSVVQDWKEQLGEKLANQLTTCGYKSNLRDSSKVGSQTVFERKMQDKLEQLKQSGRELAVSWALCAVCLVGHISHLFGVNMPLMHVIHSTGFHLSLSIFTFVGPGRRLILDGLKSLLKGSPNMNTLVGLGALSSFAVSSIAAFIPKLGWKTFFEEPVMLIAFVLLGKNLEQRAKLKATSDMTGLLSILPSKARLMVDNDAEKSSLIEVPCDTLAVGDYVVVLPGDHIPADGIVKAGRSTVDESSLTGEPMPVTKITGAEVSAGSINLNGKLTVEVRRPGGETVMSDILHLVEEAQTRAAPVQRLADKVAGNFTYGVMALSAATYMFWSILGSQLVPAAIQHGGAMSLALQLSCSVLVIACPCALGLATPTAVLVGTSLGATRGLLLRGGDVLEKFSDVDAVVFDKTGTLTIGRPVITKVIPSRGMGDANTKDLGANQWAEADILSFAAGVESNTNHPLGKAIMEAAGAANCVIMKANDGSFMEEPGSGAVATIGEKQVSVGTLDWIRRHGVIHNPFPEAEHFGQSVAYVAVNGALAGLICFEDKLRGDSRQVIETLSKQGISVYMLSGDKESAAMNVASVVGIQADKVLAEVKPHEKKKFISELQKEHKVVAMVGDGINDAAALASADVGIAMGGGVGAASDVSSVVLMGNRLSQLIDALELSKETMKTVKQNLWWAFLYNIVGLPIAAGALLPATGTILTPSIAGALMGFSSVGVMANSLLLRVRLSSRRKREPLKAISDEVEKNYSSKWST

SEQ ID NO: 177302 - protein, 535 aa, Zea Mays
MLIAFVLLGKNLEQRAKLKATSDMTGLLSILPSKARLMVDNDAEKSSLIEVPCDTLAVGDYVVVLPGDHIPADGIVKAGRSTVDESSLTGEPMPVTKITGAEVSAGSINLNGKLTVEVRRPGGETVMSDILHLVEEAQTRAAPVQRLADKVAGNFTYGVMALSAATYMFWSILGSQLVPAAIQHGGAMSLALQLSCSVLVIACPCALGLATPTAVLVGTSLGATRGLLLRGGDVLEKFSDVDAVVFDKTGTLTIGRPVITKVIPSRGMGDANTKDLGANQWAEADILSFAAGVESNTNHPLGKAIMEAAGAANCVIMKANDGSFMEEPGSGAVATIGEKQVSVGTLDWIRRHGVIHNPFPEAEHFGQSVAYVAVNGALAGLICFEDKLRGDSRQVIETLSKQGISVYMLSGDKESAAMNVASVVGIQADKVLAEVKPHEKKKFISELQKEHKVVAMVGDGINDAAALASADVGIAMGGGVGAASDVSSVVLMGNRLSQLIDALELSKETMKTVKQNLWLDYPLLLEHCFQLRGRY

SEQ ID NO: 177303 - protein, 858 aa, Zea Mays
MDPTTPVLALSKAFASSRTKPFLLLAPHRRRSLFAARASAPSSSSVPGDLLISLARLALRGPGPPAAPRRWFASVSSASPLASGGPPRGGGGRGNGDGDGGGGGDGWKRPRASQGAGVVEEAAAQGADVIVLDVGGMSCGGCAASVKRILESEPQVRSATVNLATEMAVVWAVPEDSVVQDWKEQLGEKLANQLTTCGYKSNLRDSSKVGSQTVFERKMQDKLEQLKQSGRELAVSWALCAVCLVGHISHLFGVNMPLMHVIHSTGFHLSLSIFTFVGPGRRLILDGLKSLLKGSPNMNTLVGLGALSSFAVSSIAAFIPKLNLEQRAKLKATSDMTGLLSILPSKARLMVDNDAEKSSLIEVPCDTLAVGDYVVVLPGDHIPADGIVKAGRSTVDESSLTGEPMPVTKITGAEVSAGSINLNGKLTVEVRRPGGETVMSDILHLVEEAQTRAAPVQRLADKVAGNFTYGVMALSAATYMFWSILGSQLVPAAIQHGGAMSLALQLSCSVLVIACPCALGLATPTAVLVGTSLGATRGLLLRGGDVLEKFSDVDAVVFDKTGTLTIGRPVITKVIPSRGMGDANTKDLGANQWAEADILSFAAGVESNTNHPLGKAIMEAAGAANCVIMKANDGSFMEEPGSGAVATIGEKQVSVGTLDWIRRHGVIHNPFPEAEHFGQSVAYVAVNGALAGLICFEDKLRGDSRQVIETLSKQGISVYMLSGDKESAAMNVASVVGIQADKVLAEVKPHEKKKFISELQKEHKVVAMVGDGINDAAALASADVGIAMGGGVGAASDVSSVVLMGNRLSQLIDALELSKETMKTVKQNLWWAFLYNILLCRLDYPLLLEHCFQLRGRY

SEQ ID NO: 177304 - protein, 908 aa, Zea Mays
MDPTTPVLALSKAFASSRTKPFLLLAPHRRRSLFAARASAPSSSSVPGDLLISLARLALRGPGPPAAPRRWFASVSSASPLASGGPPRGGGGRGNGDGDGGGGGDGWKRPRASQGAGVVEEAAAQGADVIVLDVGGMSCGGCAASVKRILESEPQVRSATVNLATEMAVVWAVPEDSVVQDWKEQLGEKLANQLTTCGYKSNLRDSSKVGSQTVFERKMQDKLEQLKQSGRELAVSWALCAVCLVGHISHLFGVNMPLMHVIHSTGFHLSLSIFTFVGPGRRLILDGLKSLLKGSPNMNTLVGLGALSSFAVSSIAAFIPKLNLEQRAKLKATSDMTGLLSILPSKARLMVDNDAEKSSLIEVPCDTLAVGDYVVVLPGDHIPADGIVKAGRSTVDESSLTGEPMPVTKITGAEVSAGSINLNGKLTVEVRRPGGETVMSDILHLVEEAQTRAAPVQRLADKVAGNFTYGVMALSAATYMFWSILGSQLVPAAIQHGGAMSLALQLSCSVLVIACPCALGLATPTAVLVGTSLGATRGLLLRGGDVLEKFSDVDAVVFDKTGTLTIGRPVITKVIPSRGMGDANTKDLGANQWAEADILSFAAGVESNTNHPLGKAIMEAAGAANCVIMKANDGSFMEEPGSGAVATIGEKQVSVGTLDWIRRHGVIHNPFPEAEHFGQSVAYVAVNGALAGLICFEDKLRGDSRQVIETLSKQGISVYMLSGDKESAAMNVASVVGIQADKVLAEVKPHEKKKFISELQKEHKVVAMVGDGINDAAALASADVGIAMGGGVGAASDVSSVVLMGNRLSQLIDALELSKETMKTVKQNLWWAFLYNIVGLPIAAGALLPATGTILTPSIAGALMGFSSVGVMANSLLLRVRLSSRRKREPLKAISDEVEKNYSSKWST

SEQ ID NO: 177305 - protein, 332 aa, Zea Mays
MDPTTPVLALSKAFASSRTKPFLLLAPHRRRSLFAARASAPSSSSVPGDLLISLARLALRGPGPPAAPRRWFASVSSASPLASGGPPRGGGGRGNGDGDGGGGGDGWKRPRASQGAGVVEEAAAQGADVIVLDVGGMSCGGCAASVKRILESEPQVRSATVNLATEMAVVWAVPEDSVVQDWKEQLGEKLANQLTTCGYKSNLRDSSKVGSQTVFERKMQDKLEQLKQSGRELAVSWALCAVCLVGHISHLFGVNMPLMHVIHSTGFHLSLSIFTFVGPGRRLILDGLKSLLKGSPNMNTLVGLGALSSFAVSSIAAFIPKGGRHFLRNQLC

SEQ ID NO: 177306 - protein, 291 aa, Zea Mays
MEAAGAANCVIMKANDGSFMEEPGSGAVATIGEKQVSVGTLDWIRRHGVIHNPFPEAEHFGQSVAYVAVNGALAGLICFEDKLRGDSRQVIETLSKQGISVYMLSGDKESAAMNVASVVGIQADKVLAEVKPHEKKKFISELQKEHKVVAMVGDGINDAAALASADVGIAMGGGVGAASDVSSVVLMGNRLSQLIDALELSKETMKTVKQNLWWAFLYNIVGLPIAAGALLPATGTILTPSIAGALMGFSSVGVMANSLLLRVRLSSRRKREPLKAISDEVEKNYSSKWST

SEQ ID NO: 177307 - protein, 97 aa, Zea Mays
MPISRTRWPPAAGAPSPPQQAAQGTVSAVAPKRRPVVGSRSRPAKEAEATARLPSADYYSELKTLEHVEKTKKYQGKLAAQLKAKYFSNKTFEKGNL

SEQ ID NO: 177308 - protein, 119 aa, Zea Mays
MLHEDVLTDIYGDVRGGEEFLANRLALLRAADKYDIGDLREACHESLLEDIDARNVLERLQTAHLYRLPRLKGGCLRFLVDFRKVYEMHDDDLNAFLQTADRELVAEVFHGVLAAWSGR

SEQ ID NO: 177309 - protein, 618 aa, Zea Mays
MSVSHAQDIEISLCDGNSEDERRRRKIGSLRRKAIHALKKRGRRRVDSRFPPPAISIEDVRDAEEERAVASFRERLAAHGLLPEKHDDYHMMLRFLKARKFEAEKAMQMWSEMLKWRKEFGTDTILEDFDFEELDDVLRYYPQGYHGVDRQGRPVYIERLGKVDPNNLMQITSVDRYIKYHVQEFERAFRERFPACTLAAKRHIDSTTTILDVQGVGFKNFSRTARELVNRMQKIDSDYYPETLHQMFVVNAGSGFKWIWNSVKGFLDPKTSSKIHVLGSNYQSRLLEVIDSSELPEFLGGSCTCSDKGGCLGSNKGPWNDPYILKLIHNLEAGCMRETTKPVSEGGERSSSSFRLEQMKWQGMLSDTSNAESGSDVDDFGPSFVHKVSGYGCLTPVREEVKGTDCATYLSCDDQSHPDMVPEFYHGVQRTTEMVQKQMADFRQYSTNRRPRELGNGSLNANGTAAAQRGWEDVAKLVVTALIKLFSFIRLFLSRAAESRLEKVRRTAPPPAAEKPKPPRAVSEEEVRACLQRLDSLESLCGHLATRPAQIPEDKERVLLSSFERIRSVEADLERTKRVLNATVAKQKALVEEVALESVQELPRAKVVLIDGMLAAGR

SEQ ID NO: 177310 - protein, 619 aa, Zea Mays
MSVSHAQDIEISLCDGNSEDERRRRKIGSLRRKAIHALKKRGRRRVDSRFPPPAISIEDVRDAEEERAVASFRERLAAHGLLPEKHDDYHMMLRFLKARKFEAEKAMQMWSEMLKWRKEFGTDTILEDFDFEELDDVLRYYPQGYHGVDRQGRPVYIERLGKVDPNNLMQITSVDRYIKYHVQEFERAFRERFPACTLAAKRHIDSTTTILDVQGVGFKNFSRTARELVNRMQKIDSDYYPETLHQMFVVNAGSGFKWIWNSVKGFLDPKTSSKIHVLGSNYQSRLLEVIDSSELPEFLGGSCTCSDKGGCLGSNKGPWNDPYILKLIHNLEAGCMRETTKPVSEGGERSSSSFRLEQMKWQGMLSDTSNAESGSDVDDFGPSFVHKVSGYGCLTPVREEVKGTDCATYLSCDDQSHPDMVPEFYHGVQRTTEMVQKQMADFRQYSTNRRPRELGNGSLNANGTAAAQRGWEDVAKLVVTALIKLFSFIRLFLSRAAESRLEKVRRTAPPPAAEKPKPPRAVSEEEVRACLQRLDSLESLCGHLATRPAQIPEDKERVLLSSFERIRSVEADLERTKRVLNATVAKQKALVEEVALESVQELPRAKTLRAGGTHQLNPP

SEQ ID NO: 177311 - protein, 616 aa, Zea Mays
MSVSHAQDIEISLCDGNSEDERRRRKIGSLRRKAIHALKKRGRRRVDSRFPPPAISIEDVRDAEEERAVASFRERLAAHGLLPEKHDDYHMMLRFLKARKFEAEKAMQMWSEMLKWRKEFGTDTILEDFDFEELDDVLRYYPQGYHGVDRQGRPVYIERLGKVDPNNLMQITSVDRYIKYHVQEFERAFRERFPACTLAAKRHIDSTTTILDVQGVGFKNFSRTARELVNRMQKIDSDYYPETLHQMFVVNAGSGFKWIWNSVKGFLDPKTSSKIHVLGSNYQSRLLEVIDSSELPEFLGGSCTCSDKGGCLGSNKGPWNDPYILKLIHNLEAGCMRETTKPVSEGGERSSSSFRLEQMKWQGMLSDTSNAESGSDVDDFGPSFVHKVSGYGCLTPVREEVKGTDCATYLSCDDQSHPDMVPEFYHGVQRTTEMVQKQMADFRQYSTNRRPRELGNGSLNANGTAAAQRGWEDVAKLVVTALIKLFSFIRLFLSRAAESRLEKVRRTAPPPAAEKPKPPRAVSEEEVRACLQRLDSLESLCGHLATRPAQIPEDKERVLLSSFERIRSVEADLERTKRVLNATVAKQKALVEEVALESVQELPRAKLLYAWRSTRK

SEQ ID NO: 177312 - protein, 646 aa, Zea Mays
MQTVAVEDWVRERDVSAGLSRNPEFTSVARMSVSHAQDIEISLCDGNSEDERRRRKIGSLRRKAIHALKKRGRRRVDSRFPPPAISIEDVRDAEEERAVASFRERLAAHGLLPEKHDDYHMMLRFLKARKFEAEKAMQMWSEMLKWRKEFGTDTILEDFDFEELDDVLRYYPQGYHGVDRQGRPVYIERLGKVDPNNLMQITSVDRYIKYHVQEFERAFRERFPACTLAAKRHIDSTTTILDVQGVGFKNFSRTARELVNRMQKIDSDYYPETLHQMFVVNAGSGFKWIWNSVKGFLDPKTSSKIHVLGSNYQSRLLEVIDSSELPEFLGGSCTCSDKGGCLGSNKGPWNDPYILKLIHNLEAGCMRETTKPVSEGGERSSSSFRLEQMKWQGMLSDTSNAESGSDVDDFGPSFVHKVSGYGCLTPVREEVKGTDCATYLSCDDQSHPDMVPEFYHGVQRTTEMVQKQMADFRQYSTNRRPRELGNGSLNANGTAAAQRGWEDVAKLVVTALIKLFSFIRLFLSRAAESRLEKVRRTAPPPAAEKPKPPRAVSEEEVRACLQRLDSLESLCGHLATRPAQIPEDKERVLLSSFERIRSVEADLERTKRVLNATVAKQKALVEEVALESVQELPRAKLLYAWRSTRK

SEQ ID NO: 177313 - protein, 641 aa, Zea Mays
MQTVAVEDWVRERDVSAGLSRNPEFTSVARMSVSHAQDIEISLCDGNSEDERRRRKIGSLRRKAIHALKKRGRRRVDSRFPPPAISIEDVRDAEEERAVASFRERLAAHGLLPEKHDDYHMMLRFLKARKFEAEKAMQMWSEMLKWRKEFGTDTILEDFDFEELDDVLRYYPQGYHGVDRQGRPVYIERLGKVDPNNLMQITSVDRYIKYHVQEFERAFRERFPACTLAAKRHIDSTTTILDVQGVGFKNFSRTARELVNRMQKIDSDYYPETLHQMFVVNAGSGFKWIWNSVKGFLDPKTSSKIHVLGSNYQSRLLEVIDSSELPEFLGGSCTCSDKGGCLGSNKGPWNDPYILKLIHNLEAGCMRETTKPVSEGGERSSSSFRLEQMKWQGMLSDTSNAESGSDVDDFGPSFVHKVSGYGCLTPVREEVKGTDCATYLSCDDQSHPDMVPEFYHGVQRTTEMVQKQMADFRQYSTNRRPRELGNGSLNANGTAAAQRGWEDVAKLVVTALIKLFSFIRLFLSRAAESRLEKVRRTAPPPAAEKPKPPRAVSEEEVRACLQRLDSLESLCGHLATRPAQIPEDKERVLLSSFERIRSVEADLERTKRVLNATVAKQKALVEEVALESVQELPRAKKRMFC

SEQ ID NO: 177314 - protein, 614 aa, Zea Mays
MSVSHAQDIEISLCDGNSEDERRRRKIGSLRRKAIHALKKRGRRRVDSRFPPPAISIEDVRDAEEERAVASFRERLAAHGLLPEKHDDYHMMLRFLKARKFEAEKAMQMWSEMLKWRKEFGTDTILEDFDFEELDDVLRYYPQGYHGVDRQGRPVYIERLGKVDPNNLMQITSVDRYIKYHVQEFERAFRERFPACTLAAKRHIDSTTTILDVQGVGFKNFSRTARELVNRMQKIDSDYYPETLHQMFVVNAGSGFKWIWNSVKGFLDPKTSSKIHVLGSNYQSRLLEVIDSSELPEFLGGSCTCSDKGGCLGSNKGPWNDPYILKLIHNLEAGCMRETTKPVSEGGERSSSSFRLEQMKWQGMLSDTSNAESGSDVDDFGPSFVHKVSGYGCLTPVREEVKGTDCATYLSCDDQSHPDMVPEFYHGVQRTTEMVQKQMADFRQYSTNRRPRELGNGSLNANGTAAAQRGWEDVAKLVVTALIKLFSFIRLFLSRAAESRLEKVRRTAPPPAAEKPKPPRAVSEEEVRACLQRLDSLESLCGHLATRPAQIPEDKERVLLSSFERIRSVEADLERTKRVLNATVAKQKALVEEVALESVQELPRAKVVLIDGML

SEQ ID NO: 177315 - protein, 375 aa, Zea Mays
MSAPSDAAAASAAPAPAPTTAAASSSGGFTFKLHPLVIVNVSDHHTRVKAQAACSADSSSPSSGPGAGQPPRVFGCVIGVQRGRTVEIFNSFELVLDPVSGTLDRAFLEKKQELYKKVFPDFYVLGWYSTGSDVHDTDMQIHKALMDVNESPVYLLLNPTINLSQKDLPVTIYESELHVIDGCPQLIFVRSNYTIETVEAERISVDHVAHLKPSDGGSAATQLAAHLTGIHSAIKMLNSRVRVIHQYLVAMQKGDIPMDNSLLRQVSSLVRRLPATESQKFQDDFLMEYNDTLLMTYLAMFTNCSSTMNELVEKINTSYERPTTRRGGRGKTDDLLELYQIPPVLKLICKVPHPVILFDSKASLETSILFGIRVY

SEQ ID NO: 177316 - protein, 529 aa, Zea Mays
MALRHLVTGQNNCAPDGASSSNPLNALANAFLGQSSKAQSIKELPGSVSVPSTSGFSAPAPLSNIPGSENEFKQDQRPFVQGSDFIHGGPANDWIKSFRPPGVPELGGIEAHFPDFEQIYNNAGTTFQPPLDGPPQRVLSGVLHSFLTSGPAGVPFQPLPVPAALGLSESDKQCIRDRSCIMARHIFSDQPEEYIQAQVNTLLHSLDIDNRMRGPMHGQYPELQEYWNQSQSSMGPALMHNTADKWITEFGKQNNNPENWAKSFEQQYGPNGWASEFEQHQSQMAMGQMGGVNMANLAAMEQSRMLAQTLASNNDPKFQLSQGADKWVSEFSSQHNQGALNESWVDEFSKLNVTDEWAEEFSGGGFGESSADPWVDEFQEHLSSFKQSSGASRGVYVYSENNPYVGHPNPMQEGQELFRKGLLSEAVLALEAEVLKNPDNAEGWRLLGITHAENDDDQQAIAAMMRALEANPTNLEVLLALGVSHTNELEQGEALRYLYRWLQNHPKYGGLVPPQSTDSPYGPDMQMFM

SEQ ID NO: 177317 - protein, 676 aa, Zea Mays
MALRHLVTGQNNCAPDGASSSNPLNALANAFLGQSSKAQSIKELPGSVSVPSTSGFSAPAPLSNIPGSENEFKQDQRPFVQGSDFIHGGPANDWIKSFRPPGVPELGGIEAHFPDFEQIYNNAGTTFQPPLDGPPQRVLSGVLHSFLTSGPAGVPFQPLPVPAALGLSESDKQCIRDRSCIMARHIFSDQPEEYIQAQVNTLLHSLDIDNRMRGPMHGQYPELQEYWNQSQSSMGPALMHNTADKWITEFGKQNNNPENWAKSFEQQYGPNGWASEFEQSQMAMGQMGGVNMANLAAMEQSRMLAQTLASNNDPKFQLSQGADKWVSEFSSQHNQGALNESWVDEFSKLNVTDEWAEEFSGGGFGESSADPWVDEFQEHLSSFKQSSGASRGVYVYSENNPYVGHPNPMQEGQELFRKGLLSEAVLALEAEVLKNPDNAEGWRLLGITHAENDDDQQAIAAMMRALEANPTNLEVLLALGVSHTNELEQGEALRYLYRWLQNHPKYGGLVPPQSTDSPYGPDVVRLFNDAAQMSPEDADVHVVLGVLYNLSREYDKAITSFKTAVQLKPQDYSLWNKLGATQANSIQSADAILAYQQALDLKPNYVRAWANMGISYANQGLYEDSIRYYVRAVTMNPKADNAWQYLRISLGNASRADMIAACDARNLDALQKEFPL

SEQ ID NO: 177318 - protein, 547 aa, Zea Mays
MALRHLVTGQNNCAPDGASSSNPLNALANAFLGQSSKAQSIKELPGSVSVPSTSGFSAPAPLSNIPGSENEFKQDQRPFVQSFRPPGVPELGGIEAHFPDFEQIYNNAGTTFQPPLDGPPQRVLSGVLHSFLTSGPAGVPFQPLPVPAALGLSESDKQCIRDRSCIMARHIFSDQPEEYIQAQVNTLLHSLDIDNRMRGPMHGQYPELQEYWNQSQSSMGPALMHNTADKWITEFGKQNNNPENWAKSFEQQYGPNGWASEFEQHQSQMAMGQMGGVNMANLAAMEQSRMLAQTLASNNDPKFQVKEGLASQSSGWADEFQTQYKANANSWADQFAREELSQGADKWVSEFSSQHNQGALNESWVDEFSKLNVTDEWAEEFSGGGFGESSADPWVDEFQEHLSSFKQSSGASRGVYVYSENNPYVGHPNPMQEGQELFRKGLLSEAVLALEAEVLKNPDNAEGWRLLGITHAENDDDQQAIAAMMRALEANPTNLEVLLALGVSHTNELEQGEALRYLYRWLQNHPKYGGLVPPQSTDSPYGPDMFM

SEQ ID NO: 177319 - protein, 661 aa, Zea Mays
MALRHLVTGQNNCAPDGASSSNPLNALANAFLGQSSKAQSIKELPGSVSVPSTSGFSAPAPLSNIPGSENEFKQDQRPFVQSFRPPGVPELGGIEAHFPDFEQIYNNAGTTFQPPLDGPPQRVLSGVLHSFLTSGPAGVPFQPLPVPAALGLSESDKQCIRDRSCIMARHIFSDQPEEYIQAQVNTLLHSLDIDNRMRGPMHGQYPELQEYWNQSQSSMGPALMHNTADKWITEFGKQNNNPENWAKSFEQQYGPNGWASEFEQSQMAMGQMGGVNMANLAAMEQSRMLAQTLASNNDPKFQLSQGADKWVSEFSSQHNQGALNESWVDEFSKLNVTDEWAEEFSGGGFGESSADPWVDEFQEHLSSFKQSSGASRGVYVYSENNPYVGHPNPMQEGQELFRKGLLSEAVLALEAEVLKNPDNAEGWRLLGITHAENDDDQQAIAAMMRALEANPTNLEVLLALGVSHTNELEQGEALRYLYRWLQNHPKYGGLVPPQSTDSPYGPDVVRLFNDAAQMSPEDADVHVVLGVLYNLSREYDKAITSFKTAVQLKPQDYSLWNKLGATQANSIQSADAILAYQQALDLKPNYVRAWANMGISYANQGLYEDSIRYYVRAVTMNPKADNAWQYLRISLGNASRADMIAACDARNLDALQKEFPL

SEQ ID NO: 177320 - protein, 514 aa, Zea Mays
MALRHLVTGQNNCAPDGASSSNPLNALANAFLGQSSKAQSIKELPGSVSVPSTSGFSAPAPLSNIPGSENEFKQDQRPFVQSFRPPGVPELGGIEAHFPDFEQIYNNAGTTFQPPLDGPPQRVLSGVLHSFLTSGPAGVPFQPLPVPAALGLSESDKQCIRDRSCIMARHIFSDQPEEYIQAQVNTLLHSLDIDNRMRGPMHGQYPELQEYWNQSQSSMGPALMHNTADKWITEFGKQNNNPENWAKSFEQQYGPNGWASEFEQHQSQMAMGQMGGVNMANLAAMEQSRMLAQTLASNNDPKFQLSQGADKWVSEFSSQHNQGALNESWVDEFSKLNVTDEWAEEFSGGGFGESSADPWVDEFQEHLSSFKQSSGASRGVYVYSENNPYVGHPNPMQEGQELFRKGLLSEAVLALEAEVLKNPDNAEGWRLLGITHAENDDDQQAIAAMMRALEANPTNLEVLLALGVSHTNELEQGEALRYLYRWLQNHPKYGGLVPPQSTDSPYGPDMQMFM

SEQ ID NO: 177321 - protein, 720 aa, Zea Mays
MALRHLVTGQNNCAPDGASSSNPLNALANAFLGQSSKAQSIKELPGSVSVPSTSGFSAPAPLSNIPGSENEFKQDQRPFVQGSDFIHGGPANDWIKSFRPPGVPELGGIEAHFPDFEQIYNNAGTTFQPPLDGPPQRVLSGVLHSFLTSGPAGVPFQPLPVPAALGLSESDKQCIRDRSCIMARHIFSDQPEEYIQAQVNTLLHSLDIDNRMRGPMHGQYPELQEYWNQSQSSMGPALMHNTADKWITEFGKQNNNPENWAKSFEQQYGPNGWASEFEQHQSQMAMGQMGGVNMANLAAMEQSRMLAQTLASNNDPKFQNSKFFQFVSKMSRGELIIEDNQVKEGLASQSSGWADEFQTQYKANANSWADQFAREELSQGADKWVSEFSSQHNQGALNESWVDEFSKLNVTDEWAEEFSGGGFGESSADPWVDEFQEHLSSFKQSSGASRGVYVYSENNPYVGHPNPMQEGQELFRKGLLSEAVLALEAEVLKNPDNAEGWRLLGITHAENDDDQQAIAAMMRALEANPTNLEVLLALGVSHTNELEQGEALRYLYRWLQNHPKYGGLVPPQSTDSPYGPDVNVHVVLGVLYNLSREYDKAITSFKTAVQLKPQDYSLWNKLGATQANSIQSADAILAYQQALDLKPNYVRAWANMGISYANQGLYEDSIRYYVRAVTMNPKADNAWQYLRISLGNASRADMIAACDARNLDALQKEFPL

SEQ ID NO: 177322 - protein, 564 aa, Zea Mays
MALRHLVTGQNNCAPDGASSSNPLNALANAFLGQSSKAQSIKELPGSVSVPSTSGFSAPAPLSNIPGSENEFKQDQRPFVQGSDFIHGGPANDWIKSFRPPGVPELGGIEAHFPDFEQIYNNAGTTFQPPLDGPPQRVLSGVLHSFLTSGPAGVPFQPLPVPAALGLSESDKQCIRDRSCIMARHIFSDQPEEYIQAQVNTLLHSLDIDNRMRGPMHGQYPELQEYWNQSQSSMGPALMHNTADKWITEFGKQNNNPENWAKSFEQQYGPNGWASEFEQHQSQMAMGQMGGVNMANLAAMEQSRMLAQTLASNNDPKFQVKEGLASQSSGWADEFQTQYKANANSWADQFAREELSQGADKWVSEFSSQHNQGALNESWVDEFSKLNVTDEWAEEFSGGGFGESSADPWVDEFQEHLSSFKQSSGASRGVYVYSENNPYVGHPNPMQEGQELFRKGLLSEAVLALEAEVLKNPDNAEGWRLLGITHAENDDDQQAIAAMMRALEANPTNLEVLLALGVSHTNELEQGEALRYLYRWLQNHPKYGGLVPPQSTDSPYGPDMQMFM

SEQ ID NO: 177323 - protein, 668 aa, Zea Mays
MALRHLVTGQNNCAPDGASSSNPLNALANAFLGQSSKAQSIKELPGSVSVPSTSGFSAPAPLSNIPGSENEFKQDQRPFVQGSDFIHGGPANDWIKSFRPPGVPELGGIEAHFPDFEQIYNNAGTTFQPPLDGPPQRVLSGVLHSFLTSGPAGVPFQPLPVPAALGLSESDKQCIRDRSCIMARHIFSDQPEEYIQAQVNTLLHSLDIDNRMRGPMHGQYPELQEYWNQSQSSMGPALMHNTADKWITEFGKQNNNPENWAKSFEQQYGPNGWASEFEQHQSQMAMGQMGGVNMANLAAMEQSRMLAQTLASNNDPKFQLSQGADKWVSEFSSQHNQGALNESWVDEFSKLNVTDEWAEEFSGGGFGESSADPWVDEFQEHLSSFKQSSGASRGVYVYSENNPYVGHPNPMQEGQELFRKGLLSEAVLALEAEVLKNPDNAEGWRLLGITHAENDDDQQAIAAMMRALEANPTNLEVLLALGVSHTNELEQGEALRYLYRWLQNHPKYGGLVPPQSTDSPYGPDMSPEDADVHVVLGVLYNLSREYDKAITSFKTAVQLKPQDYSLWNKLGATQANSIQSADAILAYQQALDLKPNYVRAWANMGISYANQGLYEDSIRYYVRAVTMNPKADNAWQYLRISLGNASRADMIAACDARNLDALQKEFPL

SEQ ID NO: 177324 - protein, 586 aa, Zea Mays
MALRHLVTGQNNCAPDGASSSNPLNALANAFLGQSSKAQSIKELPGSVSVPSTSGFSAPAPLSNIPGSENEFKQDQRPFVQGSDFIHGGPANDWIKSFRPPGVPELGGIEAHFPDFEQIYNNAGTTFQPPLDGPPQRVLSGVLHSFLTSGPAGVPFQPLPVPAALGLSESDKQCIRDRSCIMARHIFSDQPEEYIQAQVNTLLHSLDIDNRMRGPMHGQYPELQEYWNQSQSSMGPALMHNTADKWITEFGKQNNNPENWAKSFEQQYGPNGWASEFEQHQSQMAMGQMGGVNMANLAAMEQSRMLAQTLASNNDPKFQNSKFFQFVSKMSRGELIIEDNQVKEGLASQSSGWADEFQTQYKANANSWADQFAREELSQGADKWVSEFSSQHNQGALNESWVDEFSKLNVTDEWAEEFSGGGFGESSADPWVDEFQEHLSSFKQSSGASRGVYVYSENNPYVGHPNPMQEGQELFRKGLLSEAVLALEAEVLKNPDNAEGWRLLGITHAENDDDQQAIAAMMRALEANPTNLEVLLALGVSHTNELEQGEALRYLYRWLQNHPKYGGLVPPQSTDSPYGPDMQMFM

SEQ ID NO: 177325 - protein, 201 aa, Zea Mays
MAAVRAALRLQRQCLAANPFLFSGHGLRYRKLEVILTTTIDKLGKAGEVVKVAPGHFRNHLMPKMLAVPNLDKFAILIREQRKLYQREEEVAVKQVTEKDDDAREERMKQYQTAAKRLDNALLVLRRFISTGNELRTPVTKDEIVSEVARQLNINIHPENLHLHSPLASLGEFELPLRLPQNIPCPEGKLQWTLKVKIRRK

SEQ ID NO: 177326 - protein, 57 aa, Zea Mays
MRQQLFTKGTASYCFFLFLHDAGRLQDPAYCTRLDTCSLPSWWCCWWRRRRRSYKFL

SEQ ID NO: 177327 - protein, 199 aa, Zea Mays
MASRLFEEMSSSSSSSLLSGSNTVSVELHLIPCKLCNGVVIERVSKQPESTSRKFYRCRAKKMDGSQCDFFHWQASYAVLLIKDGVVSGDHCLELLMVALNDHGKAVESLTNSIREMKKKLSDLELVMEELDNVKKSMKAAMVGIEENNKTIAALKLMENEMQMLKGSTKVKPRNMALCFLLLALIGWFVMGQMYWGED

SEQ ID NO: 177328 - protein, 205 aa, Zea Mays
MQYRQPCRLRLFEEMSSSSSSSLLSGSNTVSVELHLIPCKLCNGVVIERVSKQPESTSRKFYRCRAKKMDGSQCDFFHWQASYAVLLIKDGVVSGDHCLELLMVALNDHGKAVESLTNSIREMKKKLSDLELVMEELDNVKKSMKAAMVGIEENNKTIAALKLMENEMQMLKGSTKVKPRNMALCFLLLALIGWFVMGQMYWGED

SEQ ID NO: 177329 - protein, 113 aa, Zea Mays
MQYRQPCRLRLFEEMSSSSSSSLLSGSNTVSVELHLIPCKLCNGVVIERVSKQPESTSRKFYRCRAKKMGARKRKGHPVDFGEAHEISQSSSLGYDEFGDRREARRFRFRWQK

SEQ ID NO: 177330 - protein, 200 aa, Zea Mays
MTSMIDRWRPETNTFHHRIGEVTPTLQDVSMLCGLPLKGKPVYSINVRNDWLEDLNKRFSSIPWKEGMNVPEVEKIDTKHSNGPLLHWLKSLSSKYMPHDANEATISLSLEAYLLWLFGYVMFCNTWGSAVLAATYEGLSKICITTGLSMPKVRTLTGCPLLLNLFVYERFIELRPRLKNAYNYSTPDNMDGDTMGSRWC

SEQ ID NO: 177331 - protein, 321 aa, Zea Mays
MTSMIDRWRPETNTFHHRIGEVTPTLQDVSMLCGLPLKGKPVYSINVRNDWLEDLNKRFSSIPWKEGMNVPEVEKIDTKHSNGPLLHWLKSLSGNVADKFFITYAKLLADMNNRDCIYSWGSAVLAATYEGLSKICITTGLSMPKLRWASEDPKKARKTFTEMLDNIKDIDFLWNPYTRTCIETVAPHGLSLLCSCDKEYWKTKDGLIFNNTVQKHPVERVMRHFSLYQEQLLVAVEDQQEGEQLLVAVEDQQEGVAWPEREPTNVLKEERVHDVDAFKEYLKWFRERSRVRVAFIPEDPRMTNEDPKMTNNNHLLSKAIS

SEQ ID NO: 177332 - protein, 159 aa, Zea Mays
MLDNIKDIDFLWNPYTRTCIETVAPHGLSLLCSCDKEYWKTKDGLIFNNTVQKHPVERVMRHFSLYQEQLLVAVEDQQEGEQLLVAVEDQQEGVAWPEREPTNVLKEERVHDVDAFKEYLKWFRERSRVRVAFIPEDPRMTNEDPKMTNNNHLLSKAIS

SEQ ID NO: 177333 - protein, 275 aa, Zea Mays
MTSMIDRWRPETNTFHHRIGEVTPTLQDVSMLCGLPLKGKPVYSINVRNDWLEDLNKRFSSIPWKEGMNVPEVEKIDTKHSNGPLLHWLKSLSSKYMPHDANEATISLSLEAYLLWLFGYVMFCNTWGSAVLAATYEGLSKICITTGLSMPKEYWKTKDGLIFNNTVQKHPVERVMRHFSLYQEQLLVAVEDQQEGEQLLVAVEDQQEGVAWPEREPTNVLKEERVHDVDAFKEYLKWFRERSRVRVAFIPEDPRMTNEDPKMTNNNHLLSKAIS

SEQ ID NO: 177334 - protein, 227 aa, Zea Mays
MYRRLKKSIPNTQMAHSCIGSNLSVWGSAVLAATYEGLSKICITTGLSMPKLRWASEDPKKARKTFTEMLDNIKDIDFLWNPYTRTCIETVAPHGLSLLCSCDKEYWKTKDGLIFNNTVQKHPVERVMRHFSLYQEQLLVAVEDQQEGEQLLVAVEDQQEGVAWPEREPTNVLKEERVHDVDAFKEYLKWFRERSRVRVAFIPEDPRMTNEDPKMTNNNHLLSKAIS

SEQ ID NO: 177335 - protein, 180 aa, Zea Mays
MASEDLGVATKDTEVVNTKPAKRYPLALWIAILGLIMLVGVYIFSLSLKQNGMLFGLMQTNLIEKEREKPCHDPGIPDTEIPYLHYPMPNTYDRKECACTGVRFFAILSMQRSGSGWVETLLNSHPNISSNGEIFSVKERRSNFTAIKKTLDKLYNLDWYSSAAKNECTAAVGLKWMLNQ

SEQ ID NO: 177336 - protein, 166 aa, Zea Mays
MKHHQEIVEYFNRRGVSAIFLLRRNLLRRYVSILANAHDSAMKQLNGTHKAHVHSKHEAEILAQYKPTIDKKTLIAELKRSDKFAADALVNFKNTRHVVLYYEDVVRSRTMLMDVLDFLRLPKRKLLSRHVKIHTKRLRDHIDNWADVNNFLKGTPFESFLNGSRR

SEQ ID NO: 177337 - protein, 288 aa, Zea Mays
MASEDLGVATKDTEVVNTKPAKRYPLALWIAILGLIMLVGVYIFSLSLKQNGMLFGLMQTNLIEKEREKPCHDPGIPDTEIPYLHYPMPNTYDRKECACTGVRFFAILSMQRSGSGWVETLLNSHPNISSNGEIFSVKERRSNFTAIKKTLDKLYNLDWYSSAAKNECTAAVGLKWMLNQAEILAQYKPTIDKKTLIAELKRSDKFAADALVNFKNTRHVVLYYEDVVRSRTMLMDVLDFLRLPKRKLLSRHVKIHTKRLRDHIDNWADVNNFLKGTPFESFLNGSRR

SEQ ID NO: 177338 - protein, 617 aa, Zea Mays
MGESDDDARTFKVVFTTTGEEQFRELVREKLRGFRRGLDDTLVDYVTIMLKNGKSKDHASEELHVFLGDDTAVFISWLWGHLSSNMHLYVQPQERTREVKDDEAPKEVSGREKSSDVLPRSKHQTHSGHTIESSEATSRRRSNREWKGIGRKGNEKFPLRNVLTDILHGEDKRSQKSNEVRPPPSKQQNDRKRERDDETHQTKKDSSSRSMLGDGASRRLLQFAVRDAVKAVQPTSTSAEPASKRLCSVVATTSTEHMRDRRSERSQDYLNDRRSERSQDNLSDRRSERTRPMLQVHGAALALRAAAEAAADSAKVRSTGSVFKRLGQGNVVKQPSRSREEKRDYEDFEPVTIADEHDSDQYVNNEESEEESGELTMADRVAGSGMYVDSSSEDDMDRDEGITRYQTSLSHDDTFSPFAEKKTVSAPCSVELETNAIRPSSVNDEEQPVPSTPTASKAVAISVDVNMVEPPSYATPKDVHVVEKPYVAPMNSNAASIATNAKELGHAEVQKDSQRSAPSVPVSYSTAHPMEDADSRTLYVNNVHFAATKDSLSRHFNKFGAVLKVVIVTNAATGQPTGFNEKNHIININGDSIIDIVATQRMQKTHMFSLIKQTAKD

SEQ ID NO: 177339 - protein, 580 aa, Zea Mays
MGESDDDARTFKVVFTTTGEEQFRELVREKLRGFRRGLDDTLVDYVTIMLKNGKSKDHASEELHVFLGDDTAVFISWLWGHLSSNMHLYVQPQERTREVKDDEAPKEVSGREKSSDVLPRSKHQTHSGHTIESSEATSRRRSNREWKGIGRKGNEKFPLRNVLTDILHGEDKRSQKSNEVRPPPSKQQNDRKRERDDETHQTKKDSSSRSMLGDGASRRLLQFAVRDAVKAVQPTSTSAEPASKRLCSVVATTSTEHMRDRRSERSQDYLNDRRSERSQDNLSDRRSERTRPMLQVHGAALALRAAAEAAADSAKVRSTGSVFKRLGQGNVVKQPSRSREEKRDYEDFEPVTIADEHDSDQYVNNEESEEESGELTMADRVAGSGMYVDSSSEDDMDRDEGITRYQTSLSHDDTFSPFAEKKTVSAPCSVELETNAIRPSSVNDEEQPVPSTPTASKAVAISVDVNMVEPPSYATPKDVHVVEKPYVAPMNSNAASIATNAKELGHAEVQKDSQRSAPSVPVSYSTAHPMEDADSRTLYVNNVHFAATKDSLSRHFNKFGAVLKVVIVTNAATGQPTGSV

SEQ ID NO: 177340 - protein, 670 aa, Zea Mays
MGESDDDARTFKVVFTTTGEEQFRELVREKLRGFRRGLDDTLVDYVTIMLKNGKSKDHASEELHVFLGDDTAVFISWLWGHLSSNMHLYVQPQERTREVKDDEAPKEVSGREKSSDVLPRSKHQTHSGHTIESSEATSRRRSNREWKGIGRKGNEKFPLRNVLTDILHGEDKRSQKSNEVRPPPSKQQNDRKRERDDETHQTKKDSSSRSMLGDGASRRLLQFAVRDAVKAVQPTSTSAEPASKRLCSVVATTSTEHMRDRRSERSQDYLNDRRSERSQDNLSDRRSERTRPMLQVHGAALALRAAAEAAADSAKVRSTGSVFKRLGQGNVVKQPSRSREEKRDYEDFEPVTIADEHDSDQYVNNEESEEESGELTMADRVAGSGMYVDSSSEDDMDRDEGITRYQTSLSHDDTFSPFAEKKTVSAPCSVELETNAIRPSSVNDEEQPVPSTPTASKAVAISVDVNMVEPPSYATPKDVHVVEKPYVAPMNSNAASIATNAKVMLKFKRILSGLHHLVHFAATKDSLSRHFNKFGAVLKVVIVTNAATGQPTGSAYVEFLHKESAERALSLNGTSFMTRILKVVRRSSHEAAHFYGWPGSGRSSIYGRHGRMAYPRAVIPGGSFRGRAPMKAGARSLQWKREPSGTDSSAGAKTDMSVAFSSEQVLPRAT

SEQ ID NO: 177341 - protein, 546 aa, Zea Mays
MGESDDDARTFKVVFTTTGEEQFRELVREKLRGFRRGLDDTLVDYVTIMLKNGKSKDHASEELHVFLGDDTAVFISWLWGHLSSNMHLYVQPQERTREVKDDEAPKEVSGREKSSDVLPRSKHQTHSGHTIESSEATSRRRSNREWKGIGRKGNEKFPLRNVLTDILHGEDKRSQKSNEVRPPPSKQQNDRKRERDDETHQTKKDSSSRSMLGDGASRRLLQFAVRDAVKAVQPTSTSAEPASKRLCSVVATTSTEHMRDRRSERSQDYLNDRRSERSQDNLSDRRSERTRPMLQVHGAALALRAAAEAAADSAKVRSTGSVFKRLGQGNVVKQPSRSREEKRDYEDFEPVTIADEHDSDQYVNNEESEEESGELTMADRVAGSGMYVDSSSEDDMDRDEGITRYQTSLSHDDTFSPFAEKKTVSAPCSVELETNAIRPSSVNDEEQPVPSTPTASKAVAISVDVNMVEPPSYATPKDVHVVEKPYVAPMNSNAASIATNAKELGHAEVQKDSQRSAPSGSLCCHQGLIISPFQQVWCSAESSHCH

SEQ ID NO: 177342 - protein, 572 aa, Zea Mays
MLKNGKSKDHASEELHVFLGDDTAVFISWLWGHLSSNMHLYVQPQERTREVKDDEAPKEVSGREKSSDVLPRSKHQTHSGHTIESSEATSRRRSNREWKGIGRKGNEKFPLRNVLTDILHGEDKRSQKSNEVRPPPSKQQNDRKRERDDETHQTKKDSSSRSMLGDGASRRLLQFAVRDAVKAVQPTSTSAEPASKRLCSVVATTSTEHMRDRRSERSQDYLNDRRSERSQDNLSDRRSERTRPMLQVHGAALALRAAAEAAADSAKVRSTGSVFKRLGQGNVVKQPSRSREEKRDYEDFEPVTIADEHDSDQYVNNEESEEESGELTMADRVAGSGMYVDSSSEDDMDRDEGITRYQTSLSHDDTFSPFAEKKTVSAPCSVELETNAIRPSSVNDEEQPVPSTPTASKAVAISVDVNMVEPPSYATPKDVHVVEKPYVAPMNSNAASIATNAKELGHAEVQKDSQRSAPSVPVSYSTAHPMEDADSRTLYVNNVHFAATKDSLSRHFNKFGAVLKVVIVTNAATGQPTGFNEKNHIININGDSIIDIVATQRMQKTHMFSLIKQTAKDINY

SEQ ID NO: 177343 - protein, 569 aa, Zea Mays
MLKNGKSKDHASEELHVFLGDDTAVFISWLWGHLSSNMHLYVQPQERTREVKDDEAPKEVSGREKSSDVLPRSKHQTHSGHTIESSEATSRRRSNREWKGIGRKGNEKFPLRNVLTDILHGEDKRSQKSNEVRPPPSKQQNDRKRERDDETHQTKKDSSSRSMLGDGASRRLLQFAVRDAVKAVQPTSTSAEPASKRLCSVVATTSTEHMRDRRSERSQDYLNDRRSERSQDNLSDRRSERTRPMLQVHGAALALRAAAEAAADSAKVRSTGSVFKRLGQGNVVKQPSRSREEKRDYEDFEPVTIADEHDSDQYVNNEESEEESGELTMADRVAGSGMYVDSSSEDDMDRDEGITRYQTSLSHDDTFSPFAEKKTVSAPCSVELETNAIRPSSVNDEEQPVPSTPTASKAVAISVDVNMVEPPSYATPKDVHVVEKPYVAPMNSNAASIATNAKELGHAEVQKDSQRSAPSVPVSYSTAHPMEDADSRTLYVNNVHFAATKDSLSRHFNKFGAVLKVVIVTNAATGQPTGFNEKNHIININGDSIIDIVATQRMQKTHMFSLIKQTAKD

SEQ ID NO: 177344 - protein, 661 aa, Zea Mays
MAHDDQAVQDYVTIMLKNGKSKDHASEELHVFLGDDTAVFISWLWGHLSSNMHLYVQPQERTREVKDDEAPKEVSGREKSSDVLPRSKHQTHSGHTIESSEATSRRRSNREWKGIGRKGNEKFPLRNVLTDILHGEDKRSQKSNEVRPPPSKQQNDRKRERDDETHQTKKDSSSRSMLGDGASRRLLQFAVRDAVKAVQPTSTSAEPASKRLCSVVATTSTEHMRDRRSERSQDYLNDRRSERSQDNLSDRRSERTRPMLQVHGAALALRAAAEAAADSAKVRSTGSVFKRLGQGNVVKQPSRSREEKRDYEDFEPVTIADEHDSDQYVNNEESEEESGELTMADRVAGSGMYVDSSSEDDMDRDEGITRYQTSLSHDDTFSPFAEKKTVSAPCSVELETNAIRPSSVNDEEQPVPSTPTASKAVAISVDVNMVEPPSYATPKDVHVVEKPYVAPMNSNAASIATNAKELGHAEVQKDSQRSAPSVPVSYSTAHPMEDADSRTLYVNNVHFAATKDSLSRHFNKFGAVLKVVIVTNAATGQPTGSAYVEFLHKESAERALSLNGTSFMTRILKVVRRSSHEAAHFYGWPGSGRSSIYGRHGRMAYPRAVIPGGSFRGRAPMKAGARSLQWKREPSGTDSSAGAKTDMSVAFSSEQVLPRAT

SEQ ID NO: 177345 - protein, 497 aa, Zea Mays
MLKNGKSKDHASEELHVFLGDDTAVFISWLWGHLSSNMHLYVQPQERTREVKDDEAPKEVSGREKSSDVLPRSKHQTHSGHTIESSEATSRRRSNREWKGIGRKGNEKFPLRNVLTDILHGEDKRSQKSNEVRPPPSKQQNDRKRERDDETHQTKKDSSSRSMLGDGASRRLLQFAVRDAVKAVQPTSTSAEPASKRLCSVVATTSTEHMRDRRSERSQDYLNDRRSERSQDNLSDRRSERTRPMLQVHGAALALRAAAEAAADSAKVRSTGSVFKRLGQGNVVKQPSRSREEKRDYEDFEPVTIADEHDSDQYVNNEESEEESGELTMADRVAGSGMYVDSSSEDDMDRDEGITRYQTSLSHDDTFSPFAEKKTVSAPCSVELETNAIRPSSVNDEEQPVPSTPTASKAVAISVDVNMVEPPSYATPKDVHVVEKPYVAPMNSNAASIATNAKFRFHIAQRIRWRMQIQERFMLTMFTLLPPRTHYLAISTSLVQC

SEQ ID NO: 177346 - protein, 532 aa, Zea Mays
MHLYVQPQERTREVKDDEAPKEVSGREKSSDVLPRSKHQTHSGHTIESSEATSRRRSNREWKGIGRKGNEKFPLRNVLTDILHGEDKRSQKSNEVRPPPSKQQNDRKRERDDETHQTKKDSSSRSMLGDGASRRLLQFAVRDAVKAVQPTSTSAEPASKRLCSVVATTSTEHMRDRRSERSQDYLNDRRSERSQDNLSDRRSERTRPMLQVHGAALALRAAAEAAADSAKVRSTGSVFKRLGQGNVVKQPSRSREEKRDYEDFEPVTIADEHDSDQYVNNEESEEESGELTMADRVAGSGMYVDSSSEDDMDRDEGITRYQTSLSHDDTFSPFAEKKTVSAPCSVELETNAIRPSSVNDEEQPVPSTPTASKAVAISVDVNMVEPPSYATPKDVHVVEKPYVAPMNSNAASIATNAKELGHAEVQKDSQRSAPSVPVSYSTAHPMEDADSRTLYVNNVHFAATKDSLSRHFNKFGAVLKVVIVTNAATGQPTGFNEKNHIININGDSIIDIVATQRMQKTHMFSLIKQTAKD

SEQ ID NO: 177347 - protein, 225 aa, Zea Mays
MDDRRRVVDETSRNGHLGSQSSTQGTLLLQGEGRSALALLRGGQGDLDSGDGGGQCRVSGWHQGSPCGVGDERASGGEARGGCQEKRAGEMGSEATMVARVPMLVGYPGRPSLEGRTPATRAGCRGCGRSALCERESGAGRCISDDRGDARDDGGCGYGCLQGIHRREASDEGEGPTVVQAMQGGDDGPSGARPSGVARPVGGMAGVEGGWWWGARSTGGLAQEE

SEQ ID NO: 177348 - protein, 491 aa, Zea Mays
MEVRGGVGQGSAARHPPAPEPSRAAARVQAGDALPLPIRHTNLIFSALFAASLAYLMRRWREKIRSSTPLHAVGLAEMLAIFGLVASLIYLLSFFGIAFVQSIVSSGDDDEDFLVGSGAPASAAAPSRQHAQAPAPCELLGSPAAAPEKMPEDDEEIVASVVAGKVPSYALEARLGDCRRAAGIRREALRRITGRDIEGLPLDGFDYASILGQCCELPVGSSRFARLQGVQCAMAGRNLYMRFSCSTGDAMGMNMVSKGVQNVLDFLQDDFHDMDVISISGSSCSLGFWQLLLRQEAVRRELDRGAREVRGVRGRDRGGSGEEGPEDRRAIAGRAEHDQEPRRLGRRRRAGGVQRPREQHRYSHLHRHRPGPRAERGELPLHHDAGARQRRERSPHFRHHAFYRGGHSRGRDSAGVAVRLPGPPGREGREPGPSRVEREAAGHRGRRRGPRRRALPAVGARRGAAREEPHEVQQVEQGRLVHDGHREDAST

SEQ ID NO: 177349 - protein, 62 aa, Zea Mays
MGTNYVKLYTYSMNIIFAQALEDFWVRHRCLPVWAIELQLISSLLHYYYIWHFVIYFMIWLT

SEQ ID NO: 177350 - protein, 105 aa, Zea Mays
MGTTAGADGCAMCGPRTMQAAGEEQRLTWWSPGRTRTISRLVACWPESHAAPIQVGFTSGSDEAWFGSLPRSNHYHVDMNRDNQLWAANMCDQLVQQMRDDWNQS

SEQ ID NO: 177351 - protein, 82 aa, Zea Mays
MGTTAGADGCAMCGPRTMQAAGEEQRLTWWSPGRTRTISRLVACWPESHAAPIQVGFTSGSGWKDQLMTPLYSKMHCHVPRA

SEQ ID NO: 177352 - protein, 88 aa, Zea Mays
MQAAGEEQRLTWWSPGRTRTISRLVACWPESHAAPIQVGFTSGSDEAWFGSLPRSNHYHVDMNRDNQLWAANMCDQLVQQMRDDWNQS

SEQ ID NO: 177353 - protein, 179 aa, Zea Mays
MVTQTQRSPILEPRGFCPVCRKVFDEKDIEHVRDLLGDNTSRLASLTVDLGEDEKELLHSEAEQNRRKRIESLVNLQQELNGLIEPKKDLAIQPGMYVSVPPSTPDTAEEENADPSQGTATSTSETEQRGQASNASSNKPKNPGHRRRNRANASRRQPHGQGQPARQQWQRKEAGTSHQ

SEQ ID NO: 177354 - protein, 325 aa, Zea Mays
MAPGGEGKPSTGGGGGGVKGGRKRKFLPHGKPVRKGAYPLRPGVQGFFITCDGGREHQATREALSLLDSFYEDLVDGKGSDEKPKNIPDKPLNKKIKFEDSDSSDDEDEDNSGEEADNGNVNDVEKGETAPSEKQQEVLDTSNTASKDNTALSEKKEEVLDTSDTVSKDNEEQAVTADEPREKKQRVEDPPVFEQAVQKETADEPKESTDKPKESSEKNIDDLIDEDLKEIGDRKKRLFASLETGCNGCIFIQMHKRAGDPGPVEIVQNMMSSAALTRKHMSRFILRVLPVEVACYASEEEITKAISPLIEKEECSGDTADRLLT

SEQ ID NO: 177355 - protein, 146 aa, Zea Mays
MHKRAGDPGPVEIVQNMMSSAALTRKHMSRFILRVLPVEVACYASEEEITKAISPLIEKYFPKECSSGHKFAVLYEARSNTGIDRMKIINAAAKSVPQPHKVDLKNPDKTIVVQIAKTICMIGVVERYKELSKFNLRQLTSPESEK

SEQ ID NO: 177356 - protein, 322 aa, Zea Mays
MCLEALYCNGLQKKEAFSVKSSVRAIANMDIKLDFVPPWLINFMSRQLIGSGHKLYQKAVSTVASHDDDYRKALRGPLYVRIREYQDSDDKAKVAATEENATEAPPDNATTQNRLSLTNTVSNSEIVEESEQNTSVTVDSLPTSQQPYVPVEQAWQVGNRPYTSPEVERALCILDTSIALLRGDDKAGNVTTLQNLLSYDASLEASTAAGSVTCQTNVLNADSLPNGHPVAAAPQDSREKASDSAAEEEDAGDENSLKNPTASTVTKSVSMTLRSAIRVHGEESLDTDGFFHQNGFSNSKESRRARKSKKRWPCCLIPTTMG

SEQ ID NO: 177357 - protein, 294 aa, Zea Mays
MDIKLDFVPPWLINFMSRQLIGSGHKLYQKAVSTVASHDDDYRKALRGPLYVRIREYQDSDDKAKVAATEENATEAPPDNATTQNRLSLTNTVSNSEIVEESEQNTSVTVDSLPTSQQPYVPVEQAWQVGNRPYTSPEVERALCILDTSIALLRGDDKAGNVTTLQNLLSYDASLEASTAAGSVTCQTNVLNADSLPNGHPVAAAPQDSREKASDSAAEEEDAGDENSLKNPTASTVTKSVSMTLRSAIRVHGEESLDTDGFFHQNGFSNSKESRRARKSKKRWPCCLIPTTMG

SEQ ID NO: 177358 - protein, 393 aa, Zea Mays
MVVVANLFIRYLEERVKVPWPVSEREAILHYFELEYLKEDVVIVIMKTLSDLDAIDVRTHGFSRDGIPEAGDTVRIDVFGGFVLQRITKERSFFRAIANMDIKLDFVPPWLINFMSRQLIGSGHKLYQKAVSTVASHDDDYRKALRGPLYVRIREYQDSDDKAKVAATEENATEAPPDNATTQNRLSLTNTVSNSEIVEESEQNTSVTVDSLPTSQQPYVPVEQAWQVGNRPYTSPEVERALCILDTSIALLRGDDKAGNVTTLQNLLSYDASLEASTAAGSVTCQTNVLNADSLPNGHPVAAAPQDSREKASDSAAEEEDAGDENSLKNPTASTVTKSVSMTLRSAIRVHGEESLDTDGFFHQNGFSNSKESRRARKSKKRWPCCLIPTTMG

SEQ ID NO: 177359 - protein, 281 aa, Zea Mays
MIIDEHEIQHFYWNVMQAVSTVASHDDDYRKALRGPLYVRIREYQDSDDKAKVAATEENATEAPPDNATTQNRLSLTNTVSNSEIVEESEQNTSVTVDSLPTSQQPYVPVEQAWQVGNRPYTSPEVERALCILDTSIALLRGDDKAGNVTTLQNLLSYDASLEASTAAGSVTCQTNVLNADSLPNGHPVAAAPQDSREKASDSAAEEEDAGDENSLKNPTASTVTKSVSMTLRSAIRVHGEESLDTDGFFHQNGFSNSKESRRARKSKKRWPCCLIPTTMG

SEQ ID NO: 177360 - protein, 52 aa, Zea Mays
MTLRSAIRVHGEESLDTDGFFHQNGFSNSKESRRARKSKKRWPCCLIPTTMG

SEQ ID NO: 177361 - protein, 440 aa, Zea Mays
MEDAGREGGTAAENGTEGEGYVLVKAAPEGEGDPTAAAAGGDREDLAASAPAMAMAVAAADEAAAPAKKGGSGATKARLQNGRVPAGTSAAAAAAGPRVKKPGVLSQSASFPARGAVAVAAKKAAAAVATPKQAKGAVPIGSETAAGRAVEKKASLARTPVARRPMLVKSGSVDAAAPNDTVVAVQESDENTDKPLKQTQPGKTEDDVHSTTSSTNTPRAAARKSAAAAAAGFSFRLEERAEKRKEFFQKLEEKIHAKELEKTNLQEKSKESQEAEIKLLRKSLTFKATPMPSFYKEQPPKVELKKIPPTRARSPRLGRHKAASSATAPAPADGSVSCGSPRSTANSGKVNEIMENIKPRVPARKSIQRPVTKTPLQVSATTKAEPRPIATKPKIANSKPKVSRAKVAQAQGNSAEVPPSEPSASEELVVEHGVGEATVL

SEQ ID NO: 177362 - protein, 398 aa, Zea Mays
MEDAGREGGTAAENGTEGEGYVLVKAAPEGEGDPTAAAAGGDREDLAASAPAMAMAVAAADEAAAPAKKGGSGATKARLQNGRVPAGTSAAAAAAGPRVKKPGVLSQSASFPARGAVAVAAKKAAAAVATPKQAKGAVPIGSETAAGRAVEKKASLARTPVARRPMLVKSGSVDAAAPNDTVVAVQESDENTDKPLKQTQPGKTEDDVHSTTSSTNTPRAAARKSAAAAAAGFSFRLEERAEKRKEFFQKLEEKIHAKELEKTNLQEKSKESQEAEIKLLRKSLTFKATPMPSFYKEQPPKVELKKIPPTRARSPRLGRHKAASSATAPAPADGSVSCGSPRSTANSGKASRGLGLTAHIIDHCKLVLKFPEGTNSTWVSIPPIFMVNGCYSSSRIMI

SEQ ID NO: 177363 - protein, 333 aa, Zea Mays
MLRCERFCFIVSTVNALQTPMINASMVLCDRHFGGINYPVGGVGGIALSLADGLVEKGSEIRYKANVTNVVLENGKAVGVRLSNGKEFFAKTVISNATRWDTFGKLLKEKELPEEEKNFQKNYVKAPSFLSIHMGVKASVLPAGTDCHHFVLEDNWNNLEKPYGSIFLSIPTVLDPSLAPEGHHILHIFTTAGIEAWEGISRKEYEEKKEMVANEIIRRLEKKLFPGLQDSIVLKEVGSPKTHRRFLARNDGTYGPMPRGKPKGLLAMPFNTTSIDGLYCVGDSCFPGQGVIAVAFSGIMCAHRVAADIGLEQKSPALDAGLLGLLRWLRTLA

SEQ ID NO: 177364 - protein, 200 aa, Zea Mays
MGVKASVLPAGTDCHHFVLEDNWNNLEKPYGSIFLSIPTVLDPSLAPEGHHILHIFTTAGIEAWEGISRKEYEEKKEMVANEIIRRLEKKLFPGLQDSIVLKEVGSPKTHRRFLARNDGTYGPMPRGKPKGLLAMPFNTTSIDGLYCVGDSCFPGQGVIAVAFSGIMCAHRVAADIGLEQKSPALDAGLLGLLRWLRTLA

SEQ ID NO: 177365 - protein, 195 aa, Zea Mays
MRGKKFTGSWEIPPIFSWLQQARTNDLQTSPLIFSSNYSEKHQALHWRTGHKNDCLQIISSAASNSVLPAVGIGFVRWFAKASNVHRLLVLDPLGLYSVLLYDQLTIHYLRLMALINNRIIKAYRGTMYRLQRSIRSIFIAEAKCSDDFVFSIVFSVIGSVCTYIDMIYGMASAIFVIFMTSFLIDVCDMNDRSF

SEQ ID NO: 177366 - protein, 159 aa, Zea Mays
MSVNDIVTLGAKPLFFLDYYATSKLDVDLAEKVIKGIRDGCEQSDCALLGGETAEMPGFYAEGEYDLSGFALPRNDGITTTVGEALMAPTFIYVKQVLEIISKGGVKGLAHITGGGFTSNIPRVFPSGCGAKNLLGHGKYLQSSVGFNRQEQMIFKLRL

SEQ ID NO: 177367 - protein, 71 aa, Zea Mays
MSPCPCKTRGATRRTGTARRSPCSWRAGSPCTLPAEKQSISTHTPWTTLQTFSMSSPTCKPMSTWVTAQAS

SEQ ID NO: 177368 - protein, 948 aa, Zea Mays
MVTPPTVEQEDEEMLVPRQEAVDTDAAQPMEGTVVAQTEVVSTAESQPVEDPQTSRFTWTIENFTRFSEKKHYLEVFVVGGFKWSVLIFPKGNNVDHFSMYLDVADSTSLPYGWSRYAQFSLAVVNQIQPEFTIRKETQHQFNARESDWGFTSFMPLSELYDASRGYLVNDTVVVEAEVAVRRIVDYWTYDSKKETGYVGLKNQGATCYMNSLLQTLYHIPYFRKAVYHMPTTENDIPSGSIPLALQSLFYKLQYSDSSVATKELTKSFGWDTYDSFMQHDVQELNRVLSEKLEDKMKGTVVEGTIEQLFEGHHINYIECINVEHKSNRKESFYDLQLDVKGCRDIYSSFDKYVEVERLEGDNKYHAENHGLQDAKKGVLFLDFPPVLQLQLKRFEYDYMRDSMVKINDRYEFPLQLDLDRDGGKYIAPNADRSTRNLYTLHSVLVHSGGVHGGHYYAFIRPTLSEQWYKFDDERVTKEDAKKALEEQYGGDEELPQINPGFNNAPFKFTKYSNAYMLVYIRESAKEKIMCTVDEKDIAEHLRVRLKKEQEEKEHKKKEKAEAHLYTIIKVARDEDLKEQIGKGIYFDLVDHEKVHNFRIQKQMPFSCFKEEVAKEYGIPVQFQRFWLWAKRQNHTYRPNRPLTVHEETQSVGQLREISNKAHNVELKLFLEVELGLDLRPLPPPEKGKEDILLFFKFYNPEKEELCFMGRLFVKALGKPSEILAKLNEMAGFPPDQEIELFEEIKFEPNVMCETIDKKLTFHYSQLEDGDIICFQKSPGAEYDAPVRYPDVPSFLEYVHNRQVVHFRSLEKPKDDDFSLELSKLHTYDDVVERVARQLELDDPAKIRLTPHNCYSQQPKPQPVKYRGVVHLSDMLIHYNQTSDILYYEVLDIPLPELQFLKTLKVAFHHPTKDEVVIHSIRLPKNSTIADVIYDLKTKHRKMMLAVQ

SEQ ID NO: 177369 - protein, 1104 aa, Zea Mays
MVTPPTVEQEDEEMLVPRQEAVDTDAAQPMEVVAQTEVVSTAESQPVEDPQTSRFTWTIENFTRFSEKKHYLEVFVVGGFKWSVLIFPKGNNVDHFSMYLDVADSTSLPYGWSRYAQFSLAVVNQIQPEFTIRKETQHQFNARESDWGFTSFMPLSELYDASRGYLVNDTVVVEAEVAVRRIVDYWTYDSKKETGYVGLKNQGATCYMNSLLQTLYHIPYFRKAVYHMPTTENDIPSGSIPLALQSLFYKLQYSDSSVATKELTKSFGWDTYDSFMQHDVQELNRVLSEKLEDKMKGTVVEGTIEQLFEGHHINYIECINVEHKSNRKESFYDLQLDVKGCRDIYSSFDKYVEVERLEGDNKYHAENHGLQDAKKGVLFLDFPPVLQLQLKRFEYDYMRDSMVKINDRYEFPLQLDLDRDGGKYIAPNADRSTRNLYTLHSVLVHSGGVHGGHYYAFIRPTLSEQWYKFDDERVTKEDAKKALEEQYGGDEELPQINPGFNNAPFKFTKYSNAYMLVYIRESAKEKIMCTVDEKDIAEHLRVRLKKEQEEKEHKKKEKAEAHLYTIIKVARDEDLKEQIGKGIYFDLVDHEKVHNFRIQKQMPFSCFKEEVAKEYGIPVQFQRFWLWAKRQNHTYRPNRPLTVHEETQSVGQLREISNKAHNVELKLFLEVELGLDLRPLPPPEKGKEDILLFFKFYNPEKEELCFMGRLFVKALGKPSEILAKLNEMAGFPPDQEIELFEEIKFEPNVMCETIDKKLTFHYSQLEDGDIICFQKSPGAEYDAPVRYPDVPSFLEYVHNRQVVHFRSLEKPKDDDFSLELSKLHTYDDVVERVARQLELDDPAKIRLTPHNCYSQQPKPQPVKYRGVVHLSDMLIHYNQTSDILYYEVLDIPLPELQFLKTLKVAFHHPTKDEVVIHSIRLPKNSTIADVIYDLKTKVELSSPNAELRVLEVFYHKIYKIFPLHEKIENINDQYWTLRAEEIQNFGDPFVLVVHEGETLAEVKKRIQSKLQVSADEFSKWKFAFISMNRPDYLQDSDVVPTGFQRREVYGAWEQYLGIEHADTAPKRVYTVNQVPSHARRFGGAFRNLRYLLGKNLHVDLVMYG

SEQ ID NO: 177370 - protein, 1116 aa, Zea Mays
MVTPPTVEEDEEMLVPRQEAVDTDAAQPMEGTVVAQTEVVSTAESQPVEDPQTSRFTWTIENFTRFSEKKHYLEVFVVGGFKWSVLIFPKGNNVDHFSMYLDVADSTSLPYGWSRYAQFSLAVVNQIQPEFTIRKETQHQFNARESDWGFTSFMPLSELYDASRGYLVNDTVVVEAEVAVRRIVDYWTYDSKKETGYVGLKNQGATCYMNSLLQTLYHIPYFRKAVYHMPTTENDIPSGSIPLALQSLFYKLQYSDSSVATKELTKSFGWDTYDSFMQHDVQELNRVLSEKLEDKMKGTVVEGTIEQLFEGHHINYIECINVEHKSNRKESFYDLQLDVKGCRDIYSSFDKYVEVERLEGDNKYHAENHGLQDAKKGVLFLDFPPVLQLQLKRFEYDYMRDSMVKINDRYEFPLQLDLDRDGGKYIAPNADRSTRNLYTLHSVLVHSGGVHGGHYYAFIRPTLSEQWYKFDDERVTKEDAKKALEEQYGGDEELPQINPGFNNAPFKFTKYSNAYMLVYIRESAKEKIMCTVDEKDIAEHLRVRLKKEQEEKEHKKKEKAEAHLYTIIKVARDEDLKEQIGKGIYFDLVDHEKVHNFRIQKQMPFSCFKEEVAKEYGIPVQFQRFWLWAKRQNHTYRPNRPLTVHEETQSVGQLREISNKAHNVELKLFLEVELGLDLRPLPPPEKGKEDILLFFKFYNPEKEELCFMGRLFVKALGKPSEILAKLNEMAGFPPDQEIELFEEIKFEPNVMCETIDKKLTFHYSQLEDGDIICFQKSPGAEYDAPVRYPDVPSFLEYVHNRQVVHFRSLEKPKDDDFSLELSKLHTYDDVVERVARQLELDDPAKIRLTPHNCYSQQPKPQPVKYRGVVHLSDMLIHYNQTSDILYYEVLDIPLPELQFLKTLKVAFHHPTKDEVVIHSIRLPKNSTIADVIYDLKTKVELSSPNAELRVLEVFYHKIYKIFPLHEKIENINDQYWTLRAEEIPEEEKNIGPNDRLIHVYHFKKDINQTQQIQNFGDPFVLVVHEGETLAEVKKRIQSKLQVSADEFSKWKFAFISMNRPDYLQDSDVVPTGFQRREVYGAWEQYLGIEHADTAPKRVYTVNQNRHAYEKPVKIYN

SEQ ID NO: 177371 - protein, 822 aa, Zea Mays
MVTPPTVEQEDEEMLVPRQEAVDTDAAQPMEGTVVAQTEVVSTAESQPVEDPQTSRFTWTIENFTRFSEKKHYLEVFVVGGFKWSVLIFPPVLQLQLKRFEYDYMRDSMVKINDRYEFPLQLDLDRDGGKYIAPNADRSTRNLYTLHSVLVHSGGVHGGHYYAFIRPTLSEQWYKFDDERVTKEDAKKALEEQYGGDEELPQINPGFNNAPFKFTKYSNAYMLVYIRESAKEKIMCTVDEKDIAEHLRVRLKKEQEEKEHKKKEKAEAHLYTIIKVARDEDLKEQIGKGIYFDLVDHEKVHNFRIQKQMPFSCFKEEVAKEYGIPVQFQRFWLWAKRQNHTYRPNRPLTVHEETQSVGQLREISNKAHNVELKLFLEVELGLDLRPLPPPEKGKEDILLFFKFYNPEKEELCFMGRLFVKALGKPSEILAKLNEMAGFPPDQEIELFEEIKFEPNVMCETIDKKLTFHYSQLEDGDIICFQKSPGAEYDAPVRYPDVPSFLEYVHNRQVVHFRSLEKPKDDDFSLELSKLHTYDDVVERVARQLELDDPAKIRLTPHNCYSQQPKPQPVKYRGVVHLSDMLIHYNQTSDILYYEVLDIPLPELQFLKTLKVAFHHPTKDEVVIHSIRLPKNSTIADVIYDLKTKVELSSPNAELRVLEVFYHKIYKIFPLHEKIENINDQYWTLRAEEIPEEEKNIGPNDRLIHVYHFKKDINQTQQIQNFGDPFVLVVHEGETLAEVKKRIQSKLQVSADEFSKWKFAFISMNRPDYLQDSDVVPTGFQRREVYGAWEQYLGIEHADTAPKRVYTVNQNRHAYEKPVKIYN

SEQ ID NO: 177372 - protein, 1132 aa, Zea Mays
MVTPPTVEQEDEEMLVPRQEAVDTDAAQPMEVVAQTEVVSTAESQPVEDPQTSRFTWTIENFTRFSEKKHYLEVFVVGGFKWSVLIFPKGNNVDHFSMYLDVADSTSLPYGWSRYAQFSLAVVNQIQPEFTIRKETQHQFNARESDWGFTSFMPLSELYDASRGYLVNDTVVVEAEVAVRRIVDYWTYDSKKETGYVGLKNQGATCYMNSLLQTLYHIPYFRKAVYHMPTTENDIPSGSIPLALQSLFYKLQYSDSSVATKELTKSFGWDTYDSFMQHDVQELNRVLSEKLEDKMKGTVVEGTIEQLFEGHHINYIECINVEHKSNRKESFYDLQLDVKGCRDIYSSFDKYVEVERLEGDNKYHAENHGLQDAKKGVLFLDFPPVLQLQLKRFEYDYMRDSMVKINDRYEFPLQLDLDRDGGKYIAPNADRSTRNLYTLHSVLVHSGGVHGGHYYAFIRPTLSEQWYKFDDERVTKEDAKKALEEQYGGDEELPQINPGFNNAPFKFTKYSNAYMLVYIRESAKEKIMCTVDEKDIAEHLRVRLKKEQEEKEHKKKEKAEAHLYTIIKVARDEDLKEQIGKGIYFDLVDHEKVHNFRIQKQMPFSCFKEEVAKEYGIPVQFQRFWLWAKRQNHTYRPNRPLTVHEETQSVGQLREISNKAHNVELKLFLEVELGLDLRPLPPPEKGKEDILLFFKFYNPEKEELCFMGRLFVKALGKPSEILAKLNEMAGFPPDQEIELFEEIKFEPNVMCETIDKKLTFHYSQLEDGDIICFQKSPGAEYDAPVRYPDVPSFLEYVHNRQVVHFRSLEKPKDDDFSLELSKLHTYDDVVERVARQLELDDPAKIRLTPHNCYSQQPKPQPVKYRGVVHLSDMLIHYNQTSDILYYEVLDIPLPELQFLKTLKVAFHHPTKDEVVIHSIRLPKNSTIADVIYDLKTKVELSSPNAELRVLEVFYHKIYKIFPLHEKIENINDQYWTLRAEEIPEEEKNIGPNDRLIHVYHFKKDINQTQIQNFGDPFVLVVHEGETLAEVKKRIQSKLQVSADEFSKWKFAFISMNRPDYLQDSDVVPTGFQRREVYGAWEQYLGIEHADTAPKRVYTVNQVPSHARRFGGAFRNLRYLLGKNLHVDLVMYG

SEQ ID NO: 177373 - protein, 795 aa, Zea Mays
MVTPPTVEQEDEEMLVPRQEAVDTDAAQPMEVVAQTEVVSTAESQPVEDPQTSRFTWTIENFTRFSEKKHYLEVFVVGGFKWSVLIFPPVLQLQLKRFEYDYMRDSMVKINDRYEFPLQLDLDRDGGKYIAPNADRSTRNLYTLHRYKFDDERVTKEDAKKALEEQYGGDEELPQINPGFNNAPFKFTKYSNAYMLVYIRESAKEKIMCTVDEKDIAEHLRVRLKKEQEEKEHKKKEKAEAHLYTIIKVARDEDLKEQIGKGIYFDLVDHEKVHNFRIQKQMPFSCFKEEVAKEYGIPVQFQRFWLWAKRQNHTYRPNRPLTVHEETQSVGQLREISNKAHNVELKLFLEVELGLDLRPLPPPEKGKEDILLFFKFYNPEKEELCFMGRLFVKALGKPSEILAKLNEMAGFPPDQEIELFEEIKFEPNVMCETIDKKLTFHYSQLEDGDIICFQKSPGAEYDAPVRYPDVPSFLEYVHNRQVVHFRSLEKPKDDDFSLELSKLHTYDDVVERVARQLELDDPAKIRLTPHNCYSQQPKPQPVKYRGVVHLSDMLIHYNQTSDILYYEVLDIPLPELQFLKTLKVAFHHPTKDEVVIHSIRLPKNSTIADVIYDLKTKVELSSPNAELRVLEVFYHKIYKIFPLHEKIENINDQYWTLRAEEIPEEEKNIGPNDRLIHVYHFKKDINQTQQIQNFGDPFVLVVHEGETLAEVKKRIQSKLQVSADEFSKWKFAFISMNRPDYLQDSDVVPTGFQRREVYGAWEQYLGIEHADTAPKRVYTVNQNRHAYEKPVKIYN

SEQ ID NO: 177374 - protein, 962 aa, Zea Mays
MPLSELYDASRGYLVNDTVVVEAEVAVRRIVDYWTYDSKKETGYVGLKNQGATCYMNSLLQTLYHIPYFRKAVYHMPTTENDIPSGSIPLALQSLFYKLQYSDSSVATKELTKSFGWDTYDSFMQHDVQELNRVLSEKLEDKMKGTVVEGTIEQLFEGHHINYIECINVEHKSNRKESFYDLQLDVKGCRDIYSSFDKYVEVERLEGDNKYHAENHGLQDAKKGVLFLDFPPVLQLQLKRFEYDYMRDSMVKINDRYEFPLQLDLDRDGGKYIAPNADRSTRNLYTLHSVLVHSGGVHGGHYYAFIRPTLSEQWYKFDDERVTKEDAKKALEEQYGGDEELPQINPGFNNAPFKFTKYSNAYMLVYIRESAKEKIMCTVDEKDIAEHLRVRLKKEQEEKEHKKKEKAEAHLYTIIKVARDEDLKEQIGKGIYFDLVDHEKVHNFRIQKQMPFSCFKEEVAKEYGIPVQFQRFWLWAKRQNHTYRPNRPLTVHEETQSVGQLREISNKAHNVELKLFLEVELGLDLRPLPPPEKGKEDILLFFKFYNPEKEELCFMGRLFVKALGKPSEILAKLNEMAGFPPDQEIELFEEIKFEPNVMCETIDKKLTFHYSQLEDGDIICFQKSPGAEYDAPVRYPDVPSFLEYVHNRQVVHFRSLEKPKDDDFSLELSKLHTYDDVVERVARQLELDDPAKIRLTPHNCYSQQPKPQPVKYRGVVHLSDMLIHYNQTSDILYYEVLDIPLPELQFLKTLKVAFHHPTKDEVVIHSIRLPKNSTIADVIYDLKTKVELSSPNAELRVLEVFYHKIYKIFPLHEKIENINDQYWTLRAEEIPEEEKNIGPNDRLIHVYHFKKDINQTQIQNFGDPFVLVVHEGETLAEVKKRIQSKLQVSADEFSKWKFAFISMNRPDYLQDSDVVPTGFQRREVYGAWEQYLGIEHADTAPKRVYTVNQNRHAYEKPVKIYN

SEQ ID NO: 177375 - protein, 717 aa, Zea Mays
MRDSMVKINDRYEFPLQLDLDRDGGKYIAPNADRSTRNLYTLHSVLVHSGGVHGGHYYAFIRPTLSEQWYKFDDERVTKEDAKKALEEQYGGDEELPQINPGFNNAPFKFTKYSNAYMLVYIRESAKEKIMCTVDEKDIAEHLRVRLKKEQEEKEHKKKEKAEAHLYTIIKVARDEDLKEQIGKGIYFDLVDHEKVHNFRIQKQMPFSCFKEEVAKEYGIPVQFQRFWLWAKRQNHTYRPNRPLTVHEETQSVGQLREISNKAHNVELKLFLEVELGLDLRPLPPPEKGKEDILLFFKFYNPEKEELCFMGRLFVKALGKPSEILAKLNEMAGFPPDQEIELFEEIKFEPNVMCETIDKKLTFHYSQLEDGDIICFQKSPGAEYDAPVRYPDVPSFLEYVHNRQVVHFRSLEKPKDDDFSLELSKLHTYDDVVERVARQLELDDPAKIRLTPHNCYSQQPKPQPVKYRGVVHLSDMLIHYNQTSDILYYEVLDIPLPELQFLKTLKVAFHHPTKDEVVIHSIRLPKNSTIADVIYDLKTKVELSSPNAELRVLEVFYHKIYKIFPLHEKIENINDQYWTLRAEEIPEEEKNIGPNDRLIHVYHFKKDINQTQIQNFGDPFVLVVHEGETLAEVKKRIQSKLQVSADEFSKWKFAFISMNRPDYLQDSDVVPTGFQRREVYGAWEQYLGIEHADTAPKRVYTVNQNRHAYEKPVKIYN

SEQ ID NO: 177376 - protein, 718 aa, Zea Mays
MRDSMVKINDRYEFPLQLDLDRDGGKYIAPNADRSTRNLYTLHSVLVHSGGVHGGHYYAFIRPTLSEQWYKFDDERVTKEDAKKALEEQYGGDEELPQINPGFNNAPFKFTKYSNAYMLVYIRESAKEKIMCTVDEKDIAEHLRVRLKKEQEEKEHKKKEKAEAHLYTIIKVARDEDLKEQIGKGIYFDLVDHEKVHNFRIQKQMPFSCFKEEVAKEYGIPVQFQRFWLWAKRQNHTYRPNRPLTVHEETQSVGQLREISNKAHNVELKLFLEVELGLDLRPLPPPEKGKEDILLFFKFYNPEKEELCFMGRLFVKALGKPSEILAKLNEMAGFPPDQEIELFEEIKFEPNVMCETIDKKLTFHYSQLEDGDIICFQKSPGAEYDAPVRYPDVPSFLEYVHNRQVVHFRSLEKPKDDDFSLELSKLHTYDDVVERVARQLELDDPAKIRLTPHNCYSQQPKPQPVKYRGVVHLSDMLIHYNQTSDILYYEVLDIPLPELQFLKTLKVAFHHPTKDEVVIHSIRLPKNSTIADVIYDLKTKVELSSPNAELRVLEVFYHKIYKIFPLHEKIENINDQYWTLRAEEIPEEEKNIGPNDRLIHVYHFKKDINQTQQIQNFGDPFVLVVHEGETLAEVKKRIQSKLQVSADEFSKWKFAFISMNRPDYLQDSDVVPTGFQRREVYGAWEQYLGIEHADTAPKRVYTVNQNRHAYEKPVKIYN

SEQ ID NO: 177377 - protein, 408 aa, Zea Mays
MGRLFVKALGKPSEILAKLNEMAGFPPDQEIELFEEIKFEPNVMCETIDKKLTFHYSQLEDGDIICFQKSPGAEYDAPVRYPDVPSFLEYVHNRQVVHFRSLEKPKDDDFSLELSKLHTYDDVVERVARQLELDDPAKIRLTPHNCYSQQPKPQPVKYRGVVHLSDMLIHYNQTSDILYYEVLDIPLPELQFLKTLKVAFHHPTKDEVVIHSIRLPKNSTIADVIYDLKTKVELSSPNAELRVLEVFYHKIYKIFPLHEKIENINDQYWTLRAEEIPEEEKNIGPNDRLIHVYHFKKDINQTQIQNFGDPFVLVVHEGETLAEVKKRIQSKLQVSADEFSKWKFAFISMNRPDYLQDSDVVPTGFQRREVYGAWEQYLGIEHADTAPKRVYTVNQNRHAYEKPVKIYN

SEQ ID NO: 177378 - protein, 92 aa, Zea Mays
MVSGGRNSVVTIGVDGSGGSMVRFVCLMDQIVVALNQFMGVTATLNAWMRDCGLPVAGIYGNTTLSVGGKCPQRQVTMLYTMTTCKYDPKVC

SEQ ID NO: 177379 - protein, 684 aa, Zea Mays
MWRLKIGGEGGGPWLRSASGFTGRQVWEFDPDAGTQDEIAEVERLRREFTERRRFDKRAVAQDLLLRMQVFALHVTGSLNTVLSAEHRHEICRYIYNHQNEDGGWGMQEVGPSTMFSSCLNYVTLRLLGEACAQHDALAKGQAWILSHGSAAAIPQWGKIWLSVIGLYDWNGNNSIVPELWLVPYSLPFHPGRFWCFCRLIYMPMAYLYGKKFVGPITPTILSIRNEIYKIPYDEVDWNKARDTCAKEDLLYPRTFVQNVIWTCVNKIVEPLLNLWPAKMLRDTALKNIMNHIHYEDESTRYLCVCPVNKALNMICCWVENPNSDAFKRHLPRIYDYIWLAEDGMKLKVYDGTQAWDTAFIVKAYCSTDLVHEFSPTLRKAHEFIKSLQIPENQPDHENYYRHRSKGSWAHSTLDNGWSVSDSTAEAIQALLLLSKFSSNLVGDPIKEERLFDAVDCLLSFMVLNPSETFLNIVVDHPSVECTSSAIQALVMFREMYPRYRDQEIKKCIKGASKFIESKQQKDGTWFGTWGVCYTYGTLFAVQGLVVAGRTYENSSSIRKACRFLLSKQLITGGWGETYPSNGTAIYQVYAEASSPHVVNTAWAMLALIYAGQVQRDPTPLYGAAKELINMQQESGEFPQQEHIGSFNCSFYFNYGNYRNLFPIWALGEFRRRIVAEKKRNQQT

SEQ ID NO: 177380 - protein, 681 aa, Zea Mays
MWRLKIGGEGGGPWLRSASGFTGRQVWEFDPDAGTQDEIAEVERLRREFTERRRFDKRAVAQDLLLRMQVFALHVTGSLNTVLSAEHRHEICRYIYNHQNEDGGWGMQEVGPSTMFSSCLNYVTLRLLGEACAQHDALAKGQAWILSHGSAAAIPQWGKIWLSVIGLYDWNGNNSIVPELWLVPYSLPFHPGRFWCFCRLIYMPMAYLYGKKFVGPITPTILSIRNEIYKIPYDEVDWNKARDTCAKEDLLYPRTFVQNVIWTCVNKIVEPLLNLWPAKMLRDTALKNIMNHIHYEDESTRYLCVCPVNKALNMICCWVENPNSDAFKRHLPRIYDYIWLAEDGMKLKVYDGTQAWDTAFIVKAYCSTDLVHEFSPTLRKAHEFIKSLQIPENQPDHENYYRHRSKGSWAHSTLDNGWSVSDSTAEAIQALLLLSKFSSNLVGDPIKEERLFDAVDCLLSFMVLNPSETFLNIVVDHPSVECTSSAIQALVMFREMYPRYRDQEIKKCIKGASKFIESKQQKDGTWFGTWGVCYTYGTLFAVQGLVVAGRTYENSSSIRKACRFLLSKQLITGGWGETYPSNGTAVYAEASSPHVVNTAWAMLALIYAGQVQRDPTPLYGAAKELINMQQESGEFPQQEHIGSFNCSFYFNYGNYRNLFPIWALGEFRRRIVAEKKRNQQT

SEQ ID NO: 177381 - protein, 703 aa, Zea Mays
MWRLKIGGEGGGPWLRSASGFTGRQVWEFDPDAGTQDEIAEVERLRREFTERRRFDKRAVAQDLLLRMQVFALHVTGSLNTVLSAEHRHEICRYIYNHQNEDGGWGMQEVGPSTMFSSCLNYVTLRLLGEACAQHDALAKGQAWILSHGSAAAIPQWGKIWLSVIGLYDWNGNNSIVPELWLVPYSLPFHPGRFWCFCRLIYMPMAYLYGKKFVGPITPTILSIRNEIYKIPYDEVDWNKARDTCAKEDLLYPRTFVQNVIWTCVNKIVEPLLNLWPAKMLRDTALKNIMNHIHYEDESTRYLCVCPVNKALNMICCWVENPNSDAFKRHLPRIYDYIWLAEDGMKLKVYDGTQAWDTAFIVKAYCSTDLVHEFSPTLRKAHEFIKSLQIPENQPDHENYYRHRSKGSWAHSTLDNGWSVSDSTAEAIQALLLLSKFSSNLVGDPIKEERLFDAVDCLLSFMNKDGTFSTYERKRTASLLEVLNPSETFLNIVVDHPSVECTSSAIQALVMFREMYPRYRDQEIKKCIKGASKFIESKQQKDGTWFGTWGVCYTYGTLFAVQGLVVAGRTYENSSSIRKACRFLLSKQLITGGWGETYPSNGTAIYQVYAEASSPHVVNTAWAMLALIYAGQVQRDPTPLYGAAKELINMQQESGEFPQQEHIGSFNCSFYFNYGNYRNLFPIWALGEFRRRIVAEKKRNQQT

SEQ ID NO: 177382 - protein, 606 aa, Zea Mays
MWRLKIGGEGGGPWLRSASGFTGRQVWEFDPDAGTQDEIAEVERLRREFTERRRFDKRAVAQDLLLRMQVFALHVTGSLNTVLSAEHRHEICRYIYNHQNEDGGWGMQEVGPSTMFSSCLNYVTLRLLGEACAQHDALAKGQAWILSHGSAAAIPQWGKIWLSVIGLYDWNGNNSIVPELWLVPYSLPFHPGRFWCFCRLIYMPMAYLYGKKFVGPITPTILSIRNEIYKIPYDEVDWNKARDTCAKEDLLYPRTFVQNVIWTCVNKIVEPLLNLWPAKMLRDTALKNIMNHIHYEDESTRYLCVCPVNKALNMICCWVENPNSDAFKRHLPRIYDYIWLAEDGMKLKVYDGTQAWDTAFIVKAYCSTDLVHEFSPTLRKAHEFIKSLQIPENQPDHENYYRHRSKGSWAHSTLDNGWSVSDSTAEAIQALLLLSKFSSNLVGDPIKEERLFDAVDCLLSFMVLNPSETFLNIVVDHPSVECTSSAIQALVMFREMYPRYRDQEIKKCIKGASKFIESKQQKDGTWFGTWGVCYTYGTLFAVQGLVVAGRTYENSSSIRKACRFLLSKQLITGGWGETYPSNGTAVILNFPYLTMCLLGHFMFDIS

SEQ ID NO: 177383 - protein, 190 aa, Zea Mays
MFREMYPRYRDQEIKKCIKGASKFIESKQQKDGTWFGTWGVCYTYGTLFAVQGLVVAGRTYENSSSIRKACRFLLSKQLITGGWGETYPSNGTAVYAEASSPHVVNTAWAMLALIYAGQVQRDPTPLYGAAKELINMQQESGEFPQQEHIGSFNCSFYFNYGNYRNLFPIWALGEFRRRIVAEKKRNQQT

SEQ ID NO: 177384 - protein, 64 aa, Zea Mays
MEYGMLHFCMCLLGIKHCYINFPNSLFSFQICALRIFFIRVHSRNARIRIGRLDLFYWCILSFL

SEQ ID NO: 177385 - protein, 284 aa, Zea Mays
MRKLFFSESACKETKLHCAPHSWLPLERGKLSKFSGHAAAGSSILNCPEAAMRSLQLAREHAASDHERLVYEGWILYDTGHCEEGLQKAEASIAIQRSFEAFFLKAYALADSSLDPSTTATVVSLLEDALRCPSDRLRKGQALNNLGSVYVDCGKLDLAAECYINALKIGHTRAHQGLARVHFLRNNRVGAYDEMTKLIEKARNNASAYEKRSEYCERELTKTDLQMVTKLDPLRVYPYRYRAAGKCRLPASCCMAYLVSYTFNTTKLGRDVILAPPDSKQVET

SEQ ID NO: 177386 - protein, 854 aa, Zea Mays
MRKLFFSESACKETKLHCAPHSWLPLERGKLSKFSGHAAAGSSIEALMKMPEPAVLPYFKPANYVDILAQIHEELESCPPDEKSCLYLLQFQVFRGLGEAKLSRRSLQSAWEKASTIHEKLIFGAWLKYEKKGEEAISDLLSSCCKCSQEFRLLDFVSQVSTGSHMMNYDDDDDESDEFRGSAVVHFRIRDDMIACDRRKLAALSTPLYAMLNGGFRESYLEVIDMSRNGISPIGMRAISKFSLSGRLPYLSADAILEMLDFANKFCCKGLKDACERKLASFISSRQDAIDFMECALELGCSILAASCLQVLLNELPECLNDEQVVRIFSSANKAQRLTMVGNASFSLYCLLSEVSVSTNPTSDVTVSFLEKLVESASDSRQKQLALHQLACTRFLRKDYPESECLFNAAFSAGHLYSLVGLARLASLRGNKHFALKLLDSVMSSRWPLGWMYQERALYLDGDNKLENLNKATELDPTLTYPYMFRAASLMKRQSVEAALMEINRILGFKLVLECLELRFCCYLALEDYRAALCDVQAILTLAPDYRMIGGRVAAKQLRMLVLENVEQWTPADCWMQLYDRWSSVDDIGSLSVIYQMLESETAKGVLYFRQSLLLLRLNCPEAAMRSLQLAREHAASDHERLVYEGWILYDTGHCEEGLQKAEASIAIQRSFEAFFLKAYALADSSLDPSTTATVVSLLEDALRCPSDRLRKGQALNNLGSVYVDCGKLDLAAECYINALKIGHTRAHQGLARVHFLRNNRVGAYDEMTKLIEKARNNASAYEKRSEYCERELTKTDLQMVTKLDPLRVYPYRYRAAGMCFWLLISWSVLSCYYYYYTTRRSGLACSHYCTHWG

SEQ ID NO: 177387 - protein, 58 aa, Zea Mays
MILLSKPLALCLGHLKFTTAGLVVVVLTARLGRWGRGWVIVFFEPRLLRRIIELVPEL

SEQ ID NO: 177388 - protein, 305 aa, Zea Mays
MVSPVERVDLPVRSSDLSDPQDFLLGDEQRMEVLEIDWGAIQIDDRWEEEGEQETASESLMYDRLGLLAEDERETTERQETVRQSDEFNDELPCTDCIPQERVFECNRSNPVMKIGSLYKDMKEFRLAIRQYAINNEFELGIESSSPFRYRAYCKGGDCPWRINARLQNAGSPTVVVTVIVDKHTCTSSGRRKTTTPTSSWVASLAMPFLTKKPHMGAKELQNTLQEQHNWSSGNQHWPSPTSKLTPEIGTASFPVARYVVACCCQCWSSGVVQNEAGHLQGTQELPETGHLLDFSRHLQGTQKL

SEQ ID NO: 177389 - protein, 470 aa, Zea Mays
MSREALVRLWVAEGFVLSKEKNTPEEVAEGNLMELIHRNMLEVVDYDELGRVSTCKMHDIMRDLALCVAKEEKFGSANDYGELIQVDQKVRRLSLCGWNVKAAAKFKFPCLRTLVAQGIISFSPDMVSSIMSQSNYLTVLELQDSEITEVPAFIGNLFNLRYIGLRRTKVKSLPESIEKLLNLHTLDIKQTQIEKLPRGIVKVKKLRHLLADRFADEKQTEFRYFIGVEAPKGLLNLEELQTLETVQASKDLPEQLKKLMQLRSLWIDNVSGADCDNLFATLSTMPLLSSLLISARDVNETLCLQALAPEFPKLHRLIVRGRWAAETLEYPIFCNHGKHLKYLALSWCQLGEDPLGVLAPHVPNLTYLSMNRVSSASTLVLSAGCFPHLKTLVLKKMPNVEQLEIGHGALPCIQGLYIMSLAQLDKVPQGIESLLSLKKLWLLYLHAEFRTQWLTNGMHQKMQHVPEIRV

SEQ ID NO: 177390 - protein, 214 aa, Zea Mays
MIYLSCDLLEGLVLQPGIPDRHIWKFNASGDYSSSSAYKALLLGAVDFGPAERIWKSWAPGKCKFFLWLVEHNRCWTADRLALRGLDHPICCPLCDQADETINHLLVECSFAKQFWFLLLRSGDFQVLCPSTGDSCFDSWWEKSAEMVGKPLSKGFNSLVILGAWSIWKHRNRCVFDGCSPSVVIALSAAREEMLCWRLAGAKALSSFHLEELL

SEQ ID NO: 177391 - protein, 174 aa, Zea Mays
MAGSGESSVMEGYGVRLDPETEGGVGGYSLVTPPPALLGPEIAEMSIGEEGEQRVRPPMSNISSREMDTPQILHSHAKNIDPTIVPTVGMTFKDVDDAYKFYKRYAYEVGFPLKKYREKTFSKWINCSREGKSALKSNDTPRMRNRSSGRTQCKAGIKLKKIYDDEKNGCSCKN

SEQ ID NO: 177392 - protein, 550 aa, Zea Mays
MKGDSSRQNSLEDNSQILSAFPREPKLEFLKNITKDFSSERVIGHGVFGVVYKGILQNGQLVAVKKLVQTSGVHDRRFQNEAGNLQFLEHRNIVKLLGSCYQVEKKLVERNNKHFLSDVPEKFLCYEYLSNGSLDNYIYDESSGIDWTMRFKIILGICNGLHFLHEERSEAIVHLNLKPSNIMLGDDMVPKIADFGLSRLFGEEQTRTLTKNVVGWIGYIAPEYHYRGEISVKSDIFSLGVLILEIVTGLKRDLNIQDISSELLIDNVSKNWTEMSHIESKYPSLEEQHLLQVKRCIELGLNCVESDPKKRPTVGSIIGKLKEISHEASIHKFMEKKLQLITEFPREPKLHFIEVITGDFANEREIGKGSFGVVYKGVLQNGEVVAVKRLLVVAKTNLDKQYLNEVSSLIDLNHRNIVKLFGYCNEIQRKLVESHGTYVFADTEERILCYEYLPRGSLDKYLYGASHELNWNISFKIIQGICHGLQFLHESQRPIIHMDLKPGNILLDDNLMPKIADFGLSRLFGEEQTRALTSNVVGSRYKGFGQKCRR

SEQ ID NO: 177393 - protein, 706 aa, Zea Mays
MRFPHPHPKPTGKTYSPSSPTRTLPLISRLCTIISERSSLAYLSLKQTSLLQGMKGDSSRQNSLEDNSQILSAFPREPKLEFLKNITKDFSSERVIGHGVFGVVYKGILQNGQLVAVKKLVQTSGVHDRRFQNEAGNLQFLEHRNIVKLLGSCYQVEKKLVERNNKHFLSDVPEKFLCYEYLSNGSLDNYIYDESSGIDWTMRFKIILGICNGLHFLHEERSEAIVHLNLKPSNIMLGDDMVPKIADFGLSRLFGEEQTRTLTKNVVGWIGYIAPEYHYRGEISVKSDIFSLGVLILEIVTGLKRDLNIQDISSELLIDNVSKNWTEMSHIESKYPSLEEQHLLQVKRCIELGLNCVESDPKKRPTVGSIIGKLKEISHEASIHKFMEKKLQLITEFPREPKLHFIEVITGDFANEREIGKGSFGVVYKGVLQNGEVVAVKRLLVVAKTNLDKQYLNEVSSLIDLNHRNIVKLFGYCNEIQRKLVESHGTYVFADTEERILCYEYLPRGSLDKYLYGASHELNWNISFKIIQGICHGLQFLHESQRPIIHMDLKPGNILLDDNLMPKIADFGLSRLFGEEQTRALTSNVVGSRGYMAPEYYYRGEVSTKSDIYSLGILIIEIVTGLKVDSNTVDLSSKNLIDNVQRIWTKMPQIASKYPTLEASNLQQVKRCIDAGLNCVSEKPRERPSAGEIIKQLNGSSFPSRN

SEQ ID NO: 177394 - protein, 389 aa, Zea Mays
MDLGLEDRRKEESAGQGGALTERRAAARDREAQGGGGGRESWICARGGDGGHEVLDESSGIDWTMRFKIILGICNGLHFLHEERSEAIVHLNLKPSNIMLGDDMVPKIADFGLSRLFGEEQTRTLTKNVVGWIGYIAPEYHYRGEISVKSDIFSLGVLILEIVTGLKRDLNIQDISSELLIDNVSKNWTEMSHIESKYPSLEEQHLLQVKRCIELGLNCVESDPKKRPTVGSIIGKLKEISHEASIHKFMEKKLQLITEFPREPKLHFIEVITGDFANEREIGKGSFGVVYKGVLQNGEVVAVKRLLVVAKTNLDKQYLNEVSSLIDLNHRNIVKLFGYCNEIQRKLVESHGTYVFADTEERILCYEYLPRGSLDKYLYGSQNRGCDWD

SEQ ID NO: 177395 - protein, 197 aa, Zea Mays
MDHQGKKGASHELNWNISFKIIQGICHGLQFLHESQRPIIHMDLKPGNILLDDNLMPKIADFGLSRLFGEEQTRALTSNVVGSRGYMAPEYYYRGEVSTKSDIYSLGILIIEIVTGLKVDSNTVDLSSKNLIDNVQRIWTKMPQIASKYPTLEASNLQQVKRCIDAGLNCVSEKPRERPSAGEIIKQLNGSSFPSRN

SEQ ID NO: 177396 - protein, 305 aa, Zea Mays
MEDPLRSSIWETMSGEAMLMHSKLSAISLLVYCGLDTSRMSVLLFLLTHGLSGRLRCRACFRQNIAVVTIYASLGEGALCHSLNETEVTTVVCGRKEFKKLIDISGQLDTVKHVIYIDEEGISVEVSLAENCTSWTVKSFEEVESIGLQRPVEANLPLPSDTAVIMYTSGSTGMPKGVMMSHQNVLAVVSAVMTIVPGLGKKDVYLAYLPLAHILELAAEAIITGVGASIGYGSPLTLTDTSNKIKKGTQGDASVLKPTLMTAVPAILDRVRDGVRKNVSSSLQLVHKLPFVIFHVLSAVLFLSC

SEQ ID NO: 177397 - protein, 55 aa, Zea Mays
MYCLLKRRNAQRKEIRLIINSLVHPKFTHKHCFTLFCIVDYTVRRVEFEYGYAYV

SEQ ID NO: 177398 - protein, 436 aa, Zea Mays
MDAGECSTSKPPQPSAASPPCGGEEVAWCEIRRNAGDASSATIRNLSSDAIIVDGRIVEQECVDIKPGSEIVSGPQKEGHLIYTFEITEAEDHEKKNVKIVLDIENAKCSICLNLWHDVVTVAPCLHNFCNGCFSEWLRRSSSNSRDKSQSAACPQCRTTVQSVGRNHFLHNIEEAILQAFSSLQRSDEEIALLESYASVKSNMKNQSRKRRFSRSSDDTDNSDLPCPQCRNEFGGFRCSPGSVHLQCSGCGGMMPARSNISIPQKCLGCDKAFCGAYWYSQGVSSSHCNLICNQDTLKSIYQRHISALPDTIHGGNPYEKDITERCIQQSGKTLQVVISEWISKFDNMEIDRSRLQLNNVDAITSRTYICNHCYSKFVDFLLYWFRVSLPQNLLPRDAAERESCWYGFMCRTQHHRPDHAKKLNHVCRPTRGNQP

SEQ ID NO: 177399 - protein, 436 aa, Zea Mays
MDAGECSTSKPPQPSAASPPCGGEEVAWCEIRRNAGDASSATIRNLSSDAIIVDGRIVEQECVDIKPGSEIVSGPQKEGHLIYTFEITEAEDHEKKNVKIVLDIENAKCSICLNLWHDVVTVAPCLHNFCNGCFSEWLRRSSSNSRDKSQSAACPQCRTTVQSVGRNHFLHNIEEAILQAFSSLQRSDEEIALLESYASVLGQQKNQSRKRRFSRSSDDTDNSDLPCPQCRNEFGGFRCSPGSVHLQCSGCGGMMPARSNISIPQKCLGCDKAFCGAYWYSQGVSSSHCNLICNQDTLKSIYQRHISALPDTIHGGNPYEKDITERCIQQSGKTLQVVISEWISKFDNMEIDRSRLQLNNVDAITSRTYICNHCYSKFVDFLLYWFRVSLPQNLLPRDAAERESCWYGFMCRTQHHRPDHAKKLNHVCRPTRGNQP

SEQ ID NO: 177400 - protein, 431 aa, Zea Mays
MDAGECSTSKPPQPSAASPPCGGEEVAWCEIRRNAGDASSATIRNLSSDAIIVDGRIVEQECVDIKPGSEIVSGPQKEEAEDHEKKNVKIVLDIENAKCSICLNLWHDVVTVAPCLHNFCNGCFSEWLRRSSSNSRDKSQSAACPQCRTTVQSVGRNHFLHNIEEAILQAFSSLQRSDEEIALLESYASVKSNMVLGQQKNQSRKRRFSRSSDDTDNSDLPCPQCRNEFGGFRCSPGSVHLQCSGCGGMMPARSNISIPQKCLGCDKAFCGAYWYSQGVSSSHCNLICNQDTLKSIYQRHISALPDTIHGGNPYEKDITERCIQQSGKTLQVVISEWISKFDNMEIDRSRLQLNNVDAITSRTYICNHCYSKFVDFLLYWFRVSLPQNLLPRDAAERESCWYGFMCRTQHHRPDHAKKLNHVCRPTRGNQP

SEQ ID NO: 177401 - protein, 407 aa, Zea Mays
MDAGECSTSKPPQPSAASPPCGGEEVAWCEIRRNAGDASSATIRNLSSDAIIVDGRIVEQECVDIKPGSEIVSGPQKEGHLIYTFEITEAEDHEKKNVKIVLDIENAKCSICLNLWHDVVTVAPCLHNFCNGCFSEWLRRSSSNSRDKSQSAACPQCRTTVQSVGRNHFLHNIEEAILQAFSSLQRSDEEIALLESYASVKSNMVLGQQKNQSRKRRFSRSSDDTDNSDLPCPQCRNEFGGFRCSPGSVHLQCSGCGGMMPARSNISIPQKCLGCDKAFCGAYWYSQGVSSSHCNLICNQDTLKSIYQRHISALPDTIHGGNPYEKDITERCIQQSGKTLQVVISEWISKFDNMEIDRSRLQLNNVDAITSRTYICNFFHVMLRRGRAAGTVSCAAPSTIGLTTPRS

SEQ ID NO: 177402 - protein, 448 aa, Zea Mays
MDAGECSTSKPPQPSAASPSSPTVWARLVPADSACPTVEVAEDDSVVCSLVAPPCGGEEVAWCEIRRNAGDASSATIRNLSSDAIIVDGRIVEQECVDIKPGSEIVSGPQKEGHLIYTFEITEAEDHEKKNVKIVLDIENAKCSICLNLWHDVVTVAPCLHNFCNGCFSEWLRRSSSNSRDKSQSAACPQCRTTVQSVGRNHFLHNIEEAILQAFSSLQRSDEEIALLESYASVLGQQKNQSRKRRFSRSSDDTDNSDLPCPQCRNEFGGFRCSPGSVHLQCSGCGGMMPARSNISIPQKCLGCDKAFCGAYWYSQGVSSSHCNLICNQDTLKSITERCIQQSGKTLQVVISEWISKFDNMEIDRSRLQLNNVDAITSRTYICNHCYSKFVDFLLYWFRVSLPQNLLPRDAAERESCWYGFMCRTQHHRPDHAKKLNHVCRPTRGNQP

SEQ ID NO: 177403 - protein, 465 aa, Zea Mays
MDAGECSTSKPPQPSAASPSSPTVWARLVPADSACPTVEVAEDDSVVCSLVAPPCGGEEVAWCEIRRNAGDASSATIRNLSSDAIIVDGRIVEQECVDIKPGSEIVSGPQKEEAEDHEKKNVKIVLDIENAKCSICLNLWHDVVTVAPCLHNFCNGCFSEWLRRSSSNSRDKSQSAACPQCRTTVQSVGRNHFLHNIEEAILQAFSSLQRSDEEIALLESYASVKSNMVLGQQKNQSRKRRFSRSSDDTDNSDLPCPQCRNEFGGFRCSPGSVHLQCSGCGGMMPARSNISIPQKCLGCDKAFCGAYWYSQGVSSSHCNLICNQDTLKSIYQRHISALPDTIHGGNPYEKDITERCIQQSGKTLQVVISEWISKFDNMEIDRSRLQLNNVDAITSRTYICNHCYSKFVDFLLYWFRVSLPQNLLPRDAAERESCWYGFMCRTQHHRPDHAKKLNHVCRPTRGNQP

SEQ ID NO: 177404 - protein, 404 aa, Zea Mays
MDAGECSTSKPPQPSAASPPCGGEEVAWCEIRRNAGDASSATIRNLSSDAIIVDGRIVEQECVDIKPGSEIVSGPQKEEAEDHEKKNVKIVLDIENAKCSICLNLWHDVVTVAPCLHNFCNGCFSEWLRRSSSNSRDKSQSAACPQCRTTVQSVGRNHFLHNIEEAILQAFSSLQRSDEEIALLESYASVLGQQKNQSRKRRFSRSSDDTDNSDLPCPQCRNEFGGFRCSPGSVHLQCSGCGGMMPARSNISIPQKCLGCDKAFCGAYWYSQGVSSSHCNLICNQDTLKSITERCIQQSGKTLQVVISEWISKFDNMEIDRSRLQLNNVDAITSRTYICNHCYSKFVDFLLYWFRVSLPQNLLPRDAAERESCWYGFMCRTQHHRPDHAKKLNHVCRPTRGNQP

SEQ ID NO: 177405 - protein, 453 aa, Zea Mays
MDAGECSTSKPPQPSAASPSSPTVWARLVPADSACPTVEVAEDDSVVCSLVAPPCGGEEVAWCEIRRNAGDASSATIRNLSSDAIIVDGRIVEQECVDIKPGSEIVSGPQKEGHLIYTFEITEAEDHEKKNVKIVLDIENAKCSICLNLWHDVVTVAPCLHNFCNGCFSEWLRRSSSNSRDKSQSAACPQCRTTVQSVGRNHFLHNIEEAILQAFSSLQRSDEEIALLESYASVKSNMVLGQQKNQSRKRRFSRSSDDTDNSDLPCPQCRNEFGGFRCSPGSVHLQCSGCGGMMPARSNISIPQKCLGCDKAFCGAYWYSQGVSSSHCNLICNQDTLKSITERCIQQSGKTLQVVISEWISKFDNMEIDRSRLQLNNVDAITSRTYICNHCYSKFVDFLLYWFRVSLPQNLLPRDAAERESCWYGFMCRTQHHRPDHAKKLNHVCRPTRGNQP

SEQ ID NO: 177406 - protein, 146 aa, Zea Mays
MAVHRLQPSPSGLQCSTARSPVLLHGPRLTGARTGRRGGFGGPRFDVQRATWRWLTSSSTASCSYNYCWPYREMLGLLYQLFKVIFPALDIRVKNVAGTYSLEHKGENDLFAHQTRLLLFQKKVIFRRIVNKMTRCLGLVGRTFFE

SEQ ID NO: 177407 - protein, 62 aa, Zea Mays
MAVHRLQPSPSGLQCSTARSPVLLHGPRLTGARTGRRGGFGGPRFDVQRATWRLFFQHLTFE

SEQ ID NO: 177408 - protein, 266 aa, Zea Mays
MTVAYLKEKPAGQGSTPSTPSAGSGMRSAAARLLGTGNGSRTLSFGSNGTSRAVSGSSRMGGGIGVSTSASGSQGMANYDGKGSYIIFNTADTLFISDLNSHDKDPIKSIHFSSSNPLCHAFDPEAKDGHDLLIGVFSGDVYSMSLRHQLQDPGKKPVSYQHFVNKDKDKDKDPSQVDAHSLPVLAVDEVVAPGSPDSTAQDVDWDPVDAHSLPLVSVDGVEAPGVLVGTVTSEPVVQLVSTVLSMSAAPPGSGNQVTEVLPVRVM

SEQ ID NO: 177409 - protein, 577 aa, Zea Mays
MASVAGSGGGASAGAGGLKTYFKTPEGRHKLQYEKTHSPAVVHYNHNGKTVAQMTVAYLKEKPAGQGSTPSTPSAGSGMRSAAARLLGTGNGSRTLSFGSNGTSRAVSGSSRMGGGIGVSTSASGSQGMANYDGKGSYIIFNTADTLFISDLNSHDKDPIKSIHFSSSNPLCHAFDPEAKDGHDLLIGVFSGDVYSMSLRHQLQDPGKKPVSYQHFVNKDKDKDKDPSQGGAASSQCTCVAWVPEREGIFVVSHADGNLYVYDKFKDGNTDWTFPTVKDQSQVLISHAKSSKGNPIARWHICQGAINGISFSPDGAYLATVGRDGYLRVFDFTKEQLIFGGKSYYGALLCCSWSADGKYLLSGGEDDLVQVWSMDDRKIVAWGEGHNSWVSAVSFDPCWSQPNSDETEENVMYRFGSVGQDTQLLLWDLALDEIAVPLRHPSGGSPTFSSGSPSAHWDNACPPTGVLQPSPRMRDVPKLSPLVAHRVHVDPLSGLEFTSESIVTICREGLIKIWARPIHSENNQQPDSSEQVIGSATAKDKMLTSSNKAVRWAADRFPRENSIFSSVRQYLVFVGAH

SEQ ID NO: 177410 - protein, 278 aa, Zea Mays
MASVAGSGGGASAGAGGLKTYFKTPEGRHKLQYEKTHSPAVVHYNHNGKTVAQMTVAYLKEKPAGQGSTPSTPSAGSGMRSAAARLLGTGNGSRTLSFGSNGTSRAVSGSSRMGGGIGVSTSASGSQGMANYDGKGSYIIFNTADTLFISDLNSHDKDPIKSIHFSSSNPLCHAFDPEAKDGHDLLIGVFSGDVYSMSLRHQLQDPGKKPVSYQHFVNKDKDKDKDPSQGGAASSQCTCVAWVPEREGIFVVSHADGNLSRMEILIGHFQLLRIKARC

SEQ ID NO: 177411 - protein, 307 aa, Zea Mays
MDAFLYIVMKFQCTCVAWVPEREGIFVVSHADGNLYVYDKFKDGNTDWTFPTVKDQSQVLISHAKSSKGNPIARWHICQGAINGISFSPDGAYLATVGRDGYLRVFDFTKEQLIFGGKSYYGALLCCSWSADGKYLLSGGEDDLVQVSAVSFDPCWSQPNSDETEENVMYRFGSVGQDTQLLLWDLALDEIAVPLRHPSGGSPTFSSGSPSAHWDNACPPTGVLQPSPRMRDVPKLSPLVAHRVHVDPLSGLEFTSESIVTICREGLIKIWARPIHSENNQQPDSSEQVIGSATAKDKMLTSSNKAE

SEQ ID NO: 177412 - protein, 470 aa, Zea Mays
MAAAPAGAQNRCVFVGNIPYDATEEQLVQICEEVGPVVSFRLVIDKETGKPKGYGFCEYKDEETALSARRNLQGYEINGRQLRVDFAESGRNTDRNREKGRGGPGMASNVDSQKRLAGTSVVGETNFHQPVGLPPAIHAASVMAGVLGGAQTANVQNGLPVQYGLGNDPLTHYLARMSRHQLHEVMAELKFLTTQNKEHSKTLLQGIPQLPKALFQAQIMLGMVTPQMMAKSQQPLGSLAQSSSHLNEPYPQPEPDAMVPVVSRPSSLPTNVLPNPVILQEQTAAIHSFPQHQHASQPQVKMFPHGQPSGITAQSPMLHQPLEHPGPPVMPTSVQQLPLTHPHLALVAAAPETLPNEIRVADQASHLTEFTHPSKLRKLEDGTSVPGMVNSSHAIYTAPLQAVGPSGPSGSYSAGAGSLQQPGNEGQITPDVESALLQQVLQLTPEQLSSLPPEQQQQVIELQKMLSAGK

SEQ ID NO: 177413 - protein, 280 aa, Zea Mays
MLGMVTPQMMQMAKSQQPLGSLAQSSSHLNEPYPQPEPDAMVPVVSRPSSLPTNVLPNPVILQEQTAAIHSFPQHQHASQPQVKMFPHGQPSGITAQSPMLHQPLGGSSSVPIQSLVTSVGLTSQVQPPFVPEHPGPPVMPTSVQQLPLTHPHLALVAAAPETLPNEIRVADQASHLTEFTHPSKLRKLEDGTSVPGMVNSSHAIYTAPLQAVGPSGPSGSYSAGAGSLQQPGNEGQITPDVESALLQQVLQLTPEQLSSLPPEQQQQVIELQKMLSAGK

SEQ ID NO: 177414 - protein, 301 aa, Zea Mays
MRLHPRLLRARSSCCSLEAQIMLGMVTPQMMQMAKSQQPLGSLAQSSSHLNEPYPQPEPDAMVPVVSRPSSLPTNVLPNPVILQEQTAAIHSFPQHQHASQPQVKMFPHGQPSGITAQSPMLHQPLGGSSSVPIQSLVTSVGLTSQVQPPFVPEHPGPPVMPTSVQQLPLTHPHLALVAAAPETLPNEIRVADQASHLTEFTHPSKLRKLEDGTSVPGMVNSSHAIYTAPLQAVGPSGPSGSYSAGAGSLQQPGNEGQITPDVESALLQQVLQLTPEQLSSLPPEQQQQVIELQKMLSAGK

SEQ ID NO: 177415 - protein, 1233 aa, Zea Mays
MVEKALFTNTLIALPTGLGKTFIAAVVMYNYFRWFPEGKIIFTCPSRPLVTQQIEACHNTVGIPQEWIIDMKGDQCPSIRSVHWKSKRVFFVTPQVLQNDIQSGICMVQQIVCLVIDEAHRASGNYAYCMVIRELLAARVPLRILALTATPGSKHSDIQSVIDNLNISELIYCDEEDSRVNQYVNTRKVELVQVPFGSDATQVADMLLDIIRPHINRLRDAGVIDHRDYSNWTQFELLKFKDKFKEVPPPNIHEIERGEIERSFVILGPLCHTRKLLLSHGTQFAHGYLDKRLKGGSLNLMHKNEFFWRLKEKMKLSSSHSITPKVQELKRLMVEHFNTDSNLKDSRIIIFSHYRESVNEIYCSLQDIDDKLVRPVEFIGQSSAGNQLKGQSQKTQQAILKKFRSGVYNVLVATSIGEEGLDIIEVDLVICFDANVSPLRMIQRMGRTGRKNEGRVVVLAYEGQELQGYRKKQGDCRTMRKLLHNSERFEYHASPRMVPHVYKPEVKYVKLTIDKYIPHAKKMRVAAKEASPIPWKMSEADGQMITRYFSVCKEEVWRPSLVAFPRFQLYPSVVHKVPHSFRTTDMLTDAMKQLQDPSLFRTKCEIPLQEPANVSAVEEGLEHEGLYAANGNEEMPQECDGLEASSSVVWNENVSVPGSPVKKYPVHTFFSGDYVTVDRRGSVLITYVPVLPQKIAFSKDIKSAVWNNKDQNKAKPYRSAAGVCRTTVEFVLGTNTDKHLFVDNLSTVAMHSPECSWHGDNVDDNHVLTTVPSKTLTSPREKMDTPCNVKLPESTYSYQEDMELNSRLTVYMEEGIVPESPVVEVSHLRLEMDEAADFGAVPKRGSPKSRDERAHANVAGSHKGPLNFEKNDQLLCGENEFDGSSRLYMLDQTRAKTEEPMHPSNVKMATTTRHTPGNMLCDSFSGDYQLRSGGDASGSVQQAPKYRRLCKYGDKIKRVSSISLDGCDDRFEECNIANKDRPNQIKHAMGTKRKTKRRLDAYIDEEVGVSEDAYVSEDEDDNQSEDKYEDSFIDDQATPTEFTQTEQGDRHNGDMMGFYRQSLFTQSPVVLPSRYLDVSYNSASRTGNSSYSSEARHNYTETPKEIQTQHHTINPSPSYSFVQDRCERGIANCESSTKLDCRKRRLSFQQPLAIPVINLEPEPAPEPSPHVASRVADHLYFDDGFFENLDLDAIEAQATEQWRQKTTQSTQKPVEIKNASDMSFAPPSFDLGL

SEQ ID NO: 177416 - protein, 793 aa, Zea Mays
MIQRMGRTGRKNEGRVVVLAYEGQELQGYRKKQGDCRTMRKLLHNSERFEYHASPRMVPHVYKPEVKYVKLTIDKYIPHAKKMRVAAKEASPIPWKMSEADGQMITRYFSVCKEEVWRPSLVAFPRFQLYPSVVHKVPHSFRTTDMLTDAMKQLQDPSLFRTKCEIPLQEPANVSAVEEGLEHEGLYAANGNEEMPQECDGLEASSSVVWNENVSVPGSPVKKYPVHTFFSGDYVTVDRRGSVLITYVPVLPQKIAFSKDIKSAVWNNKDQNKAKPYRSAAGVCRTTVEFVLGTNTDKHLFVDNLSTVAMHSPECSWHGDNVDDNHVLTTVPSKTLTSPREKMDTPCNVKLPESTYSYQEDMELNSRLTVYMEEGIVPESPVVEVSHLRLEMDEAADFGAVPKRGSPKSRDERAHANVAGSHKGPLNFEKNDQLLCGENEFDGSSRLYMLDQTRAKTEEPMHPSNVKMATTTRHTPGNMLCDSFSGDYQLRSGGDASGSVQQAPKYRRLCKYGDKIKRVSSISLDGCDDRFEECNIANKDRPNQIKHAMGTKRKTKRRLDAYIDEEVGVSEDAYVSEDEDDNQSEDKYEDSFIDDQATPTEFTQTEQGDRHNGDMMGFYRQSLFTQSPVVLPSRYLDVSYNSASRTGNSSYSSEARHNYTETPKEIQTQHHTINPSPSYSFVQDRCERGIANCESSTKLDCRKRRLSFQQPLAIPVINLEPEPAPEPSPHVASRVADHLYFDDGFFENLDLDAIEAQATEQWRQKTTQSTQKPVEIKNASDMSFAPPSFDLGL

SEQ ID NO: 177417 - protein, 1466 aa, Zea Mays
MSVPPRLSVDFYDDDGFDWEAAVQEIDRACAFASASAPAPAPAPAPTPAPVHHPLPPRPPEPSASAPLHRPPAAGGGTARQSTLDRFVDSFTKRRLEKERPAPAPVQAASWGVGVEPVGGGLGRPGVRAGEGCSGQANERAVEDRFIESFTRRQQEKERAASEVAPALAGGQGRPAARAGKGCSGRGNRAGKGCSRRPSMEIEYGLCAVSLDHEAVKTWIYPTNVEVREYQKYMVEKALFTNTLIALPTGLGKTFIAAVVMYNYFRWFPEGKIIFTCPSRPLVTQQIEACHNTVGIPQEWIIDMKGDQCPSIRSVHWKSKRVFFVTPQVLQNDIQSGICMVQQIVCLVIDEAHRASGNYAYCMVIRELLAARVPLRILALTATPGSKHSDIQSVIDNLNISELIYCDEEDSRVNQYVNTRKVELVQVPFGSDATQVADMLLDIIRPHINRLRDAGVIDHRDYSNWTQFELLKFKDKFKEVPPPNIHEIERGEIERSFVILGPLCHTRKLLLSHGTQFAHGYLDKRLKGGSLNLMHKNEFFWRLKEKMKLSSSHSITPKVQELKRLMVEHFNTDSNLKDSRIIIFSHYRESVNEIYCSLQDIDDKLVRPVEFIGQSSAGNQLKGQSQKTQQAILKKFRSGVYNVLVATSIGEEGLDIIEVDLVICFDANVSPLRMIQRMGRTGRKNEGRVVVLAYEGQELQGYRKKQGDCRTMRKLLHNSERFEYHASPRMVPHVYKPEVKYVKLTIDKYIPHAKKMRVAAKEASPIPWKMSEADGQMITRYFSVCKEEVWRPSLVAFPRFQLYPSVVHKVPHSFRTTDMLTDAMKQLQDPSLFRTKCEIPLQEPANVSAVEEGLEHEGLYAANGNEEMPQECDGLEASSSVVWNENVSVPGSPVKKYPVHTFFSGDYVTVDRRGSVLITYVPVLPQKIAFSKDIKSAVWNNKDQNKAKPYRSAAGVCRTTVEFVLGTNTDKHLFVDNLSTVAMHSPECSWHGDNVDDNHVLTTVPSKTLTSPREKMDTPCNVKLPESTYSYQEDMELNSRLTVYMEEGIVPESPVVEVSHLRLEMDEAADFGAVPKRGSPKSRDERAHANVAGSHKGPLNFEKNDQLLCGENEFDGSSRLYMLDQTRAKTEEPMHPSNVKMATTTRHTPGNMLCDSFSGDYQLRSGGDASGSVQQAPKYRRLCKYGDKIKRVSSISLDGCDDRFEECNIANKDRPNQIKHAMGTKRKTKRRLDAYIDEEVGVSEDAYVSEDEDDNQSEDKYEDSFIDDQATPTEFTQTEQGDRHNGDMMGFYRQSLFTQSPVVLPSRYLDVSYNSASRTGNSSYSSEARHNYTETPKEIQTQHHTINPSPSYSFVQDRCERGIANCESSTKLDCRKRRLSFQQPLAIPVINLEPEPAPEPSPHVASRVADHLYFDDGFFENLDLDAIEAQATEQWRQKTTQSTQKPVEIKNASDMSFAPPSFDLGL

SEQ ID NO: 177418 - protein, 464 aa, Zea Mays
MPQECDGLEASSSVVWNENVSVPGSPVKKYPVHTFFSGDYVTVDRRGSVLITYVPVLPQKIAFSKDIKSAVWNNKDQNKAKPYRSAAGVCRTTVEFVLGTNTDKHLFVDNLSTVAMHSPECSWHGDNVDDNHVLTTVPSKTLTSPREKMDTPCNVKLPESTYSYQEDMELNSRLTVYMEEGIVPESPVVEVSHLRLEMDEAADFGAVPKRGSPKSRDERAHANVAGSHKGPLNFEKNDQLLCGENEFDGSSRLVSEDAYVSEDEDDNQSEDKYEDSFIDDQATPTEFTQTEQGDRHNGDMMGFYRYLDVSYNSASRTGNSSYSSEARHNYTETPKEIQTQHHTINPSPSYSFVQDRCERGIANCESSTKLDCRKRRLSFQQPLAIPVINLEPEPAPEPSPHVASRVADHLYFDDGFFENLDLDAIEAQATEQWRQKTTQSTQKPVEIKNASDMSFAPPSFDLGL

SEQ ID NO: 177419 - protein, 795 aa, Zea Mays
MGKCLDKALRCQVSWTQGLLYFPITEKVSMKYIAHYRILMINLSDLLNSLVKAQQDILGKRTCGMSEGLCSVDPMVFEVMCCPVVLGVHLGNQLKGQSQKTQQAILKKFRSGVYNVLVATSIGEEGLDIIEVDLVICFDANVSPLRMIQRMGRTGRKNEGQELQGYRKKQGDCRTMRKLLHNSERFEYHASPRMVPHVYKPEVKYVKLTIDKYIPHAKKMRVAAKEASPIPWKMSEADGQMITRYFSVCKEEVWRPSLVAFPRFQLYPSVVHKVPHSFRTTDMLTDAMKQLQDPSLFRTKCEIPLQEPANVSAVEEGLEHEGLYAANGNEEMPQECDGLEASSSVVWNENVSVPGSPVKKYPVHTFFSGDYVTVDRRGSVLITYVPVLPQKIAFSKDIKSAVWNNKDQNKAKPYRSAAGVCRTTVEFVLGTNTDKHLFVDNLSTVAMHSPECSWHGDNVDDNHVLTTVPSKTLTSPREKMDTPCNVKLPESTYSYQEDMELNSRLTVYMEEGIVPESPVVEVSHLRLEMDEAADFGAVPKRGSPKSRDERAHANVAGSHKGPLNFEKNDQLLCGENEFDGSSRLVSEDAYVSEDEDDNQSEDKYEDSFIDDQATPTEFTQTEQGDRHNGDMMGFYRYLDVSYNSASRTGNSSYSSEARHNYTETPKEIQTQHHTINPSPSYSFVQDRCERGIANCESSTKLDCRKRRLSFQQPLAIPVINLEPEPAPEPSPHVASRVADHLYFDDGFFENLDLDAIEAQATEQWRQKTTQSTQKPVEIKNASDMSFAPPSFDLGL

SEQ ID NO: 177420 - protein, 809 aa, Zea Mays
MGKCLDKALRCQVSWTQGLLYFPITEKVSMKYIAHYRILMINLSDLLNSLVKAQQDILGKRTCGMSEGLCSVDPMVFEVMCCPVVLGVHLGNQLKGQSQKTQQAILKKFRSGVYNVLVATSIGEEGLDIIEVDLVICFDANVSPLRMIQRMGRTGRKNEGQELQGYRKKQGDCRTMRKLLHNSERFEYHASPRMVPHVYKPEVKYVKLTIDKYIPHAKKMRVAAKEASPIPWKMSEADGQMITRYFSVCKEEVWRPSLVAFPRFQLYPSVVHKVPHSFRTTDMLTDAMKQLQDPSLFRTKCEIPLQEPANVSAVEEGLEHEGLYAANGNEEMPQECDGLEASSSVVWNENVSVPGSPVKKYPVHTFFSGDYVTVDRRGSVLITYVPVLPQKIAFSKDIKSAVWNNKDQNKAKPYRSAAGVCRTTVEFVLGTNTDKHLFVDNLSTVAMHSPECSWHGDNVDDNHVLTTVPSKTLTSPREKMDTPCNVKLPESTYSYQEDMELNSRLTVYMEEGIVPESPVVEVSHLRLEMDEAADFGAVPKRGSPKSRDERAHANVAGSHKGPLNFEKNDQLLCGENEFDGSSRLVSEDAYVSEDEDDNQSEDKYEDSFIDDQATPTEFTQTEQGDRHNGDMMGFYRQSLFTQSPVVLPSRYLDVSYNSASRTGNSSYSSEARHNYTETPKEIQTQHHTINPSPSYSFVQDRCERGIANCESSTKLDCRKRRLSFQQPLAIPVINLEPEPAPEPSPHVASRVADHLYFDDGFFENLDLDAIEAQATEQWRQKTTQSTQKPVEIKNASDMSFAPPSFDLGL

SEQ ID NO: 177421 - protein, 494 aa, Zea Mays
MAAEQGRSLAETPTWSVATVTTLMVAACFLVERSLSRFAKWLRKTKRKAMLAALEKIREELMLLGVISLLLSQTARFISEICVPSSLFTSRFYICSESDYQDLLRNTDANQTALDKNMFGGQRLHVCGEGHEPFVSYEGLEQLHRFLFILGITHVLYSFVTVVLSMIKIYSWRKWETLAGPIAAEELKARRTKVMRRQSTFVFNNASHPWSKNKILIWMLCFLRQFKGSIIRSDYLALRLGFVTYHKLPHSYDFHKYMVRSMEDDYNGTIGISWPLWAYAIVCILINVHGINIYFWLSFVPVILALEVAEATAPYVGSQLKLRDDLFWFGKPRVLWWLIQFISFQNAFELATFLWSLWELSAQTCFMKHYYMVAIRLISGLLVQFWCSYSTLPLNVIISQMGSKFKKSLVSENVRESLHSWCKRVKDRSRHNPLFSRNGTLTTRSVCSLDTTYETDHETNTVCTLSRTASATSLDDQLTVVTVDDEPSCIEKDV

SEQ ID NO: 177422 - protein, 395 aa, Zea Mays
MAAEQGRSLAETPTWSVATVTTLMVAACFLVERSLSRFAKWLRKTKRKAMLAALEKIREELMLLGVISLLLSQTARFISEICVPSSLFTSRFYICSESDYQDLLRNTDANQTALDKNMFGGQRLHVCGEGHEPFVSYEGLEQLHRFLFILGITHVLYSFVTVVLSMIKIYSWRKWETLAGPIAAEELKARRTKVMRRQSTFVFNNASHPWSKNKILIWMLCFLRQFKGSIIRSDYLALRLGFVTYHKLPHSYDFHKYMVRSMEDDYNGTIGISWPLWAYAIVCILINVHGINIYFWLSFVPVILVLLVGTELQHVIAQLALEVAEATAPYVGSQLKLRDDLFWFGKPRVLWWLIQFISFQNAFELATFLWSLVRIFLIRMIGIKLFGQTANSTRI

SEQ ID NO: 177423 - protein, 225 aa, Zea Mays
MACPYQLSKDGIELQFATNHVGHFLLTSLLLDKMKSTAAETGVQGRIINVSSVAHKRSDGTCFELNKLNDKARYKPFIAYAHSKLANILHTNELSRRFQEEGCNLTANSLHPGVIITNIIRYVAGNSALISALSPVANLVLKSVPRGAATTCYLALHPNVKGVSGKYFADCNEATPTAVARDSELAKRLWSFSEELVKIYADMSQTTQASEEEETTVTKDVFQDK

SEQ ID NO: 177424 - protein, 259 aa, Zea Mays
MEMDLSCLSSVRDFARSFNSSHKHLNLLINNAGIMACPYQLSKDGIELQFATNHVGHFLLTSLLLDKMKSTAAETGVQGRIINVSSVAHKRSDGTCFELNKLNDKARYKPFIAYAHSKLANILHTNELSRRFQEEGCNLTANSLHPGVIITNIIRYVAGNSALISALSPVANLVLKSVPRGAATTCYLALHPNVKGVSGKYFADCNEATPTAVARDSELAKRLWSFSEELVKIYADMSQTTQASEEEETTVTKDVFQDK

SEQ ID NO: 177425 - protein, 877 aa, Zea Mays
MLDFCAPHGPAKLPVASVAGVRVAGRWLWRSAAVGAVRHGVSARASSFGSRIGLDSQNFHTRDLSQLLWIGPVPGDIAEIEAYCRIFRAAEQLHTAVMSALCDPETGECPVRYDVESEDLPVLEDKVAAVLGCMLALLNRGRNEVLSGRSGVASAFQGSEDSTADRIPPLALFRGDMKRCCESMQVALASYLVPSEPRGLDIWRKLQRLKNTCYDAGFPRADGYPCPTLFANWFPVYLSIVSDDSGMDELEVAFWRGGQVSEEGLAWLLGKGFKTIVDLREEDVKDDLYLSAVQEAVSSGKIEVVNMPVEIGTAPSAEQVQQFAALVSDGAKKPIYLYSKEGVSRTSAMVSRWKQYVTRSERLAVQNHSLNGNGNILTNHKTMQHTGIPSSSPNGAENGMITESDRTMNNGESSEIDIDTARHNLEVTNALCNDQSTQQGEMPDTVAELLSNFKLESNPLKAQFPTCDVFSRKEMTKFFRSKTVYPKSVLNSRRRSSSLVIRRKQNLCTERSGTNDYEAAEFAVLRSSNGKSFDSDYILSVASGITDGKPSNNEASLIEEKEREVSVATIDTRASANSSNRKVQVGSQESAEKNSTPYLERNKSDNVDRNMCASATGVVRLQSRRKAEMFLVRTDGFSCTREKVTESSLAFTHPSTQQQMLMWKSPPKTVLLLKKLGDELMEEAKEVASFLHHQEKMNVLVEPDVHDTFARIPGYGFVQTFYTQDTSDLHERIDFVTCLGGDGLILHASNLFRTSVPPVVSFNLGSLGFLTSHNFEGFRQDLRDLIHGNNTLGIYITLRMRLRCEIFRKGKSMPGKVFDVLNEVVVDRGSNPYLSKIECYEHNHLITKVQADGVIVATPTGSTAYSTAAGGSMDCYN

SEQ ID NO: 177426 - protein, 94 aa, Zea Mays
MLFTPICPHSLSFRPVILPDSARLELKIPDEARSNAWVSFDGKRRQQLSRGDSVRISMSQHPLPTVNKSDQTGDWFRSLIRCLNWNERLDQKAL

SEQ ID NO: 177427 - protein, 472 aa, Zea Mays
MNLDDDQFHNEVTYLFGLKHKNIVQLKAYCAESRWEAIELRRKYVMAESRKRLLCFECINNKSLDKHLSAESHGVEWHIRYEIIKGICHGLHYLHTDCQIVHLDLKPENILLDDNMEPKITDFGMSRLFGLQQSKIITKTCGGTLGYMAPEYLLKGLISVKADIFSLGVIIIEVMTGGRNYPTCEKSCEQFAVDVVGRWRKRLLEEAGRYTPLEKYVEQVETCILIGLMCVDDDPNKRPTTLDIIERLTKVDVTNTDRGPPKTLEAATGLTGHPNLATRSFLDRFRRTIVIGMLKKALKIQDVSQLEQLLAKEVLLELHKIGTNATGNRSFLERLHASITMATLVQALHSLDLDPSAALRMEVLFLALENMRGKNNSRRRSEDVLELEERPEQIRSVLEAGTRARLSDEEHMPSVSVQAEDQAFPKPKLAKVRATAPVCVSAVWLAAGIGFLCGFTLGEMRGLRRTRVHERT

SEQ ID NO: 177428 - protein, 71 aa, Zea Mays
MEHVIPSTTKKRKQISTCCAPSSVPPVEARRIRRQLLNERRLTSSGAFTSSQRASTLQCGHFDPNFIKALK

SEQ ID NO: 177429 - protein, 144 aa, Zea Mays
MSGGTPAASSSLRAALSYCVRQVRAYDYHHYLCLLHLAPAVRKAAFTFRAFNIQTARAMDVVSDPRTGLMRLLWWKEAVDKVFGNKLVEHLVAHALSSVIADHKVSKHWLKRSVEARINDTNREEGTIPGTSAELERCQTCMGN

SEQ ID NO: 177430 - protein, 66 aa, Zea Mays
MEKSSFVLTADTRIIIQEHYRFLNLFSLSSRSSNSQNKFLDFYWEGFCLPGYVIILLLHSYIYSVL

SEQ ID NO: 177431 - protein, 67 aa, Zea Mays
MESSAKTRLPLHSIELFILRRRSAPLSNFGIIFTHILFTIGGESSLKRALMTPFLVIHAKGERVLAQ

SEQ ID NO: 177432 - protein, 184 aa, Zea Mays
MLNYPQGQLLTQDDVFESTATQDSPATSFAKRSTSARQENMVRRILEYYDASKNLENVDEYTDQPTNNELSSPPKRYEASSLLVMRLMYILGRCPCVATVYKIFNKILVHKKEHRIFQLQQKRYIPHLQGQGCIFFLLYTSANNKNQRTIQSIDTLAHLKSNQVMVVYLLLRALHISLSSSYTS

SEQ ID NO: 177433 - protein, 132 aa, Zea Mays
MFPRGGNNPPELLADLRASWVPKPPSLPCAYKTRAIVLLLPPVRPINHVTSGAHRFGESREEAPPLRISHAVNPHLRSVPGSPQKPRGPIPRLGCVSTPVGASKFLADPGCHRWSRSAPWIGFNSRSEMTNK

SEQ ID NO: 177434 - protein, 180 aa, Zea Mays
MEVLMEAMKHIRDMPVRSRSSLVGSCFMKWMQLERRTSRPTSRGGSPWATGPARPRCRSSGTTPSPPTPLSDSSSSPVYLRYCLNVWDVGGQKTIMSYWRKFFEQTNGLVWFADSSHIRRLDDCRAELHNLLKEERLVGASLLIFANKQDMQGALKPTGIAKSHSPTAHRRLVLPPVHKV

SEQ ID NO: 177435 - protein, 130 aa, Zea Mays
MLYYGCSEASNFSVYCNTWVHLVTLRQLIAAWFSRRYTRFKKRSADFHGRAADLVHSLRGTAMPRRQALEEEQCREEKGISTVPKHKYASKACSPKDLNNMLHENLYFIHNTPEMDWAWAANRLIEKDEA

SEQ ID NO: 177436 - protein, 111 aa, Zea Mays
MAVMTSSAGPSTTTHFIAAIPLVLLLISAASPSRCQAWNHHTSATQPQPSLLGTAPAVARRGPSLRVRCYNLYSEEECSNRYCHSVCVVRDRKYRQGAYCAETRWECCCPH

SEQ ID NO: 177437 - protein, 325 aa, Zea Mays
MIGSAAWCCSSSLPPRRRLCFWRRRRRMLRCRGCSTRPPRPTGRSPSSSSATGAAVVGQKLDIDFVISTGDNIYDDGIANTSDPLFKESFSNIYTANSLQKPWYLVLGNHDYTGNALAQLDPAIRKVDSRYTAIAKSFIVNSGIADFFLVDTTPFIVHYWNNTKFDWRGVAPRDTYIANLLKDLKCALTASKAPWKIVVGHHPISSACGHGNNTELEELLLPVLTTHGVDMYLNGHDHCLQRVSSRDSRLQLLTSGGGSKAWAGKFKPTLDKVEFLYDGQGFMSMRLSRTEARLAFFDVAGSVLHCWTMHAQKLTTTTTAAAARH

SEQ ID NO: 177438 - protein, 343 aa, Zea Mays
MAPAHDRLRRLVLLLVVATAAAALLLAPTTADAALPRVQHTPTKADGSLAILVVGDWGRRGQFNQTLVAQQMGVVGQKLDIDFVISTGDNIYDDGIANTSDPLFKESFSNIYTANSLQKPWYLVLGNHDYTGNALAQLDPAIRKVDSRYTAIAKSFIVNSGIADFFLVDTTPFIVHYWNNTKFDWRGVAPRDTYIANLLKDLKCALTASKAPWKIVVGHHPISSACGHGNNTELEELLLPVLTTHGVDMYLNGHDHCLQRVSSRDSRLQLLTSGGGSKAWAGKFKPTLDKVEFLYDGQGFMSMRLSRTEARLAFFDVAGSVLHCWTMHAQKLTTTTTAAAARH

SEQ ID NO: 177439 - protein, 315 aa, Zea Mays
MTMELDFTREAKNSERTASCFRKNSVVKVPYVFWQLTTREVLTMEFCYGHKVNDLDFLRKTDISPTKVAKALIELFGEMIFVHGFVHGDPHPGNILVSPEGHGKFSLVLLDHGIYRELDQKFRLDYCRLWKALILLDSNKILELGEQFGVGKYAKYFPVIFTGRTIESKSALGTQMSGEEQRRLKEDLNSLGMDDISSFMESLPPDFYVILRTDGLLRSILGNLGAPRHVRLLTYARCAIHGLEKQHKMESDVQLCSGAIRRMFLNVKTNVSYLRLRVIIEIAVLLAKANGAKQKVVNKLRQMLQETSQGFHRRM

SEQ ID NO: 177440 - protein, 140 aa, Zea Mays
MSGEEQRRLKEDLNSLGMDDISSFMESLPPDFYVILRTDGLLRSILGNLGAPRHVRLLTYARCAIHGLEKQHKMESDVQLCSGAIRRMFLNVKTNVSYLRLRVIIEIAVLLAKANGAKQKVVNKLRQMLQETSQGFHRRM

SEQ ID NO: 177441 - protein, 102 aa, Zea Mays
MKMLNGIHRVLKPEGIFVSIAFGQPHFRRRFFEAPELTWSIEYSTFGDSFHYFFYTLKKGKRSLESSSYQNTLPSPVAPRINMVHEELESEDFIFLTNLDGL

SEQ ID NO: 177442 - protein, 657 aa, Zea Mays
MSMPETFTLKVGEATPAAAGRPSAGPVYRSIYAKDGLMDLPQDIQSPWDLFSGAVKKYPTNRMVGQRQVTDGKAGEYVWQTYEEVCQKVMRIGSAIRSLGVEPGAHCGIYGSNCPEWVMAMQACNSQGICYVPLYDTLGAKAVEFIMYHAEISIAFVQESKIKSILAVLPKCTAHLRAIVSFGDFASEMKAEAERLGVSCFSWEEFSSMGKQDYQLPNKRKEDICTIMYTSGTTGDPKGVIITNKAIVAGVMTTEHLLKETDKVITEEDSYFSYLPLAHIFDQVIENYCISKGASIGFWQGDIRYLMEDVQVMKPTIFCGVPRVYDRIYTGINMKIQSGGMIARHLFQYAYNYKLANMRKGLKQHEASPFFDKIVFSKIKEGLGGRIRLMIAGAAPLPGQIEEFMRVTTCSVVVQGYGCFTSIANIFSMIGTVGPPVTTIEARLESVPEMGYDALSDTPRGEICLRGHTMFSGYYKRPSLTEEVFSDGWFHTGDIGEWQSNGTMKIIDRKKNIFKLSQGEYVAVEVLERAYLQSPLVASVWVYGNSFESFLVAVAVPERQALEEWAAANSKAGDFAELCADPKARTYVRDQLNQTGKKLGLRGFEMLKAVYLEPVPFSIEKDLVTPTFKLKRPQLLKYYKDRVDQMYKDAKEGRAAP

SEQ ID NO: 177443 - protein, 437 aa, Zea Mays
MSMPETFTLKVGEATPAAAGRPSAGPVYRSIYAKDGLMDLPQDIQSPWDLFSGAVKKYPTNRMVGQRQVTDGKAGEYVWQTYEEVCQKVMRIGSAIRSLGVEPGAHCGIYGSNCPEWVMAMQACNSQGICYVPLYDTLGAKAVEFIMYHAEISIAFVQESKIKSILAVLPKCTAHLRAIVSFGDFASEMKAEAERLGVSCFSWEEFSSMGKQDYQLPNKRKEDICTIMYTSGTTGDPKGVIITNKAIVAGVMTTEHLLKETDKVITEEDSYFSYLPLAHIFDQVIENYCISKGASIGFWQGDIRYLMEDVQVMKPTIFCGVPRVYDRIYTGINMKIQSGGMIARHLFQYAYNYKLANMRKGLKQHEASPFFDKIVFSKIKEGLGGRIRLMIAGAAPLPGQIEEFMRVTTCSVVVQGYGSGRPNVQGCQGGESCAMSP

SEQ ID NO: 177444 - protein, 358 aa, Zea Mays
MEDVQVMKPTIFCGVPRVYDRIYTGINMKIQSGGMIARHLFQYAYNYKLANMRKGLKQHEASPFFDKIVFSKIKEGLGGRIRLMIAGAAPLPGQIEEFMRVTTCSVVVQGYGLTESCAGCFTSIANIFSMIGTVGPPVTTIEARLESVPEMGYDALSDTPRGEICLRGHTMFSGYYKRPSLTEEVFSDGWFHTGDIGEWQSNGTMKIIDRKKNIFKLSQGEYVAVEVLERAYLQSPLVASVWVYGNSFESFLVAVAVPERQALEEWAAANSKAGDFAELCADPKARTYVRDQLNQTGKKLGLRGFEMLKAVYLEPVPFSIEKDLVTPTFKLKRPQLLKYYKDRVDQMYKDAKEGRAAP

SEQ ID NO: 177445 - protein, 467 aa, Zea Mays
MTGTAVNPLFRAAYLAKSCKQDVTLVVPWLCKSDQELVYPNSMTFSSPEEQEKYMRNWLEERVGFKTDFKISFYPGKFQKERRSIIPAGDTSQFIPSKEADIAILEEPEHLNWYHHGKRWTDKFNHVIGVVHTNYLEYIKREKNGAIQAFFVKHINNLVARAYCHKILRLSGATQDLPKSTICNVHGVNPKFLEVGERIAAERESGQQSFSKGAYFLGKMVWAKGYRELIDLFAKHNSDLEGFKLDIYGNGEDSHEVQSAARKLNLNLNFHKGRDHADDSLHGYKVFINPSISDVLCTATAEALAMGKFVVCADHPSNDFFRSFPNCLTYKTSEDFVARVKEAMARDPQPLTPEQRYNLSWDAATQRFMEHSELDKVLNGDSNSECGGSVGTETGKSAGTMMRRSASAPNMSDVVDGGLAFVHYCFTGSELLRLSTGAVPGTRDYNKQHSLDLRLPPPQVQNPVYGW

SEQ ID NO: 177446 - protein, 616 aa, Zea Mays
MHIFSSFAEKWFFMIQRAHENLKNKKSLTFAPEASEDVLPLDLGELLAYFVKQSVPLFDQLGIKRDVCDKLVESLCSKRKDHPAYSFLSATESSSLKNDNVGNELDLRIASALQSTGHHYEGGFWSDGHKSDISGKRHVAIVTTASLPWMTGTAVNPLFRAAYLAKSCKQDVTLVVPWLCKSDQELVYPNSMTFSSPEEQEKYMRNWLEERVGFKTDFKISFYPGKFQKERRSIIPAGDTSQFIPSKEADIAILEEPEHLNWYHHGKRWTDKFNHVIGVVHTNYLEYIKREKNGAIQAFFVKHINNLVARAYCHKILRLSGATQDLPKSTICNVHGVNPKFLEVGERIAAERESGQQSFSKGAYFLGKMVWAKGYRELIDLFAKHNSDLEGFKLDIYGNGEDSHEVQSAARKLNLNLNFHKGRDHADDSLHGYKVFINPSISDVLCTATAEALAMGKFVVCADHPSNDFFRSFPNCLTYKTSEDFVARVKEAMARDPQPLTPEQRYNLSWDAATQRFMEHSELDKVLNGDSNSECGGSVGTETGKSAGTMMRRSASAPNMSDVVDGGLAFVHYCFTGSELLRLSTGAVPGTRDYNKQHSLDLRLPPPQVQNPVYGW

SEQ ID NO: 177447 - protein, 691 aa, Zea Mays
MAVGDALRRLCEEIGWSYAVFWKAIGAADPVHLVQEDGYCGHTSCPVGSEPSESLPSDAGCSVPAANTICSLVHSVMASQVHVVGQGTVGRAAFSGNHQWIVRGTANGHGLSSEVAAEMNNQFRVGIQTIAIIPVLPRGVLQLGSAGLVMENINFVMFAKKLCSQLNNRSSMAASASAKNALSQHGQSRPDTATVSTRTPPNALLNASLLKVAQQSGHPVREHVVYAEPDLRFRQQASFCENQFGSNLQSVVMNSSLTSPSLASVKKQPLLMNSIGQLQFSNYVHSSADLARDVILKSLVRQDSSVCETTNMNMHRGRYMVSNDINGSGDFDFLPVGAKASRANLSTSVSSQILDHTTRTLQQKQSLVPFKVTQSSEFNKKMENPENGSFQTPSVPTSESGGQVSNSFNMDQENQLIMSNNVRQVQKINRFSDPSANVSTQRMKNRDVCESGMPIERGSSLLVEPGADNDLFDMLGSEFHQFSHNVGSDLVTWSGTESQNSDRDGPESSIYLNSSPLFSSLDNELHYSGILSLTDTDQLLDAVISNVNPSSKQCPDDSASCKTALTDVPSTSHLGSIDLKRCESSGVPSVLIKHELAQLVKQPCIFDKSENCLSQNNGMHKSQIRLWIESGQNMKCESTSASNSKGLDTPSKANRKRSRPGESAKPRPKDRQLIQDRIKELRELVPNGAKH

SEQ ID NO: 177448 - protein, 79 aa, Zea Mays
MEPPTCSKPEHAAAVLLTSSCPGKKKPLYLYDMWAQGHGNLRTRDEVVHNMKSMVGMKVEPAPEIRARKLRLSSRKEPT

SEQ ID NO: 177449 - protein, 73 aa, Zea Mays
MLDTGRRMEVSFEGYSVKNIPRGDNEQADLLAKSAAQELPLPSELFFETLKASSVELMERAVLTISPVHSKDW

SEQ ID NO: 177450 - protein, 59 aa, Zea Mays
MQEDILNFYSLLSVFSLLSLMSPFPPTIPVTHAARQSSSSCRARHQLSCCSLCSTSPAP

SEQ ID NO: 177451 - protein, 270 aa, Zea Mays
MDPRFPPPAPSSCFGGGGELPARGHHRRAHSETFIRLPDADLLLDPDADFGFSDIDFPSLSDDSPAASDPTPQPQAPPLQPPLQQAASPASAAPPRPPSGAHMRSLSLDAAFFDGLSLQGGGGGGGVRGGMAGHKRSGSMDGDTSPFEGESAPPSVLPDYAKKAVPDDKLAELALLDPKRAKRILANRQSAARSKERKIKYTSELERKVQTLQTEATTLSAQLTLLQRDTSGLTTENRELKLRLQAMEEQAKLRDGMSLSFFGRSKATVI

SEQ ID NO: 177452 - protein, 92 aa, Zea Mays
MEEQAKLRDALNDALREEVQRLKIAAGQVPNMNGNPFNGGLSQQQQMPSYFSQPQQMQYFSGHQGQHHHPKHDPQNSSNGGGQPLSDSMDFM

SEQ ID NO: 177453 - protein, 55 aa, Zea Mays
MQKAGMGKRRGDAQTEKLLHYRSRYYAPPPSCCHCHSLESIIFLARLNSRTKGSD

SEQ ID NO: 177454 - protein, 319 aa, Zea Mays
MSSYHVLDLCKTNKGSWSGSESSASKRSLPFLAQDFESDIDTRLLKLVNKIASGSCGDMFLGTYSGEEVAVKVLNPQNLNKNVWSEFKQEINMLREVDHPNIVRFIGSCTKPPQFYIITECMSRGSLFDFLHNEHNVLDLPTLLKFALDVCQGMSYLHQKGIIHRDLKSGNLLLDKNDVVKVADFGLARFQDGGGDMTAETGTYRWMAPEVINHQPYDSKADVYSFALVLWELMTSKIPYNTMTPLQAAVGVRQGLRPQIPENTHPRLINLMQRCWEATPTDRPSFEEIIPELEDIQAQAQRTSGETSQTEEDHSCSKD

SEQ ID NO: 177455 - protein, 203 aa, Zea Mays
MFLGTYSGEEVAVKVLNPQNLNKNVWSEFKQEINMLREVDHPNIVRFIGSCTKPPQFYIITECMSRGSLFDFLHNEHNVLDLPTLLKFALDVCQGMSYLHQKGIIHRDLKSGNLLLDKNDVVKVADFGLARFQDGGGDMTAETGTYRWMAPEVINHQPYDSKADVYSFALVLWELMTSKIPYNTMTPLQAAVGVRQVGSYNLV

SEQ ID NO: 177456 - protein, 132 aa, Zea Mays
MAAVAGDGGGGPEEGVGESSSPPRNPVLAPAPAASGGSGSGGGGRGGGLRDICREVFERLVNDGHRAGSELLAQLEAHFNRLPISYKLDVNIDKAEDVLIHQKVLAEAQDPDRRPAFTVRFLRVKDIICTHS

SEQ ID NO: 177457 - protein, 198 aa, Zea Mays
MSRGSLFDFLHNEHNVLDLPTLLKFALDVCQGMSYLHQKGIIHRDLKSGNLLLDKNDVVKVADFGLARFQDGGGDMTAETGTYRWMAPEVINHQPYDSKADVYSFALVLWELMTSKIPYNTMTPLQAAVGVRQGLRPQIPENTHPRLINLMQRCWEATPTDRPSFEEIIPELEDIQAQAQRTSGETSQTEEDHSCSKD

SEQ ID NO: 177458 - protein, 313 aa, Zea Mays
MAAVAGDGGGGPEEGVGESSSPPRNPVLAPAPAASGGSGSGGGGRGGGLRDICREVFERLVNDGHRAGSELLAQLEAHFNRLPISYKLDVNIDKAEDVLIHQKVLAEAQDPDRRPAFTVRFLRLEEVNVDETTNSDAHEEGADIGEALSTRSKTSYAHIHEILFSTKDKPKLLSQLSALLSDIGLNIKEAHVFSTTDGYSLDVFVVDGWPVEETDGLHKALEVSILRNEGSWSGSESSASKRSLPFLAQDFESDIDTRLLKLVNKIASGSCGDMFLGTYSGEEVAVKVLNPQNLNKNVWSEFKQEINMLRVHV

SEQ ID NO: 177459 - protein, 249 aa, Zea Mays
MEGIQQLPADVLVSVISRAAAGPRDACIAATVSPAFRAAADSDTVWSRFLPADLAPLVYPTPPPRSKKELFLRLSETHALVEDGLMSAWLDRETGAKSYMIAARAMAIIWVDTPDYWRWIVREDSRMLSGDTRYAAYLVFKMADDCFGLDSPLQEASVSVGEGGTSTAHWIRLQSYHVGDEENGVTEEGAPPRLPHERPDGWMEVELGDWYNHGGDDDLVVRASVKEARFGGNWKKGLIVQGLEIRPKN

SEQ ID NO: 177460 - protein, 355 aa, Zea Mays
MCREIVKSPEFSGKITFPVSLKQPGPRDGTIQCFIKRDTSTQIYSLYLSFSSAVPVENGKFLLSAKRNCRATYTEYIISINSGDTSRCTSNNTYIGKLRSNFLGTKFVIYDTHPPYNGTSQTVAGKTSQRFYSKKGSTKVSCRWYSIAQISYELNVLGTRGPRRMNCVMHSIPASCLEAGGSVPCQPDSIAAHSVGGSFSSVSLSKSSTMDHSMHFTSSRLSDAITGDGIVNRGQALNDADDEECKDMPLILRNKAPRWHEQLQCWCLNFRGRVTVASVKNFQLVAATQPAAGALTPSQAAPQPAPPPPPDQEKVILQFGKVGKDIFTMDYCYPLSAFQAFAICLSSFDTKLACE

SEQ ID NO: 177461 - protein, 162 aa, Zea Mays
MPFRSIVRDVRDGFGSLSRRGFEVRFLSHRRGKSHGAVHELHDPVLVVQSSCWASLPPELLRDVIERLETSEDTWPSRKHVVACAAVCRTWREMCREIVKSPEFSGKITFPVSLKQPGPRDGTIQCFIKRDTSTQIYSLYLSFSSVVTDSQYQAQYSIEKGR

SEQ ID NO: 177462 - protein, 340 aa, Zea Mays
MLFLFCLQPGPRDGTIQCFIKRDTSTQIYSLYLSFSSAVPVENGKFLLSAKRNCRATYTEYIISINSGDTSRCTSNNTYIGKLRSNFLGTKFVIYDTHPPYNGTSQTVAGKTSQRFYSKKGSTKVSCRWYSIAQISYELNVLGTRGPRRMNCVMHSIPASCLEAGGSVPCQPDSIAAHSVGGSFSSVSLSKSSTMDHSMHFTSSRLSDAITGDGIVNRGQALNDADDEECKDMPLILRNKAPRWHEQLQCWCLNFRGRVTVASVKNFQLVAATQPAAGALTPSQAAPQPAPPPPPDQEKVILQFGKVGKDIFTMDYCYPLSAFQAFAICLSSFDTKLACE

SEQ ID NO: 177463 - protein, 316 aa, Zea Mays
MTGILRDFLESSGVVVGSTDDILLYTLSEEELFELFQIVSSQLSFIWNEFLKFHRTHKDKVMGYLHDMWDINRKAEWSIWIIHSKIEIPHRYLRSMNDDSPRHLIRISSSRKPIQNSMSQAELHRKSIAQMKINTPSVQDMHIYADPSCIPVVRIEQHVMVIPQHCSSKDFLTDASEPARTIVPPPLLQGQSLGEETCGFKSGRILRAVIFVHGFQGHHLDLRLVKNQWLLLDPGAECLLSQINEDRTSGDFKEMGRRLANEVVAFLKRKVDKYSRNGGCKEIKLSFVGHSIGNIILRSALTGRFKLAASKIFPPS

SEQ ID NO: 177464 - protein, 755 aa, Zea Mays
METAHEVAIYIDRFHNLDLFQQGWYRVKISALWEDDENRAPISPARVTQYEAIDIGVKSSFGFWKIDDVDNSFYTQPFLVKYSRQDIYLSVMVSFYIPNSEDEGPATSSVILKFELIYIPTLGNAWTDVQDSSDDTDLIPVHEFRIPHRALLGLHSYCPVHFDALHSALVDLTIHIVYLKAAVTKSSLKPLEQSFGSKSYGIVKASLISREILLEEVKKISNAVGSTLEDLDRTDLTLGKYETVQPSKSASPSYSYGQGTPTKCSPQMTGILRDFLESSGVVVGSTDDILLYTLSEEELFELFQIVSSQLSFIWNEFLKFHRTHKDKVMGYLHDMWDINRKAEWSIWIIHSKIEIPHRYLRSMNDDSPRHLIRISSSRKVHHDPIQNSMSQAELHRKSIAQMKINTPSVQDMHIYADPSCIPVVRIEQHVMVIPQHCSSKDFLTDASEPARTIVPPPLLQGQSLGEETCGFKSGRILRAVIFVHGFQGHHLDLRLVKNQWLLLDPGAECLLSQINEDRTSGDFKEMGRRLANEVVAFLKRKVDKYSRNGGCKEIKLSFVGHSIGNIILRSALTEPKLQPFLKNLYTYMSISGPHLGYWYSPNSLFNSGLWLMKRLKGMQCMHQLTFSDDHDPQNTFFYKLCKLKTLENFKNIILVSSPQDGYVPYHSARIDLCHASSSDNSKRGQVFTEMLNNCLDQIRAPTSETRVFMRCDVIFDQSAQGRNLNTMIGRAAHIEFLENDIYARFIMWSFPELFR

SEQ ID NO: 177465 - protein, 437 aa, Zea Mays
MTRIEHPSRRPGSRNTKVDYAAIDIGVKSSFGFWKIDDVDNSFYTQPFLVKYSRQDIYLSVMVSFYIPNSEDEGPATSSVILKFELIYIPTLGNAWTDVQDSSDDTDLIPVHEFRIPHRALLGLHSYCPVHFDALHSALVDLTIHIVYLKAAVTKSSLKPLEQSFGSKSYGIVKASLISREILLEEVKKISNAVGSTLEDLDRTDLTLGKYETVQPSKSASPSYSYGQGTPTKCSPQMTGILRDFLESSGVVVGSTDDILLYTLSEEELFELFQIVSSQLSFIWNEFLKFHRTHKDKVMGYLHDMWDINRKAEWSIWIIHSKIEIPHRYLRSMNDDSPRHLIRISSSRKVHHDPIQNSMSQAELHRKSIAQMKINTPSVQDMHIYADPSCIPVVRIEQHVMVIPQHCSSKDFLTDASEPAPLSHISATYLVETSADP

SEQ ID NO: 177466 - protein, 730 aa, Zea Mays
METAHEVAIYIDRFHNLDLFQQGWYRVKISALWEDDENRAPISPARVTQYEAIDIGVKSSFGFWKIDDVDNSFYTQPFLVKYSRQDIYLSVMVSFYIPNSEDEGPATSSVILKFELIYIPTLGNAWTDVQDSSDDTDLIPVHEFRIPHRALLGLHSYCPVHFDALHSALVDLTIHIVYLKAAVTKSSLKPLEQSFGSKSYGIVKASLISREILLEEVKKISNAVGSTLEDLDRTDLTLGKYETVQPSKSASPSYSYGQGTPTKCSPQMTGILRDFLESSGVVVGSTDDILLYTLSEEELFELFQIVSSQLSFIWNEFLKFHRTHKDKVMGYLHDMWDINRKAEWSIWIIHSKIEIPHRYLRSMNDDSPRHLIRISSSRKVHHDPIQNSMSQAELHRKSIAQMKHVMVIPQHCSSKDFLTDASEPARTIVPPPLLQGQSLGEETCGFKSGRILRAVIFVHGFQGHHLDLRLVKNQWLLLDPGAECLLSQINEDRTSGDFKEMGRRLANEVVAFLKRKVDKYSRNGGCKEIKLSFVGHSIGNIILRSALTEPKLQPFLKNLYTYMSISGPHLGYWYSPNSLFNSGLWLMKRLKGMQCMHQLTFSDDHDPQNTFFYKLCKLKTLENFKNIILVSSPQDGYVPYHSARIDLCHASSSDNSKRGQVFTEMLNNCLDQIRAPTSETRVFMRCDVIFDQSAQGRNLNTMIGRAAHIEFLENDIYARFIMWSFPELFR

SEQ ID NO: 177467 - protein, 488 aa, Zea Mays
MTGILRDFLESSGVVVGSTDDILLYTLSEEELFELFQIVSSQLSFIWNEFLKFHRTHKDKVMGYLHDMWDINRKAEWSIWIIHSKIEIPHRYLRSMNDDSPRHLIRISSSRKVHHDPIQNSMSQAELHRKSIAQMKINTPSVQDMHIYADPSCIPVVRIEQHVMVIPQHCSSKDFLTDASEPARTIVPPPLLQGQSLGEETCGFKSGRILRAVIFVHGFQGHHLDLRLVKNQWLLLDPGAECLLSQINEDRTSGDFKEMGRRLANEVVAFLKRKVDKYSRNGGCKEIKLSFVGHSIGNIILRSALTEPKLQPFLKNLYTYMSISGPHLGYWYSPNSLFNSGLWLMKRLKGMQCMHQLTFSDDHDPQNTFFYKLCKLKTLENFKNIILVSSPQDGYVPYHSARIDLCHASSSDNSKRGQVFTEMLNNCLDQIRAPTSETRVFMRCDVIFDQSAQGRNLNTMIGRAAHIEFLENDIYARFIMWSFPELFR

SEQ ID NO: 177468 - protein, 725 aa, Zea Mays
MTRIEHPSRRPGSRNTKVDYAAIDIGVKSSFGFWKIDDVDNSFYTQPFLVKYSRQDIYLSVMVSFYIPNSEDEGPATSSVILKFELIYIPTLGNAWTDVQDSSDDTDLIPVHEFRIPHRALLGLHSYCPVHFDALHSALVDLTIHIVYLKAAVTKSSLKPLEQSFGSKSYGIVKASLISREILLEEVKKISNAVGSTLEDLDRTDLTLGKYETVQPSKSASPSYSYGQGTPTKCSPQMTGILRDFLESSGVVVGSTDDILLYTLSEEELFELFQIVSSQLSFIWNEFLKFHRTHKDKVMGYLHDMWDINRKAEWSIWIIHSKIEIPHRYLRSMNDDSPRHLIRISSSRKVHHDPIQNSMSQAELHRKSIAQMKINTPSVQDMHIYADPSCIPVVRIEQHVMVIPQHCSSKDFLTDASEPARTIVPPPLLQGQSLGEETCGFKSGRILRAVIFVHGFQGHHLDLRLVKNQWLLLDPGAECLLSQINEDRTSGDFKEMGRRLANEVVAFLKRKVDKYSRNGGCKEIKLSFVGHSIGNIILRSALTEPKLQPFLKNLYTYMSISGPHLGYWYSPNSLFNSGLWLMKRLKGMQCMHQLTFSDDHDPQNTFFYKLCKLKTLENFKNIILVSSPQDGYVPYHSARIDLCHASSSDNSKRGQVFTEMLNNCLDQIRAPTSETRVFMRCDVIFDQSAQGRNLNTMIGRAAHIEFLENDIYARFIMWSFPELFR

SEQ ID NO: 177469 - protein, 665 aa, Zea Mays
MLTIASTHSRFLLNILGKIFIYQLWCPSTYPTAKTRTDVQDSSDDTDLIPVHEFRIPHRALLGLHSYCPVHFDALHSALVDLTIHIVYLKAAVTKSSLKPLEQSFGSKSYGIVKASLISREILLEEVKKISNAVGSTLEDLDRTDLTLGKYETVQPSKSASPSYSYGQGTPTKCSPQMTGILRDFLESSGVVVGSTDDILLYTLSEEELFELFQIVSSQLSFIWNEFLKFHRTHKDKVMGYLHDMWDINRKAEWSIWIIHSKIEIPHRYLRSMNDDSPRHLIRISSSRKVHHDPIQNSMSQAELHRKSIAQMKINTPSVQDMHIYADPSCIPVVRIEQHVMVIPQHCSSKDFLTDASEPARTIVPPPLLQGQSLGEETCGFKSGRILRAVIFVHGFQGHHLDLRLVKNQWLLLDPGAECLLSQINEDRTSGDFKEMGRRLANEVVAFLKRKVDKYSRNGGCKEIKLSFVGHSIGNIILRSALTEPKLQPFLKNLYTYMSISGPHLGYWYSPNSLFNSGLWLMKRLKGMQCMHQLTFSDDHDPQNTFFYKLCKLKTLENFKNIILVSSPQDGYVPYHSARIDLCHASSSDNSKRGQVFTEMLNNCLDQIRAPTSETRVFMRCDVIFDQSAQGRNLNTMIGRAAHIEFLENDIYARFIMWSFPELFR

SEQ ID NO: 177470 - protein, 344 aa, Zea Mays
MHIYADPSCIPVVRIEQHVMVIPQHCSSKDFLTDASEPARTIVPPPLLQGQSLGEETCGFKSGRILRAVIFVHGFQGHHLDLRLVKNQWLLLDPGAECLLSQINEDRTSGDFKEMGRRLANEVVAFLKRKVDKYSRNGGCKEIKLSFVGHSIGNIILRSALTEPKLQPFLKNLYTYMSISGPHLGYWYSPNSLFNSGLWLMKRLKGMQCMHQLTFSDDHDPQNTFFYKLCKLKTLENFKNIILVSSPQDGYVPYHSARIDLCHASSSDNSKRGQVFTEMLNNCLDQIRAPTSETRVFMRCDVIFDQSAQGRNLNTMIGRAAHIEFLENDIYARFIMWSFPELFR

SEQ ID NO: 177471 - protein, 664 aa, Zea Mays
MVSFYIPNSEDEGPATSSVILKFELIYIPTLGNAWTDVQDSSDDTDLIPVHEFRIPHRALLGLHSYCPVHFDALHSALVDLTIHIVYLKAAVTKSSLKPLEQSFGSKSYGIVKASLISREILLEEVKKISNAVGSTLEDLDRTDLTLGKYETVQPSKSASPSYSYGQGTPTKCSPQMTGILRDFLESSGVVVGSTDDILLYTLSEEELFELFQIVSSQLSFIWNEFLKFHRTHKDKVMGYLHDMWDINRKAEWSIWIIHSKIEIPHRYLRSMNDDSPRHLIRISSSRKVHHDPIQNSMSQAELHRKSIAQMKINTPSVQDMHIYADPSCIPVVRIEQHVMVIPQHCSSKDFLTDASEPARTIVPPPLLQGQSLGEETCGFKSGRILRAVIFVHGFQGHHLDLRLVKNQWLLLDPGAECLLSQINEDRTSGDFKEMGRRLANEVVAFLKRKVDKYSRNGGCKEIKLSFVGHSIGNIILRSALTEPKLQPFLKNLYTYMSISGPHLGYWYSPNSLFNSGLWLMKRLKGMQCMHQLTFSDDHDPQNTFFYKLCKLKTLENFKNIILVSSPQDGYVPYHSARIDLCHASSSDNSKRGQVFTEMLNNCLDQIRAPTSETRVFMRCDVIFDQSAQGRNLNTMIGRAAHIEFLENDIYARFIMWSFPELFR

SEQ ID NO: 177472 - protein, 484 aa, Zea Mays
MTGILRDFLESSGVVVGSTDDILLYTLSEEELFELFQIVSSQLSFIWNEFLKFHRTHKDKVMGYLHDMWDINRKAEWSIWIIHSKIEIPHRYLRSMNDDSPRHLIRISSSRKPIQNSMSQAELHRKSIAQMKINTPSVQDMHIYADPSCIPVVRIEQHVMVIPQHCSSKDFLTDASEPARTIVPPPLLQGQSLGEETCGFKSGRILRAVIFVHGFQGHHLDLRLVKNQWLLLDPGAECLLSQINEDRTSGDFKEMGRRLANEVVAFLKRKVDKYSRNGGCKEIKLSFVGHSIGNIILRSALTEPKLQPFLKNLYTYMSISGPHLGYWYSPNSLFNSGLWLMKRLKGMQCMHQLTFSDDHDPQNTFFYKLCKLKTLENFKNIILVSSPQDGYVPYHSARIDLCHASSSDNSKRGQVFTEMLNNCLDQIRAPTSETRVFMRCDVIFDQSAQGRNLNTMIGRAAHIEFLENDIYARFIMWSFPELFR

SEQ ID NO: 177473 - protein, 288 aa, Zea Mays
MYASRSRHFLLSVRTANHGILLRSPTSYVSPTGCGVSAQRHYNHQQREDEWEESKAVKVTVWWDFQRCRLPRRASPRHLSPRVTEALRCAGIRGPVEITAFGDVSHIPLTEQEALADTGVILSHVPSNPLPDDGGPAVVGVFKRSEDSAQSHIQEKCHKEGESEEPSPRPKKRTLQVEVPSSPPDESSRDNRKAPGSTQRPEPPSIHVEADVTRTVEVPSPPSDSPCMDQRNDVAVDPVMQTERPVNLMEADKANAAGGPSSSGGQGNISKKRGFLERISSLWNGQKD

SEQ ID NO: 177474 - protein, 474 aa, Zea Mays
MYASRSRHFLLSVRTANHGILLRSPTSYVSPTGCGVSAQRHYNHQQREDEWEESKAVKVTVWWDFQRCRLPRRASPRHLSPRVTEALRCAGIRGPVEITAFGDVSHIPLTEQEALADTGVILSHVPSSGKDGCGRSFMSDLISWIAQNPPPSHFFLLSGDKDFTNILHRLRMSNYNVLLSCPDSGSKMLRSAATYLWTWEDLATGVDLKPKYLNHPPDGLSNSWYGQYSEPGRDFLLKPKNPMALPRKTKEPKVPRFAVVGIKRVLWFYPQGISVSELRKELKRINVYIDASAFGFKDFSAFLLSMSDVVKFIDPLPDDGGPAVVGVFKRSEDSAQSHIQEKCHKEGESEEPSPRPKKRTLQVEVPSSPPDESSRDNRKAPGSTQRPEPPSIHVEADVTRTVEVPSPPSDSPCMDQRNDVAVDPVMQTERPVNLMEADKANAAGGPSSSGGQGNISKKRGFLERISSLWNGQKD

SEQ ID NO: 177475 - protein, 158 aa, Zea Mays
MTASLPQCRQARLCAQVLLQPLPPPWTLLFPLRETLSCSVLSKSSYLEPRYPERRASEVWYPQPCNWNLSIIIGFRLEICHRGRFNPSPAAVTLKIWISRSSKRIGLPTSFRTDRELSSLLSSSRSLSGSPTAPPRLLPAPRRSSSSPVCGAPRRAPD

SEQ ID NO: 177476 - protein, 276 aa, Zea Mays
MIMQLFYKRRRIGRRLEGKILPSIIAQLNARTRGLGHLEVIKGDDYVAEVRDNGDCFSRYVVKAHLRECSCKEWQHTGKPCHHALCLITAQQYRNVMMEEFVDDYYSVDMFRKAYERLVEPIESKLFWPKVDFAKEVGAPLGKRGVGRQRKNRFKSCLEGGSSKKKPANESEKAKKIIRGKFKCPNCGELGHRKASYKCPLNGTKKRKRKPRKNSTKKWFPKEPAEASSSQPELGDSGQHQLVSTDVPKEIVGTTPQRRVRCAVKKKITPKKKICF

SEQ ID NO: 177477 - protein, 482 aa, Zea Mays
MAYKKDDNFGEWYSEVVVNSEMIEYYDISGCYILRPWAMEIWELLKEFFDAEIKKLKLKPYYFPLFVTENVLQKEKDHIEGFAPEVAWVTKSGKSDLEAPIAIRPTSETVMYPYFSKWIRSHRDLPLRCNQWCNVVRWEFSNPTPFIRSREFLWQEGHTAFATKEEADEEVLQILELYRRIYEEFLAVPVSKGRKSEMEKFAGGLYTTSVEAFIPNTGRGIQGATSHCLGQNFAKMFDITFENEKGVREMVWQNSWAYTTRSIGVMVMTHGDDKGLVLPPKVAPIQVIVIPVPYKDADTTAIKGACESTVYTLDQSGIRADQDTRENYSPGWKYSHWEMKGVPLRIEIGPKDLANKQVRVVRRDNGAKVDIPVTNLVEEVKVLLDEIQKNLFKTAQEKRDACVHVVNTWDEFTTALNNKKLILAPWCDEEEIEKNVKTRTKGELGAAKTLCTPFEQPELPEGTLCFASGKPAKKWSFWGRSY

SEQ ID NO: 177478 - protein, 89 aa, Zea Mays
MAAENYWRYADARQQQQAMVAAAAAAAGMAPAATVAAAQTVGSAAAAMNQQAAAAAMAQQAAAAPPLKRARPDFGVVFCNKILNFLVKS

SEQ ID NO: 177479 - protein, 76 aa, Zea Mays
MTISTWPQTQVACMLCRIAKEKDILALGRQQRKRTELGNSQFRCSSWDFGGFRLWSLKCLVFARQNCSLDVVGCGD

SEQ ID NO: 177480 - protein, 509 aa, Zea Mays
MEGCRGRHQRPIPVDVTSATPIPPRLATPIPPLFKPGSMAHLSLSPFNTGSLGTALEIAPFPPSPPDPAWRCSALDYGSPTVARIPTSSLDLSPFIGDDEEPGRPATGDLLPARPVNEAGPRSSSDERERLSHRAGFSRLLCLPGVRRPHAPPRALAARAEFSCAAAGTGSSSDCGRWSRLGVEGRPWEAPYWSPGSPHGATVAQWRDGQEHCAPASVAAAANRIRTLARAFCGAPASRADAGANGDAQPAGCAHGNKQVKGFMFEKPVDLKVGVNHVILLSSTMGMKDSGGELAEVKGGIQECLIQGLNTGTLDLQVNGWGHKFWLQPSPSVSLCSLPCQRYFDEPDGDDPVVLDMSSMKLIYHATFSCPPWFSSGARKFIKCILDPNHDTRIKIAEILEDEWFKKGYNLDDVDAAFNGSEQRATGKKASTGLQTGSVRYEGYWKLWCHILAIETSNSNQMAPAKRKRTSASRMNVWVEPVSTSATNVRSLTLTWSYMVLLMSMPVRA

SEQ ID NO: 177481 - protein, 527 aa, Zea Mays
MAHLSLSPFNTGSLGTALEIAPFPPSPPDPAWRCSALDYGSPTVARIPTSSLDLSPFIGDDEEPGRPATGDLLPARPVNEAGPRSSSDERERLSHRAGFSRLLCLPGVRRPHAPPRALAARAEFSCAAAGTGSSSDCGRWSRLGVEGRPWEAPYWSPGSPHGATVAQWRDGQEHCAPASVAAAANRIRTLARAFCGAPASRADAGANGDAQPAGCAHGNKQVKGFMFEKPVDLKVGVNHVILLSSTMGMKVKFCRNCGMCLECKMADYTILSDIQDSGGELAEVKGGIQECLIQGLNTGTLDLQVNGWGHKFWLQPSPSVSLCSLPCQRYFDEPDGDDPVVLDMSSMKLIYHATFSCPPWFSSGARKFIKCILDPNHDTRIKIAEILEDEWFKKGYNLDDVDAAFNGSEQRATGKKASTGLQTGSVRYEGYWKVNCLLGKNLPIDLQKYYLNVMNTFCFYLVHELWCHILAIETSNSNQMAPAKRKRTSASRMNVWVEPVSTSATNVRSLTLTWSYMVLLMSMPVRA

SEQ ID NO: 177482 - protein, 394 aa, Zea Mays
MAHLSLSPFNTGSLGTALEIAPFPPSPPDPAWRCSALDYGSPTVARIPTSSLDLSPFIGDDEEPGRPATGDLLPARPVNEAGPRSSSDERERLSHRAGFSRLLCLPGVRRPHAPPRALAARAEFSCAAAGTGSSSDCGRWSRLGVEGRPWEAPYWSPGSPHGATVAQWRDGQEHCAPASVAAAANRIRTLARAFCGAPASRADAGANGDAQPAGCAHGNKQVKGFMFEKPVDLKVGVNHVILLSSTMGMKDSGGELAEVKGGIQECLIQGLNTGTLDLQVNGWGHKFWLQPSPSVSLCSLPCQRYFDEPDGDDPVVLDMSSMKLIYHATFSCPPWFSSGARKFIKCILDPNHDTRIKIAEILEDEWFKKGYNLDDVDAAFNGSELAKQWDATIC

SEQ ID NO: 177483 - protein, 438 aa, Zea Mays
MFEKPVDLKVGVNHVILLSSTMGMKDSGGELAEVKGGIQECLIQGLNTGTLDLQVNGWGHKFWLQPSPSVSLCSLPCQRYFDEPDGDDPVVLDMSSMKLIYHATFSCPPWFSSGARKFIKCILDPNHDTRIKIAEILEDEWFKKGYNLDDVDAAFNGSEQRATGKKASTGLQTGSVRYEGYWKVNPHTHQLKLCDFGSAKVLVKGEPNISYICSRYYRARELIFGATEYTTAIDVWSAGCVLAELLLGQPLFPGESGVDQIVEIIKVLGTPTREEIKCMNPNYTEFKFPQIKAHSWHKIFHKRMPAEAVDLVPRLLQYSPKLRSTAGVNQTQKHQLMLVWYFKPCLYMDAGLASAVTTLRTCTDVAHVLEQFRLAWCGKLVRDARTVVPSRTSASTSSSLGVETELSMHAGGARCDQYYPCLINDDNGDGHDIWSILY

SEQ ID NO: 177484 - protein, 345 aa, Zea Mays
MSSMKLIYHATFSCPPWFSSGARKFIKCILDPNHDTRIKIAEILEDEWFKKGYNLDDVDAAFNGSEQRATGKKASTGLQTGSVRYEGYWKVNPHTHQLKLCDFGSAKVLVKGEPNISYICSRYYRARELIFGATEYTTAIDVWSAGCVLAELLLGQPLFPGESGVDQIVEIIKVLGTPTREEIKCMNPNYTEFKFPQIKAHSWHKIFHKRMPAEAVDLVPRLLQYSPKLRSTAGVNQTQKHQLMLVWYFKPCLYMDAGLASAVTTLRTCTDVAHVLEQFRLAWCGKLVRDARTVVPSRTSASTSSSLGVETELSMHAGGARCDQYYPCLINDDNGDGHDIWSILY

SEQ ID NO: 177485 - protein, 235 aa, Zea Mays
MRGSSRRPVAVVMAWVRRQPPKVKAFLAVVAGMAALVFIRFIVHDHDNLFVAAEAAHALGIAVLIYKLTKEKTCAGLSLKSQDLTALFLAVRLYCSFVMEYDIHTILDTAALAATLFVIYMIRFKLRSTYMLDKDNFALYYVILPCALLALLVHPSTSHNIVNRICWAFCVYLEAVSVLPQLRLMQNTKIVEPFTAHYVFALGVARFLSCAHWVLQVLFFLSPFLFYLPLKELPC

SEQ ID NO: 177486 - protein, 804 aa, Zea Mays
MARSFNICPQIDPLVVTRVPGVALDMLFLVIIQALAVILLAKFIHLFLQRYNQPSAVSQILAGVAVGGMGLRNAILHVDVDDVEDMYGGYITLARVVYMFLVGLDLDLAALRNSTRRCVALAYATVAASLLVAAIVSSGMYGSMMHSPVKTPELLAATLMLALTNTSSITISRIAGELNLTVTENGRLLVAAAIITNLICVVGDSVLSSTALAKEKSQDLYHTSPQIKKGFLALAVAGVAVWQVRPVVTRINQRNVGQHHVRSRDLVIILLGIWFISNIQQLLGFDGMPTSLALGMAFPREGPAARSVADALMPPVNGLVLPFYFATIGMRLDYNSMSGAIIVPGLLLTLLGLVAKAIGATAASTYLNVKGHVDTMNMKFAKSEGVWAEQALYAMIIGNLISTIIAGPAAAAVLSREKEEYKTRHQAMESLSAEKELRMLVCAHSAHAAPGVLSLVELLVITPHEQPAVPVLHFFEAPRDRSARTPYHQRTRGDEGAEDKGGPDPVTQMNMVVDVFSKTTGISFRQIDVVSLGASRDAAVACRGAEEAHASLLLLPCYKEQRFDGKMACRLEERWKLNHDVLERAPCTVGLLVDRPYRGGGTSFQTPIDIAPETGRTLVHPCSDRTVTHVIAAVFLGGPDDREAVSFACRLAEHPAIGLTVFRFVKRSTYDTVTSSTSRAAAAVAAGGDELDVPFKEGHVDERFLWRFYENYASRELAMYVEKVVESPADVVETLEGMSGMFSLVVLGRGGRQPVELMAGLERWSEAGSEIGPVGEILASHESLEMGSVLVMQQHTVALSPPCQ

SEQ ID NO: 177487 - protein, 86 aa, Zea Mays
MSLLMRQPHHRLGHRIAVVHQQDAGAVYVSLPRRSALRYRRVFGTSFVTYFRFEQHGHNIAATPELFNSSCSYGSILFICSSEYFL

SEQ ID NO: 177488 - protein, 113 aa, Zea Mays
MSLLMRQPHHRLGHRIAVVHQQDAGAVYVSLPRRSALRYRRVFGKNLEAGSHHRSHEISNCLDGGELGRYSCLFWISRTVKYISCDNFLVVVKMHCETFADVSHMRYIFGLVI

SEQ ID NO: 177489 - protein, 83 aa, Zea Mays
MNDIDLLNPPAELEKLKHKKKRLVQSPNSFFMDVKCQGCFSITTVFSHSQTVVVCPGCQTVLCQPTGGKARLTEGCSFRRKGD

SEQ ID NO: 177490 - protein, 132 aa, Zea Mays
MSELERQRDELKISQYEISRLSRSLSLKDPIIRELRILKKLVSQELEVARRDVEASHHDIKVLEDDRAIMKAWCDKAMDKAIRAGRILMKRPGVVVPDDIVVDVLVASGTLSNPSASGDPVDKVPREDAHAQ

SEQ ID NO: 177491 - protein, 217 aa, Zea Mays
MQHPQNKRELRRKMGQKNLNGCLVTFIERQFFLQVKDEDIATQFQSLKDQKEEIQKLLDSWDNLDKLYHDASNSLTTLERSHRFTMSELERQRDELKISQYEISRLSRSLSLKDPIIRELRILKKLVSQELEVARRDVEASHHDIKVLEDDRAIMKAWCDKAMDKAIRAGRILMKRPGVVVPDDIVVDVLVASGTLSNPSASGDPVDKVPREDAHAQ

SEQ ID NO: 177492 - protein, 76 aa, Zea Mays
MVAAELEMLLYRLGQLVDYAGAHGASLIEHWITSRTTFGTLQTLAFIVGSRWRYLWCRSAWATTFRISLVPFIPLR

SEQ ID NO: 177493 - protein, 415 aa, Zea Mays
MVEAAAGRRSGTSRRRPSGSGGEHQRLVALAVAARVAMVSTRSAGPAVAGGDGAGAAGTGAGPAAGRGRCMEDFFDCLLGLLGALGMTWATARPQRQPLPPLPRGVGAGPEPTDARRFAAALRATPGRIAGNGACAVASLYTLQGKKGVNQDAMIFWENFCSRDDTIFCGVFDGHGPYGHLVAKRVRDLLPLKLGADLGMEDGRVASTGNIKLNTNDVASSEHIVRGGTAVSSEAQQNGDYPEVFPALRTSFLKAFHVMDRDLKLHKNIDCFFSGTTAVAVIKQGHNLIIGNLGDSRAVLGTRDENNQLVAVQLTVDLKPDIPSESQRIRQRRGRIFALPEEPEVARVWLPRYNSPGLAMARAFGDFCLKDHGVISVPDVSYHHITEKDEFVVLATDGVSRLSTYAPFCLGRAIK

SEQ ID NO: 177494 - protein, 465 aa, Zea Mays
MVEAAAGRRSGTSRRRPSGSGGEHQRLVALAVAARVAMVSTRSAGPAVAGGDGAGAAGTGAGPAAGRGRCMEDFFDCLLGLLGALGMTWATARPQRQPLPPLPRGVGAGPEPTDARRFAAALRATPGRIAGNGACAVASLYTLQGKKGVNQDAMIFWELGADLGMEDGRVASTGNIKLNTNDVASSEHIVRGGTAVSSEAQQNGDYPEVFPALRTSFLKAFHVMDRDLKLHKNIDCFFSGTTAVAVIKQGHNLIIGNLGDSRAVLGTRDENNQLVAVQLTVDLKPDIPSESQRIRQRRGRIFALPEEPEVARVWLPRYNSPGLAMARAFGDFCLKDHGVISVPDVSYHHITEKDEFVVLATDGVWDVLSNDEVVNTVSRVTSRASAARFLVESAHRAWRTRFPTSKVDDCAAVCLFLNTNEASESSSSLANNLADAVQVSTAQCSKTIQVSAPIDGNEVSVVETR

SEQ ID NO: 177495 - protein, 358 aa, Zea Mays
MVEAAAGRRSGTSRRRPSGSGGEHQRLVALAVAARVAMVSTRSAGPAVAGGDGAGAAGTGAGPAAGRGRCMEDFFDCLLGLLGALGMTWATARPQRQPLPPLPRGVGAGPEPTDARRFAAALRATPGRIAGNGACAVASLYTLQGKKGVNQDAMIFWENFCSRDDTIFCGVFDGHGPYGHLVAKRVRDLLPLKLGADLGMEDGRVASTGNIKLNTNDVASSEHIVRGGTAVSSEAQQNGDYPEVFPALRTSFLKAFHVMDRDLKLHKNIDCFFSGTTAVAVIKQGHNLIIGNLGDSRAVLGTRDENNQLVAVQLTVDLKPDIPKPRHAENQILPCDVKKDCLNNLCAMNLLEFYLLYQ

SEQ ID NO: 177496 - protein, 301 aa, Zea Mays
MEDGRVASTGNIKLNTNDVASSEHIVRGGTAVSSEAQQNGDYPEVFPALRTSFLKAFHVMDRDLKLHKNIDCFFSGTTAVAVIKQGHNLIIGNLGDSRAVLGTRDENNQLVAVQLTVDLKPDIPSESQRIRQRRGRIFALPEEPEVARVWLPRYNSPGLAMARAFGDFCLKDHGVISVPDVSYHHITEKDEFVVLATDGVWDVLSNDEVVNTVSRVTSRASAARFLVESAHRAWRTRFPTSKVDDCAAVCLFLNTNEASESSSSLANNLADAVQVSTAQCSKTIQVSAPIDGNEVSVVETR

SEQ ID NO: 177497 - protein, 4214 aa, Zea Mays
MFEGHVLYLLRKYLGEYVEGLSVEALRISVWKGDVVLKDLKLKAEALNSLGFPVTVKAGFVGTITLKVPWKCLGKEPVIVLIDRLFVLAHPAPDGQTLKEEDRQKLFEAKLQQIEAAEAATLEATNRNSRGGPAPGGNSWLYNLISTIIGNLKVTISNVHIRYEDSVSNSGHPFASGFTLSKLAAVTVDEDGNETFDAGVALDKLRKSVELHRLGIYHDSDSNPWKLNKNWEALNRTEWSEIFQDGIEDGSQSSIWAVNRNYLVSPINGTLKYKRLGKNERGDPDTPLEKASLVLSDVSLTVTEAQYYDGIKLLEAFSRFRTRVDVSHLRPVVPVKEDRRAWWRYAVLAGLRQRKLCYWFSWERTRRLCQLRRRYVQLYATLLQQAAKVDISEIREIEKILDMKVIILWRLLGHAKVETVKSKGTLYRKGASKKRWWPFAWNTTGLPSEEATHPESQLDEEEQLTKEEWQAINKLLSYQPDEDMSFPLEKVSPNVIQFMMDVSIGQAGARIINIDGTEVLCGRFHQLQVVTKLYPKSTCCDVTLKYCGLSSPEGSLAQSVVSEGKSHALDVSFVRAPIGMDLDWQLIAKISPCHVTVLKESYERFMEFIKRSNAVSPTVTMETATALQLKLEKVTRRAQEQLQLVLEEQSRFGLDIDLDAPKVRIPLNANQPLLGNEYFVLDFGHFTLHTRDGKHDEERQSLYSGFYITGRDMAAFLICDLAQNIYSIPENLDQDTLLGHTFDDNQFCSLLDRCGMSVIIEQIKVPHPNYPSTRVAFQVPNLDIHFSPKRYCKIVELLGVLLHMKGNNNEYSNNHESGSLAPWYPADLAGDARTLVWRGIGYSQAEWHTCYVVLSGMYLYILESEFSANYQRCCSMASRQVFEVPPTSVGGSPYSIGVCSRGGDTHKALELTSTLVIEFRNEIEKAMWMKALVQATYRASAPPDVNILGDPVSPPPESSTPRLNSLGLVDLVVNGSVIETKLSLYGKLDRKSSDSQELLMLELLGNGGKVNVVQSSRGLSVKTKLHSLKIMDELQGRLSMTSKYLVCSVINESVGATSSDTLDKGGDLSIFPVDEDPFMDALTDFTPDQNSNPDDCQIPNFISDANEYNEIGSKDGSCFDGDEQNAKPTEIFYEAQDSNVADFVVLTFLSRSPDSCLYDGIDSQMSIRMSALEFYCNRPTLVALIEFGFDLSTVNSVPKCSLDVAPAIETVKPTGKEEGAPTIVKGLLGYGKRRTIFNIKMDVDRVSMFLNKEDGSQLAMFVQEKFLFDLKVHPSSFSIDGMLGNMRFCDMSLGPEHRWGWLCDIRKPGVESLIKFTFQSYSIDDEDFEGHNYSLTGQLSAVRIVFLYRFIQEFTSYFMELGTPHTEEAIKFIDKVGGFEWLIQKYEMDGASAIKLDLSLETPIIIVPKNSQSEDYIQFDLGQLKVRNEFSWHGGKETDPSAVRLDVLHAEINGINMAVGVNGTLGKCMIRDGRGINIEVRRSLRDVFKKVPILSMKFQIGLLHGVMSDKEYNVAISCISTNLSDTPNLPPSFRENMNRTKESIRLLADKVNLSNHLLLSRTVVVMTVEIQYALLELRNGPDAESPLAELAVEGLWVSYRTTSMLEMDLYLSILKFSIHDIRPDTKSEMRLMLGSCSETANLCVDDSSTDAGVSNLTMLILDYRSRSSFQSFVIRIQQPRILVVLDFLLPVVEYFVPSLGSITGREESLDPKNDPLMRADDIILTEHVFLQKEDFIQLSPVRQLIVDGCDIDEFIYDGCGGTVSLCEEFDKKGQVYSGIIIIIGCGKRLRFKNVKIENGALLRRCVYLNMGSSYSISSEDDVEVSVLESSFTNDEDCLNLEEHKKRNLQNAIDGPTNQILNFTFEAQVVSPEFTFYDSSKLSMDDSLHIEKLLRAKMDFSFMYASKEKDIWARSVIKDLTIEAGSGLLVLEPVDVSWKYTSVNEKTNIVLVSTDVCIHLSLSVASLMLKLQNQTLAALQFGNISPLISCTNFKRIWSSPKGDLPGYNLTFWRPQAPSNYVILGDCVSSRSVPPSQVVVAISNTYGRVRKPLGFRLIHVLPGSLDLIDSCQSTEENECSIWIPVPPPGYLALGCVVNIGRLPPSNHVVYCLRSDLATSATFSDCIHTLSPAAGIISEFSIWRVDNVIASFCAHNSIEQPTKTEALNLHHVLLRNPNCYIVKDLSADSSIQNDQSSDQLNHRKSLSGWDVLRTLSRPSNYCMSTPHFERIWWDKGNDTKKPFSIWRPLPRFGFASVGDCITEGFEPPTLGILFKCDTVVSEKPVQFTKVTQIDRKGLEEIFFWYPVPPPGYASLGCIVTKTDEMPSKDSICCPKLSLVSQANMSEDPISMSSSSKGPCCWSIWKVENQGCTFLARPDVKKPSAQLAYRIADHAKPKARENITAELKLGCLSVGILDSSCGMVTPLFDTTIANINLATHGRFETLNAVLICSIAASTFNRHLEAWEPFVEPFDGIFKFETYDTSEHPPSKVGKRIRVAATSPLNANLSSANLELLIETLVSWRRQIDLENKSSTKSEGTIENMKKADDSSYSALNEDDFQRVVFENKLGCDVYLKKKMEDSEITIELLQHESKVSLLLPPPRFSDKLNVLSNSTESRYYVVVQIFESKGLPIIDDGNGHSYFCALRLLIGSHASDQHKVFPQSARTRCVKPVETTELLTHCAKWNEHFIFEVPEQASANLEIEVTNLASKAGKGEVIGSLSMPIGRGATMLKRAPSMRMIQHVSDVKRVLTCPLTKKGQIPNFEDRKKGGVLVLSSCYVERSTHSYFQRLKDSINNVESDFCIGLSPDGPWESFTAALPVTVLPKSLNNNRFAFEVTMRNGKKHATLRGLAVIANDADIKLEVSICPVNMLDNSMLNTRLASSTSVIDEVFENQWYRPIAGWGHNPSIGHRKDLKQWSTKDCSYSSKAFFEPGLPSGWRWTSPWKIERLNFVDNDGWAYAADFQNLNWPSSSWRSSKSPHDFVRRRRWVRSRQQSQEQSAEIPRKVLATVSPHSSTALPWTSMIRDMDLCLQVRPYSEKSEESYSWSQICSLGSESIPKQQHSSLSRQSTVKQSVVSSRNSVLKLAELEKKDVLSYCHPPVSTERYFWFSVGIDASVVHTDLNVPVYDWRISFNSILRLENKLPYEAEYAIWEISTKSNMVEKQHGIVPSGGSVFIYSADIRKPIYLTLFLQNGWILEKDAVLIMDLLSLEHVSSFWMVQKQSQRRLRVSVEHDLGASDAAPKTLRLFVPYWIKNHSSIPLCYRIVEGESTESTEADSLSRPDSLSRVSKSSKFSLKYSSKSLVRRGTMSHRNMQVLEDIEDCSTDYVMLSPQDYLNRSAGMRSESRDNNFSPARVAISMAVGGCTQYSVGVSLFELENKEHVDIKTFASDGSYYWFSVQLKMASDRTKVVNLLPRALLINRIGRTIFLSEYHDETEEPLQPYEPPKVFQWRSEFGSELLKLRLEGYQWSTPFSINANGVMCVLMNSTTGNDQAFVRVNVRSGTKSSRHEVVFQLDCWSSPYRVENRSMFLPIRFRQFGGDDHSWRNLLPNSSASFFLEDLSRRHLLEVLVDGTDPMNSMTYDINVVMDHQPLTNSDALKKALRVTVLKEGKLNVIQIIDWLPDNRNRGQITERMLSPIFQPSEVDYGQSSPDLDSEFHVTLELTELGISVIDHMPEEVLYLSVQQLLLAYSSGIGSGVNRLKMRMHWIQVDNQLPFVPMPVLFCPQKIENQSDYIFKFSMTVQTNNSLDFCVYPYVGVQVPENCVFFVNIHEPIIWRLHEMIQHLKFDRIYSNQPSAVSVDPILKIGLLNISEIRFRVSMAMSPSQRPRGVFGFWSSLMTALGNMEHMPVRIAQRYREELCMRQSALMNSAISNIQKDLLSQPLQLLSGVDILGNASSALSNMSKGIAALSMDKKFIQGRMRQDSKGVEDFGDVIRDGGGALAKGIFRGVTGILTKPIEGAKSSGVEGFVQGVGKGIIGAAAQPVSGVLDLLSKTTEGANAVKMKISSAIMAEEQLLRRRLPRAIGGNSLLYPYDGHKATGQAILHLAECATFLGQIDIFKIRGKFASTDAYEDHFLLPKGKIFLITHRRVLLLQLPMMTQRKFNPTKDPCSVIWDVLWDDLVTVEMTHGKKDPPDSWPSKLILYLKAKPSNSKEIVRLVKCNRGSDQASIIYSAIDKAYKAYGPNSLKEFLRWKVPRPYAPRNSSGRSIQDLSFG

SEQ ID NO: 177498 - protein, 638 aa, Zea Mays
MFEGHVLYLLRKYLGEYVEGLSVEALRISVWKGDVVLKDLKLKAEALNSLGFPVTVKAGFVGTITLKVPWKCLGKEPVIVLIDRLFVLAHPAPDGQTLKEEDRQKLFEAKLQQIEAAEAATLEATNRNSRGGPAPGGNSWLYNLISTIIGNLKVTISNVHIRYEDSVSNSGHPFASGFTLSKLAAVTVDEDGNETFDAGVALDKLRKSVELHRLGIYHDSDSNPWKLNKNWEALNRTEWSEIFQDGIEDGSQSSIWAVNRNYLVSPINGTLKYKRLGKNERGDPDTPLEKASLVLSDVSLTVTEAQYYDGIKLLEAFSRFRTRVDVSHLRPVVPVKEDRRAWWRYAVLAGLRQRKLCYWFSWERTRRLCQLRRRYVQLYATLLQQAAKVDISEIREIEKILDMKVIILWRLLGHAKVETVKSKGTLYRKGASKKRWWPFAWNTTGLPSEEATHPESQLDEEEQLTKEEWQAINKLLSYQPDEDMSFPLEKVSPNVIQFMMDVSIGQAGARIINIDGTEVLCGRFHQLQVVTKLYPKSTCCDVTLKYCGLSSPEGSLAQSVVSEGKSHALDVSFVRAPIGMDLDWQLIAKISPCHVTLLAKFNLMTTCQVQTAALTYQGNKTADVAYLLERETDLYVTH

SEQ ID NO: 177499 - protein, 635 aa, Zea Mays
MLVLYLLRKYLGEYVEGLSVEALRISVWKGDVVLKDLKLKAEALNSLGFPVTVKAGFVGTITLKVPWKCLGKEPVIVLIDRLFVLAHPAPDGQTLKEEDRQKLFEAKLQQIEAAEAATLEATNRNSRGGPAPGGNSWLYNLISTIIGNLKVTISNVHIRYEDSVSNSGHPFASGFTLSKLAAVTVDEDGNETFDAGVALDKLRKSVELHRLGIYHDSDSNPWKLNKNWEALNRTEWSEIFQDGIEDGSQSSIWAVNRNYLVSPINGTLKYKRLGKNERGDPDTPLEKASLVLSDVSLTVTEAQYYDGIKLLEAFSRFRTRVDVSHLRPVVPVKEDRRAWWRYAVLAGLRQRKLCYWFSWERTRRLCQLRRRYVQLYATLLQQAAKVDISEIREIEKILDMKVIILWRLLGHAKVETVKSKGTLYRKGASKKRWWPFAWNTTGLPSEEATHPESQLDEEEQLTKEEWQAINKLLSYQPDEDMSFPLEKVSPNVIQFMMDVSIGQAGARIINIDGTEVLCGRFHQLQVVTKLYPKSTCCDVTLKYCGLSSPEGSLAQSVVSEGKSHALDVSFVRAPIGMDLDWQLIAKISPCHVTLLAKFNLMTTCQVQTAALTYQGNKTADVAYLLERETDLYVTH

SEQ ID NO: 177500 - protein, 1273 aa, Zea Mays
MLVLYLLRKYLGEYVEGLSVEALRISVWKGDVVLKDLKLKAEALNSLGFPVTVKAGFVGTITLKVPWKCLGKEPVIVLIDRLFVLAHPAPDGQTLKEEDRQKLFEAKLQQIEAAEAATLEATNRNSRGGPAPGGNSWLYNLISTIIGNLKVTISNVHIRYEDSVSNSGHPFASGFTLSKLAAVTVDEDGNETFDAGVALDKLRKSVELHRLGIYHDSDSNPWKLNKNWEALNRTEWSEIFQDGIEDGSQSSIWAVNRNYLVSPINGTLKYKRLGKNERGDPDTPLEKASLVLSDVSLTVTEAQYYDGIKLLEAFSRFRTRVDVSHLRPVVPVKEDRRAWWRYAVLAGLRQRKLCYWFSWERTRRLCQLRRRYVQLYATLLQQAAKVDISEIREIEKILDMKVIILWRLLGHAKVETVKSKGTLYRKGASKKRWWPFAWNTTGLPSEEATHPESQLDEEEQLTKEEWQAINKLLSYQPDEDMSFPLEKVSPNVIQFMMDVSIGQAGARIINIDGTEVLCGRFHQLQVVTKLYPKSTCCDVTLKYCGLSSPEGSLAQSVVSEGKSHALDVSFVRAPIGMDLDWQLIAKISPCHVTVLKESYERFMEFIKRSNAVSPTVTMETATALQLKLEKVTRRAQEQLQLVLEEQSRFGLDIDLDAPKVRIPLNANQPLLGNEYFVLDFGHFTLHTRDGKHDEERQSLYSGFYITGRDMAAFLICDLAQNIYSIPENLDQDTLLGHTFDDNQFCSLLDRCGMSVIIEQIKVPHPNYPSTRVAFQVPNLDIHFSPKRYCKIVELLGVLLHMKGNNNEYSNNHESGSLAPWYPADLAGDARTLVWRGIGYSQAEWHTCYVVLSGMYLYILESEFSANYQRCCSMASRQVFEVPPTSVGGSPYSIGVCSRGGDTHKALELTSTLVIEFRNEIEKAMWMKALVQATYRASAPPDVNILGDPVSPPPESSTPRLNSLGLVDLVVNGSVIETKLSLYGKLDRKSSDSQELLMLELLGNGGKVNVVQSSRGLSVKTKLHSLKIMDELQGRLSMTSKYLVCSVINESVGATSSDTLDKGGDLSIFPVDEDPFMDALTDFTPDQNSNPDDCQIPNFISDANEYNEIGSKDGSCFDGDEQNAKPTEIFYEAQDSNVADFVVLTFLSRSPDSCLYDGIDSQMSIRMSALEFYCNRPTLVALIEFGFDLSTVNSVPKCSLDVAPAIETVKPTGKEEGAPTIVKGLLGYGKRRTIFNIKMDVDRVSMFLNKEDGSQLAMFVQEKFLFDLKVRYLQ

SEQ ID NO: 177501 - protein, 2255 aa, Zea Mays
MLVLYLLRKYLGEYVEGLSVEALRISVWKGDVVLKDLKLKAEALNSLGFPVTVKAGFVGTITLKVPWKCLGKEPVIVLIDRLFVLAHPAPDGQTLKEEDRQKLFEAKLQQIEAAEAATLEATNRNSRGGPAPGGNSWLYNLISTIIGNLKVTISNVHIRYEDSVSNSGHPFASGFTLSKLAAVTVDEDGNETFDAGVALDKLRKSVELHRLGIYHDSDSNPWKLNKNWEALNRTEWSEIFQDGIEDGSQSSIWAVNRNYLVSPINGTLKYKRLGKNERGDPDTPLEKASLVLSDVSLTVTEAQYYDGIKLLEAFSRFRTRVDVSHLRPVVPVKEDRRAWWRYAVLAGLRQRKLCYWFSWERTRRLCQLRRRYVQLYATLLQQAAKVDISEIREIEKILDMKVIILWRLLGHAKVETVKSKGTLYRKGASKKRWWPFAWNTTGLPSEEATHPESQLDEEEQLTKEEWQAINKLLSYQPDEDMSFPLEKVSPNVIQFMMDVSIGQAGARIINIDGTEVLCGRFHQLQVVTKLYPKSTCCDVTLKYCGLSSPEGSLAQSVVSEGKSHALDVSFVRAPIGMDLDWQLIAKISPCHVTVLKESYERFMEFIKRSNAVSPTVTMETATALQLKLEKVTRRAQEQLQLVLEEQSRFGLDIDLDAPKVRIPLNANQPLLGNEYFVLDFGHFTLHTRDGKHDEERQSLYSGFYITGRDMAAFLICDLAQNIYSIPENLDQDTLLGHTFDDNQFCSLLDRCGMSVIIEQIKVPHPNYPSTRVAFQVPNLDIHFSPKRYCKIVELLGVLLHMKGNNNEYSNNHESGSLAPWYPADLAGDARTLVWRGIGYSQAEWHTCYVVLSGMYLYILESEFSANYQSMASRQVFEVPPTSVGGSPYSIGVCSRGGDTHKALELTSTLVIEFRNEIEKAMWMKALVQATYRASAPPDVNILGDPVSPPPESSTPRLNSLGLVDLVVNGSVIETKLSLYGKLDRKSSDSQELLMLELLGNGGKVNVVQSSRGLSVKTKLHSLKIMDELQGRLSMTSKYLVCSVINESVGATSSDTLDKGGDLSIFPVDEDPFMDALTDFTPDQNSNPDDCQIPNFISDANEYNEIGSKDGSCFDGDEQNAKPTEIFYEAQDSNVADFVVLTFLSRSPDSCLYDGIDSQMSIRMSALEFYCNRPTLVALIEFGFDLSTVNSVPKCSLDVAPAIETVKPTGKEEGAPTIVKGLLGYGKRRTIFNIKMDVDRVSMFLNKEDGSQLAMFVQEKFLFDLKVHPSSFSIDGMLGNMRFCDMSLGPEHRWGWLCDIRKPGVESLIKFTFQSYSIDDEDFEGHNYSLTGQLSAVRIVFLYRFIQEFTSYFMELGTPHTEEAIKFIDKVGGFEWLIQKYEMDGASAIKLDLSLETPIIIVPKNSQSEDYIQFDLGQLKVRNEFSWHGGKETDPSAVRLDVLHAEINGINMAVGVNGTLGKCMIRDGRGINIEVRRSLRDVFKKVPILSMKFQIGLLHGVMSDKEYNVAISCISTNLSDTPNLPPSFRENMNRTKESIRLLADKVNLSNHLLLSRTVVVMTVEIQYALLELRNGPDAESPLAELAVEGLWVSYRTTSMLEMDLYLSILKFSIHDIRPDTKSEMRLMLGSCSETANLCVDDSSTDAGVSNLTMLILDYRSRSSFQSFVIRIQQPRILVVLDFLLPVVEYFVPSLGSITGREESLDPKNDPLMRADDIILTEHVFLQKEDFIQLSPVRQLIVDGCDIDEFIYDGCGGTVSLCEEFDKKGQVYSGIIIIIGCGKRLRFKNVKIENGALLRRCVYLNMGSSYSISSEDDVEVSVLESSFTNDEDCLNLEEHKKRNLQNAIDGPTNQILNFTFEAQVVSPEFTFYDSSKLSMDDSLHIEKLLRAKMDFSFMYASKEKDIWARSVIKDLTIEAGSGLLVLEPVDVSWKYTSVNEKTNIVLVSTDVCIHLSLSVASLMLKLQNQTLAALQFGNISPLISCTNFKRIWSSPKGDLPGYNLTFWRPQAPSNYVILGDCVSSRSVPPSQVVVAISNTYGRVRKPLGFRLIHVLPGSLDLIDSCQSTEENECSIWIPVPPPGYLALGCVVNIGRLPPSNHVVYCLRSDLATSATFSDCIHTLSPAAGIISEFSIWRVDNVIASFCAHNSIEQPTKTEALNLHHVLLRNPNCYIVKDLSADSSIQNDQSSDQLNHRKSLSGWDVLRTLSRPSNYCMSTPHFERIWWDKGNDTKKPFSIWRPLPRFGFASVGDCITEG

SEQ ID NO: 177502 - protein, 4208 aa, Zea Mays
MLVLYLLRKYLGEYVEGLSVEALRISVWKGDVVLKDLKLKAEALNSLGFPVTVKAGFVGTITLKVPWKCLGKEPVIVLIDRLFVLAHPAPDGQTLKEEDRQKLFEAKLQQIEAAEAATLEATNRNSRGGPAPGGNSWLYNLISTIIGNLKVTISNVHIRYEDSVSNSGHPFASGFTLSKLAAVTVDEDGNETFDAGVALDKLRKSVELHRLGIYHDSDSNPWKLNKNWEALNRTEWSEIFQDGIEDGSQSSIWAVNRNYLVSPINGTLKYKRLGKNERGDPDTPLEKASLVLSDVSLTVTEAQYYDGIKLLEAFSRFRTRVDVSHLRPVVPVKEDRRAWWRYAVLAGLRQRKLCYWFSWERTRRLCQLRRRYVQLYATLLQQAAKVDISEIREIEKILDMKVIILWRLLGHAKVETVKSKGTLYRKGASKKRWWPFAWNTTGLPSEEATHPESQLDEEEQLTKEEWQAINKLLSYQPDEDMSFPLEKVSPNVIQFMMDVSIGQAGARIINIDGTEVLCGRFHQLQVVTKLYPKSTCCDVTLKYCGLSSPEGSLAQSVVSEGKSHALDVSFVRAPIGMDLDWQLIAKISPCHVTVLKESYERFMEFIKRSNAVSPTVTMETATALQLKLEKVTRRAQEQLQLVLEEQSRFGLDIDLDAPKVRIPLNANQPLLGNEYFVLDFGHFTLHTRDGKHDEERQSLYSGFYITGRDMAAFLICDLAQNIYSIPENLDQDTLLGHTFDDNQFCSLLDRCGMSVIIEQIKVPHPNYPSTRVAFQVPNLDIHFSPKRYCKIVELLGVLLHMKGNNNEYSNNHESGSLAPWYPADLAGDARTLVWRGIGYSQAEWHTCYVVLSGMYLYILESEFSANYQSMASRQVFEVPPTSVGGSPYSIGVCSRGGDTHKALELTSTLVIEFRNEIEKAMWMKALVQATYRASAPPDVNILGDPVSPPPESSTPRLNSLGLVDLVVNGSVIETKLSLYGKLDRKSSDSQELLMLELLGNGGKVNVVQSSRGLSVKTKLHSLKIMDELQGRLSMTSKYLVCSVINESVGATSSDTLDKGGDLSIFPVDEDPFMDALTDFTPDQNSNPDDCQIPNFISDANEYNEIGSKDGSCFDGDEQNAKPTEIFYEAQDSNVADFVVLTFLSRSPDSCLYDGIDSQMSIRMSALEFYCNRPTLVALIEFGFDLSTVNSVPKCSLDVAPAIETVKPTGKEEGAPTIVKGLLGYGKRRTIFNIKMDVDRVSMFLNKEDGSQLAMFVQEKFLFDLKVHPSSFSIDGMLGNMRFCDMSLGPEHRWGWLCDIRKPGVESLIKFTFQSYSIDDEDFEGHNYSLTGQLSAVRIVFLYRFIQEFTSYFMELGTPHTEEAIKFIDKVGGFEWLIQKYEMDGASAIKLDLSLETPIIIVPKNSQSEDYIQFDLGQLKVRNEFSWHGGKETDPSAVRLDVLHAEINGINMAVGVNGTLGKCMIRDGRGINIEVRRSLRDVFKKVPILSMKFQIGLLHGVMSDKEYNVAISCISTNLSDTPNLPPSFRENMNRTKESIRLLADKVNLSNHLLLSRTVVVMTVEIQYALLELRNGPDAESPLAELAVEGLWVSYRTTSMLEMDLYLSILKFSIHDIRPDTKSEMRLMLGSCSETANLCVDDSSTDAGVSNLTMLILDYRSRSSFQSFVIRIQQPRILVVLDFLLPVVEYFVPSLGSITGREESLDPKNDPLMRADDIILTEHVFLQKEDFIQLSPVRQLIVDGCDIDEFIYDGCGGTVSLCEEFDKKGQVYSGIIIIIGCGKRLRFKNVKIENGALLRRCVYLNMGSSYSISSEDDVEVSVLESSFTNDEDCLNLEEHKKRNLQNAIDGPTNQILNFTFEAQVVSPEFTFYDSSKLSMDDSLHIEKLLRAKMDFSFMYASKEKDIWARSVIKDLTIEAGSGLLVLEPVDVSWKYTSVNEKTNIVLVSTDVCIHLSLSVASLMLKLQNQTLAALQFGNISPLISCTNFKRIWSSPKGDLPGYNLTFWRPQAPSNYVILGDCVSSRSVPPSQVVVAISNTYGRVRKPLGFRLIHVLPGSLDLIDSCQSTEENECSIWIPVPPPGYLALGCVVNIGRLPPSNHVVYCLRSDLATSATFSDCIHTLSPAAGIISEFSIWRVDNVIASFCAHNSIEQPTKTEALNLHHVLLRNPNCYIVKDLSADSSIQNDQSSDQLNHRKSLSGWDVLRTLSRPSNYCMSTPHFERIWWDKGNDTKKPFSIWRPLPRFGFASVGDCITEGFEPPTLGILFKCDTVVSEKPVQFTKVTQIDRKGLEEIFFWYPVPPPGYASLGCIVTKTDEMPSKDSICCPKLSLVSQANMSEDPISMSSSSKGPCCWSIWKVENQGCTFLARPDVKKPSAQLAYRIADHAKPKARENITAELKLGCLSVGILDSSCGMVTPLFDTTIANINLATHGRFETLNAVLICSIAASTFNRHLEAWEPFVEPFDGIFKFETYDTSEHPPSKVGKRIRVAATSPLNANLSSANLELLIETLVSWRRQIDLENKSSTKSEGTIENMKKADDSSYSALNEDDFQRVVFENKLGCDVYLKKKMEDSEITIELLQHESKVSLLLPPPRFSDKLNVLSNSTESRYYVVVQIFESKGLPIIDDGNGHSYFCALRLLIGSHASDQHKVFPQSARTRCVKPVETTELLTHCAKWNEHFIFEVPEQASANLEIEVTNLASKAGKGEVIGSLSMPIGRGATMLKRAPSMRMIQHVSDVKRVLTCPLTKKGQIPNFEDRKKGGVLVLSSCYVERSTHSYFQRLKDSINNVESDFCIGLSPDGPWESFTAALPVTVLPKSLNNNRFAFEVTMRNGKKHATLRGLAVIANDADIKLEVSICPVNMLDNSMLNTRLASSTSVIDEVFENQWYRPIAGWGHNPSIGHRKDLKQWSTKDCSYSSKAFFEPGLPSGWRWTSPWKIERLNFVDNDGWAYAADFQNLNWPSSSWRSSKSPHDFVRRRRWVRSRQQSQEQSAEIPRKVLATVSPHSSTALPWTSMIRDMDLCLQVRPYSEKSEESYSWSQICSLGSESIPKQQHSSLSRQSTVKQSVVSSRNSVLKLAELEKKDVLSYCHPPVSTERYFWFSVGIDASVVHTDLNVPVYDWRISFNSILRLENKLPYEAEYAIWEISTKSNMVEKQHGIVPSGGSVFIYSADIRKPIYLTLFLQNGWILEKDAVLIMDLLSLEHVSSFWMVQKQSQRRLRVSVEHDLGASDAAPKTLRLFVPYWIKNHSSIPLCYRIVEGESTESTEADSLSRPDSLSRVSKSSKFSLKYSSKSLVRRGTMSHRNMQVLEDIEDCSTDYVMLSPQDYLNRSAGMRSESRDNNFSPARVAISMAVGGCTQYSVGVSLFELENKEHVDIKTFASDGSYYWFSVQLKMASDRTKVVNLLPRALLINRIGRTIFLSEYHDETEEPLQPYEPPKVFQWRSEFGSELLKLRLEGYQWSTPFSINANGVMCVLMNSTTGNDQAFVRVNVRSGTKSSRHEVVFQLDCWSSPYRVENRSMFLPIRFRQFGGDDHSWRNLLPNSSASFFLEDLSRRHLLEVLVDGTDPMNSMTYDINVVMDHQPLTNSDALKKALRVTVLKEGKLNVIQIIDWLPDNRNRGQITERMLSPIFQPSEVDYGQSSPDLDSEFHVTLELTELGISVIDHMPEEVLYLSVQQLLLAYSSGIGSGVNRLKMRMHWIQVDNQLPFVPMPVLFCPQKIENQSDYIFKFSMTVQTNNSLDFCVYPYVGVQVPENCVFFVNIHEPIIWRLHEMIQHLKFDRIYSNQPSAVSVDPILKIGLLNISEIRFRVSMAMSPSQRPRGVFGFWSSLMTALGNMEHMPVRIAQRYREELCMRQSALMNSAISNIQKDLLSQPLQLLSGVDILGNASSALSNMSKGIAALSMDKKFIQGRMRQDSKGVEDFGDVIRDGGGALAKGIFRGVTGILTKPIEGAKSSGVEGFVQGVGKGIIGAAAQPVSGVLDLLSKTTEGANAVKMKISSAIMAEEQLLRRRLPRAIGGNSLLYPYDGHKATGQAILHLAECATFLGQIDIFKIRGKFASTDAYEDHFLLPKGKIFLITHRRVLLLQLPMMTQRKFNPTKDPCSVIWDVLWDDLVTVEMTHGKKDPPDSWPSKLILYLKAKPSNSKEIVRLVKCNRGSDQASIIYSAIDKAYKAYGPNSLKEFLRWKVPRPYAPRNSSGRSIQDLSFG

SEQ ID NO: 177503 - protein, 184 aa, Zea Mays
MALDGCIPAKLYTINIAFVNWNTTGLPSEEATHPESQLDEEEQLTKEEWQAINKLLSYQPDEDMSFPLEKVSPNVIQFMMDVSIGQAGARIINIDGTEVLCGRFHQLQVVTKLYPKSTCCDVTLKYCGLSSPEGSLAQSVVSEGKSHALDVSFVRAPIGMDLDWQLIAKISPCHVTVPHSQVLL

SEQ ID NO: 177504 - protein, 3271 aa, Zea Mays
MAEAMEGMSWVRDLRGLVSQEIISDVLQLCDAISDWFQFAGDPWSLGYLGHRNDCIFKGIAPNLSSVLGLAEDDLSLWCMAGAKGLSMMFRLSLQQGIECGCDGVYGVLYVNVVQSSRGLSVKTKLHSLKIMDELQGRLSMTSKYLVCSVINESVGATSSDTLDKGGDLSIFPVDEDPFMDALTDFTPDQNSNPDDCQIPNFISDANEYNEIGSKDGSCFDGDEQNAKPTEIFYEAQDSNVADFVVLTFLSRSPDSCLYDGIDSQMSIRMSALEFYCNRPTLVALIEFGFDLSTVNSVPKCSLDVAPAIETVKPTGKEEGAPTIVKGLLGYGKRRTIFNIKMDVDRVSMFLNKEDGSQLAMFVQEKFLFDLKFTFQSYSIDDEDFEGHNYSLTGQLSAVRIVFLYRFIQEFTSYFMELGTPHTEEAIKFIDKVGGFEWLIQKYEMDGASAIKLDLSLETPIIIVPKNSQSEDYIQFDLGQLKVRNEFSWHGGKETDPSAVRLDVLHAEINGINMAVGVNGTLGKCMIRDGRGINIEVRRSLRDVFKKVPILSMKFQIGLLHGVMSDKEYNVAISCISTNLSDTPNLPPSFRENMNRTKESIRLLADKVNLSNHLLLSRTVVVMTVEIQYALLELRNGPDAESPLAELAVEGLWVSYRTTSMLEMDLYLSILKFSIHDIRPDTKSEMRLMLGSCSETANLCVDDSSTDAGVSNLTMLILDYRSRSSFQSFVIRIQQPRILVVLDFLLPVVEYFVPSLGSITGREESLDPKNDPLMRADDIILTEHVFLQKEDFIQLSPVRQLIVDGCDIDEFIYDGCGGTVSLCEEFDKKGQVYSGIIIIIGCGKRLRFKNVKIENGALLRRCVYLNMGSSYSISSEDDVEVSVLESSFTNDEDCLNLEEHKKRNLQNAIDGPTNQILNFTFEAQVVSPEFTFYDSSKLSMDDSLHIEKLLRAKMDFSFMYASKEKDIWARSVIKDLTIEAGSGLLVLEPVDVSWKYTSVNEKTNIVLVSTDVCIHLSLSVASLMLKLQNQTLAALQFGNISPLISCTNFKRIWSSPKGDLPGYNLTFWRPQAPSNYVILGDCVSSRSVPPSQVVVAISNTYGRVRKPLGFRLIHVLPGSLDLIDSCQSTEENECSIWIPVPPPGYLALGCVVNIGRLPPSNHVVYCLRSDLATSATFSDCIHTLSPAAGIISEFSIWRVDNVIASFCAHNSIEQPTKTEALNLHHVLLRNPNCYIVKDLSADSSIQNDQSSDQLNHRKSLSGWDVLRTLSRPSNYCMSTPHFERIWWDKGNDTKKPFSIWRPLPRFGFASVGDCITEGFEPPTLGILFKCDTVVSEKPVQFTKVTQIDRKGLEEIFFWYPVPPPGYASLGCIVTKTDEMPSKDSICCPKLSLVSQANMSEDPISMSSSSKGPCCWSIWKVENQGCTFLARPDVKKPSAQLAYRIADHAKPKARENITAELKLGCLSVGILDSSCGMVTPLFDTTIANINLATHGRFETLNAVLICSIAASTFNRHLEAWEPFVEPFDGIFKFETYDTSEHPPSKVGKRIRVAATSPLNANLSSANLELLIETLVSWRRQIDLENKSSTKSEGTIENMKKADDSSYSALNEDDFQRVVFENKLGCDVYLKKKMEDSEITIELLQHESKVSLLLPPPRFSDKLNVLSNSTESRYYVVVQIFESKGLPIIDDGNGHSYFCALRLLIGSHASDQHKVFPQSARTRCVKPVETTELLTHCAKWNEHFIFEVPEQASANLEIEVTNLASKAGKGEVIGSLSMPIGRGATMLKRAPSMRMIQHVSDVKRVLTCPLTKKGQIPNFEDRKKGGVLVLSSCYVERSTHSYFQRLKDSINNVESDFCIGLSPDGPWESFTAALPVTVLPKSLNNNRFAFEVTMRNGKKHATLRGLAVIANDADIKLEVSICPVNMLDNSMLNTRLASSTSVIDEVFENQWYRPIAGWGHNPSIGHRKDLKQWSTKDCSYSSKAFFEPGLPSGWRWTSPWKIERLNFVDNDGWAYAADFQNLNWPSSSWRSSKSPHDFVRRRRWVRSRQQSQEQSAEIPRKVLATVSPHSSTALPWTSMIRDMDLCLQVRPYSEKSEESYSWSQICSLGSESIPKQQHSSLSRQSTVKQSVVSSRNSVLKLAELEKKDVLSYCHPPVSTERYFWFSVGIDASVVHTDLNVPVYDWRISFNSILRLENKLPYEAEYAIWEISTKSNMVEKQHGIVPSGGSVFIYSADIRKPIYLTLFLQNGWILEKDAVLIMDLLSLEHVSSFWMVQKQSQRRLRVSVEHDLGASDAAPKTLRLFVPYWIKNHSSIPLCYRIVEGESTESTEADSLSRPDSLSRVSKSSKFSLKYSSKSLVRRGTMSHRNMQVLEDIEDCSTDYVMLSPQDYLNRSAGMRSESRDNNFSPARVAISMAVGGCTQYSVGVSLFELENKEHVDIKTFASDGSYYWFSVQLKMASDRTKVVNLLPRALLINRIGRTIFLSEYHDETEEPLQPYEPPKVFQWRSEFGSELLKLRLEGYQWSTPFSINANGVMCVLMNSTTGNDQAFVRVNVRSGTKSSRHEVVFQLDCWSSPYRVENRSMFLPIRFRQFGGDDHSWRNLLPNSSASFFLEDLSRRHLLEVLVDGTDPMNSMTYDINVVMDHQPLTNSDALKKALRVTVLKEGKLNVIQIIDWLPDNRNRGQITERMLSPIFQPSEVDYGQSSPDLDSEFHVTLELTELGISVIDHMPEEVLYLSVQQLLLAYSSGIGSGVNRLKMRMHWIQVDNQLPFVPMPVLFCPQKIENQSDYIFKFSMTVQTNNSLDFCVYPYVGVQVPENCVFFVNIHEPIIWRLHEMIQHLKFDRIYSNQPSAVSVDPILKIGLLNISEIRFRVSMAMSPSQRPRGVFGFWSSLMTALGNMEHMPVRIAQRYREELCMRQSALMNSAISNIQKDLLSQPLQLLSGVDILGNASSALSNMSKGIAALSMDKKFIQGRMRQDSKGVEDFGDVIRDGGGALAKGIFRGVTGILTKPIEGAKSSGVEGFVQGVGKGIIGAAAQPVSGVLDLLSKTTEGANAVKMKISSAIMAEEQLLRRRLPRAIGGNSLLYPYDGHKATGQAILHLAECATFLGQIDIFKIRGKFASTDAYEDHFLLPKGKIFLITHRRVLLLQLPMMTQRKFNPTKDPCSVIWDVLWDDLVTVEMTHGKKDPPDSWPSKLILYLKAKPSNSKEIVRLVKCNRGSDQASIIYSAIDKAYKAYGPNSLKEFLRWKVPRPYAPRNSSGRSIQDLSFG

SEQ ID NO: 177505 - protein, 2939 aa, Zea Mays
MWLMDFCAWSQKGHAGWWASFSEYALQLVGNLLQTLECLGFTFQSYSIDDEDFEGHNYSLTGQLSAVRIVFLYRFIQEFTSYFMELGTPHTEEAIKFIDKVGGFEWLIQKYEMDGASAIKLDLSLETPIIIVPKNSQSEDYIQFDLGQLKVRNEFSWHGGKETDPSAVRLDVLHAEINGINMAVGVNGTLGKCMIRDGRGINIEVRRSLRDVFKKVPILSMKFQIGLLHGVMSDKEYNVAISCISTNLSDTPNLPPSFRENMNRTKESIRLLADKVNLSNHLLLSRTVVVMTVEIQYALLELRNGPDAESPLAELAVEGLWVSYRTTSMLEMDLYLSILKFSIHDIRPDTKSEMRLMLGSCSETANLCVDDSSTDAGVSNLTMLILDYRSRSSFQSFVIRIQQPRILVVLDFLLPVVEYFVPSLGSITGREESLDPKNDPLMRADDIILTEHVFLQKEDFIQLSPVRQLIVDGCDIDEFIYDGCGGTVSLCEEFDKKGQVYSGIIIIIGCGKRLRFKNVKIENGALLRRCVYLNMGSSYSISSEDDVEVSVLESSFTNDEDCLNLEEHKKRNLQNAIDGPTNQILNFTFEAQVVSPEFTFYDSSKLSMDDSLHIEKLLRAKMDFSFMYASKEKDIWARSVIKDLTIEAGSGLLVLEPVDVSWKYTSVNEKTNIVLVSTDVCIHLSLSVASLMLKLQNQTLAALQFGNISPLISCTNFKRIWSSPKGDLPGYNLTFWRPQAPSNYVILGDCVSSRSVPPSQVVVAISNTYGRVRKPLGFRLIHVLPGSLDLIDSCQSTEENECSIWIPVPPPGYLALGCVVNIGRLPPSNHVVYCLRSDLATSATFSDCIHTLSPAAGIISEFSIWRVDNVIASFCAHNSIEQPTKTEALNLHHVLLRNPNCYIVKDLSADSSIQNDQSSDQLNHRKSLSGWDVLRTLSRPSNYCMSTPHFERIWWDKGNDTKKPFSIWRPLPRFGFASVGDCITEGFEPPTLGILFKCDTVVSEKPVQFTKVTQIDRKGLEEIFFWYPVPPPGYASLGCIVTKTDEMPSKDSICCPKLSLVSQANMSEDPISMSSSSKGPCCWSIWKVENQGCTFLARPDVKKPSAQLAYRIADHAKPKARENITAELKLGCLSVGILDSSCGMVTPLFDTTIANINLATHGRFETLNAVLICSIAASTFNRHLEAWEPFVEPFDGIFKFETYDTSEHPPSKVGKRIRVAATSPLNANLSSANLELLIETLVSWRRQIDLENKSSTKSEGTIENMKKADDSSYSALNEDDFQRVVFENKLGCDVYLKKKMEDSEITIELLQHESKVSLLLPPPRFSDKLNVLSNSTESRYYVVVQIFESKGLPIIDDGNGHSYFCALRLLIGSHASDQHKVFPQSARTRCVKPVETTELLTHCAKWNEHFIFEVPEQASANLEIEVTNLASKAGKGEVIGSLSMPIGRGATMLKRAPSMRMIQHVSDVKRVLTCPLTKKGQIPNFEDRKKGGVLVLSSCYVERSTHSYFQRLKDSINNVESDFCIGLSPDGPWESFTAALPVTVLPKSLNNNRFAFEVTMRNGKKHATLRGLAVIANDADIKLEVSICPVNMLDNSMLNTRLASSTSVIDEVFENQWYRPIAGWGHNPSIGHRKDLKQWSTKDCSYSSKAFFEPGLPSGWRWTSPWKIERLNFVDNDGWAYAADFQNLNWPSSSWRSSKSPHDFVRRRRWVRSRQQSQEQSAEIPRKVLATVSPHSSTALPWTSMIRDMDLCLQVRPYSEKSEESYSWSQICSLGSESIPKQQHSSLSRQSTVKQSVVSSRNSVLKLAELEKKDVLSYCHPPVSTERYFWFSVGIDASVVHTDLNVPVYDWRISFNSILRLENKLPYEAEYAIWEISTKSNMVEKQHGIVPSGGSVFIYSADIRKPIYLTLFLQNGWILEKDAVLIMDLLSLEHVSSFWMVQKQSQRRLRVSVEHDLGASDAAPKTLRLFVPYWIKNHSSIPLCYRIVEGESTESTEADSLSRPDSLSRVSKSSKFSLKYSSKSLVRRGTMSHRNMQVLEDIEDCSTDYVMLSPQDYLNRSAGMRSESRDNNFSPARVAISMAVGGCTQYSVGVSLFELENKEHVDIKTFASDGSYYWFSVQLKMASDRTKVVNLLPRALLINRIGRTIFLSEYHDETEEPLQPYEPPKVFQWRSEFGSELLKLRLEGYQWSTPFSINANGVMCVLMNSTTGNDQAFVRVNVRSGTKSSRHEVVFQLDCWSSPYRVENRSMFLPIRFRQFGGDDHSWRNLLPNSSASFFLEDLSRRHLLEVLVDGTDPMNSMTYDINVVMDHQPLTNSDALKKALRVTVLKEGKLNVIQIIDWLPDNRNRGQITERMLSPIFQPSEVDYGQSSPDLDSEFHVTLELTELGISVIDHMPEEVLYLSVQQLLLAYSSGIGSGVNRLKMRMHWIQVDNQLPFVPMPVLFCPQKIENQSDYIFKFSMTVQTNNSLDFCVYPYVGVQVPENCVFFVNIHEPIIWRLHEMIQHLKFDRIYSNQPSAVSVDPILKIGLLNISEIRFRVSMAMSPSQRPRGVFGFWSSLMTALGNMEHMPVRIAQRYREELCMRQSALMNSAISNIQKDLLSQPLQLLSGVDILGNASSALSNMSKGIAALSMDKKFIQGRMRQDSKGVEDFGDVIRDGGGALAKGIFRGVTGILTKPIEGAKSSGVEGFVQGVGKGIIGAAAQPVSGVLDLLSKTTEGANAVKMKISSAIMAEEQLLRRRLPRAIGGNSLLYPYDGHKATGQAILHLAECATFLGQIDIFKIRGKFASTDAYEDHFLLPKGKIFLITHRRVLLLQLPMMTQRKFNPTKDPCSVIWDVLWDDLVTVEMTHGKKDPPDSWPSKLILYLKAKPSNSKEIVRLVKCNRGSDQASIIYSAIDKAYKAYGPNSLKEFLRWKVPRPYAPRNSSGRSIQDLSFG

SEQ ID NO: 177506 - protein, 88 aa, Zea Mays
MRWVPIIGGKDLDLHQLYKEVTSRGGIDKLKAENRWREVTASFIFPATATNASFMLKKYYMSLLYHFEQLYFFRVQGWYQQEIDSRTN

SEQ ID NO: 177507 - protein, 428 aa, Zea Mays
MEAMDTEPSSPAPAAAVNLPPPPYHHCPAPADEVAATPQPKPKQSTAGPGLRTPSPPPSVQVSGYSLHDLLLLSPPPPSSRRHRSSTRGAAGTSVDESLEIVAVAGTPTPPRRRRRGGAEQCVTPVLASPRNARRARRRLEKDVEAVEDAGRRARRRKSTRAAPKAAAAADKAEAALNEEDITMAVVPACPAATCGLWERIVELVMWRNMAKSALWFGFGSMFFSCSLSRDVTFSPISALCHLGVMILGLAFFKDSVPQRPQVENERRFRLTEEDMLRASQAVLPFANSMISTAQVIFSGEPSMTLKVLPLLLFGAKYGGLVTVWRLLAAGFFISFTVPKLYSCYSSRIHKRVEILRDQALEAWKSCPRKKLVAAIIVTMFWNMFSVKTRVMAAFVSLVILRYNKKHHKAAEVGSYRDEQGQTMEMDS

SEQ ID NO: 177508 - protein, 61 aa, Zea Mays
MFVDEHSRGHMTVTFVSSPFFCRKRSRLSKCCPAIVGVDGGSDSFGQSGQSIVYCKPIWVL

SEQ ID NO: 177509 - protein, 411 aa, Zea Mays
MATHASDNGSGHAEWRFARAAKEGALAVAGDKMSIRAARFKISASVDGRDPRPVLPLAHGDPSVFPAFRTAAEAEDAVAAALRTGKFNCYPAGVGLPEARRALAEHLSSDLPYKLSTDDIFLTAGGTQAIEVVVSVLAQPGANILLPRPGYPNYEARAGLHNLQVRHFDLIPERGWEIDIDSLESIADKNTTAMVIINPNNPCGSVYTREHLAKVAEVARKLGILVIADEVYGNLVFGDTPYVPMGVFGHIAPVLSIGSLSKRWIVPGWRLGWVAVCDPNKILQETKIIASITNFLNVSTDPATFVQGALPHILGNTKEDFFRRIIGLLAETSEICYREIKDIKCITCPHKPEGSMFVMVKLNLYLLEGIHDDIDFCCKLAKEESVILCPVVCFGLQVLQAYTVCLRSEML

SEQ ID NO: 177510 - protein, 365 aa, Zea Mays
MATHASDNGSGHAEWRFARAAKEGALAVAGDKMSIRAARFKISASVDGRDPRPVLPLAHGDPSVFPAFRTAAEAEDAVAAALRTGKFNCYPAGVGLPEARRALAEHLSSDLPYKLSTDDIFLTAGGTQAIEVVVSVLAQPGANILLPRPGYPNYEARAGLHNLQVRHFDLIPERGWEIDIDSLESIADKNTTAMVIINPNNPCGSVYTREHLAKVAEVARKLGILVIADEVYGNLVFGDTPYVPMGVFGHIAPVLSIGSLSKRWIVPGWRLGWVAVCDPNKILQETKIIASITNFLNVSTDPATFVQGALPHILGNTKEDFFRRIIGLLAETSEICYREIKDIKCITCPHKPEGEIKFVSFGGDS

SEQ ID NO: 177511 - protein, 574 aa, Zea Mays
MKAVERAKLVRSLRHESRRLRLLVLVIGFFLVTLTFVVVSKPDALLFNLNGRLSVDQAPRSLLIRQRVDADEGRSAETLASATGDPKVVEDDTYGEEASAKARANANARGTTAEEERMLASEPEQRKRAQEATTSEILAGEDDRGRKSQQEGHKEHQQHKLTLPTVSNYTIHDATDGTDNGKQEALDNMERDKPLCDFSNFRANVCEMRGNIRIHPNGSSVIYMEPTSSGSKRNEQWKIKPYPRKGDELCLNHITEVTVKSSIVAPECSKYHDVPAVIFALTGYTGNLFHDFTDVLVPLFTTASEFNGEVQFLITDMAIWWTRKYAVVFEKLTKYPLIDFNKDNEVHCFNHAIVGLHAYMEFTIDPLKAPHNYSMVDFNQFMRRTYSLPRDAVRAPGETPQTRKPRLLIISRQRTRMFLNLKEIVAMAEEIGYEVVVEEANVNSNVGHFAKVVNSVDVMMGVHGAGLTNCVFLPHGATLIQIVPWGALDGICRIDFGYPAEQMGLRYKHYSIGVHESSLTEQYPLDHEIFRNPLAFHKNGFEFVRQTFMDTQNVRLDCNRFRPVLLEALDQLNQ

SEQ ID NO: 177512 - protein, 489 aa, Zea Mays
MKAVERAKLVRSLRHESRRLRLLVLVIGFFLVTLTFVVVSKPDALLFNLNGRLSVDQAPRSLLIRQRVDADEGRSAETLASATGDPKVVEDDTYGEEASAKARANANARGTTAEEERMLASEPEQRKRAQEATTSEILAGEDDRGRKSQQEGHKEHQQHKLTLPTVSNYTIHDATDGTDNGKQEDTEFNLTPDVDQRNGRDRSHQAALDNMERDKPLCDFSNFRANVCEMRGNIRIHPNGSSVIYMEPTSSGSKRNEQWKIKPYPRKGDELCLNHITEVTVKSSIVAPECSKYHDVPAVIFALTGYTGNLFHDFTDVLVPLFTTASEFNGEVQFLITDMAIWWTRKYAVVFEKLTKYPLIDFNKDNEVHCFNHAIVGLHAYMEFTIDPLKAPHNYSMVDFNQFMRRTYSLPRDAVRAPGETPQTRKPRLLIISRQRTRMFLNLKEIVAMAEEIGYEVVVEEANVNSNVGHFAKMGYAGSILVTQQNRWA

SEQ ID NO: 177513 - protein, 202 aa, Zea Mays
MAMPTTSSASPCQAPSPAGLPISPGARATILSFSRRLRRSRGAIISAPTGCLFLGLPKSCCSIAAFGEVAAVSDDYVESSPSSSGYLNSTMDASSHEDNQSERVAKMNQNSRDNNKMIKICDKLIGVFLVDKPTPTDWRKLLAFSREWDNIRPHFFKRCQEKADTELNPEMKHNLLRLGRKLKEVMHLLTHSRTPIMVYLII

SEQ ID NO: 177514 - protein, 89 aa, Zea Mays
MTVHEGRIYQLKLFCDKDYPEKPPSVRFHSRINMTCVNHETGMVDPRKFGLLANWQRDYTMENILTQLKKEMAASQNRKLVQPPEGTFF

SEQ ID NO: 177515 - protein, 166 aa, Zea Mays
MARERGARQTDSTSRHCDEDWPRGLSRAQPRRNQILYSNILLTYGARHRSAPHVKDEGSKSVIAFVVWALTGDGYKFERPGTLEHTYNYGVTDTEYDKGNCICPGVQSGFLRARSLQLRCFSGHNMMLSCEPLPLPGINPHQCMSHPSWTLMSEIGTIQCTDVFGL

SEQ ID NO: 177516 - protein, 233 aa, Zea Mays
MSPRPPSLSATPMTTRASPPLLPPPLPPRRPAVSVILFPIAVTFYVTWWFFRFVDGFFSPIYAHLGIKIFGLGFVTSISFIFVVGLFMSSWLGASILGLGEWFIKRMPFVRHIYDASKQISAAISPDQNKHAFKEVVIIRHPRIGEYAFGFITSEVLLQGYSSEEQMYCVYVPTNHLYIGDIFLVSSSDVIRPNMSVREGIEIVVSVGTSMPQVLSILETEPNQLNRIRSTRS

SEQ ID NO: 177517 - protein, 146 aa, Zea Mays
MSSWLGASILGLGEWFIKRMPFVRHIYDASKQISAAISPDQNKHAFKEVVIIRHPRIGEYAFGFITSEVLLQGYSSEEQMYCVYVPTNHLYIGDIFLVSSSDVIRPNMSVREGIEIVVSVGTSMPQVLSILETEPNQLNRIRSTRS

SEQ ID NO: 177518 - protein, 238 aa, Zea Mays
MEEERCFNNWDLDAVVRLGCRRLLSPSPQPDPFASFLPPPPQKEKPVAPAPAKEPEPHTAWRFPDLGAGGGQDGEELLRALLADQPPLHQPLPTPAATPTPTPTATPPPPSQQQHLQPTVTAVDVAPPQEEPGEEGGLPRSGGRLVAGRVGVAQVRPEAHQGLPLPKGILPMQQLQGVRGAEAGGAQPRGPQHFHPHLHRGAQPRGADPPQLARRHHPPQVPVVGGASAAAAVRRGGR

SEQ ID NO: 177519 - protein, 606 aa, Zea Mays
MSLEVSMQKSLGFGLKSDNGKHDYVANDTVQSLHKQDSKIVIKKTIKLLDGPPYPKRPKLEPAQTGRDAEAKGHEFISQKNVPDLTPCTTSEKSRLLKQKRISDGKRTDKKNIRSGVRSKHDCFSSKAGLANFDSGFSGNSVLGAHGLKSDIRDITHHIENLSLIELLDGTYKYSSLGRDKGKKVLHTKEELLVSVRKTFSMLSDMDYRHGKDSNLILSPKLSSASTSSCDIKEQCGDKPPLLVKDPSQINLCDSALCHPKDILSRLTLPHRQDLDSLLAPGRESTAAVKPYMPSMTVHGASLPPFPWSHSQAGGCRQGVDCGKHGSSRSNSQWQWVRVGSNLTSLDHEDTSVHRIDDLLQEMDAAKLCILDPCDGQHNLCGTESTSGSLVQNIHSRKIGGEHGSQQLQPQDHLDSLDGFQKHDIDYSLLKTSQVSPKIQCAAEILCDMRRSTESWIGQGYSNGTIKWPKSPPEKAMKARKPSSQFGTTESSSGSRNNEATWNGSSHSTKKIVDRNNDSARLNNPGKGTIRWPVPVEDNASPVRSERGLMVDMRQPHGNGGRHLVQVSSQTRLEKEYENQQKLRKATLTSSLGSAGDWNREKNRRM

SEQ ID NO: 177520 - protein, 251 aa, Zea Mays
MLSDMDYRHGKDSNLILSPKLSSASTSSCDIKEQCGDKPPLLVKDPSQINLCDSALCHPKDILSRLTLPHRQDLDSLLAPGRESTAAVKPYMPSMTVHGASLPPFPWSHSQAGGCRQGVDCGKHGSSRSNSQWQWVRVGSNLTSLDHEDTSVHRIDDLLQEMDAAKLCILDPCDGQHNLCGTESTSGSLVQNIHSRKIGGEHGSQQLQPQDHLDSLDGFQKHDIDYSLLKTSQGRPKSIWEKVTLIYILPC

SEQ ID NO: 177521 - protein, 196 aa, Zea Mays
MAQYYRCPPLSSSMTSLPAAVMATATTLPLGLLPSKTLTLSPLPSARRSLSIAAEEPAVPEPVEAQLAAAGAGKDADIFAVVMIGSRQYIVMPGRYIYTQRLKGANVNDQIILNKVLLVSTREKAYIGMPVVTNAAVHAVVEEQGRDDKVIVFKYKKKKKYQRKLGHRQPNTRLRITGISGYEEYPADPILDPAAA

SEQ ID NO: 177522 - protein, 238 aa, Zea Mays
MLQKRRQGDQASIIGGVVDYIKELQQVLRSLETKKHRKAYAEQVLSPRPLPAVKSTPPLSPHVAVPMSPRTPTPGSPYKPASGAAATTTGSCRLPHRAAAAAAAYIGTPTTSSSSSSYSHDQQRHYSTYLPTLDSLVTELAAQAAACSRPAASGGLTRLPDVKVEFAGPNLVLKTVSHRSPGQALKIIAALESLPLEILHVSVSTVDDTMVHSFTIKIGIECELSAEELVQEIQQTLL

SEQ ID NO: 177523 - protein, 382 aa, Zea Mays
MTTTTKNHKQQQLLHMLPTAAAPPWPVRTKLLLCAALGFALGVVATASLVNSPSYATSSAAAAALRGGGGALGLVLPPSATRNAAQDRRPPPKQAGAARATVRRSRPEPPAGTGITSAAAPPPSVVGAEGPAAPSACRLQGPQGGVPVPRALGPAHGAAVGRVLPRPPRPLQRLRALRPGVQRLRPARDLRLLPPEDPQQGGEMGRDQHGGGGAPASGARAAGRPLQRALRPPVGVARPAVRSPHGALLPRQLHQAVPRVLRPARRDGPRPLQPPHEPRRGRGAVAQGLPVVRPGPGPGHRRGRRPRLLPALPPLLPPSPLLRRRALPAHAPQHRPAPVGGGQPEPHVGRLVPRRLSPRAVHEDGGHRRLPPVAQGRQHVHV

SEQ ID NO: 177524 - protein, 253 aa, Zea Mays
MVCIGSLLRALVLSAAASAGRRRGPRILCGHEADVRVTPRHGHGWRGFRAVTGRMMLDSSDCASAAAAAETGQVQPQRRAVGAVPLAHDGGYASGGWEREDGKLSCGYSSFRGKRATMEDFYDVKLTEIDGQAVSLFGVFDGHGGSRAAEYLREHLFDNLLKHPDFLTDTKLAISETYQKTDTDFLESEASAFRDDGSTASTALLLWRFQKITNLTELMSERELKMLVVLSFGLALGGWVVYWQCPVHLAIVY

SEQ ID NO: 177525 - protein, 343 aa, Zea Mays
MKTSTNTLENLFAVFVSTSGLVLFALLIGNVQTYLQSASVRIEEMRVKRRDTEQWMAHRLLPENLKDRIMRHEQYRWQETRGVDEEGLLKNLPKDLRREIKRHLCLSLLMKVPMFENMDEQLLDAMCDRLKPMLYTEGSCIIREGDPVNEMLFIMRGTLESTTTNGGQTGFFNSNVLKGGDFCGEELLTWALDPTSASNLPGSTRTVKTLSEVEAFALRADDLKFVATQFRRLHSKQLQHTFRFYSQQWRTWAACFIQAAWHRYCRKKLEEALYEKEKRLQAAIVSDGTTSLSLGAALYASRFAGNMMRILRRNATRKARLQERVPARLLQKPAEPNFFAEDS

SEQ ID NO: 177526 - protein, 226 aa, Zea Mays
MEVYFERYPGIVQWSPLTYVCKDFFPHLSVGFQDPRVQLHVGDAVEFLRNAPEGTYDAIIVDSSDPIGPAQELVEKPFFDTIARALRPGGVLCNQAESMWLHTHLIQDMLSICRETFKGSVRYAWTSVPTYPSGVIGFLLCAKEGPLVNFLTPINPIEKLEGATKAGREIRFYNSEMHRAAFVLPTFARRELEAYCVSTETEQAEETPAAPLKLTLASRSEIFATS

SEQ ID NO: 177527 - protein, 309 aa, Zea Mays
MEAGGAGSGLNGAVQAKGTGADDGSAKRLPPCCVKARAAAPESEARCHATVVSGWFTEPRSRCGKASKVQYYNNPMWPGEANSLKVEKILYQGKSLYQEVLVFESSTYGKVLVLDGIVQLTDKDECAYQEMITHLPLCSIPSPKKVLVIGGGDGGVLREVSRHSSVESIDICEIDQLVIDVCKDFFPHLSVGFQDPRVQLHVGDAVEFLRNAPEGTYDAIIVDSSDPIGPAQELVEKPFFDTIARALRPGGVLCNQAESMWLHTHLIQDMLSICRETFKGSVRYAWTSVPTYPRCIGQHLFSRPLQGES

SEQ ID NO: 177528 - protein, 50 aa, Zea Mays
MHRAAFVLPTFARRELEAYCVSTETEQAEETPAAPLKLTLASRSEIFATS

SEQ ID NO: 177529 - protein, 60 aa, Zea Mays
MPTSSGKELLMHRAAFVLPTFARRELEAYCVSTETEQAEETPAAPLKLTLASRSEIFATS

SEQ ID NO: 177530 - protein, 151 aa, Zea Mays
MEAYAPAGSYRPVCDTVVFVCLASASALIVFMVAVCFRNAFAANGYATAAVATNGAAGATAANGRSRCGLAPSALSAIPVLAYRRRGAGWAQCAICLALVRDGETVRLLPACGHLFHVECIDLWLRSHATCPLCRRGVVEAPVEKMVIQLN

SEQ ID NO: 177531 - protein, 155 aa, Zea Mays
MEAYAPAGSYRPVCDTVVFVCLASASALIVFMVAVCFRNAFAANGYATAAVATNGAAGATAANGRSRCGLAPSALSAIPVLAYRRRGAGWAQCAICLALVRDGETVRLLPACGHLFHVECIDLWLRSHATCPLCRRGVVEAPVEKGPSPQPEASQ

SEQ ID NO: 177532 - protein, 154 aa, Zea Mays
MEAYAPAGSYRPVCDTVVFVCLASASALIVFMVAVCFRNAFAANGYATAAVATNGAAGATAANGRSRCGLAPSALSAIPVLAYRRRGAGWAQCAICLALVRDGETVRLLPACGHLFHVECIDLWLRSHATCPLCRRGVVEAPVEKVWYALHSGF

SEQ ID NO: 177533 - protein, 50 aa, Zea Mays
MKRKRRRRRRDLEDESRRAVSKTLAAGYWAKFTGSIWATTRATIILGLHP

SEQ ID NO: 177534 - protein, 422 aa, Zea Mays
MMQRDSIQSASEFASRNQLPDKIKQQMLSHFCLQFKTEGLSQQAMLNCLPKGIRSGIAYNLFFTIIRKAYLFHGVSNSFIAELVMEVQAEYFPPMEDIMLQNEAAADIYIIVSGVANLITTANGNEQVYEKVEEGDMFGEVGALCDIPQPFTCRTTTLSQLLRIRKIRLTEIMQEHKEDSKILMNNLFQKLKLHESLPELKQLDRRFMHKYELFHAPQEAWLLPQPYLQYTEHKLEDIGKKIPTFCGDHGSTKLAAETNQMRLTQQGNSHDHGNYMATDGMAGEEGERNEVHINCETKEVSIHINSEDCDAASHWQTDHETVRLGSSHNTSDGITMRENQDSSNIKSSNKRVTIHTYPRNAAGSLVQNGKLINLPGSLDEIFEIGCQKFPGLRPTKLFSGDYAEIDDISVIRDGDHLFLLQM

SEQ ID NO: 177535 - protein, 732 aa, Zea Mays
MLQPREADLPALFLVFIVLPVVAYFLLGRWHDAASKKARVSVLAQRAAEEAYREETMACPDIILPGSSLRTMPYFRPMPALRQEYHECATCHAPAKTRCSRCKAVRYCSGKCQIVHWRQGHKETCQKWLGSGSSSFGGSSTEATEQMPFLTNLNSPLPGGDIHLRDLNFDTLSEPSFPTTDGYNLDTDPFLADRSNMNKSNQGIHMSENGAVGVSFEKNNYNADDEIHSPENLSRNKVSNNYFGSDAISGNGDAIYPAKSNAQQPSSCAPDMRKQPKASITVYQPDIGVYLTSDMVSSCEGSYASASEPLQRSLSSGRTIGKANAVNKRPPYPSSKVVSAQKPQDRVSTSYQNDGHEKNPCNKNDQRSTPKCESSQSTSSNLQKFGASKVEVLKKPSKFLKTSLVGLINDNKRNKVLFPYEDLVKFFQYEARGISPRGLFNCGNSCYANAVLQCLMCTKPLMIYLLLRLHSKDCSSKKWCLMCELEQYASTLRESGGPLSPSRILSNLRNIGCRLGGGTQEDAHEFLRHLVMSMQAACLDGLGGEKHVEPSLQETTLIQQMFGGRLKSKVKCLRCYHESERYENIMDLTLEIHGWVESLQDALTQFTAPEDLDGDNMYKCGSCAAYVKARKQLSVHEVPNILTVVLKRFQSGKYGKINKCVTFPDMLDMVPFVTGSGDNPPLYFLYAVVVHVDTENASFSGHYISYVKDMQGTWLRIDDSEVRFTTRPTPVK

SEQ ID NO: 177536 - protein, 533 aa, Zea Mays
MIIRGTRYCSHMKILSSFFSMKPGVFPLEVFSIVETGSSKKWCLMCELEQYASTLRESGGPLSPSRILSNLRNIGCRLGGGTQEDAHEFLRHLVMSMQAACLDGLGGEKHVEPSLQETTLIQQMFGGRLKSKVKCLRCYHESERYENIMDLTLEIHGWVESLQDALTQFTAPEDLDGDNMYKCGSCAAYVKARKQLSVHEVPNILTVVLKRFQSGKYGKINKCVTFPDMLDMVPFVTGSGDNPPLYFLYAVVVHVDTENASFSGHYISYVKDMQGTWLRIDDSEVQVVSVNQVMSEGAYMLFYMRSFPRPPRIYIEKGPTVPSAKRHTSKYSKGSKHEREQTELLLSANDPAYGVYDFRPDGEGYTQDQQAELRSRDFHRADDAFADSVSADFSEATSSEWSLFTSSDESSFTTESTRDSFSVVDYGDNAGLDPISSIFGPSYAPEHHPGPPGSFAACTRLSPSNPQTRYFSESTGFVSDYSSSGIVHRGRDPGRAYTCSAEPLASAAAAHQHQRYALSGRDGLVQTSGFCQM

SEQ ID NO: 177537 - protein, 824 aa, Zea Mays
MPFLTNLNSPLPGGDIHLRDLNFDTLSEPSFPTTDGYNLDTDPFLADRSNMNKSNQGIHMSENGAVGVSFEKNNYNADDEIHSPENLSRNKVSNNYFGSDAISGNGDAIYPAKSNAQQPSSCAPDMRKQPKASITVYQPDIGVYLTSDMVSSCEGSYASASEPLQRSLSSGRTIGKANAVNKRPPYPSSKVVSAQKPQDRVSTSYQNDGHEKNPCNKNDQRSTPKCESSQSTSSNLQKFGASKVEVLKKPSKFLKTSLVGLINDNKRNKVLFPYEDLVKFFQYEARGISPRGLFNCGNSCYANAVLQCLMCTKPLMIYLLLRLHSKDCSSKKWCLMCELEQYASTLRESGGPLSPSRILSNLRNIGCRLGGGTQEDAHEFLRHLVMSMQAACLDGLGGEKHVEPSLQETTLIQQMFGGRLKSKVKCLRCYHESERYENIMDLTLEIHGWVESLQDALTQFTAPEDLDGDNMYKCGSCAAYVKARKQLSVHEVPNILTVVLKRFQSGKYGKINKCVTFPDMLDMVPFVTGSGDNPPLYFLYAVVVHVDTENASFSGHYISYVKDMQGTWLRIDDSEVQVVSVNQVMSEGAYMLFYMRSFPRPPRIYIEKGPTVPSAKRHTSKYSKGSKHEREQTELLLSANDPAYGVYDFRPDGEGYTQDQQAELRSRDFHRADDAFADSVSADFSEATSSEWSLFTSSDESSFTTESTRDSFSVVDYGDNAGLDPISSIFGPSYAPEHHPGPPGSFAACTRLSPSNPQTRYFSESTGFVSDYSSSGIVHRGRDPGRAYTCSAEPLASAAAAHQHQRYALSGRDGLVQTSGFCQM

SEQ ID NO: 177538 - protein, 774 aa, Zea Mays
MPFLTNLNSPLPGGDIHLRDLNFDTLSEPSFPTTDGYNLDTDPFLADRSNMNKSNQGIHMSENGAVGVSFEKNNYNADDEIHSPENLSRNKVSNNYFGSDAISGNGDAIYPAKSNAQQPSSCAPDMRKQPKASITVYQPDIGVYLTSDMVSSCEGSYASASEPLQRSLSSGRTIGKANAVNKRPPYPSRSTPKCESSQSTSSNLQKFGASKVEVLKKPSKFLKTSLVGLINDNKRNKVLFPYEDLVKFFQYEARGISPRGLFNCGNSCYANAVLQCLMCTKPLMIYLLLRLHSKDCSSKKWCLMCELEQYASTLRESGGPLSPSRILSNLRNIGCRLGGGTQEDAHEFLRHLVMSMQAACLDGLGGEKHVEPSLQETTLIQQMFGGRLKSKVKCLRCYHESERYENIMDLTLEIHGWVESLQDALTQFTAPEDLDGDNMYKCGSCAAYVKARKQLSVHEVPNILTVVLKRFQSGKYGKINKCVTFPDMLDMVPFVTGSGDNPPLYFLYAVVVHVDTENASFSGHYISYVKDMQGTWLRIDDSEVQVVSVNQVMSEGAYMLFYMRSFPRPPRIYIEKGPTVPSAKRHTSKYSKGSKHEREQTELLLSANDPAYGVYDFRPDGEGYTQDQQAELRSRDFHRADDAFADSVSADFSEATSSEWSLFTSSDESSFTTESTRDSFSVVDYGDNAGLDPISSIFGPSYAPEHHPGPPGSFAACTRLSPSNPQTRYFSESTGFVSDYSSSGIVHRGRDPGRAYTCSAEPLASAAAAHQHQR

SEQ ID NO: 177539 - protein, 263 aa, Zea Mays
MLDVERGKTWRLLLKRVKNQILNLKRKNKHKLNQAQSKSKVNRIRELPHNSKIIATHTDSPDVLIWDVEAQPNRHVVLGASESRPDLILTGHKENAEFALAMCPAEPYVLSRGKDKSVVLWSIQDHISALGDSSSSPGASGSKQSVKTANEKESPKVDPRGIFHGHDNTVEDVQFCPSSAHEFCSVGDDACLILWDARTGTAPAVKVEKAHSGDVHCLDWNPLDVNYILTGYDGIKVQFSIIVETNSISISSLYVQVMNLSID

SEQ ID NO: 177540 - protein, 235 aa, Zea Mays
MSEQKRDQKLVLYEYMEKGDLHRWLHELPVGSMDTEDICIDAMEAMTEDSRKPAGDWPTRYRIILGVARGLAFLHQGWAGAGGGRRPIVHGRLVPTNVLLGDDMEPRISDFLPHPGGGGGAETAEGDVYRFGALVFEVVTGQARWGDAATTSWARGVVRNRKGLNLVDERLRDETAGTGAERELLECLQVGFLCTAAAPEKRPTMQQVVGLLKDVRPAATAGGGVPPPPLRSLAE

SEQ ID NO: 177541 - protein, 450 aa, Zea Mays
MQASWASVLMIHMGLKPLEDFSILQAGELMYFFWKMDPEDSSDFEEEDDEEEDDDLMIFILPALYLASTGIGTLDQTSMVSDGTAIETPSQVSKFNDAERICKVLEDDRGQGYDKLRVEPHVLLELSRYLRSNDLLKNTRGVSVEEKIGMFIYMLSRNASFQKLSDRFKYSTETIHRHIKACFDAVTPMTGEFVRPPSIQAHRKISSDTRYGPYFENCIGAIDGIHVPMTISDSEAAPYRNRQESLSQNVMLACDFDLNFVHVSCSREGSASDAAVLYSAIEYGFEVPRGKFYLVDGGYANTPSFLAPFSEVSYHAEEQDESNFQPIDYRELFNLRHAQLYRHIKRAVGLLKMRFPILNVATSYRKDTQLKIPSAAVVMHNIIQRQGGSEELLCEQTIPFASRKTVNLPSGDDTYGYDVSAFNSECDMGNALRDGIALRMWADYESSMYV

SEQ ID NO: 177542 - protein, 382 aa, Zea Mays
MDPEDSSDFEEEDDEEEDDDLMIFILPALYLASTGIGTLDQTSMVSDGTAIETPSQVSKFNDAERICKVLEDDRGQGYDKLRVEPHVLLELSRYLRSNDLLKNTRGVSVEEKIGMFIYMLSRNASFQKLSDRFKYSTETIHRHIKACFDAVTPMTGEFVRPPSIQAHRKISSDTRYGPYFENCIGAIDGIHVPMTISDSEAAPYRNRQESLSQNVMLACDFDLNFVHVSCSREGSASDAAVLYSAIEYGFEVPRGKFYLVDGGYANTPSFLAPFSEVSYHAEEQDESNFQPIDYRELFNLRHAQLYRHIKRAVGLLKMRFPILNVATSYRKDTQLKIPSAAVVMHNIIQRQGAFNSECDMGNALRDGIALRMWADYESSMYV

SEQ ID NO: 177543 - protein, 50 aa, Zea Mays
MLQAVQKPSDNHSSFLYPTVLRYKLSLSRTPSTRRCCSLMHQLQPYALSK

SEQ ID NO: 177544 - protein, 89 aa, Zea Mays
MLTRHFFHQSHLQHFAYKKIYLFFNCMSGRGGLVGEMRCEELVSERATGHRRRVVRCPGPRLPGPDPGRPLPRSRSASAPNSPADGTVR

SEQ ID NO: 177545 - protein, 76 aa, Zea Mays
MRGAGVRAGYWSPPARCALPWSPPPRTGPRPPPPAVPLGLRSELSCRWDCEMTRRAPRKNHWASSHFRAWQWHRLT

SEQ ID NO: 177546 - protein, 473 aa, Zea Mays
MDPPRPAAGRSGGVGTGDSPVSWDDDDDDCSGGGGRVEGLAGLHIFDQEADEPPAKNSMANRLDTNCIPVANGCNTGTSVEKEPVNGIDPPHEHTGIWVPVSVPPMTAQDREEWHRGFSCNGRNFPEEEFSWELDEENNEMTMWDVFADMVVAAKDKVVSSATYDFGRYGMSVVSNFFLQEAWNDMAQTLADANTGIVNELLDTEPTKWLPDSAATSCMLCGVRFHPIMCSRHHCRFCGGVFCNGCSKGRSLMPPKFRTAEPQRVCDVCGVRLESIQPQLMNQISRATQLPTRDVTDLSTLRSWLNFPWAHTMEYEIYKATNSLRNYYKVGRLKPEKAIPDTILRQAKGLAIVTVVKVGMMVTYKLGTGLVIARRVDDSWSPPSAISTCGIGYGAQAGGEIADFIIVLRNTDAIRTFSGKAHLSVGAGVSASAGHVGRAAEADFRAGDGGYAACYTYSCSKGSWETQGKTRPS

SEQ ID NO: 177547 - protein, 233 aa, Zea Mays
MDPPRPAAGRSGGVGTGDSPVSWDDDDDDCSGGGGRVEGLAVGRLKPEKAIPDTILRQAKGLAIVTVVKVGMMVTYKLGTGLVIARRVDDSWSPPSAISTCGIGYGAQAGGEIADFIIVLRNTDAIRTFSGKAHLSVGAGVSASAGHVGRAAEADFRAGDGGYAACYTYSCSKGAFVGCALNGSIVSTRDTENARFYGGPVKASDILLGSMAKPPAASPLYKALSELFDKIGK

SEQ ID NO: 177548 - protein, 306 aa, Zea Mays
MNCSSCCAAATPSSPALLARPRGGLAASCSTTTANQKVLFLGSKQFPRITYSRASSRLSRREVIAFAGQQPWDIGRFVKTLYFFNGPPNLLKIVESIISSFTGPASSEVPKKMETSDVVLVTGATGGVGRRVVDVLQKKGVPVRVLARNVDKARSMLGPDVPLIIGDVTKEDTLDPKLFKGIKKVVNAVSVIVGPKEGDTPDRQKYKQGIKFFEPEIKGPSPEMVEYIGMQNLINAIKSSVGLSEGKLLFGFKGNLSGEIVWGALDDVVMGGVSESTFQILPTGSESSGPTGLFKEFYCARGPVSI

SEQ ID NO: 177549 - protein, 158 aa, Zea Mays
MWRVPQASEKKQSNPMREIKVQKLVLNISVGESGDRLTRAAKVLEQLSGQTPVFSKARYTVRSFGIRRNEKIACYVTVRGDKAMQLLESGLKVKEYELLRRNFSDTGCFGFGIQEHIDLGMIHQQASMGWTSTSCLSVLAIASRAAGGASPVLGFSIG

SEQ ID NO: 177550 - protein, 182 aa, Zea Mays
MTVYSKSSVIPIHCSEEDISRTRDILSCSVGSFPCSYLGIPLTLAKPTKADLLPLIDKVAIKLLGWKVHLLNKAGRLELVKSALLATPIHLMLALDLPKWVIKAIDKRRRGFLWKGQEQANGGNCMVSWRKVQRPYQYGGLGIHDLERMGWTLRLRWLWFMKTDTSKPWFPCTSSSLVQNGS

SEQ ID NO: 177551 - protein, 54 aa, Zea Mays
MRQLFPSSTLVSPLAPSAIPVHYRSCTAGSKERRNSWYCGCSSHVGWLPCPSLG

SEQ ID NO: 177552 - protein, 51 aa, Zea Mays
MSRTQRRIFVLVSIPIAPPARSCTAGSKERRNSWYCGCSSHVGWLPCPSLG

SEQ ID NO: 177553 - protein, 302 aa, Zea Mays
MHRKNVTGQEFTHVARSRRVYAHAHDYHINSISNNSDGETFISADDLRINLWNLEISNQSFNIVDVKPANMEDLTEVITCAEFHPTHCNTLAYSSSKGTIRLIDLRQSALCDNHAKLFEEHEAPGSRSFFTEIIASVSDIKFARDGRHILSRDYMTLKLWDLNMDSGPVATFQVHEYLRPKLCDLYENDSIFDKFECCLSGDGLHVATGSYSNLFRVFGCSPESVEASTLEASRNPMRRQVADPARPARTLTGAVRRGGENTSVDASGNSCDLSTKLLHLAWHPTENSIACAAANSLYMYYA

SEQ ID NO: 177554 - protein, 477 aa, Zea Mays
MVSFSVDIISAIEFDKSGNHLATGDRGGRVVLFERTDIADNACRGELERQEYLVSRHPEFRYKTEFQSHEPEFDYLKSLEIEEKINKIKWCQTTNNALFLLSTNDKTIKYWKVQEKKVKRVSVMNLDTSQSSDNGSTSSPGTSSCRALLPNGGCTGKMYSPNNNMSFPPGGCTSLRLPVVVTGQEFTHVARSRRVYAHAHDYHINSISNNSDGETFISADDLRINLWNLEISNQSFNIVDVKPANMEDLTEVITCAEFHPTHCNTLAYSSSKGTIRLIDLRQSALCDNHAKLFEEHEAPGSRSFFTEIIASVSDIKFARDGRHILSRDYMTLKLWDLNMDSGPVATFQVHEYLRPKLCDLYENDSIFDKFECCLSGDGLHVATGSYSNLFRVFGCSPESVEASTLEASRNPMRRQVADPARPARTLTGAVRRGGENTSVDASGNSCDLSTKLLHLAWHPTENSIACAAANSLYMYYA

SEQ ID NO: 177555 - protein, 505 aa, Zea Mays
MEREPKSPDDRPEPAAAAAQPQPQPLEWRFAQVFGERAAGEDVQDVDIISAIEFDKSGNHLATGDRGGRVVLFERTDIADNACRGELERQEYLVSRHPEFRYKTEFQSHEPEFDYLKSLEIEEKINKIKWCQTTNNALFLLSTNDKTIKYWKVQEKKVKRVSVMNLDTSQSSDNGSTSSPGTSSCRALLPNGGCTGKMYSPNNNMSFPPGGCTSLRLPVVVTGQEFTHVARSRRVYAHAHDYHINSISNNSDGETFISADDLRINLWNLEISNQSFNIVDVKPANMEDLTEVITCAEFHPTHCNTLAYSSSKGTIRLIDLRQSALCDNHAKLFEEHEAPGSRSFFTEIIASVSDIKFARDGRHILSRDYMTLKLWDLNMDSGPVATFQVHEYLRPKLCDLYENDSIFDKFECCLSGDGLHVATGSYSVEASTLEASRNPMRRQVADPARPARTLTGAVRRGGENTSVDASGNSCDLSTKLLHLAWHPTENSIACAAANSLYMYYA

SEQ ID NO: 177556 - protein, 370 aa, Zea Mays
MVSFSGIDLKLASSFLFFPVLINSSLCCVTACRLLFSVLFISLDICCVGLICSPAKSVCILISMLHVSVDIISAIEFDKSGNHLATGDRGGRVVLFERTDIADNACRGELERQEYLVSRHPEFRYKTEFQSHEPEFDYLKSLEIEEKINKIKWCQTTNNALFLLSTNDKTIKYWKVQEKKVKRVSVMNLDTSQSSDNGSTSSPGTSSCRALLPNGGCTGKMYSPNNNMSFPPGGCTSLRLPVVVTGQEFTHVARSRRVYAHAHDYHINSISNNSDGETFISADDLRINLWNLEISNQSFNIVDVKPANMEDLTEVITCAEFHPTHCNTLAYSSSKGTIRLIDLRQSALCDNHAKLLRSMKHLDQDPFLQR

SEQ ID NO: 177557 - protein, 164 aa, Zea Mays
MDLTTAVMGDQTTEVELTAILTVVVVELVVAAVEAAVVMGMVVLIDLLQQVMDMMVAQEQDMAMVEGMAMEAMLALGLVLVVVMVDPCMEVLPMVHMVPMVVAPMEEVPTEAVPMEVVLPMVAPQVVMALADTAVMAEQAVLVVGAQVLGVLAGIIHTENKRRV

SEQ ID NO: 177558 - protein, 343 aa, Zea Mays
MAGYPEDNQHELNGKIFVGGVAWETTEESFSKHFEKYGAITDSVIMKDKHTKMPRGFGFVTFSDPSVIDKVLEDDHVIDGRTVEVKRTVPREEMITKDGPKTRKIFIGGLPPSLTEDELKDHFSSYGNVVEHQIMLDHSTGRSRGFGFITFESEDSVERVISEGRMRDLGGKQVEIKKAEPKKHGSDHSSNGRSNHGGGAYRNSYRSGGGAGSGSSGGGGGYGYGGAYRSAAAGYGYDGGAGAGYGYGRGYGYGGNAGFGSSFGGGYGGSMYGGAAYGAYGAYGGGAYGGGAYGGGAYGGGAAYGGAPGGYGTGGYGSYGGAGSTGGGSTGARGSSRYHPYGK

SEQ ID NO: 177559 - protein, 279 aa, Zea Mays
MGALERFLSEALLGRLLKVEVKRTVPREEMITKDGPKTRKIFIGGLPPSLTEDELKDHFSSYGNVVEHQIMLDHSTGRSRGFGFITFESEDSVERVISEGRMRDLGGKQVEIKKAEPKKHGSDHSSNGRSNHGGGAYRNSYRSGGGAGSGSSGGGGGYGYGGAYRSAAAGYGYDGGAGAGYGYGRGYGYGGNAGFGSSFGGGYGGSMYGGAAYGAYGAYGGGAYGGGAYGGGAYGGGAAYGGAPGGYGTGGYGSYGGAGSTGGGSTGARGSSRYHPYGK

SEQ ID NO: 177560 - protein, 751 aa, Zea Mays
MSRMKHLLRKLHLAGGPAGAGAGGAAPDHHRSRHRRSGHPTPPPPGAAVAAPEPPQPAVTPAAAVSIAPAVEEPRGLEAEAATTRLEEDYQVRLALAISASDHAGLVDADSVQIRAAELISLGAGAGSGHDRSPAEALSARYWNHSVVNYDEQLPDGFYDVCGAQLHPGFQAKFPSLEYLRAVPLGRDAPFLAILVDREHDPALKRLEDRAAQIAAQTRAGHGGAASAELAQKIVGLIVNAMGGLVEDADGMNREWSIKSHELSLQLNSVVLPLGSLRVGLSRHRSLLFKVLADRVNLPCKLLKGICYTGTDEGAVNLVKVDFDSMEYIIDLMGAPGTLIPSDISGSQFQDSNNSQLSSDAIEESVAELCLALEQINGGYENKNTIGGCSSGHSSILALTSSHLGDLSQTELKQNVVSEKKNDGDISEHVKVDDVSKYIVPEVVDPQFAQNLHDLLLESGALLPSDLLSDQNNHDIHEKESTGWLLVAQTTQNLPNAFVAKDSSSPDEDEQPRAENTEAAIRDLDLHGHTASVISNEDQMVAGSLVNMSGSSNGNLDTLSWSSVKTISSVIDDIAEYEIPWEDLDIGERIGLGSFGEVYRADWNGTEVAVKKFLDQDLSGVSLEQFKCEVRIMSRLRHPNVVLFLGYVTQSPNLSILTEYLPRGSLYRLLHRPNSRIDEVRRLKMAFDVAKGMNYLHSSHPTIVHRDLKSPNLLVDKNWVVKVSDFGMSRLKHHTFLSSKSTAGTVIPLTR

SEQ ID NO: 177561 - protein, 748 aa, Zea Mays
MSRMKHLLRKLHLAGGPAGAGAGGAAPDHHRSRHRRSGHPTPPPPGAAVAAPEPPQPAVTPAAAVSIAPAVEEPRGLEAEAATTRLEEDYQVRLALAISASDHAGLVDADSVQIRAAELISLGAGAGSGHDRSPAEALSARYWNHSVVNYDEQLPDGFYDVCGAQLHPGFQAKFPSLEYLRAVPLGRDAPFLAILVDREHDPALKRLEDRAAQIAAQTRAGHGGAASAELAQKIVGLIVNAMGGLVEDADGMNREWSIKSHELSLQLNSVVLPLGSLRVGLSRHRSLLFKVLADRVNLPCKLLKGICYTGTDEGAVNLVKVDFDSMEYIIDLMGAPGTLIPSDISGSQFQDSNNSQLSSDAIEESVAELCLALEQINGGYENKNTIGGCSSGHSSILALTSSHLGDLSQTELKQNVVSEKKNDGDISEHVKVDDVSKYIVPEVVDPQFAQNLHDLLLESGALLPSDLLSDQNNHDIHEKESTGWLLVAQTTQNLPNAFVAKDSSSPDEDEQPRAENTEAAIRDLDLHGHTASVISNEDQMVAGSLVNMSGSSNGNLDTLSWSSVKTISSVIDDIAEYEIPWEDLDIGERIGLGSFGEVYRADWNGTEVAVKKFLDQDLSGVSLEQFKCEVRIMSRLRHPNVVLFLGYVTQSPNLSILTEYLPRGSLYRLLHRPNSRIDEVRRLKMAFDVAKGMNYLHSSHPTIVHRDLKSPNLLVDKNWVVKVSDFGMSRLKHHTFLSSKSTAGTAYA

SEQ ID NO: 177562 - protein, 772 aa, Zea Mays
MSRMKHLLRKLHLAGGPAGAGAGGAAPDHHRSRHRRSGHPTPPPPGAAVAAPEPPQPAVTPAAAVSIAPAVEEPRGLEAEAATTRLEEDYQVRLALAISASDHAGLVDADSVQIRAAELISLGAGAGSGHDRSPAEALSARYWNHSVVNYDEQLPDGFYDVCGAQLHPGFQAKFPSLEYLRAVPLGRDAPFLAILVDREHDPALKRLEDRAAQIAAQTRAGHGGAASAELAQKIVGLIVNAMGGLVEDADGMNREWSIKSHELSLQLNSVVLPLGSLRVGLSRHRSLLFKVLADRVNLPCKLLKGICYTGTDEGAVNLVKVDFDSMEYIIDLMGAPGTLIPSDISGSQFQDSNNSQLSSDAIEESVAELCLALEQINGGYENKNTIGGCSSGHSSILALTSSHLGDLSQTELKQNVVSEKKNDGDISEHVKVDDVSKYIVPEVVDPQFAQNLHDLLLESGALLPSDLLSDQNNHDIHEKESTGWLLVAQTTQNLPNAFVAKDSSSPDEDEQPRAENTEAAIRDLDLHGHTASVISNEDQMVAGSLVNMSGSSNGNLDTLSWSSVKTISSVIDDIAEYEIPWEDLDIGERIGLGSFGEVYRADWNGTVLCEYLSTVLGIHFSIMTKPNEVAVKKFLDQDLSGVSLEQFKCEVRIMSRLRHPNVVLFLGYVTQSPNLSILTEYLPRGSLYRLLHRPNSRIDEVRRLKMAFDVAKGMNYLHSSHPTIVHRDLKSPNLLVDKNWVVKVSDFGMSRLKHHTFLSSKSTAGTVIPLTR

SEQ ID NO: 177563 - protein, 690 aa, Zea Mays
MSRMKHLLRKLHLAGGPAGAGAGGAAPDHHRSRHRRSGHPTPPPPGAAVAAPEPPQPAVTPAAAVSIAPAVEEPRGLEAEAATTRLEEDYQVRLALAISASDHAGLVDADSVQIRAAELISLGAGAGSGHDRSPAEALSARYWNHSVVNYDEQLPDGFYDVCGAQLHPGFQAKFPSLEYLRAVPLGRDAPFLAILVDREHDPALKRLEDRAAQIAAQTRAGHGGAASAELAQKIVGLIVNAMGGLVEDADGMNREWSIKSHELSLQLNSVVLPLGSLRVGLSRHRSLLFKVLADRVNLPCKLLKGICYTGTDEGAVNLVKVDFDSMEYIIDLMGAPGTLIPSDISGSQFQDSNNSQLSSDAIEESVAELCLALEQINGGYENKNTIGGCSSGHSSILALTSSHLGDLSQTELKQNVVSEKKNDGDISEHVKVDDVSKYIVPEVVDPQFAQNLHDLLLESGALLPSDLLSDQNNHDIHEKESTGWLLVAQTTQNLPNAFVAKDSSSPDEDEQPRAENTEAAIRDLDLHGHTASVISNEDQMVAGSLVNMSGSSNGNLDTLSWSSVKTISSVIDDIAEYEIPWEDLDIGERIGLGSFGEVYRADWNGTEVAVKKFLDQDLSGVSLEQFKCEVRIMSRLRHPNVVLFLGYVTQSPNLSILTEYLPRGSLYRLLHRPNSRIDEVRRLKMAFDVG

SEQ ID NO: 177564 - protein, 736 aa, Zea Mays
MAAAPRSLVTCSGGGSSSSRILLAVFLAAALLASAANAAVSYDHRSLVINGRRRILISGSIHYPRSAPEMWPGLIQKAKDGGLDVVQTYVFWNGHEPAQGQYYFADRYDLVRFVKLVRQAGLYVHLRVGPYVCAEWNFGGFPVWLKYVPGIRFRTDNGPFKAAMQKFVEKIVSMMKSEGLFEWQGGPIIMAQVENEFGPMESVVGSGGKPYAHWAAQMAVGTNAGVPWVMCKQDDAPDPVINTCNGFYCDYFTPNNKHKPTMWTEAWTGWFTKFGGAAPHRPVEDLAFAVARFVQKGGSFVNYYMYHGGTNFGRTAGGPFIATSYDYDAPIDEFGLLRQPKWGHLRNMHRAIKQAEPALVSGDPTIRSIGNYEKAYVFKSKNGACAAFLSNYHVKSAVRIRFDGRHYDLPAWSISILPDCKTAVFNTATVKEPTLLPKMSPVMHRFAWQSYSEDTNSLDDSAFARDGLIEQLSLTWDKSDYLWYTTHVNIGSNERFLKSGQWPQLSVYSAGHSMQVFVNGRSYGSVYGGYDNPKLTFSGYVKMWQGSNKISILSSAVGLPNNGDHFELWNVGVLGPVTLSGLNEGKRDLSHQRWIYQVGLKGESLGLHTVTGSSAVEWAGPGGGTQPLTWHKALFNAPAGSDPVALDMGSMGKGQVWVNGRHAGRYWSYRAHSRGCGRCSYAGTYREDQCTSNCGDLSQRWYHVPRSWLKPSGNLLVVLEEYGGDLAGVSLATRTT

SEQ ID NO: 177565 - protein, 430 aa, Zea Mays
MEERTLGAPPVAPSSRPATTTMPPLTSLGLLRQPKWGHLRNMHRAIKQAEPALVSGDPTIRSIGNYEKAYVFKSKNGACAAFLSNYHVKSAVRIRFDGRHYDLPAWSISILPDCKTAVFNTATVKEPTLLPKMSPVMHRFAWQSYSEDTNSLDDSAFARDGLIEQLSLTWDKSDYLWYTTHVNIGSNERFLKSGQWPQLSVYSAGHSMQVFVNGRSYGSVYGGYDNPKLTFSGYVKMWQGSNKISILSSAVGLPNNGDHFELWNVGVLGPVTLSGLNEGKRDLSHQRWIYQVGLKGESLGLHTVTGSSAVEWAGPGGGTQPLTWHKALFNAPAGSDPVALDMGSMGKGQVWVNGRHAGRYWSYRAHSRGCGRCSYAGTYREDQCTSNCGDLSQRWYHVPRSWLKPSGNLLVVLEEYGGDLAGVSLATRTT

SEQ ID NO: 177566 - protein, 459 aa, Zea Mays
MSMELPSIDFGESMELSSAMSMESLSCAGDVEAEMRRLRLELKQTMEMYNSACKEAVDAKQKAAQMHQMKVEESKKYQELRNSEEEALALVEMEKAKCRAALEAAEAAQKIAELEAQKRLRAEWKAKREAEDRKKATDALNKNDIRYRRYSIDDIEAATHKFDKALKIGEGGYGPVYKAVLDHTNVAIKILRPDASQGRKQFQQEIEVLSCMRHPNMVLLLGACPEYGCLVYEYMDYGSLEDRLCRRGKTLPIPWSIRFRIAADIATGLLFLHQAKPEPLVHRDLKPANILLDHNFVSKISDVGLARLVPQSAADVTQYRMTSTAGTFCYIDPEYQQTGMLTTKSDVYSLGIMLLQIITARSPMGLTHHVENAIERGAFQEILDPTVTDWPVEEALEFAKLALRCAELRKKDRPDLGKEILPELNRLRNLGHEYETSQVSCASTNCSSSAPYSFNNDDI

SEQ ID NO: 177567 - protein, 270 aa, Zea Mays
MEEWNVQPVRCPVTVCGDIHGQFYDLIELFRIGGDSPDTNYLFMGDYVDRGYYSVETVSLLVALKVRYRDRITILRGNHESRQITQVYGFYDECLRKYGNANVWKYFTDLFDYLPLTALIENQVFCLHGGLSPSLDTLDNIRSLDRIQEVPHEGPMCDLLWSDPDDRCGWGISPRGAGYTFGQDIAQQFNHTNGLSLISRAHQLVMEGFNWCQDKNVVTVFSAPNYCYRCGNMAAILEIGENMDQNFLQFNPAPRQIEPDTTRKTPDYFL

SEQ ID NO: 177568 - protein, 131 aa, Zea Mays
MFDKTPSNTQVPHEGPMCDLLWSDPDDRCGWGISPRGAGYTFGQDIAQQFNHTNGLSLISRAHQLVMEGFNWCQDKNVVTVFSAPNYCYRCGNMAAILEIGENMDQNFLQFNPAPRQIEPDTTRKTPDYFL

SEQ ID NO: 177569 - protein, 65 aa, Zea Mays
MASKQQQKQFLDEAMIKQPTPEEDRQMEMLDLSPLWSSLTWSSFCCSTACADSRQLHQSRLAGST

SEQ ID NO: 177570 - protein, 832 aa, Zea Mays
MRQKGTMRTETFPLPPRRNPPLGVTSPADASILAPHHSHTAALAPSPAATTSLSPASVGSPSFPLSGGRSSLLGGSSSPVAALVKGGEPPSYRDVLVSARPSSGADSSSGDGAGGGWVKVVGRRGRRLSAGQSFLQTRSSFVQRPVPRSLHPPVDLRGRCFNCFASSHRAAACRSIVRCFNCRLPGHRFRVCPRRATAPAPPRRVSVWRPVSKGPSVLPVPSCHAMEVAPLSGGSSAVEKARKRTRRGQRKRKNGADAGGDSGLRSVVPPVESAHNVCVLKRSGRIDRAEEGLRRALILTVVGEEGLGCALEIRDALALKFQLQAESLHLRRAAPNSFLCFFPSVEVAEQIIQNGHSIFAPPFRLHVRRWSRHAFASGGGALPVLVDIELQGIPAHLWDLETAELLLGAHGLVQGLSTVSSEGVDSADMTAFSVSFWCFSPEALPDVLFLHAVEPRVAVEAGSWFPRTMVFKIAVKVIRSGDMIGADQPPPSLPDLGGDDGDRDNLRRRPHLHYHPSPSARVSALSRLGPRVSSAVPGGGPVDAISPLMVGVERMAPGSTLSPGSVISFPVDAHSFPVLAVDEVVAPGSPDSTAQDVDWDPVDAHSLPLISVDGMVAPGVLVGTVDCGPAVQLGSSVLSMPADPPGSDIQVIDVLAGSVTVIVKFGISVQRIIWTVDPLNRMSSLLLSKMLHGWTVASPCLKVYSRRKKLVIEPVQDEECVLSSQLLEFKNDVTGPINSLLPPPRTTNRRRRTVPANFIPRRSRRVAKFPPELGSSSAAQVCRHLGFCDEMENISLDDANGYARLFKNGLSGSHVAAVAALFGWQVPLVGQC

SEQ ID NO: 177571 - protein, 131 aa, Zea Mays
MSCVPKVRHIFLPLPVSSEIAAEFKNTCWWIVQTTVLPVSTVFRTVLITIAAALASSPEVGSSMNMMDGLATSSTAIVSLFRCSVDKPFTPGSPTNAPLSGVNSTSSMTSSTNICTHEVIRLAKHYNYQLL

SEQ ID NO: 177572 - protein, 50 aa, Zea Mays
MNRKPGDWDCRACQHLNFSRRDFASRMECFRCNAPRDSGSAAMTYENYLH

SEQ ID NO: 177573 - protein, 101 aa, Zea Mays
MASALWCFHRASEKGHAGAAIAYGSLLLKGAEIPEVITRFNSGKSPSTGKMRKRTQQQDPVKLAKEQFQIAAEAGCDLGLRWLKRLEAYENQEEKLKQVQQ

SEQ ID NO: 177574 - protein, 257 aa, Zea Mays
MALTKDGKLFGWGYSENGRLGEMGQSTRALSAEEYIGKTVDKYSSVMLEAVEKMVEEKIQSEDDMPIIWEPSLVHEVSRLEVSDVSCGLDHSLILCSDGIVLSGGDNTYGQLGRKAGPPELLPVGMSYRPFSMSASVGHSLALCYTTTEGTAGVETGLLSWGWNCSSQLGRSSQEDIPALVDSLSRERLVSASAGRVHSVALTSKGEVWTWGSGRNGRLGLGSSIDEAAPCLVDTLEGVEVLQVAAGMDHNLLLVAE

SEQ ID NO: 177575 - protein, 281 aa, Zea Mays
MRSLLLPRRCAFASRRFLSALAGSGARAPCAGVVYGFGDNSHGAVGQPPPAAHAYVPTPVPSLPPSVSAVAAGHYHSLAVSAAGEVWAWGRNDEGQLGRGLHSPRNTWSNAELVRGLENVQVQAVSASGVVSAAIGSDGSLWVWGRSKRGQLGLGKDIVEAAVPSKVKALASYDIVKVSFGWGHSMALTKDGKLFGWGYSENGRLGEMGQSTRALSAEEYIGKTVDKYSSVMLEAVEKMVEEKIQSEDDMPIIWEPSLVHEVSRLEVSDVSCGLDHSLILC

SEQ ID NO: 177576 - protein, 388 aa, Zea Mays
MVTSWYRNLVALSDDLESSYDLMRRPLVVPASVHPVTFTSSTSFSSLYRPRLPTLMPWPGPHLTPFTRMVLLPGPMETQSSPTAMVVPLMVTLLESPMWMPSVLGLLPGALIVTLSITTFLLPKMFMWKNLLFSSVMPRIWAFVTKSSTRLCTRSPLRFTSHHLPKQGTDRERRSTYVGEDFAVVGTLALVLVPHQGSLPVDGAVAVDGQVVDVLDLDPVPLVRVEVAGAEQVAVEADDDGGLAGAHQVQRARQVVALGDDDLLLPRRLARVLPRLEHHRGAVRLAVALGAQLRDVQRASGHRRRASHSLRLRLRLRRHRARGRRHRGEHQQSGHGCLHRRTADERHRYVSCCRVRAAPEPWRARAHIYAATARGWRAMFGMAMARRA

SEQ ID NO: 177577 - protein, 340 aa, Zea Mays
MGIMEDVTIIPQPVGDSSKVDLVMNLVERPSGGFSAGGGISSGITNGPLSGLIGSFAYSHRNVFGRNKKLNLSLERGQIDSIFRLNFTDPWIDGDNKRTSRTVMVQNSRTPGTLVHGGDHPDHGPITIGRVTAGLEYSRPFRPKWSGTLGLIFQHAGARDDKGNPAIRDFYNSQLTASGHDYDDTLLAKFESIYTDSGDHSSAMFVFSVEQGLPVLPEWLSFNRVTTRLRQGYEIGPARLLLSASGGHVEGNFPPHEAFAIGGTNSVRGYEEGAVGSGRSYAVGSGEVSCRMVNFFLLPTLLAFCSCQMGSTWKYAKIQTQLYGNLPQNAVLATRVYIST

SEQ ID NO: 177578 - protein, 379 aa, Zea Mays
MLTYKIGTKVSYAEILSGGILRLEVSEAEVNNISIRFLDRKTGEPTLGKTQPETILRQLTTRKGQAYNRAQVKRDVETILTMGIMEDVTIIPQPVGDSSKVDLVMNLVERPSGGFSAGGGISSGITNGPLSGLIGSFAYSHRNVFGRNKKLNLSLERGQIDSIFRLNFTDPWIDGDNKRTSRTVMVQNSRTPGTLVHGGDHPDHGPITIGRVTAGLEYSRPFRPKWSGTLGLIFQHAGARDDKGNPAIRDFYNSQLTASGHDYDDTLLAKFESIYTDSGDHSSAMFVFSVEQGLPVLPEWLSFNRVTTRLRQGYEIGPARLLLSASGGHVEGNFPPHEAFAIGGTNSVRGYEEGAVGSGRSYAVGSVWATGRRGLWRLW

SEQ ID NO: 177579 - protein, 473 aa, Zea Mays
MADEALDQPPDATPSPTPATPPVPATPSPTVLLRPRREAFEHGLLPIPKLIFPEGTLAQTLAQLKEKLAASAPDGRVRAAALAEALQIPQEQAALALATLAAVLPAEDPALGDGAVDGSAADIRDMLLFLYIQSYKRLVPRSAHKDSPVVADVWPSTSAFDGYLSALSPIQLVRSNSRRFMPSQADEEIHQLSYLQKHMANILTLLADSVEGDGDDSLVLTMETFEHLGFLVQFSEGTSLSQAATFFACSDPDMPDVPVPAAQVLDWMSQKIAFSLEYSAERSAAKESNQQTMSDLDVTMAEANTSHPRNSTPSANPAYYRNVTFVEGFSKTSVVKHASDVKGNSIKVLNCHDSVIYILAPLKYATVYGCSDATVVLGAVGKVVKVEHCERVHIIAAAKRICIANCRECIFYIGVNHQPLVLGDNHKLQIPSWFGDERQGTTNRNPFPLPEIYGTSQSKKLVHISPCCITKGQ

SEQ ID NO: 177580 - protein, 602 aa, Zea Mays
MADEALDQPPDATPSPTPATPPVPATPSPTVLLRPRREAFEHGLLPIPKLIFPEGTLAQTLAQLKEKLAASAPDGRVRAAALAEALQIPQEQAALALATLAAVLPAEDPALGDGAVDGSAADIRDMLLFLYIQSYKRLVPRSAHKDSPVVADVWPSTSAFDGYLSALSPIQLVRSNSRRFMPSQADEEIHQLSYLQKHMANILTLLADSVEGDGDDSLVLTMETFEHLGFLVQFSEGTSLSQAATFFACSDPDMPDVPVPAAQVLDWMSQKIAFSLEYSAERSAAKESNQQTMSDLDVTMAEANTSHPRNSTPSANPAYYRNVTFVEGFSKTSVVKHASDVKGNSIKVLNCHDSVIYILAPLKYATVYGCSDATVVLGAVGKVVKVEHCERVHIIAAAKRICIANCRECIFYIGVNHQPLVLGDNHKLQVAPFNTCYPQLHEHMIQVAVDPSVNKWDQPFVLGVVDPHDSLSHPAGVSDVKAESATCLDPDLFTNFLIPSWFGDERQGTTNRNPFPLPEIYGTSQSKKLVHISPCCITKGQMFLSTLYSYQRSALEDIQKMIRELQLDENRKRELATALHVQFKDWLYASGNIRQLYCLQGD

SEQ ID NO: 177581 - protein, 395 aa, Zea Mays
MADEALDQPPDATPSPTPATPPVPATPSPTVLLRPRREAFEHGLLPIPKLIFPEGTLAQTLAQLKEKLAASAPDGRVRAAALAEALQIPQEQAALALATLAAVLPAEDPALGDGAVDGSAADIRDMLLFLYIQSYKRLVPRSAHKDSPVVADVWPSTSAFDGYLSALSPIQLVRSNSRRFMPSQADEEIHQLSYLQKHMANILTLLADSVEGDGDDSLVLTMETFEHLGFLVQFSEGTSLSQAATFFACSDPDMPDVPVPAAQVLDWMSQKIAFSLEYSAERSAAKESNQQTMSDLDVTMAEANTSHPRNSTPSANPAYYRNVTFVEGFSKTSVVKHASDVKGNSIKVLNCHDSVIYILAPLKYATVYGCSDATVVLGAVGKSTCLAIRVEDLYQ

SEQ ID NO: 177582 - protein, 358 aa, Zea Mays
METFEHLGFLVQFSEGTSLSQAATFFACSDPDMPDVPVPAAQVLDWMSQKIAFSLEYSAERSAAKESNQQTMSDLDVTMAEANTSHPRNSTPSANPAYYRNVTFVEGFSKTSVVKHASDVKGNSIKVLNCHDSVIYILAPLKYATVYGCSDATVVLGAVGKVVKVEHCERVHIIAAAKRICIANCRECIFYIGVNHQPLVLGDNHKLQVAPFNTCYPQLHEHMIQVAVDPSVNKWDQPFVLGVVDPHDSLSHPAGVSDVKAESATCLDPDLFTNFLIPSWFGDERQGTTNRNPFPLPEIYGTSQSKKRSALEDIQKMIRELQLDENRKRELATALHVQFKDWLYASGNIRQLYCLQGD

SEQ ID NO: 177583 - protein, 82 aa, Zea Mays
MYFLSRQQNDTLHIFLNAILLIWFRTCFGRSKSQNQHPPQICSRIRFNTLTKKLKISLLEVATICQSLWPSTNNLIFQKKTL

SEQ ID NO: 177584 - protein, 407 aa, Zea Mays
MRGRHLKMKRRHKYGETRGVIVEIGNYRSGSPQCARQPSSSGRFQIPAASSIFCSARHSGCPKNFAHPRFPPALVRALVWFPCQPGHSTSQPPRAARAGTRGLGFGCKFGNTMAGAAGESSGERQGTVERRMLRSRYHAVKNIISDERDEMSRADSDRFTAIIQQVDCLHELVQRPREQIADAEALLGITNTLVTSVRSHSSEGISPSDFITALLKKFGQQGNHDDESVSLRWGDLGLSVSHIFRPVPGCCTMLGPMNTEVKQRKVVAVGRKRTARPTENTCPEELAESSEEVKTDTDRNVLVMFDILRRKKSAKLENLVLNRLSFAQTVENVFALSFLVKDGRVEITVDDSGHIVRPRNAPAASAIASGEVSYSHFVFRFDFKDWKHHAWSWSVSKVLGNATENRA

SEQ ID NO: 177585 - protein, 1098 aa, Zea Mays
MIGDYLGERDEFPIKVMHAYVDALNFEGMDFGEAIRYYLRGFRLPGEAQKIDRIMEKFAERYCKCNPNSFTSADTAYVLAYSVIMLNTDAHNTMVKDKMSKSDFIRNNRGIDDGKDLPETYLGTLYDQIVKNEIKMSAGSSVPQNKQPSSVMKLLGLDNIISFVNWKQADDRVVGANDLLIKTIQEKFKLKSGKSESVFSVITDTTILRFMMEVCWAPMMAAFSVTLDQSDDKAATSQCLQGFRSAVHVTSVMCMETQRDAFVTSVAKFTYLHCAADMKQKNVDAVKAIISIAIEDGDYLQEAWEHVLTCLSRFEHLHLLGEGAPTDASFLTVPLVDSEEKTQKSTSMSSKRTNALQNPAVMAAVRGGSYDSTTAKNKASPLVTPEQINNFISNINLLDQIGIFELNHIFAHSPRLNSDAIVAFVKALCKVSMTELQSPTDPRIFCLTKIVEIAHYNMNRIRLVWSRIWKVLSDFFVSVGLSENLSVAIFVMDSLRQLAMKFLEREELANYNFQNEFLQPFAVVMQKSNASEVRELIVRCVSQMVLSRVNNIKSGWKSVFTVFTAAAADDRKNIVLLAFETMEKIVRDYFPYITETETTTFTDCVKCLITFTSSKFSSDASLNAIAFLRFCAVKLAEEGFISHEKDTEQQPSKIDSSDGNSMVHKDDHVYFWVPLLAGLARLTTDSRPTIRKGSAEVLFDILADHGHLFSQSFWANIFESVIYPLFSSESFAPNGQISSVNSTEDDSWNFETKTVALKCLADLYIMFFEVMRPELSRVTSVITNFIRSPYKQSASTGISVFQRLTEGLASKLSNDEWGTVLLCFKESASHTFVVFDKIVKMMKVIEIPDRNESYSEAEQYSDHDIYNDEEEEANMETASYAIVRMKNHMALQLLIVEGIIKLYEVHRSFLGAEHIVIMLEILSAIASHASEVNSESNLHRKLHKACSILEVPEPAVIHFESESYQSYLKLLQALLHDNPSLSETMNVESQIMLVCEKILRMYLTCAEHELSNGVSGRGPALQRMPLGTSKKEELGARTPFVLHVMGLLGSLEKNCFRRNLPRFFPLLANLIRCEHNSGEVQVALYDIFQSSIGPIISA

SEQ ID NO: 177586 - protein, 390 aa, Zea Mays
MVRMECERWARKGINITYQIREDRKGYKAGALRAGMRHAYVRDCEYVAIFDADFQPDPDYLKRTIPYLVHNPEIALVQARWRFVNADECLMTRMQEMSLDYHFTVEQEVSSSVCAFFGFNGTAGVWRISAVNEAGGWKDRTTVEDMDLAIRASLKGWKFVYLGDVQVKSELPSTFKAFRFQQHRWSCGPANLFRKMLMEIVTNKKVTIWKKIHVIYNFFLIRKIIAHIITFSFYCVIIPATIFVPEVRIPKWGCVYIPSAITLLNSVGTPRSFHLLFFWVAFENVMSLHRTKATLIGLLEAGRANEWVVTAKLGSAMKMKSANKAGLRKQFMRIWERLHVTELGVAAFLFSCGWYDLAYGRDHFFIYLFFQSVAFFIVGVGYVGTIVPQS

SEQ ID NO: 177587 - protein, 267 aa, Zea Mays
MKRNYDSMVTELEKLRAELRDTSNLDKSGFFYNSTTQKADGISSHLSVGQIAYDTGYGSTQARATPTGLADLSGVPGGAGLRSGFDPSRGNAYDGSHVANFSSSKTGTHDASRGATGFDSLKGSGYDASKAHVTGQASATAAHGGIAGYYGSNQAAHAWGQSASPYGSVQVPPSYASGSNTSYGAAAAAAVRPYGSAQAQPSYGQTQAPSAYGHTQLPSSYSLAQAQSPFTAAQGSSPYGLAAQPPAYGSGRAGSNAGSYEAPQGRK

SEQ ID NO: 177588 - protein, 423 aa, Zea Mays
MVEAPAGLSAAAQVSALPLQVDLLQLPPEVPAPGDPALRGVLDSLFAHWLSLPNTAVLLASLVHKAKASGGGAAAAGAGMLPSMLLQGGAAVPPLSPRSPRLSRRPSSLGVAPPNHAASPLRPPAARPAKEVIPQFYFRDGRPPPYEVRRQCISTVDQLFAGHSNGLRAPEFRMVTRELCKLPTFFTTVLFDKIDKESTGFVTREAFIDFWVNNNLMSMDSATQVFTILKQQNHNYLTKEDFKPILKDLLDNHPGLEFLKSTPEFQERYAETVIYRIFYCLNRIGSGHLTLRELKRGNLLNALRHADDEEDINKVLRYFSYEHFYVIYCKFWELDTDHDFFIDKENLIKYGNHALTYRIVDRIFSEVPRKFTSKVEGKMGYEDFVHFVLSEEDKSSAPSQEYWYFAWFNAFTKMDQFFIFSVL

SEQ ID NO: 177589 - protein, 136 aa, Zea Mays
MRERYLRAVLRQDVEYFDLKVGSTSEVITSVSNDSLVVQDVLSEKVPNFVMNCSMFLGSYAVGFALLWHLTLVALPSVLLLIIPGFMYGRILIGLARRIREQYTRPGAIAEQAVSSVRTVYSFVAERSTMAQFSAA

SEQ ID NO: 177590 - protein, 789 aa, Zea Mays
MAGGPRTGAGTRGLMWTRDTGDTEREHLLPASRRRSEPLHVADAAAVQGSSGGCHQGVPGCSSWPNGSKLSSHVSGPPAASWSQCCFESSNSRAKMADSERSSPSSRSSRRILCDRIGFCKTGLTLDNSTTVAEIFPKMDRTYKLQGEDVHGWFSLDFTAEQLVQNVTLIQNIFSRPSTFDASFGMYTLDDVVELHPPQIWLNVEYNSFFMEHKLSSEDYILELPKDFSLTYISSPEIGFLKSLSGKLRNAKTKLIFRFLNEDVEEPSTKKTYGELLKDLKSIKEFAAGVLVPKTYIWPLKKDQYLAPSTSLVKDAHALGLEVYASGFANDIILSYNYSYDPTAEYLQFIDNPDFSVDGVITDFPPTASGAVACLAHSKGNPLPPPGKDTRPLIITHNGASGMFAGSTDLAYQQAIKDAADVIDCTVQMSKDGTAFCMQSADMSSSTTASTAFASKASTVHEIQNKSGIFSFDLSWSEIATLKPDLISPFAQAGMKRNPQAKNAGKLMTVPQFLDLAKASNITGILIEIEHASYLAKRGIGVVEAVSSALTKAGYDKETKQQVFIQSDDSSVLAAFKKFTTFRRVLNIEAKISGASKPSVDDIKKFADTVRINRNSVAQVTGYFMTHFTDTVSSLQDANLTVFLGVLKNEFMNLGFDFFADPTIEIVTYSWAVLADGLVTDYPATAASYFRSPCSDMNLNLSYSILPAQPGALVNLAAPGTLAPAGAPAPLLQPSDVVDPPLPPVKAVITADAPAPEAADNTSSASSSNAGNGLLWAAIVALLSLSFLR

SEQ ID NO: 177591 - protein, 772 aa, Zea Mays
MLALRKMAREELVRGLPSIEQGAPPGQMGASYPRMFLVLLLLHGASAALNPPTAGPKWQTLSGRPPQVVARGGFSGLFPDSSQMAYQLALSTSLPDVVLLCDLQFSSDRIGFCKTGLTLDNSTTVAEIFPKMDRTYKLQGEDVHGWFSLDFTAEQLVQNVTLIQNIFSRPSTFDASFGMYTLDDVVELHPPQIWLNVEYNSFFMEHKLSSEDYILELPKDFSLTYISSPEIGFLKSLSGKLRNAKTKLIFRFLNEDVEEPSTKKTYGELLKDLKSIKEFAAGVLVPKTYIWPLKKDQYLAPSTSLVKDAHALGLEVYASGFANDIILSYNYSYDPTAEYLQFIDNPDFSVDGVITDFPPTASGAVACLAHSKGNPLPPPGKDTRPLIITHNGASGMFAGSTDLAYQQAIKDAADVIDCTVQMSKDGTAFCMQSADMSSSTTASTAFASKASTVHEIQNKSGIFSFDLSWSEIATLKRMKRNPQAKNAGKLMTVPQFLDLAKASNITGILIEIEHASYLAKRGIGVVEAVSSALTKAGYDKETKQQVFIQSDDSSVLAAFKKFTTFRRVLNIEAKISGASKPSVDDIKKFADTVRINRNSVAQVTGYFMTHFTDTVSSLQDANLTVFLGVLKNEFMNLGFDFFADPTIEIVTYSWAVLADGLVTDYPATAASYFRSPCSDMNLNLSYSILPAQPGALVNLAAPGTLAPAGAPAPLLQPSDVVDPPLPPVKAVITADAPAPEAADNTSSASSSNAGNGLLWAAIVALLSLSFLR

SEQ ID NO: 177592 - protein, 585 aa, Zea Mays
MLALRKMAREELVRGLPSIEQGAPPGQMGASYPRMFLVLLLLHGASAALNPPTAGPKWQTLSGRPPQVVARGGFSGLFPDSSQMAYQLALSTSLPDVVLLCDLQFSSDRIGFCKTGLTLDNSTTVAEIFPKMDRTYKLQGEDVHGWFSLDFTAEQLVQNVTLIQNIFSRPSTFDASFGMYTLDDVVELHPPQIWLNVEYNSFFMEHKLSSEDYILELPKDFSLTYISSPEIGFLKSLSGKLRNAKTKLIFRFLNEDVEEPSTKKTYGELLKDLKSIKEFAAGVLVPKTYIWPLKKDQYLAPSTSLVKDAHALGLEVYASGFANDIILSYNYSYDPTAEYLQFIDNPDFSVDGVITDFPPTASGAVACLAHSKGNPLPPPGKDTRPLIITHNGASGMFAGSTDLAYQQAIKDAADVIDCTVQMSKDGTAFCMQSADMSSSTTASTAFASKASTVHEIQNKSGIFSFDLSWSEIATLKRRHEKKSSSEECRQADDCAPILGLGQGQQHHRYTDRNRACFVPGQERDRRGGGGVQRADQGGLRQGDQAAGVHPVRRLVGARGVQEVHDVQEGAQHRGQDQRRLQAVGG

SEQ ID NO: 177593 - protein, 667 aa, Zea Mays
MADSERSSPSSRSSRRILCDRIGFCKTGLTLDNSTTVAEIFPKMDRTYKLQGEDVHGWFSLDFTAEQLVQNVTLIQNIFSRPSTFDASFGMYTLDDVVELHPPQIWLNVEYNSFFMEHKLSSEDYILELPKDFSLTYISSPEIGFLKSLSGKLRNAKTKLIFRFLNEDVEEPSTKKTYGELLKDLKSIKEFAAGVLVPKTYIWPLKKDQYLAPSTSLVKDAHALGLEVYASGFANDIILSYNYSYDPTAEYLQFIDNPDFSVDGVITDFPPTASGAVACLAHSKGNPLPPPGKDTRPLIITHNGASGMFAGSTDLAYQQAIKDAADVIDCTVQMSKDGTAFCMQSADMSSSTTASTAFASKASTVHEIQNKSGIFSFDLSWSEIATLKPDLISPFAQAGMKRNPQAKNAGKLMTVPQFLDLAKASNITGILIEIEHASYLAKRGIGVVEAVSSALTKAGYDKETKQQVFIQSDDSSVLAAFKKFTTFRRVLNIEAKISGASKPSVDDIKKFADTDANLTVFLGVLKNEFMNLGFDFFADPTIEIVTYSWAVLADGLVTDYPATAASYFRSPCSDMNLNLSYSILPAQPGALVNLAAPGTLAPAGAPAPLLQPSDVVDPPLPPVKAVITADAPAPEAADNTSSASSSNAGNGLLWAAIVALLSLSFLR

SEQ ID NO: 177594 - protein, 684 aa, Zea Mays
MADSERSSPSSRSSRRILCDRIGFCKTGLTLDNSTTVAEIFPKMDRTYKLQGEDVHGWFSLDFTAEQLVQNVTLIQNIFSRPSTFDASFGMYTLDDVVELHPPQIWLNVEYNSFFMEHKLSSEDYILELPKDFSLTYISSPEIGFLKSLSGKLRNAKTKLIFRFLNEDVEEPSTKKTYGELLKDLKSIKEFAAGVLVPKTYIWPLKKDQYLAPSTSLVKDAHALGLEVYASGFANDIILSYNYSYDPTAEYLQFIDNPDFSVDGVITDFPPTASGAVACLAHSKGNPLPPPGKDTRPLIITHNGASGMFAGSTDLAYQQAIKDAADVIDCTVQMSKDGTAFCMQSADMSSSTTASTAFASKASTVHEIQNKSGIFSFDLSWSEIATLKRMKRNPQAKNAGKLMTVPQFLDLAKASNITGILIEIEHASYLAKRGIGVVEAVSSALTKAGYDKETKQQVFIQSDDSSVLAAFKKFTTFRRVLNIEAKISGASKPSVDDIKKFADTVRINRNSVAQVTGYFMTHFTDTVSSLQDANLTVFLGVLKNEFMNLGFDFFADPTIEIVTYSWAVLADGLVTDYPATAASYFRSPCSDMNLNLSYSILPAQPGALVNLAAPGTLAPAGAPAPLLQPSDVVDPPLPPVKAVITADAPAPEAADNTSSASSSNAGNGLLWAAIVALLSLSFLR

SEQ ID NO: 177595 - protein, 745 aa, Zea Mays
MHVLQSRRHSLNRNQGCSSWPNGSKLSSHVSGPPAASWSQCCFESSNSRAKMADSERSSPSSRSSRRILCDRIGFCKTGLTLDNSTTVAEIFPKMDRTYKLQGEDVHGWFSLDFTAEQLVQNVTLIQNIFSRPSTFDASFGMYTLDDVVELHPPQIWLNVEYNSFFMEHKLSSEDYILELPKDFSLTYISSPEIGFLKSLSGKLRNAKTKLIFRFLNEDVEEPSTKKTYGELLKDLKSIKEFAAGVLVPKTYIWPLKKDQYLAPSTSLVKDAHALGLEVYASGFANDIILSYNYSYDPTAEYLQFIDNPDFSVDGVITDFPPTASGAVACLAHSKGNPLPPPGKDTRPLIITHNGASGMFAGSTDLAYQQAIKDAADVIDCTVQMSKDGTAFCMQSADMSSSTTASTAFASKASTVHEIQNKSGIFSFDLSWSEIATLKPDLISPFAQAGMKRNPQAKNAGKLMTVPQFLDLAKASNITGILIEIEHASYLAKRGIGVVEAVSSALTKAGYDKETKQQVFIQSDDSSVLAAFKKFTTFRRVLNIEAKISGASKPSVDDIKKFADTVRINRNSVAQVTGYFMTHFTDTVSSLQDANLTVFLGVLKNEFMNLGFDFFADPTIEIVTYSWAVLADGLVTDYPATAASYFRSPCSDMNLNLSYSILPAQPGALVNLAAPGTLAPAGAPAPLLQPSDVVDPPLPPVKAVITADAPAPEAADNTSSASSSNAGNGLLWAAIVALLSLSFLR

SEQ ID NO: 177596 - protein, 371 aa, Zea Mays
MGWASCCKRSDGAEPGRRRRKKKDTAWRIFSLKELQSATNNFNYDNKLGEGGFGSVYWGQLWDGSQIAVKRLKSWSNKAETEFAVEVEVLARVRHRSLLSLRGYCAEGQERLIVYDYMPNLSIHSQLHGQHAAECNLSWERRMRIAVDSAEGIAYLHHSATPHIIHRDVKASNVLLDADFQARVADFGFAKLVPDGATHVTTKVKGTLGYLAPEYAMLGKASESCDVFSFGVTLLELASGRRPVEKLSPTAAAKQTVTEWALPLARARRFGEIADPKLGGGFVEEELKRVVLVGLVCAQDRPELRPTMSEVVQLLKGESAEKLDSLENDCLFKPGGGSFQGSDCVGEGEGEGEGRSPGADGGIQEEPRSRW

SEQ ID NO: 177597 - protein, 792 aa, Zea Mays
MPLSSTTSPSAGAAAAAAVRTASPPRRIATHVRAQFRLIKSITKIRSSEDSCVLFRQKLGIPAGFQAQHVKCLPHLIRSIVRGARSDITDGDNGTTEPARELLERLFAKTKSLDPSASQGRELSMSIEVLKTEFEAALSILRKKEKDLRDAEKKVSVDRSRLNQTKQDLDQREEDIIKAYSRQHEMEKALMKASRDLTLQVRQINNLKVMIEEQDKKLVSSQDALSKKVIEVDKLKQEMLKKNDEVALLHSEIESKEQELLVANQAIARQEATIRELRSETKRKETEVERLNELAKANEDKLKFAEQELEKQNSGWIAAQQELKELAQMAFKDKDDIKNTINDFKRVRYLLDAVRSELIASKEALTFSRKQVEDQAAQLSNQVQELTDQKALIISYTRNLEAAQLEIQGKSNELSTVQSRCSELESQLLEETEKVEFLEAMLTKEREILEQKTKEVAFLQEEVVQKEKDYFNSQKLVETKETELLEARHEVEDMKLKVDSIQFAVREKDLELLEAQRKLDEVNSEVVELQQLINSKEDQLVQVRTELQDKEQCIQLMQDELDKMRLGRSQAESVVQKIVELTSNLIGSVKGEEFNIYNLLDDEILSTSTALEYSLHKHNQLEADIDMLKESLRQKDMDLTAAYKALDAKDRELKAVVGRLDVRDKELDKLEELSIDPYGTRKLSRVADEATEDNIAGEAELQKHEMESVEMEALAASTMLKKLADVTKKFLRSGRTDSGTNLDSNVSEGASELEPQRKLNVILEAKKEIVGLFSLTEELVTGAQTKDDDEEP

SEQ ID NO: 177598 - protein, 761 aa, Zea Mays
MAAAAILPELGTQVLIPVAAAVGIAFSVLQWVLVSKVRLAPERRADGGGAVKSGPSDYLIEEEEGLNDHNVVVKCAEIQNAISEGATSFLFTEYKYVGLFMGIFAILIFLFLGSVEGFSTKSQPCHYSKDKTCKPALANAIFSTIAFVLGAVTSLVSGFLGMKIATYANARTTLEARKGVGKAFITAFRSGAVMGFLLAASGLLVLYIAINLFGIYYGDDWEGLFEAITGYGLGGSSMALFGRVGGGIYTKAADVGADLVGKVERNIPEDDPRNPAVIADNVGDNVGDIAGMGSDLFGSYAESSCAALVVASISSFGINHQFTPMVYPLLVSSVGIIACLITTLFATDFFEIKAVNEIEPALKKQLIISTVVMTIGIALISWLGLPYTFTIYNFGAQKTVQSWQLFLCVAVGLWAGLVIGFITEYYTSNAYSPVQVVADSCRTGAATNVIFGLALGYKSVIIPIFAIAFSIFLSFSLAAMYGVAVAALGMLSTIATGLAIDAYGPISDNAGGIAEMAGMSHRIRERTDALDAAGNTTAAIGKGFAIGSAALVSLALFGAFVSRAAISTVDVLTPKVFIGLIVGAMLPYWFSAMTMKSVGSAALKMVEEVRRQFNTIPGLMEGTTKPDYATCVKISTDASIKEMIPPGALVMLTPLIVGILFGVETLAGVLAGALVSGVQIAISASNTGGAWDNAKKYIEVLTLTRRLSLVTPLEILSRTRLAPPSTFSSSLWRLNPLSSPPSSPPMVALSSNGSKDSDNVS

SEQ ID NO: 177599 - protein, 418 aa, Zea Mays
MWKGKKSGPLAPRGRKREFPIRAADYELLEPIGDGATAVVRRARCLPHGGEIVAVKVMNMAHRTESDVNNASEEVKTMIMIDHPNLLSAYCSFTEGEALWIVMPYMAGGSCYHLMKSSYPKGFDDENFIAFVLRETLKGLEYLHENGHIHRDVKAGNILLDQDKGVKLSDFGVTASLYDSIINRHGKRKTLVGTPCWMAPEVMEQKDYDFKADIWSFGITALELAIGHAPFSSQPPAKVFLMTLQHAPPSLHNTKEKKFSDSFKSMIATCLIKDPTKRPPAKKLLKHPFFRRARSDHNAVKCMLNKLPSLAERMQFIKENEAKLQADKKPLDNCKEKASQEEYRRGVSEWNFDIADLKAQAALYPDENEAEDFLRFLFELDIVDETTQLKDIRAESHSINNDGTENQIQQVRCLHPKV

SEQ ID NO: 177600 - protein, 564 aa, Zea Mays
MWKGKKSGPLAPRGRKREFPIRAADYELLEPIGDGATAVVRRARCLPHGGEIVAVKVMNMAHRTESDVNNASEEVKTMIMIDHPNLLSAYCSFTEGEALWIVMPYMAGGSCYHLMKSSYPKGFDDENFIAFVLRETLKGLEYLHENGHIHRDVKAGNILLDQDKGVKLSDFGVTASLYDSIINRHGKRKTLVGTPCWMAPEVMEQKDYDFKADIWSFGITALELAIGHAPFSSQPPAKVFLMTLQHAPPSLHNTKEKKFSDSFKSMIATCLIKDPTKRPPAKKLLKHPFFRRARSDHNAVKCMLNKLPSLAERMQFIKENEAKLQADKKPLDNCKEKASQEEYRRGVSEWNFDIADLKAQAALYPDENEAEDFLRFLFELDIVDETTQLKDIRAESHSINNDGTNVADDGLGKSNSTSPMSSSQSVKQLDKGSPNGLVRSESFEIHSISPAKQLTTAVSTCNDVDEYLEKTAFQKGRFKVIHDYSKLEGATPREKELLDRISSLEQMLLATQDEVERLKAKGKYAIMLSHKEQKDDCNNNSSEVEVKFNCYLELVMIESSCSTF

SEQ ID NO: 177601 - protein, 431 aa, Zea Mays
MWKGKKSGPLAPRGRKREFPIRAADYELLEPIGDGATAVVRRARCLPHGGEIVAVKVMNMAHRTESDVNNASEEVKTMIMIDHPNLLSAYCSFTEGEALWIVMPYMAGGSCYHLMKSSYPKGFDDENFIAFVLRETLKGLEYLHENGHIHRDVKAGNILLDQDKGVKLSDFGVTASLYDSIINRHGKRKTLVGTPCWMAPEVMEQKDYDFKADIWSFGITALELAIGHAPFSSQPPAKVFLMTLQHAPPSLHNTKEKKFSDSFKSMIATCLIKDPTKRPPAKKLLKHPFFRRARSDHNAVKCMLNKLPSLAERMQFIKENEAKLQADKKPLDNCKEKASQEEYRRGVSEWNFDIADLKAQAALYPDENEAEDFLRFLFELDIVDETTQLKDIRAESHSINNDGTNVADDGLGKSNSTSPMSSSQSFYVQRC

SEQ ID NO: 177602 - protein, 537 aa, Zea Mays
MPPSRLQVGTKTTEGHNQAGNTLHPYEVQRLRQVMRNNARLQQLGIPGLCDTLPKAYSFHHNKNKPNFTNNEDSESDYNPSSNDTGEEDLLDDDNVQGSKDYNMRTTNMSNGVIKLRTKRLLAEKESIRITRSKKTAAQPNGTEVFDNNDGHTQATVQASDPALFDEYTHMANGGHSIARPDGHNLMGNKDNVNIQVDDNMTSGGEASIEPSVHVQLGENDRWERGVNMGHGLHRMNRAMRGKLPVVIPEGRIRPVAPLVAAKFSTECNIAVRNHVPVYKHWKDYKNHNGMFNLFTDKLSAKFDINTNDAPVQKACSQMMKNAIRQQRSMSNEEWNDLVEYWKSPKRMETSQKNKDNRSKVKFHQTTGSRSYMVHVENLGDKNIGQEPDALDLFKECHYSRKKKCYTSTVQQAITQMDNKRSATTEGEKSMSATEVVANVLAENTKKNLFLQNVGIQNVGPRSSLRNIEAQLEVEKRANSDLKSIVDAQHEQLDALLKQMQETEENRIREQEEVKKKQAEMETKMQLVLSQIHSRLR

SEQ ID NO: 177603 - protein, 159 aa, Zea Mays
MRNNARLQQLGIPGLCDTLPKAYSFHHNKNKPNFTNNEDSESDYNPSSNDTGEEDLLDDDNVQGSKDYNMRTTNMSNGVIKLRTKRLLAEKESIRITRSKKTAAQPNGTEVFDNNDGHTQATVQASDPALFDEYTHMANGGHSIARPDGHNLMGNKGKV

SEQ ID NO: 177604 - protein, 181 aa, Zea Mays
MAPSAALAPVAFRSAFSTPLASNPTRNRINIEGTFCLPCSARKRASYRSFRVYSLFGGKKDKDENGDEAPSKAGIFGNMQNLYETVKKAQMVVQVEAVRVQKELAALHFLETSNLLELKSQKLQWSWVLKISFIFMCEKTLMFHIRKVLNSLVRKENREPPPFCTLVLEKKDASCIKLGYV

SEQ ID NO: 177605 - protein, 138 aa, Zea Mays
MAPSAALAPVAFRSAFSTPLASNPTRIFGNMQNLYETVKKAQMVVQVEAVRVQKELAATEIDGYCEGELIKVTLSGNQQPIRVEITEAAMELGAEKLSELVNDAYKDAHQRSVQAMKERMSDLAQSLGMPAGLGDGLK

SEQ ID NO: 177606 - protein, 114 aa, Zea Mays
MAPSAALAPVAFRSAFSTPLASNPTRNRINIEGTFCLPCSARKRASYRSFRVYSLFGGKKDKDENGDEAPSKGFLETCKISMKLLRRPKWLSKLRLSGCRRSLQRYTFWKPATY

SEQ ID NO: 177607 - protein, 273 aa, Zea Mays
MPPSALDRLASLHIEYPMLFEVHNAAAERTSHCGVLEFIAEEGMIYMPYWMMQNLLLQEGDMVFIKNANLPKGTYVKLQPHTTDFLDISNPKAILEKTLRNFSCLTTGDSIMVAYNNKKYYIDIVETKPSNAISIIETDCEVDFAPPLDYKEPEPVKPAVPASTEPGTDVPAEEEPKFIPFTGSGRRLDGKPSKDKDVLASSPAKRQANATNGVQPSTATTSQGSSSRKATGKLVFGSGGNRAEKAPEKEAEEPKKEDPKFAAFTGKKYSLKG

SEQ ID NO: 177608 - protein, 153 aa, Zea Mays
MRVGGVRCGRSWALPPRLPCRQVGATDRPQLIFPTPPLPRLAGQRPRKKLRLPEMQQLVRSLAVDNERLREEMRDLQGACEALSKENDELETRLGQSSRQSEVASKEQRGKGLLDPRQPARDSFALPDLNLPPQDSADVSTVSLIAPDRLQLC

SEQ ID NO: 177609 - protein, 99 aa, Zea Mays
MQQLVRSLAVDNERLREEMRDLQGACEALSKENDELETRLGQSSRQSEVASKEQRGKGLLDPRQPARDSFALPDLNLPPQDSADVSTVSLIAPDRLQLC

SEQ ID NO: 177610 - protein, 311 aa, Zea Mays
MSNKMWETLVEHAKTCTLSGKYYIYYSDETRSIGAIFNNIYAFCGLISGEQFYSSESLDDSQKLFADALVKKAYDNWMYVIEYDGKGLLNPKPKKKSASTGQVETHAPAGGPTSYQQYLSSMSMPGPSPSGYGVDQSATHPSQLQSSSANVQAPYDDTFSFLPPNMLTGSANDAMGLELGQLQQVTSQGQTIQPANVGYGDWPRNRDSQYPDDFTEDIRVKSHQLLEGEDMQQLLRVFSMGGASGSLPDDTFNFQSYMPSPLPNLGFETERSHSSGKAVVGWLKIKAAMRWGIFVRKKAAERRAQLVELED

SEQ ID NO: 177611 - protein, 523 aa, Zea Mays
MYRLKYNLNLGSLGNFTSITEINLSNNNIGGSIPEDLPVTLQNIFLSDNQLTGSIPVSLSKLHSLTAMSLNDNHLDGKLPDTFDSLTELVNLGPLPPSLGSLTSLTTLHMQDNQLSGTLDVLQDLSLKDLNVENNMFSGPVPPKLLNIPNFKNDGNPFNTSIAPSTSPSSPTGSPTQTPSSSSSPSGSPSPSNAASNSSSGSTARNSNSTSSKKKKPSTLRTVGYVLLAIVLFIVLALLVVFCLSKYQERQTRRDYSMAQLGRHQRAEEPKSKQASVQSRHDAKKGLSEVPERKKPREINLAVPVAIEKPPEKRKEHVINLERTESEIFAAAPPPPPPPPPPPPPPPPPPSTPPPPSPPPRLPSPPPAEKVTVNPIVRPVKRVNTPPRTGPSTSATSFSVASLQQYTNSFQEQNLIRESRLGKVYLAELPEGKLLEVMKIDNANGRIPVDDFLELVACISDIRHPNILELVGYCAEYEQRLLVYNHFSRKTLLDVLHEGEDIDNPLSWNARLQIALHAAKALE

SEQ ID NO: 177612 - protein, 611 aa, Zea Mays
MGAAPVLVLLLLVAAAALPRRASAATDAGDVSAINGLYVALGSPKLPGWSASGGDPCGESWQGVTCTGSSITSIIFNAANLGGQLGSLGNFTSITEINLSNNNIGGSIPEDLPVTLQNIFLSDNQLTGSIPVSLSKLHSLTAIFSFTRSLNDNHLDGKLPDTFDSLTELVNLDISSNNFSGPLPPSLGSLTSLTTLHMQDNQLSGTLDVLQDLSLKDLNVENNMFSGPVPPKLLNIPNFKNDGNPFNTSIAPSTSPSSPTGSPTQTPSSSSSPSGSPSPSNAASNSSSGSTARNSNSTSSKKKKPSTLRTVGYVLLAIVLFIVLALLVVFCLSKYQERQTRRDYSMAQLGRHQRAEEPKSKQASVQSRHDAKKGLSEVPERKKPREINLAVPVAIEKPPEKRKEHVINLERTESEIFAAAPPPPPPPPPPPPPPPPPPSTPPPPSPPPRLPSPPPAEKVTVNPIVRPVKRVNTPPRTGPSTSATSFSVASLQQYTNSFQEQNLIRESRLGKVYLAELPEGKLLEVMKIDNANGRIPVDDFLELVACISDIRHPNILELVGYCAEYEQRLLVYNHFSRKTLLDVLHEGEDIDNPLSWNARLQIALHAAKALE

SEQ ID NO: 177613 - protein, 531 aa, Zea Mays
MYRLKYNLNLGSLGNFTSITEINLSNNNIGGSIPEDLPVTLQNIFLSDNQLTGSIPVSLSKLHSLTAMSLNDNHLDGKLPDTFDSLTELVNLDISSNNFSGPLPPSLGSLTSLTTLHMQDNQLSGTLDVLQDLSLKDLNVENNMFSGPVPPKLLNIPNFKNDGNPFNTSIAPSTSPSSPTGSPTQTPSSSSSPSGSPSPSNAASNSSSGSTARNSNSTSSKKKKPSTLRTVGYVLLAIVLFIVLALLVVFCLSKYQERQTRRDYSMAQLGRHQRAEEPKSKQASVQSRHDAKKGLSEVPERKKPREINLAVPVAIEKPPEKRKEHVINLERTESEIFAAAPPPPPPPPPPPPPPPPPPSTPPPPSPPPRLPSPPPAEKVTVNPIVRPVKRVNTPPRTGPSTSATSFSVASLQQYTNSFQEQNLIRESRLGKVYLAELPEGKLLEVMKIDNANGRIPVDDFLELVACISDIRHPNILELVGYCAEYEQRLLVYNHFSRKTLLDVLHEGEDIDNPLSWNARLQIALHAAKALE

SEQ ID NO: 177614 - protein, 536 aa, Zea Mays
MYRLKYNLNLGSLGNFTSITEINLSNNNIGGSIPEDLPVTLQNIFLSDNQLTGSIPVSLSKLHSLTAIFSFTRSLNDNHLDGKLPDTFDSLTELVNLDISSNNFSGPLPPSLGSLTSLTTLHMQDNQLSGTLDVLQDLSLKDLNVENNMFSGPVPPKLLNIPNFKNDGNPFNTSIAPSTSPSSPTGSPTQTPSSSSSPSGSPSPSNAASNSSSGSTARNSNSTSSKKKKPSTLRTVGYVLLAIVLFIVLALLVVFCLSKYQERQTRRDYSMAQLGRHQRAEEPKSKQASVQSRHDAKKGLSEVPERKKPREINLAVPVAIEKPPEKRKEHVINLERTESEIFAAAPPPPPPPPPPPPPPPPPPSTPPPPSPPPRLPSPPPAEKVTVNPIVRPVKRVNTPPRTGPSTSATSFSVASLQQYTNSFQEQNLIRESRLGKVYLAELPEGKLLEVMKIDNANGRIPVDDFLELVACISDIRHPNILELVGYCAEYEQRLLVYNHFSRKTLLDVLHEGEDIDNPLSWNARLQIALHAAKALE

SEQ ID NO: 177615 - protein, 529 aa, Zea Mays
MYRLKIFNAANLGGQLGSLGNFTSITEINLSNNNIGGSIPEDLPVTLQNIFLSDNQLTGSIPVSLSKLHSLTAMSLNDNHLDGKLPDTFDSLTELVNLGPLPPSLGSLTSLTTLHMQDNQLSGTLDVLQDLSLKDLNVENNMFSGPVPPKLLNIPNFKNDGNPFNTSIAPSTSPSSPTGSPTQTPSSSSSPSGSPSPSNAASNSSSGSTARNSNSTSSKKKKPSTLRTVGYVLLAIVLFIVLALLVVFCLSKYQERQTRRDYSMAQLGRHQRAEEPKSKQASVQSRHDAKKGLSEVPERKKPREINLAVPVAIEKPPEKRKEHVINLERTESEIFAAAPPPPPPPPPPPPPPPPPPSTPPPPSPPPRLPSPPPAEKVTVNPIVRPVKRVNTPPRTGPSTSATSFSVASLQQYTNSFQEQNLIRESRLGKVYLAELPEGKLLEVMKIDNANGRIPVDDFLELVACISDIRHPNILELVGYCAEYEQRLLVYNHFSRKTLLDVLHEGEDIDNPLSWNARLQIALHAAKALE

SEQ ID NO: 177616 - protein, 464 aa, Zea Mays
MSLNDNHLDGKLPDTFDSLTELVNLDISSNNFSGPLPPSLGSLTSLTTLHMQDNQLSGTLDVLQDLSLKDLNVENNMFSGPVPPKLLNIPNFKNDGNPFNTSIAPSTSPSSPTGSPTQTPSSSSSPSGSPSPSNAASNSSSGSTARNSNSTSSKKKKPSTLRTVGYVLLAIVLFIVLALLVVFCLSKYQERQTRRDYSMAQLGRHQRAEEPKSKQASVQSRHDAKKGLSEVPERKKPREINLAVPVAIEKPPEKRKEHVINLERTESEIFAAAPPPPPPPPPPPPPPPPPPSTPPPPSPPPRLPSPPPAEKVTVNPIVRPVKRVNTPPRTGPSTSATSFSVASLQQYTNSFQEQNLIRESRLGKVYLAELPEGKLLEVMKIDNANGRIPVDDFLELVACISDIRHPNILELVGYCAEYEQRLLVYNHFSRKTLLDVLHEGEDIDNPLSWNARLQIALHAAKALE

SEQ ID NO: 177617 - protein, 414 aa, Zea Mays
MQDNQLSGTLDVLQDLSLKDLNVENNMFSGPVPPKLLNIPNFKNDGNPFNTSIAPSTSPSSPTGSPTQTPSSSSSPSGSPSPSNAASNSSSGSTARNSNSTSSKKKKPSTLRTVGYVLLAIVLFIVLALLVVFCLSKYQERQTRRDYSMAQLGRHQRAEEPKSKQASVQSRHDAKKGLSEVPERKKPREINLAVPVAIEKPPEKRKEHVINLERTESEIFAAAPPPPPPPPPPPPPPPPPPSTPPPPSPPPRLPSPPPAEKVTVNPIVRPVKRVNTPPRTGPSTSATSFSVASLQQYTNSFQEQNLIRESRLGKVYLAELPEGKLLEVMKIDNANGRIPVDDFLELVACISDIRHPNILELVGYCAEYEQRLLVYNHFSRKTLLDVLHEGEDIDNPLSWNARLQIALHAAKALE

SEQ ID NO: 177618 - protein, 115 aa, Zea Mays
MAPEMIQHRPYDHNVDVYSFGIVLWELITGMLPFTNMTAVQAAFAVVNKGARPVIPQDCLSSLSHIMTRCWDANPEVRPPFTEIVCMLESAEMELLSNVRKARFRCCISEPMTTD

SEQ ID NO: 177619 - protein, 137 aa, Zea Mays
MTEAARFHGMIGGGGGKGMQDNVINGFDNIPYYQKFGEGSHMSVDSVDGFNLTNCAGGSVAMSVDSSSVGSNESRTVILKHPGLRDAPTASYSVNNSVFRPNRVAAHTLNEDALAQVLMDPNHPTEVLSSYDPARSY

SEQ ID NO: 177620 - protein, 456 aa, Zea Mays
MVCPRIPLISSFLLMHFGPFRIGDLLRWILVTMVQFIVGKRFYVAAYRALRHGSTNMDVLVVIGTTASYVYSVCALLYGAFTGFHPPIYFETSAMIITFVLFGKYLEVLAKGKTSDAIKKLVELAPATAILLLKDKGEKEIDASLVQPGDVLKVLPGSKVPADGIVIWGTSHVNESMVTGESVPISKEVSSLVIGGTMNLHGVLHIQATKVGSGTVLSQIISLVETAQMSKAPIQKFADYVASIFVPIVITLSFLTFLAWFLCGWLGAYPNSWSAESSNCFVFSLMFSISVVVIACPCALGLATPTAVMVATGVGASHGVLVKGGDALERAQNVKYVIFDKTGTLTQGKATVTATKIFSGMDLGDFLTLVASAEASSEHPLAKAILDYAFHFHFFGNLPSGKDSIKRRKEEILSQWLLEVVDFAALPGKGIQCWINGKKVLVSWKNIALLYLPPLK

SEQ ID NO: 177621 - protein, 400 aa, Zea Mays
MFSISVVVIACPCALGLATPTAVMVATGVGASHGVLVKGGDALERAQNVKYVIFDKTGTLTQGKATVTATKIFSGMDLGDFLTLVASAEASSEHPLAKAILDYAFHFHFFGNLPSGKDSIKRRKEEILSQWLLEVVDFAALPGKGIQCWINGKKVLVGNRALITENGVNIPEEAERFLVDMELNAKTGILVAYDGDFIGLVGITDPLKREAAVVIQGLKKMGVHPVMVTGDNWRTARAVAKEVGIDDVRAEVMPAGKADVIHSLQKDGSVVAMVGDGINDSPALAAADVGMAIGAGTDIAIEAADYVLVRNNLEDVITAIDLSRKTFIRIRWNYFFAMAYNVIAIPVAAGALFPFTGVQMPPWLAGACMAFSSVSVVSSSLLLRRYRKPRLTTVLQITVE

SEQ ID NO: 177622 - protein, 690 aa, Zea Mays
MVCPRIPLISSFLLMHFGPFRIGDLLRWILVTMVQFIVGKRFYVAAYRALRHGSTNMDVLVVIGTTASYVYSVCALLYGAFTGFHPPIYFETSAMIITFVLFGKYLEVLAKGKTSDAIKKLVELAPATAILLLKDKEGKYSGEKEIDASLVQPGDVLKVLPGSKVPADGIVIWGTSHVNESMVTGESVPISKEVSSLVIGGTMNLHGVLHIQATKVGSGTVLSQIISLVETAQMSKAPIQKFADYVASIFVPIVITLSFLTFLAWFLCGWLGAYPNSWSAESSNCFVFSLMFSISVVVIACPCALGLATPTAVMVATGVGASHGVLVKGGDALERAQNVKYVIFDKTGTLTQGKATVTATKIFSGMDLGDFLTLVASAEASSEHPLAKAILDYAFHFHFFGNLPSGKDSIKRRKEEILSQWLLEVVDFAALPGKGIQCWINGKKVLVGNRALITENGVNIPEEAERFLVDMELNAKTGILVAYDGDFIGLVGITDPLKREAAVVIQGLKKMGVHPVMVTGDNWRTARAVAKEVGIDDVRAEVMPAGKADVIHSLQKDGSVVAMVGDGINDSPALAAADVGMAIGAGTDIAIEAADYVLVRNNLEDVITAIDLSRKTFIRIRWNYFFAMAYNVIAIPVAAGALFPFTGVQMPPWLAGACMAFSSVSVVSSSLLLRRYRKPRLTTVLQITVE

SEQ ID NO: 177623 - protein, 88 aa, Zea Mays
MMLVWKRGAWSTLRRTPTPATEATAFVTAATSAWRSAMASSAGSAIRAPATASSAPTSHYRRRVLCRTHVESATDVCIVRSADAPCMH

SEQ ID NO: 177624 - protein, 63 aa, Zea Mays
MFVKSEVGTEQGTKPKGSMHQRYSDRESPTRPPSSPSMRWSLKFLVTTSKMTDSLNLSVLNKI

SEQ ID NO: 177625 - protein, 184 aa, Zea Mays
MDTELTGSWSYGREGVNQGPHRKGTCYGQRHRGAQRRMTRSTEEAHAVISKDERRTGLNFQVTRPSSFQDFYIYAFRYCLTEDKKKCIEIPAACELLNLVLGLQFRPQVDKLNNYLMAWLSLVTSELTMIAGMAVGFNLVFEHDNLITAICFASVVVNLLPYTLSRLSPTYPSQYECDVSQVEW

SEQ ID NO: 177626 - protein, 219 aa, Zea Mays
MQWMELKAAESPTVLSPNPPKRRNLSAAGSGDKAHQPPTRSAFAGSSEHGSFPNTYSRAAQDGVMSPDEPKCQNGLEQQDGREELSTRSSGRGKRGVASLSHWLKPSSSSADDGSPDDGSSNFVGTEEEKTRCGANVSDVPFFPAFGLDWEGETDKPTPVLPKAWDGNGIPNTTTKYKEKVSWHATPFEERLLKVLSDEKPRHERRISGKLIHLDENAE

SEQ ID NO: 177627 - protein, 130 aa, Zea Mays
MVTTAVAAVAGAVPPARKAQAVTVATTTALPPTLTRRQLLAAVATASTLPTAAASAAAPRFAEIPGSGGVKALDLREGSGEIPAVGDQVAVHYYGRLAAKQGWRFDSTYDHKDETGDPMPFVFTLGSGKQ

SEQ ID NO: 177628 - protein, 456 aa, Zea Mays
MANLNITNILEKMTGKDKDYRYMATSDLLSELNKESFKADQDLEPKLTITVLQQLEDASGDVSGLAVKCLAPLVKKVGEDRVVEMTNKLCDKLINGKDQHRDTASIALKTIIAEVTTPSLAEKILLSLAPQLIKGVNTAKSAEIKCECLDILADVLHRFGNLITKDHEYMLNALLSQLGSNPASVRKKSISCIASLAPSLSDDLLAKATLQVVQLLKNRGAKSEITRTNIQMIGSLSRSVGYRFGPHLAETVPLLISYCTSASENDEELREYSLQALESFMLRCPRDISPYCEGILNLALEYVSYDPNFTDSMDEDTDEEAKEEDDDDESANEYTDDEDASWKVRRASAKCLSAIIVSRPEMLSKMFLEACPKLIERFREREENVKMDIFNTFIELLRQTGNVTKGQGDIDESSPRWLLKQEVPKVVKSINRQLREKSIKTKVSPSVFLQFMVLEL

SEQ ID NO: 177629 - protein, 138 aa, Zea Mays
MFPVAFGFFESETKESWVWFMKQLHKAIGDLPLLAICSDACKGLTGAVEEIFPNAEKRECFRHLMQNYVKHFSSSEHMYPAARAYRSTVFEHHFANVRDVMGVKNWLDEWHPLLWYRCGFNPAIRCDYITNNIAEVFN

SEQ ID NO: 177630 - protein, 96 aa, Zea Mays
MELLELCCIVCTPLPTCVVQLLAYALLPPLDRSPLLYKSSSCSFFYLHLLHAFSLAVLSSSLNPNPRSLLPSSSPPASTSLFILLSLLLIVLQFCS

SEQ ID NO: 177631 - protein, 150 aa, Zea Mays
MIGTTHPQAVQKDGTRKKRRPPKARRRPPSVSPRGAAPCRHGARTQQRRAFARGWGKPGRRGEAGATTARGGRADCGLVAWCRMAPSGTHARYLTCRPRCGKGGRRGGVLWTGVEVEPWRWKRRPGRLGFERWTEQRGGGSTQTVDHVER

SEQ ID NO: 177632 - protein, 152 aa, Zea Mays
MCELTVSARVTVVDRHPKRAQIFGRQQRFLPSPPRKAGQDWRGWQYPSGIQTRGPSRRYDESDGEITREATGVRSYGRPAQSRRASTRTGELCSPACHAAIAIALHVLPLRILSRSTARRRSRQPPNRSIPEGPARRRRPQVRWIGAGIVDP

SEQ ID NO: 177633 - protein, 3209 aa, Zea Mays
MNIVKGVADLLRKSTPASPGAGAGGGGGGGDRGGVGSPSADRLAAPPSPRVRFSDNGEEGVLNALWHKYESGIDKAEKKKTLQTFVMHFVKAFKDWEPGYIEQSIDHESLSDDTILGCSTGHPSEVILILIQEISQITSSITESSSCPESSANISELLGDLGLNAEGLTILECLTILTRSVHNCKVFSYYGGVQKVTALLKAAVVKLKTLTSLLAADEQLSNKTVENMRTMQKVLVYIVTIISNFMDLEPNTTRISQFILNSSRHTLSSNYLATVAPNTSKSMVFDRNWQKKAIVSVMEAGGVNWLVELLRVIRRLNLKEQWTDLSLHFITLYSLRSTISENVRAQNHFRSIGGLEVLLDGLGLPSSKFSVSKQSFVPSDERSGILQLQILYLEILREAVFGNVNNLQFLCENGRIHKFANSICWPAFMLQEYHQQKILNAQAILKADKESTGPSPTLESFSNPVDILDTSEWNEYSVKLSITLCSFLLPPKEIKYCPAPTDVTQISLSISLAYWEQCARWIIKVLSTVFPCMKACASETDLPNHIRILANTMQHYMLCTFRKVLISAPALLKSFREEGLWDLIFSEKFFYFGSSLDYIQQNDQLIDAPKSIDSKSFSETDVNVLQAEAISFLEFAATLNENSNNLPECLALVGALEHCTYDPGLAGGIVKSFHVILQLATEQTLASFKSIDVLTRVLKVACLQAQEIRKLSQDDLNQNGSQSRNAQTTYSDERIKNTCAFVKLAFNLFKEYATISDIGRITVLCNANCIECLFDLFQEEYLRKHILEQVLALFRLPSSSAQHHAAKMLLCSKYLETFTRAKEKEKAFAELSIDLLVNMREVIMIDRVYYQNLFRNGECFLHIVSLLNGTFDEAVGEQLVLNVLRTLTALLAENDESKAAFRLLVGAGYQTLQSLLLDFCKWIPSPKLLDALLDMLVDGTFDINEKATIKNEDVIMLLINVLQKSSTSLQHYGLMVLQQLLKGSITNRTSCFRAGLLSFLLDWFKVEKGNDIVMKIAEIIQIIGGHSICGKDIRKFFALLRDEEIIAKQQHSSLLLTSVSHMLKEKGPEAFFEFSGHDSGIEIKSSVQWPYNKGLSFCCWLRVESFPEKGLMGLYSFFTENGKGCLAMIGNNTLIYESVNPKHQCVLLSLSLPIKQWKFLCVTHTIGRTFSGGSQLRCYVDGDLVSSEKCRYTKVNELMTRCSVGTELMPIGEEPSSLGFENTLAFTGQMGPVYAFSDALSPEQIRGIYNLGPSYMYSFLGDQNLLTNDDSRYKGILDAKDGISSKMIFGLNAQASNNRTLFNVSSALDGLDKSKFEATTMGGTKLCSRRLLQEIIYCVGGVSVFFPLLIHFDDAVVQNGEFATRDQLAGQVIELVASVLDGNIANQQQMHLLSGFSILGFLFQSVSPQLLNIKTLSASKYMFTILKTSNILLRDALSQFYLNPHIWAYATYQVQRELFLFLIQYFEADGKFLPVLCALPRIIDVIKQFYSEKLDPRFSKPLLVSKKVTGERPSMEEIRKIRLLLLSLAEMSLKLKVSQHDIRALVSFLERSQDVACVEDILHMIIRALSQNSLVPSFLEQVNSLGGCYIFINLLKREFEPIRLLGLQLLGKLLVGVPSEKRGPKIFGLPVGRPRSIAEDIRKGATAAPQLFFYSISDRLFKFPLSDHLCASLFDVLLGGASPKQVLQKRSQSDALKDRSMAPFFVPQILVCIFKYIQSCRDASVRTKILSDLLDLLDSNPVNVESLMEYGWSSWLETSAKLDVLRNYKSNSVAKADGLETNELILVRNMYSLVLSYCIFSVKGGWHQLEDTTNFLLLKIEQGQLPNSSMLRDIFEDLIGSLLETSSEESVFNSQPCRDNILYLLNLSHELFVDQIGIKLLFPSPDMSAHLSSDDINSAVLEIMNTEGNGLLTSLPWSNILFNDGEKLTDDWWSFFDKIWTLLCYLNGKGQTRLTPKGLNTAGPSIGQRARGLVESLNIPAAEMAAVVVTGGISSALGGKTNKVADKAMMLRGERFPRIIFHLIIMYLCKAGLENASKCVQQFISLLPNIISEDDQCKNRLHFLIWSLLRVRSQYGQLDDGARFHVMSHLILETVIYGKSMLTTNIVGRDDSTEANNSKEAGFILNLVQKDRVLTAATDEAKYMKDAIADRMKLVQELHSKLDERSIQDVEQLQSFEDDVQFAKTAAIAADDSRKAAFQLAFDEDQQIVADKWIHILRALSDERGPWSAAPFPNNIVTYWKLDKTEDKWRRRLKLKRNYKFDECLCHPSSIKSSNDNAAPTVDPSANAKITEKMKHLLLKGVRGITGDISSESCEDSNDMIDPPQNVPPENHTVSDTSDSADSSDYPAIVQNRKESSSTSSDNDYIEVLSSVHCVLVTPKRKLAGQLTITRNALHFSFEFLVEGTGGSSVFDRFHDKKDSDSKNEMGGVEKLKGNLDGGRGNAAESSDTQIKNQSGKIKHHRRWKITRIKAVHWTRYLLQYTATEIFFDDANAPVFLNFSSQNDAKSVGSLLVSLRNDALFPKGTTRDKNSLISFVDRKVALEMSESARESWRRREISNFEYLMILNTLAGRSYNDLTQYPIFPWILADYSSEKLDFNKSSTFRDLSKPVGALDAKRFKAFEDRYLNFVDPDIPSFYYGSHYSSMGIVLYYLLRLEPFTALHRNLQGGKFDHADRLFQSIESTYSNCLSNTSDVKELIPEFFYMPEFLENSNSYHLGIKQDGEPLGDVGLPPWAKGSPEEFIHISREALESEYVSSNLHHWIDLIFGYKQRGKPAVEAANIFYYLTYEGAVDLENMDDMLQKSAIEDQIANFGQTPIQIFRKKHPRRGPPIPIVHPLYFAPQSITVTSVVPTIVTPLSVLFIGLLDSNVVMMNEGLILSVKLWLTTQLQSGGNFTFSGSLEPFFGIGSDVISPRKIGTSLAENVEFGRQCLATVQIRGDNYLILCGNWENSFQIISLSDGKIVQSIRQHKDVVSCVAVSSDGSVIATGSYDTTVMIWYAFQGRSNDKRYRNANYDLSTKDHVIIESPCHILCGHDDIITCLFVSTELDIVISGSKDGTCMFHTLREGTYVRSIRHPSGAGLSKMVTSQHGRLVIYSDSDLSLHMYSINGKHIASSESNCRLNCMELSCCGEFMVCAGDHGQIVLRSMHSLDVVWRYEGAGKTITSLVVTPEECFLAGTKDGSLIVFSIENPLLRKNAMQRHKAKPSIGG

SEQ ID NO: 177634 - protein, 2405 aa, Zea Mays
MLLCSKYLETFTRAKEKEKAFAELSIDLLVNMREVIMIDRVYYQNLFRNGECFLHIVSLLNGTFDEAVGEQLVLNVLRTLTALLAENDESKAAFRLLVGAGYQTLQSLLLDFCKWIPSPKLLDALLDMLVDGTFDINEKATIKNEDVIMLLINVLQKSSTSLQHYGLMVLQQLLKGSITNRTSCFRAGLLSFLLDWFKVEKGNDIVMKIAEIIQIIGGHSICGKDIRKFFALLRDEEIIAKQQHSSLLLTSVSHMLKEKGPEAFFEFSGHDSGIEIKSSVQWPYNKGLSFCCWLRVESFPEKGLMGLYSFFTENGKGCLAMIGNNTLIYESVNPKHQCVLLSLSLPIKQWKFLCVTHTIGRTFSGGSQLRCYVDGDLVSSEKCRYTKVNELMTRCSVGTELMPIGEEPSSLGFENTLAFTGQMGPVYAFSDALSPEQIRGIYNLGPSYMYSFLGDQNLLTNDDSRYKGILDAKDGISSKMIFGLNAQASNNRTLFNVSSALDGLDKSKFEATTMGGTKLCSRRLLQEIIYCVGGVSVFFPLLIHFDDAVVQNGEFATRDQLAGQVIELVASVLDGNIANQQQMHLLSGFSILGFLFQSVSPQLLNIKTLSASKYMFTILKTSSMSDILLRDALSQFYLNPHIWAYATYQVQRELFLFLIQYFEADGKFLPVLCALPRIIDVIKQFYSEKLDPRFSKPLLVSKKVTGERPSMEEIRKIRLLLLSLAEMSLKLKVSQHDIRALVSFLERSQDVACVEDILHMIIRALSQNSLVPSFLEQVNSLGGCYIFINLLKREFEPIRLLGLQLLGKLLVGVPSEKRGPKIFGLPVGRPRSIAEDIRKGATAAPQLFFYSISDRLFKFPLSDHLCASLFDVLLGGASPKQVLQKRSQSDALKDRSMAPFFVPQILVCIFKYIQSCRDASVRTKILSDLLDLLDSNPVNVESLMEYGWSSWLETSAKLDVLRNYKSNSVAKADGLETNELILVRNMYSLVLSYCIFSVKGGWHQLEDTTNFLLLKIEQGQLPNSSMLRDIFEDLIGSLLETSSEESVFNSQPCRDNILYLLNLSHELFVDQIGIKLLFPSPDMSAHLSSDDINSAVLEIMNTEGNGLLTSLPWSNILFNDGEKLTDDWWSFFDKIWTLLCYLNGKGQTRLTPKGLNTAGPSIGQRARGLVESLNIPAAEMAAVVVTGGISSALGGKTNKVADKAMMLRGERFPRIIFHLIIMYLCKAGLENASKCVQQFISLLPNIISEDDQCKNRLHFLIWSLLRVRSQYGQLDDGARFHVMSHLILETVIYGKSMLTTNIVGRDDSTEANNSKEAGFILNLVQKDRVLTAATDEAKYMKDAIADRMKLVQELHSKLDERSIQDVEQLQSFEDDVQFAKTAAIAADDSRKAAFQLAFDEDQQIVADKWIHILRALSDERGPWSAAPFPNNIVTYWKLDKTEDKWRRRLKLKRNYKFDECLCHPSSIKSSNDNAAPTVDPSANAKITEKMKHLLLKGVRGITGDISSESCEDSNDMIDPPQNVPPENHTVSDTSDSADSSDYPAIVQNRKESSSTSSDNDYIEVLSSVHCVLVTPKRKLAGQLTITRNALHFSFEFLVEGTGGSSVFDRFHDKKDSDSKNEMGGVEKLKGNLDGGRGNAAESSDTQIKNQSGKIKHHRRWKITRIKAVHWTRYLLQYTATEIFFDDANAPVFLNFSSQNDAKSVGSLLVSLRNDALFPKGTTRDKNSLISFVDRKVALEMSESARESWRRREISNFEYLMILNTLAGRSYNDLTQYPIFPWILADYSSEKLDFNKSSTFRDLSKPVGALDAKRFKAFEDRYLNFVDPDIPSFYYGSHYSSMGIVLYYLLRLEPFTALHRNLQGGKFDHADRLFQSIESTYSNCLSNTSDVKELIPEFFYMPEFLENSNSYHLGIKQDGEPLGDVGLPPWAKGSPEEFIHISREALESEYVSSNLHHWIDLIFGYKQRGKPAVEAANIFYYLTYEGAVDLENMDDMLQKSAIEDQIANFGQTPIQIFRKKHPRRGPPIPIVHPLYFAPQSITVTSVVPTIVTPLSVLFIGLLDSNVVMMNEGLILSVKLWLTTQLQSGGNFTFSGSLEPFFGIGSDVISPRKIGTSLAENVEFGRQCLATVQIRGDNYLILCGNWENSFQIISLSDGKIVQSIRQHKDVVSCVAVSSDGSVIATGSYDTTVMIWYAFQGRSNDKRYRNANYDLSTKDHVIIESPCHILCGHDDIITCLFVSTELDIVISGSKDGTCMFHTLREGTYVRSIRHPSGAGLSKMVTSQHGRLVIYSDSDLSLHMYSINGKHIASSESNCRLNCMELSCCGEFMVCAGDHGQIVLRSMHSLDVVWRYEGAGKTITSLVVTPEECFLAGTKDGSLIVFSIENPLLRKNAMQRHKAKPSIGG

SEQ ID NO: 177635 - protein, 3047 aa, Zea Mays
MNIVKGVADLLRKSTPASPGAGAGGGGGGGDRGGVGSPSADRLAAPPSPRVRFSDNGEEGVLNALWHKYESGIDKAEKKKTLQTFVMHFVKAFKDWEPGYIEQSIDHESLSDDTILGCSTGHPSEVILILIQEISQITSSITESSSCPESSANISELLGDLGLNAEGLTILECLTILTRSVHNCKVFSYYGGVQKVTALLKAAVVKLKTLTSLLAADEQLSNKTVENMRTMQKVLVYIVTIISNFMDLEPNTTRISQFILNSSRHTLSSNYLATVAPNTSKSMVFDRNWQKKAIVSVMEAGGVNWLVELLRVIRRLNLKEQWTDLSLHFITLYSLRSTISENVRAQNHFRSIGGLEVLLDGLGLPSSKFSVSKQSFVPSDERILANTMQHYMLCTFRKVLISAPALLKSFREEGLWDLIFSEKFFYFGSSLDYIQQNDQLIDAPKSIDSKSFSETDVNVLQAEAISFLEFAATLNENSNNLPECLALVGALEHCTYDPGLAGGIVKSFHVILQLATEQTLASFKSIDVLTRVLKVACLQAQEIRKLSQDDLNQNGSQSRNAQTTYSDERIKNTCAFVKLAFNLFKEYATISDIGRITVLCNANCIECLFDLFQEEYLRKHILEQVLALFRLPSSSAQHHAAKMLLCSKYLETFTRAKEKEKAFAELSIDLLVNMREVIMIDRVYYQNLFRNGECFLHIVSLLNGTFDEAVGEQLVLNVLRTLTALLAENDESKAAFRLLVGAGYQTLQSLLLDFCKWIPSPKLLDALLDMLVDGTFDINEKATIKNEDVIMLLINVLQKSSTSLQHYGLMVLQQLLKGSITNRTSCFRAGLLSFLLDWFKVEKGNDIVMKIAEIIQIIGGHSICGKDIRKFFALLRDEEIIAKQQHSSLLLTSVSHMLKEKGPEAFFEFSGHDSGIEIKSSVQWPYNKGLSFCCWLRVESFPEKGLMGLYSFFTENGKGCLAMIGNNTLIYESVNPKHQCVLLSLSLPIKQWKFLCVTHTIGRTFSGGSQLRCYVDGDLVSSEKCRYTKVNELMTRCSVGTELMPIGEEPSSLGFENTLAFTGQMGPVYAFSDALSPEQIRGIYNLGPSYMYSFLGDQNLLTNDDSRYKGILDAKDGISSKMIFGLNAQASNNRTLFNVSSALDGLDKSKFEATTMGGTKLCSRRLLQEIIYCVGGVSVFFPLLIHFDDAVVQNGEFATRDQLAGQVIELVASVLDGNIANQQQMHLLSGFSILGFLFQSVSPQLLNIKTLSASKYMFTILKTSSMSDILLRDALSQFYLNPHIWAYATYQVQRELFLFLIQYFEADGKFLPVLCALPRIIDVIKQFYSEKLDPRFSKPLLVSKKVTGERPSMEEIRKIRLLLLSLAEMSLKLKVSQHDIRALVSFLERSQDVACVEDILHMIIRALSQNSLVPSFLEQVNSLGGCYIFINLLKREFEPIRLLGLQLLGKLLVGVPSEKRGPKIFGLPVGRPRSIAEDIRKGATAAPQLFFYSISDRLFKFPLSDHLCASLFDVLLGGASPKQVLQKRSQSDALKDRSMAPFFVPQILVCIFKYIQSCRDASVRTKILSDLLDLLDSNPVNVESLMEYGWSSWLETSAKLDVLRNYKSNSVAKADGLETNELILVRNMYSLVLSYCIFSVKGGWHQLEDTTNFLLLKIEQGQLPNSSMLRDIFEDLIGSLLETSSEESVFNSQPCRDNILYLLNLSHELFVDQIGIKLLFPSPDMSAHLSSDDINSAVLEIMNTEGNGLLTSLPWSNILFNDGEKLTDDWWSFFDKIWTLLCYLNGKGQTRLTPKGLNTAGPSIGQRARGLVESLNIPAAEMAAVVVTGGISSALGGKTNKVADKAMMLRGERFPRIIFHLIIMYLCKAGLENASKCVQQFISLLPNIISEDDQCKNRLHFLIWSLLRVRSQYGQLDDGARFHVMSHLILETVIYGKSMLTTNIVGRDDSTEANNSKEAGFILNLVQKDRVLTAATDEAKYMKDAIADRMKLVQELHSKLDERSIQDVEQLQSFEDDVQFAKTAAIAADDSRKAAFQLAFDEDQQIVADKWIHILRALSDERGPWSAAPFPNNIVTYWKLDKTEDKWRRRLKLKRNYKFDECLCHPSSIKSSNDNAAPTVDPSANAKITEKMKHLLLKGVRGITGDISSESCEDSNDMIDPPQNVPPENHTVSDTSDSADSSDYPAIVQNRKESSSTSSDNDYIEVLSSVHCVLVTPKRKLAGQLTITRNALHFSFEFLVEGTGGSSVFDRFHDKKDSDSKNEMGGVEKLKGNLDGGRGNAAESSDTQIKNQSGKIKHHRRWKITRIKAVHWTRYLLQYTATEIFFDDANAPVFLNFSSQNDAKSVGSLLVSLRNDALFPKGTTRDKNSLISFVDRKVALEMSESARESWRRREISNFEYLMILNTLAGRSYNDLTQYPIFPWILADYSSEKLDFNKSSTFRDLSKPVGALDAKRFKAFEDRYLNFVDPDIPSFYYGSHYSSMGIVLYYLLRLEPFTALHRNLQGGKFDHADRLFQSIESTYSNCLSNTSDVKELIPEFFYMPEFLENSNSYHLGIKQDGEPLGDVGLPPWAKGSPEEFIHISREALESEYVSSNLHHWIDLIFGYKQRGKPAVEAANIFYYLTYEGAVDLENMDDMLQKSAIEDQIANFGQTPIQIFRKKHPRRGPPIPIVHPLYFAPQSITVTSVVPTIVTPLSVLFIGLLDSNVVMMNEGLILSVKLWLTTQLQSGGNFTFSGSLEPFFGIGSDVISPRKIGTSLAENVEFGRQCLATVQIRGDNYLILCGNWENSFQIISLSDGKIVQSIRQHKDVVSCVAVSSDGSVIATGSYDTTVMIWYAFQGRSNDKRYRNANYDLSTKDHVIIESPCHILCGHDDIITCLFVSTELDIVISGSKDGTCMFHTLREGTYVRSIRHPSGAGLSKMVTSQHGRLVIYSDSDLSLHMYSINGKHIASSESNCRLNCMELSCCGEFMVCAGDHGQIVLRSMHSLDVVWRYEGAGKTITSLVVTPEECFLAGTKDGSLIVFSIENPLLRKNAMQRHKAKPSIGG

SEQ ID NO: 177636 - protein, 3138 aa, Zea Mays
MNIVKGVADLLRKSTPASPGAGAGGGGGGGDRGGVGSPSADRLAAPPSPRVRFSDNGEEGVLNALWHKYESGIDKAEKKKTLQTFVMHFVKAFKDWEPGYIEQSIDHESLSDDTILGCSTGHPSEVILILIQEISQITSSITESSSCPESSANISELLGDLGLNAEGLTILECLTILTRSVHNCKVFSYYGGVQKVTALLKAAVVKLKTLTSLLAADEQLSNKTVENMRTMQKVLVYIVTIISNFMDLEPNTTRISQFILNSSRHTLSSNYLATVAPNTSKSMVFDRNWQKKAIVSVMEAGGVNWLVELLRVIRRLNLKEQWTDLSLHFITLYSLRSTISENVRAQNHFRSIGGLEVLLDGLGLPSSKFSVSKQSFVPSDERSGILQLQILYLEILREAVFGNVNNLQFLCENGRIHKFANSICWPAFMLQEYHQQKILNAQAILKADKESTGPSPTLESFSNPVDILDTSEWNEYSVKLSITLCSFLLPPKEIKYCPAPTDVTQISLSISLAYWEQCARWIIKVLSTVFPCMKACASETDLPNHIRILANTMQHYMLCTFRKVLISAPALLKSFREEGLWDLIFSEKFFYFGSSLDYIQQNDQLIDAPKSIDSKSFSETDVNVLQAEAISFLEFAATLNENSNNLPECLALVGALEHCTYDPGLAGGIVKSFHVILQLATEQTLASFKSIDVLTRVLKVACLQAQEIRKLSQDDLNQNGSQSRNAQTTYSDERIKNTCAFVKLAFNLFKEYATISDIGRITVLCNANCIECLFDLFQEEYLRKHILEQVLALFRLPSSSAQHHAAKMLLCSKYLETFTRAKEKEKAFAELSIDLLVNMREVIMIDRVYYQNLFRNGECFLHIVSLLNGTFDEAVGEQLVLNVLRTLTALLAENDESKAAFRLLVGAGYQTLQSLLLDFCKWIPSPKLLDALLDMLVDGTFDINEKATIKNEDVIMLLINVLQKSSTSLQHYGLMVLQQLLKGSITNRTSCFRAGLLSFLLDWFKVEKGNDIVMKIAEIIQIIGGHSICGKDIRKFFALLRDEEIIAKQQHSSLLLTSVSHMLKEKGPEAFFEFSGHDSGIEIKSSVQWPYNKGLSFCCWLRVESFPEKGLMGLYSFFTENGKGCLAMIGNNTLIYESVNPKHQCVLLSLSLPIKQWKFLCVTHTIGRTFSGGSQLRCYVDGDLVSSEKCRYTKVNELMTRCSVGTELMPIGEEPSSLGFENTLAFTGQMGPVYAFSDALSPEQIRGIYNLGPSYMYSFLGDQNLLTNDDSRYKGILDAKDGISSKMIFGLNAQASNNRTLFNVSSALDGLDKSKFEATTMGGTKLCSRRLLQEIIYCVGGVSVFFPLLIHFDDAVVQNGEFATRDQLAGQVIELVASVLDGNIANQQQMHLLSGFSILGFLFQSVSPQLLNIKTLSASKYMFTILKTSSMSDILLRDALSQFYLNPHIWAYATYQVQRELFLLKVSQHDIRALVSFLERSQDVACVEDILHMIIRALSQNSLVPSFLEQVNSLGGCYIFINLLKREFEPIRLLGLQLLGKLLVGVPSEKRGPKIFGLPVGRPRSIAEDIRKGATAAPQLFFYSISDRLFKFPLSDHLCASLFDVLLGGASPKQVLQKRSQSDALKDRSMAPFFVPQILVCIFKYIQSCRDASVRTKILSDLLDLLDSNPVNVESLMEYGWSSWLETSAKLDVLRNYKSNSVAKADGLETNELILVRNMYSLVLSYCIFSVKGGWHQLEDTTNFLLLKIEQGQLPNSSMLRDIFEDLIGSLLETSSEESVFNSQPCRDNILYLLNLSHELFVDQIGIKLLFPSPDMSAHLSSDDINSAVLEIMNTEGNGLLTSLPWSNILFNDGEKLTDDWWSFFDKIWTLLCYLNGKGQTRLTPKGLNTAGPSIGQRARGLVESLNIPAAEMAAVVVTGGISSALGGKTNKVADKAMMLRGERFPRIIFHLIIMYLCKAGLENASKCVQQFISLLPNIISEDDQCKNRLHFLIWSLLRVRSQYGQLDDGARFHVMSHLILETVIYGKSMLTTNIVGRDDSTEANNSKEAGFILNLVQKDRVLTAATDEAKYMKDAIADRMKLVQELHSKLDERSIQDVEQLQSFEDDVQFAKTAAIAADDSRKAAFQLAFDEDQQIVADKWIHILRALSDERGPWSAAPFPNNIVTYWKLDKTEDKWRRRLKLKRNYKFDECLCHPSSIKSSNDNAAPTVDPSANAKITEKMKHLLLKGVRGITGDISSESCEDSNDMIDPPQNVPPENHTVSDTSDSADSSDYPAIVQNRKESSSTSSDNDYIEVLSSVHCVLVTPKRKLAGQLTITRNALHFSFEFLVEGTGGSSVFDRFHDKKDSDSKNEMGGVEKLKGNLDGGRGNAAESSDTQIKNQSGKIKHHRRWKITRIKAVHWTRYLLQYTATEIFFDDANAPVFLNFSSQNDAKSVGSLLVSLRNDALFPKGTTRDKNSLISFVDRKVALEMSESARESWRRREISNFEYLMILNTLAGRSYNDLTQYPIFPWILADYSSEKLDFNKSSTFRDLSKPVGALDAKRFKAFEDRYLNFVDPDIPSFYYGSHYSSMGIVLYYLLRLEPFTALHRNLQGGKFDHADRLFQSIESTYSNCLSNTSDVKELIPEFFYMPEFLENSNSYHLGIKQDGEPLGDVGLPPWAKGSPEEFIHISREALESEYVSSNLHHWIDLIFGYKQRGKPAVEAANIFYYLTYEGAVDLENMDDMLQKSAIEDQIANFGQTPIQIFRKKHPRRGPPIPIVHPLYFAPQSITVTSVVPTIVTPLSVLFIGLLDSNVVMMNEGLILSVKLWLTTQLQSGGNFTFSGSLEPFFGIGSDVISPRKIGTSLAENVEFGRQCLATVQIRGDNYLILCGNWENSFQIISLSDGKIVQSIRQHKDVVSCVAVSSDGSVIATGSYDTTVMIWYAFQGRSNDKRYRNANYDLSTKDHVIIESPCHILCGHDDIITCLFVSTELDIVISGSKDGTCMFHTLREGTYVRSIRHPSGAGLSKMVTSQHGRLVIYSDSDLSLHMYSINGKHIASSESNCRLNCMELSCCGEFMVCAGDHGQIVLRSMHSLDVVWRYEGAGKTITSLVVTPEECFLAGTKDGSLIVFSIENPLLRKNAMQRHKAKPSIGG

SEQ ID NO: 177637 - protein, 3176 aa, Zea Mays
MNIVKGVADLLRKSTPASPGAGAGGGGGGGDRGGVGSPSADRLAAPPSPRVRFSDNGEEGVLNALWHKYESGIDKAEKKKTLQTFVMHFVKAFKDWEPGYIEQSIDHESLSDDTILGCSTGHPSEVILILIQEISQITSSITESSSCPESSANISELLGDLGLNAEGLTILECLTILTRSVHNCKVFSYYGGVQKVTALLKAAVVKLKTLTSLLAADEQLSNKTVENMRTMQKVLVYIVTIISNFMDLEPNTTRISQFILNSSRHTLSSNYLATVAPNTSKSMVFDRNWQKKAIVSVMEAGGVNWLVELLRVIRRLNLKEQWTDLSLHFITLYSLRSTISENVRAQNHFRSIGGLEVLLDGLGLPSSKFSVSKQSFVPSDERSGILQLQILYLEILREAVFGNVNNLQFLCENGRIHKFANSICWPAFMLQEYHQQKILNAQAILKADKESTGPSPTLESFSNPVDILDTSEWNEYSVKLSITLCSFLLPPKEIKYCPAPTDVTQISLSISLAYWEQCARWIIKVLSTVFPCMKACASETDLPNHIRILANTMQHYMLCTFRKVLISAPALLKSFREEGLWDLIFSEKFFYFGSSLDYIQQNDQLIDAPKSIDSKSFSETDVNVLQAEAISFLEFAATLNENSNNLPECLALVGALEHCTYDPGLAGGIVKSFHVILQLATEQTLASFKSIDVLTRVLKVACLQAQEIRKLSQDDLNQNGSQSRNAQTTYSDERIKNTCAFVKLAFNLFKEYATISDIGRITVLCNANCIECLFDLFQEEYLRKHILEQVLALFRLPSSSAQHHAAKMLLCSKYLETFTRAKEKEKAFAELSIDLLVNMREVIMIDRVYYQNLFRNGECFLHIVSLLNGTFDEAVGEQLVLNVLRTLTALLAENDESKAAFRLLVGAGYQTLQSLLLDFCKWIPSPKLLDALLDMLVDGTFDINEKATIKNEDVIMLLINVLQKSSTSLQHYGLMVLQQLLKGSITNRTSCFRAGLLSFLLDWFKVEKGNDIVMKIAEIIQIIGGHSICGKDIRKFFALLRDEEIIAKQQHSSLLLTSVSHMLKEKGPEAFFEFSGHDSGIEIKSSVQWPYNKGLSFCCWLRVESFPEKGLMGLYSFFTENGKGCLAMIGNNTLIYESVNPKHQCVLLSLSLPIKQWKFLCVTHTIGRTFSGGSQLRCYVDGDLVSSEKCRYTKVNELMTRCSVGTELMPIGEEPSSLGFENTLAFTGQMGPVYAFSDALSPEQIRGIYNLGPSYMYSFLGDQNLLTNDDSRYKGILDAKDGISSKMIFGLNAQASNNRTLFNVSSALDGLDKSKFEATTMGGTKLCSRRLLQEIIYCVGGVSVFFPLLIHFDDAVVQNGEFATRDQLAGQVIELVASVLDGNIANQQQMHLLSGFSILGFLFQSVSPQLLNIKTLSASKYMFTILKTSSMSDILLRDALSQFYLNPHIWAYATYQVQRELFLFLIQYFEADGKFLPVLCALPRIIDVIKQFYSEKLDPRFSKPLLVSKKVTGERPSMEEIRKIRLLLLSLAEMSLKLKVSQHDIRALVSFLERSQDVACVEDILHMIIRALSQNSLVPSFLEQVNSLGGCYIFINLLKREFEPIRLLGLQLLGKLLVGVPSEKRGPKIFGLPVGRPRSIAEDIRKGATAAPQLFFYSISDRLFKFPLSDHLCASLFDVLLGGASPKQVLQKRSQSDALKDRSMAPFFVPQILVCIFKYIQSCRDASVRTKILSDLLDLLDSNPVNVESLMEYGWSSWLETSAKLDVLRNYKSNSVAKADGLETNELILVRNMYSLVLSYCIFSVKGGWHQLEDTTNFLLLKIEQGQLPNSSMLRDIFEDLIGSLLETSSEESVFNSQPCRDNILYLLNLSHELFVDQIGIKLLFPSPDMSAHLSSDDINSAVLEIMNTEGNGLLTSLPWSNILFNDGEKLTDDWWSFFDKIWTLLCYLNGKGQTRLTPKGLNTAGPSIGQRARGLVESLNIPAAEMAAVVVTGGISSALGGKTNKVADKAMMLRGERFPRIIFHLIIMYLCKAGLENASKCVQQFISLLPNIISEDDQCKNRLHFLIWSLLRVRSQYGQLDDGARFHVMSHLILETVIYGKSMLTTNIVGRDDSTEANNSKEAGFILNLVQKDRVLTAATDEAKYMKDAIADRMKLVQELHSKLDERSIQDVEQLQSFEDDVQFAKTAAIAADDSRKAAFQLAFDEDQQIVADKWIHILRALSDERGPWSAAPFPNNIVTYWKLDKTEDKWRRRLKLKRNYKFDECLCHPSSIKSSNDNAAPTVDPSANAKITEKMKHLLLKGVRGITGDISSESCEDSNDMIDPPQNVPPENHTVSDTSDSADSSDYPAIVQNRKESSSTSSDNDYIEVLSSVHCVLVTPKRKLAGQLTITRNALHFSFEFLVEGTGGSSVFDRFHDKKDSDSKNEMGGVEKLKGNLDGGRGNAAESSDTQIKNQSGKIKHHRRWKITRIKAVHWTRYLLQYTATEIFFDDANAPVFLNFSSQNDAKSVGSLLVSLRNDALFPKGTTRDKNSLISFVDRKVALEMSESARESWRRREISNFEYLMILNTLAGRSYNDLTQYPIFPWILADYSSEKLDFNKSSTFRDLSKPVGALDAKRFKAFEDRYLNFVDPDIPSFYYGSHYSSMGIVLYYLLRLEPFTALHRNLQGGKFDHADRLFQSIESTYSNCLSNTSDVKELIPEFFYMPEFLENSNSYHLGIKQDGEPLGDVGLPPWAKGSPEEFIHISREALESEYVSSNLHHWIDLIFGYKQRGKPAVEAANIFYYLTYEGAVDLENMDDMLQKSAIEDQIANFGQTPIQIFRKKHPRRGPPIPIVHPLYFAPQSITVTSVVPTIVTPLSVLFIGLLDSNVVMMNEGLILSVKLWLTTQLQSGGNFTFSGSLEPFFGIGSDVISPRKIGTSLAENVEFGRQCLATVQIRGDNYLILCGNWENSFQIISLSDGKIVQSIRQHKDVVSCVAVSSDGSVIATGSYDTTVMIWYAFQGRSNDKRYRNANYDLSTKDHVIIESPCHILCGHDDIITCLFVSTELDIVISGSKDGTCMFHTLREGTYVRSIRHPSGAGLSKMVTSQHGSCCGEFMVCAGDHGQIVLRSMHSLDVVWRYEGAGKTITSLVVTPEECFLAGTKDGSLIVFSIENPLLRKNAMQRHKAKPSIGG

SEQ ID NO: 177638 - protein, 2238 aa, Zea Mays
MVLQQLLKGSITNRTSCFRAGLLSFLLDWFKVEKGNDIVMKIAEIIQIIGGHSICGKDIRKFFALLRDEEIIAKQQHSSLLLTSVSHMLKEKGPEAFFEFSGHDSGIEIKSSVQWPYNKGLSFCCWLRVESFPEKGLMGLYSFFTENGKGCLAMIGNNTLIYESVNPKHQCVLLSLSLPIKQWKFLCVTHTIGRTFSGGSQLRCYVDGDLVSSEKCRYTKVNELMTRCSVGTELMPIGEEPSSLGFENTLAFTGQMGPVYAFSDALSPEQIRGIYNLGPSYMYSFLGDQNLLTNDDSRYKGILDAKDGISSKMIFGLNAQASNNRTLFNVSSALDGLDKSKFEATTMGGTKLCSRRLLQEIIYCVGGVSVFFPLLIHFDDAVVQNGEFATRDQLAGQVIELVASVLDGNIANQQQMHLLSGFSILGFLFQSVSPQLLNIKTLSASKYMFTILKTSSMSDILLRDALSQFYLNPHIWAYATYQVQRELFLFLIQYFEADGKFLPVLCALPRIIDVIKQFYSEKLDPRFSKPLLVSKKVTGERPSMEEIRKIRLLLLSLAEMSLKLKVSQHDIRALVSFLERSQDVACVEDILHMIIRALSQNSLVPSFLEQVNSLGGCYIFINLLKREFEPIRLLGLQLLGKLLVGVPSEKRGPKIFGLPVGRPRSIAEDIRKGATAAPQLFFYSISDRLFKFPLSDHLCASLFDVLLGGASPKQVLQKRSQSDALKDRSMAPFFVPQILVCIFKYIQSCRDASVRTKILSDLLDLLDSNPVNVESLMEYGWSSWLETSAKLDVLRNYKSNSVAKADGLETNELILVRNMYSLVLSYCIFSVKGGWHQLEDTTNFLLLKIEQGQLPNSSMLRDIFEDLIGSLLETSSEESVFNSQPCRDNILYLLNLSHELFVDQIGIKLLFPSPDMSAHLSSDDINSAVLEIMNTEGNGLLTSLPWSNILFNDGEKLTDDWWSFFDKIWTLLCYLNGKGQTRLTPKGLNTAGPSIGQRARGLVESLNIPAAEMAAVVVTGGISSALGGKTNKVADKAMMLRGERFPRIIFHLIIMYLCKAGLENASKCVQQFISLLPNIISEDDQCKNRLHFLIWSLLRVRSQYGQLDDGARFHVMSHLILETVIYGKSMLTTNIVGRDDSTEANNSKEAGFILNLVQKDRVLTAATDEAKYMKDAIADRMKLVQELHSKLDERSIQDVEQLQSFEDDVQFAKTAAIAADDSRKAAFQLAFDEDQQIVADKWIHILRALSDERGPWSAAPFPNNIVTYWKLDKTEDKWRRRLKLKRNYKFDECLCHPSSIKSSNDNAAPTVDPSANAKITEKMKHLLLKGVRGITGDISSESCEDSNDMIDPPQNVPPENHTVSDTSDSADSSDYPAIVQNRKESSSTSSDNDYIEVLSSVHCVLVTPKRKLAGQLTITRNALHFSFEFLVEGTGGSSVFDRFHDKKDSDSKNEMGGVEKLKGNLDGGRGNAAESSDTQIKNQSGKIKHHRRWKITRIKAVHWTRYLLQYTATEIFFDDANAPVFLNFSSQNDAKSVGSLLVSLRNDALFPKGTTRDKNSLISFVDRKVALEMSESARESWRRREISNFEYLMILNTLAGRSYNDLTQYPIFPWILADYSSEKLDFNKSSTFRDLSKPVGALDAKRFKAFEDRYLNFVDPDIPSFYYGSHYSSMGIVLYYLLRLEPFTALHRNLQGGKFDHADRLFQSIESTYSNCLSNTSDVKELIPEFFYMPEFLENSNSYHLGIKQDGEPLGDVGLPPWAKGSPEEFIHISREALESEYVSSNLHHWIDLIFGYKQRGKPAVEAANIFYYLTYEGAVDLENMDDMLQKSAIEDQIANFGQTPIQIFRKKHPRRGPPIPIVHPLYFAPQSITVTSVVPTIVTPLSVLFIGLLDSNVVMMNEGLILSVKLWLTTQLQSGGNFTFSGSLEPFFGIGSDVISPRKIGTSLAENVEFGRQCLATVQIRGDNYLILCGNWENSFQIISLSDGKIVQSIRQHKDVVSCVAVSSDGSVIATGSYDTTVMIWYAFQGRSNDKRYRNANYDLSTKDHVIIESPCHILCGHDDIITCLFVSTELDIVISGSKDGTCMFHTLREGTYVRSIRHPSGAGLSKMVTSQHGRLVIYSDSDLSLHMYSINGKHIASSESNCRLNCMELSCCGEFMVCAGDHGQIVLRSMHSLDVVWRYEGAGKTITSLVVTPEECFLAGTKDGSLIVFSIENPLLRKNAMQRHKAKPSIGG

SEQ ID NO: 177639 - protein, 1733 aa, Zea Mays
MQPIKIIDVIKQFYSEKLDPRFSKPLLVSKKVTGERPSMEEIRKIRLLLLSLAEMSLKLKVSQHDIRALVSFLERSQDVACVEDILHMIIRALSQNSLVPSFLEQVNSLGGCYIFINLLKREFEPIRLLGLQLLGKLLVGVPSEKRGPKIFGLPVGRPRSIAEDIRKGATAAPQLFFYSISDRLFKFPLSDHLCASLFDVLLGGASPKQVLQKRSQSDALKDRSMAPFFVPQILVCIFKYIQSCRDASVRTKILSDLLDLLDSNPVNVESLMEYGWSSWLETSAKLDVLRNYKSNSVAKADGLETNELILVRNMYSLVLSYCIFSVKGGWHQLEDTTNFLLLKIEQGQLPNSSMLRDIFEDLIGSLLETSSEESVFNSQPCRDNILYLLNLSHELFVDQIGIKLLFPSPDMSAHLSSDDINSAVLEIMNTEGNGLLTSLPWSNILFNDGEKLTDDWWSFFDKIWTLLCYLNGKGQTRLTPKGLNTAGPSIGQRARGLVESLNIPAAEMAAVVVTGGISSALGGKTNKVADKAMMLRGERFPRIIFHLIIMYLCKAGLENASKCVQQFISLLPNIISEDDQCKNRLHFLIWSLLRVRSQYGQLDDGARFHVMSHLILETVIYGKSMLTTNIVGRDDSTEANNSKEAGFILNLVQKDRVLTAATDEAKYMKDAIADRMKLVQELHSKLDERSIQDVEQLQSFEDDVQFAKTAAIAADDSRKAAFQLAFDEDQQIVADKWIHILRALSDERGPWSAAPFPNNIVTYWKLDKTEDKWRRRLKLKRNYKFDECLCHPSSIKSSNDNAAPTVDPSANAKITEKMKHLLLKGVRGITGDISSESCEDSNDMIDPPQNVPPENHTVSDTSDSADSSDYPAIVQNRKESSSTSSDNDYIEVLSSVHCVLVTPKRKLAGQLTITRNALHFSFEFLVEGTGGSSVFDRFHDKKDSDSKNEMGGVEKLKGNLDGGRGNAAESSDTQIKNQSGKIKHHRRWKITRIKAVHWTRYLLQYTATEIFFDDANAPVFLNFSSQNDAKSVGSLLVSLRNDALFPKGTTRDKNSLISFVDRKVALEMSESARESWRRREISNFEYLMILNTLAGRSYNDLTQYPIFPWILADYSSEKLDFNKSSTFRDLSKPVGALDAKRFKAFEDRYLNFVDPDIPSFYYGSHYSSMGIVLYYLLRLEPFTALHRNLQGGKFDHADRLFQSIESTYSNCLSNTSDVKELIPEFFYMPEFLENSNSYHLGIKQDGEPLGDVGLPPWAKGSPEEFIHISREALESEYVSSNLHHWIDLIFGYKQRGKPAVEAANIFYYLTYEGAVDLENMDDMLQKSAIEDQIANFGQTPIQIFRKKHPRRGPPIPIVHPLYFAPQSITVTSVVPTIVTPLSVLFIGLLDSNVVMMNEGLILSVKLWLTTQLQSGGNFTFSGSLEPFFGIGSDVISPRKIGTSLAENVEFGRQCLATVQIRGDNYLILCGNWENSFQIISLSDGKIVQSIRQHKDVVSCVAVSSDGSVIATGSYDTTVMIWYAFQGRSNDKRYRNANYDLSTKDHVIIESPCHILCGHDDIITCLFVSTELDIVISGSKDGTCMFHTLREGTYVRSIRHPSGAGLSKMVTSQHGRLVIYSDSDLSLHMYSINGKHIASSESNCRLNCMELSCCGEFMVCAGDHGQIVLRSMHSLDVVWRYEGAGKTITSLVVTPEECFLAGTKDGSLIVFSIENPLLRKNAMQRHKAKPSIGG

SEQ ID NO: 177640 - protein, 2710 aa, Zea Mays
MLQEYHQQKILNAQAILKADKESTGPSPTLESFSNPVDILDTSEWNEYSVKLSITLCSFLLPPKEIKYCPAPTDVTQISLSISLAYWEQCARWIIKVLSTVFPCMKACASETDLPNHIRILANTMQHYMLCTFRKVLISAPALLKSFREEGLWDLIFSEKFFYFGSSLDYIQQNDQLIDAPKSIDSKSFSETDVNVLQAEAISFLEFAATLNENSNNLPECLALVGALEHCTYDPGLAGGIVKSFHVILQLATEQTLASFKSIDVLTRVLKVACLQAQEIRKLSQDDLNQNGSQSRNAQTTYSDERIKNTCAFVKLAFNLFKEYATISDIGRITVLCNANCIECLFDLFQEEYLRKHILEQVLALFRLPSSSAQHHAAKMLLCSKYLETFTRAKEKEKAFAELSIDLLVNMREVIMIDRVYYQNLFRNGECFLHIVSLLNGTFDEAVGEQLVLNVLRTLTALLAENDESKAAFRLLVGAGYQTLQSLLLDFCKWIPSPKLLDALLDMLVDGTFDINEKATIKNEDVIMLLINVLQKSSTSLQHYGLMVLQQLLKGSITNRTSCFRAGLLSFLLDWFKVEKGNDIVMKIAEIIQIIGGHSICGKDIRKFFALLRDEEIIAKQQHSSLLLTSVSHMLKEKGPEAFFEFSGHDSGIEIKSSVQWPYNKGLSFCCWLRVESFPEKGLMGLYSFFTENGKGCLAMIGNNTLIYESVNPKHQCVLLSLSLPIKQWKFLCVTHTIGRTFSGGSQLRCYVDGDLVSSEKCRYTKVNELMTRCSVGTELMPIGEEPSSLGFENTLAFTGQMGPVYAFSDALSPEQIRGIYNLGPSYMYSFLGDQNLLTNDDSRYKGILDAKDGISSKMIFGLNAQASNNRTLFNVSSALDGLDKSKFEATTMGGTKLCSRRLLQEIIYCVGGVSVFFPLLIHFDDAVVQNGEFATRDQLAGQVIELVASVLDGNIANQQQMHLLSGFSILGFLFQSVSPQLLNIKTLSASKYMFTILKTSSMSDILLRDALSQFYLNPHIWAYATYQVQRELFLLKVSQHDIRALVSFLERSQDVACVEDILHMIIRALSQNSLVPSFLEQVNSLGGCYIFINLLKREFEPIRLLGLQLLGKLLVGVPSEKRGPKIFGLPVGRPRSIAEDIRKGATAAPQLFFYSISDRLFKFPLSDHLCASLFDVLLGGASPKQVLQKRSQSDALKDRSMAPFFVPQILVCIFKYIQSCRDASVRTKILSDLLDLLDSNPVNVESLMEYGWSSWLETSAKLDVLRNYKSNSVAKADGLETNELILVRNMYSLVLSYCIFSVKGGWHQLEDTTNFLLLKIEQGQLPNSSMLRDIFEDLIGSLLETSSEESVFNSQPCRDNILYLLNLSHELFVDQIGIKLLFPSPDMSAHLSSDDINSAVLEIMNTEGNGLLTSLPWSNILFNDGEKLTDDWWSFFDKIWTLLCYLNGKGQTRLTPKGLNTAGPSIGQRARGLVESLNIPAAEMAAVVVTGGISSALGGKTNKVADKAMMLRGERFPRIIFHLIIMYLCKAGLENASKCVQQFISLLPNIISEDDQCKNRLHFLIWSLLRVRSQYGQLDDGARFHVMSHLILETVIYGKSMLTTNIVGRDDSTEANNSKEAGFILNLVQKDRVLTAATDEAKYMKDAIADRMKLVQELHSKLDERSIQDVEQLQSFEDDVQFAKTAAIAADDSRKAAFQLAFDEDQQIVADKWIHILRALSDERGPWSAAPFPNNIVTYWKLDKTEDKWRRRLKLKRNYKFDECLCHPSSIKSSNDNAAPTVDPSANAKITEKMKHLLLKGVRGITGDISSESCEDSNDMIDPPQNVPPENHTVSDTSDSADSSDYPAIVQNRKESSSTSSDNDYIEVLSSVHCVLVTPKRKLAGQLTITRNALHFSFEFLVEGTGGSSVFDRFHDKKDSDSKNEMGGVEKLKGNLDGGRGNAAESSDTQIKNQSGKIKHHRRWKITRIKAVHWTRYLLQYTATEIFFDDANAPVFLNFSSQNDAKSVGSLLVSLRNDALFPKGTTRDKNSLISFVDRKVALEMSESARESWRRREISNFEYLMILNTLAGRSYNDLTQYPIFPWILADYSSEKLDFNKSSTFRDLSKPVGALDAKRFKAFEDRYLNFVDPDIPSFYYGSHYSSMGIVLYYLLRLEPFTALHRNLQGGKFDHADRLFQSIESTYSNCLSNTSDVKELIPEFFYMPEFLENSNSYHLGIKQDGEPLGDVGLPPWAKGSPEEFIHISREALESEYVSSNLHHWIDLIFGYKQRGKPAVEAANIFYYLTYEGAVDLENMDDMLQKSAIEDQIANFGQTPIQIFRKKHPRRGPPIPIVHPLYFAPQSITVTSVVPTIVTPLSVLFIGLLDSNVVMMNEGLILSVKLWLTTQLQSGGNFTFSGSLEPFFGIGSDVISPRKIGTSLAENVEFGRQCLATVQIRGDNYLILCGNWENSFQIISLSDGKIVQSIRQHKDVVSCVAVSSDGSVIATGSYDTTVMIWYAFQGRSNDKRYRNANYDLSTKDHVIIESPCHILCGHDDIITCLFVSTELDIVISGSKDGTCMFHTLREGTYVRSIRHPSGAGLSKMVTSQHGRLVIYSDSDLSLHMYSINGKHIASSESNCRLNCMELSCCGEFMVCAGDHGQIVLRSMHSLDVVWRYEGAGKTITSLVVTPEECFLAGTKDGSLIVFSIENPLLRKNAMQRHKAKPSIGG

SEQ ID NO: 177641 - protein, 2251 aa, Zea Mays
MFCKSTSLQHYGLMVLQQLLKGSITNRTSCFRAGLLSFLLDWFKVEKGNDIVMKIAEIIQIIGGHSICGKDIRKFFALLRDEEIIAKQQHSSLLLTSVSHMLKEKGPEAFFEFSGHDSGIEIKSSVQWPYNKGLSFCCWLRVESFPEKGLMGLYSFFTENGKGCLAMIGNNTLIYESVNPKHQCVLLSLSLPIKQWKFLCVTHTIGRTFSGGSQLRCYVDGDLVSSEKCRYTKVNELMTRCSVGTELMPIGEEPSSLGFENTLAFTGQMGPVYAFSDALSPEQIRGIYNLGPSYMYSFLGDQNLLTNDDSRYKGILDAKDGISSKMIFGLNAQASNNRTLFNVSSALDGLDKSKFEATTMGGTKLCSRRLLQEIIYCVGGVSVFFPLLIHFDDAVVQNGEFATRDQLAGQVIELVASVLDGNIANQQQMHLLSGFSILGFLFQSVSPQLLNIKTLSASKYMFTILKTSSMSDILLRDALSQFYLNPHIWAYATYQVQRELFLFLIQYFEADGKFLPVLCALPRIIDVIKQFYSEKLDPRFSKPLLVSKKVTGERPSMEEIRKIRLLLLSLAEMSLKLKVSQHDIRALVSFLERSQDVACVEDILHMIIRALSQNSLVPSFLEQVNSLGGCYIFINLLKREFEPIRLLGLQLLGKLLVGVPSEKRGPKIFGLPVGRPRSIAEDIRKGATAAPQLFFYSISDRLFKFPLSDHLCASLFDVLLGGASPKQVLQKRSQSDALKDRSMAPFFVPQILVCIFKYIQSCRDASVRTKILSDLLDLLDSNPVNVESLMEYGWSSWLETSAKLDVLRNYKSNSVAKADGLETNELILVRNMYSLVLSYCIFSVKGGWHQLEDTTNFLLLKIEQGQLPNSSMLRDIFEDLIGSLLETSSEESVFNSQPCRDNILYLLNLSHELFVDQIGIKLLFPSPDMSAHLSSDDINSAVLEIMNTEGNGLLTSLPWSNILFNDGEKLTDDWWSFFDKIWTLLCYLNGKGQTRLTPKGLNTAGPSIGQRARGLVESLNIPAAEMAAVVVTGGISSALGGKTNKVADKAMMLRGERFPRIIFHLIIMYLCKAGLENASKCVQQFISLLPNIISEDDQCKNRLHFLIWSLLRVRSQYGQLDDGARFHVMSHLILETVIYGKSMLTTNIVGRDDSTEANNSKEAGFILNLVQKDRVLTAATDEAKYMKDAIADRMKLVQELHSKLDERSIQDVEQLQSFEDDVQFAKTAAIAADDSRKAAFQLAFDEDQQIVADKWIHILRALSDERGPWSAAPFPNNIVTYWKLDKTEDKWRRRLKLKRNYKFDECLCHPSSIKSSNDNAAPTVDPSANAKITEKMKHLLLKGVRGITGDISSESCEDSNDMIDPPQNVPPENHTVSDTSDSADSSDYPAIVQNRKESSSTSSDNDYIEVLSSVHCVLVTPKRKLAGQLTITRNALHFSFEFLVEGTGGSSVFDRFHDKKDSDSKNEMGGVEKLKGNLDGGRGNAAESSDTQIKNQSGKIKHHRRWKITRIKAVHWTRYLLQYTATEIFFDDANAPVFLNFSSQNDAKSVGSLLVSLRNDALFPKGTTRDKNSLISFVDRKVALEMSESARESWRRREISNFEYLMILNTLAGRSYNDLTQYPIFPWILADYSSEKLDFNKSSTFRDLSKPVGALDAKRFKAFEDRYLNFVDPDIPSFYYGSHYSSMGIVLYYLLRLEPFTALHRNLQGGKFDHADRLFQSIESTYSNCLSNTSDVKELIPEFFYMPEFLENSNSYHLGIKQDGEPLGDVGLPPWAKGSPEEFIHISREALESEYVSSNLHHWIDLIFGYKQRGKPAVEAANIFYYLTYEGAVDLENMDDMLQKSAIEDQIANFGQTPIQIFRKKHPRRGPPIPIVHPLYFAPQSITVTSVVPTIVTPLSVLFIGLLDSNVVMMNEGLILSVKLWLTTQLQSGGNFTFSGSLEPFFGIGSDVISPRKIGTSLAENVEFGRQCLATVQIRGDNYLILCGNWENSFQIISLSDGKIVQSIRQHKDVVSCVAVSSDGSVIATGSYDTTVMIWYAFQGRSNDKRYRNANYDLSTKDHVIIESPCHILCGHDDIITCLFVSTELDIVISGSKDGTCMFHTLREGTYVRSIRHPSGAGLSKMVTSQHGRLVIYSDSDLSLHMYSINGKHIASSESNCRLNCMELSCCGEFMVCAGDHGQIVLRSMHSLDVVWRYEGAGKTITSLVVTPEECFLAGTKDGSLIVFSIENPLLRKNAMQRHKAKPSIGG

SEQ ID NO: 177642 - protein, 221 aa, Zea Mays
MQIFVKTLTGKTITLEVESSDTIDNVKAKIQDKEGIPPDQQRLIFAGKQLEDGRTLADYNIQKESTLHLVLRLRGGMQIFVKTLTGKTITLEVESSDTIDNVKAKIQDKEGIPPDQQRLIFAGKQLEDGRTLADYNIQKESTLHLVLRLRGGMQIFVKTLTGKTITLEVESSDIQDKEGIPPDQQRLIFAGKQLEDGRTLADYNIQKESTLHLVLRLRGGY

SEQ ID NO: 177643 - protein, 350 aa, Zea Mays
MQIFVKTLTGKTITLEVESSDTIDNVKAKIQDKEGIPPDQQRLIFAGKQLEDGRTLADYNIQKESTLHLVLRLRGGMQIFVKTLTGKTITLEVESSDTIDNVKAKIQDKEGIPPDQQRLIFAGKQLEDGRTLADYNIQKESTLHLVLRLRGGMQIFVKTLTGKTITLEVESSDTIDNVKAKIQKESTLHLVLRLRGGMQIFVKTLTGKTITLEVESSDTIDNVKAKIQDKEGIPPDQQRLIFAGKQLEDGRTLADYNIQKESTLHLVLRLRGGMQIFVKTLTGKTITLEVESSDTIDNVKAKIQDKEGIPPDQQRLIFAGKQLEDGRTLADYNIQKESTLHLVLRLRGGY

SEQ ID NO: 177644 - protein, 133 aa, Zea Mays
MRLLIHPRGPSCGRRGPGPVGAHQPVHLYLRLFCSVATKTLLHIRFDPFSDRKKSHFLDSRSRSPLPLLTWIMCILARFLVLVLDSSQTSLFEGLLIQTEIEDSQSQMGSTSRFSLPHFHSFRSEAKTEEVKT

SEQ ID NO: 177645 - protein, 440 aa, Zea Mays
MDIARAAAGVACCKEHQRIYAEWFALADPDGDGRVTGADATSFFAMSALSRADLKQVWAIADSRRQGYLGFAEFVTAMQLVSLAQAGNEITQDSLKREDLSTLDPPVMEGVDELLARSKAVVKRVHPDDNGTTQAQAPSIYHWFGSKSAQKVQMPLTAVTSVIDGLKRLYVEKLKPLEVAYRYNDFSHPLLTNSDFEAKPMVMLLGQYSTGKTTFIKHLLKTSYPGAHVGPEPTTDRFVVVMSGSDGRTIPGNTIAVQADMPFTGLTTFGGAFLSKFECSQMPHPLLEHITFVDTPGVLSGEKQRTQRSYDFTGVTSWFAAKCDLILLLFDPHKLDISDEFKRVISSLRGHDDKIRVVLNKADQVDTQQLMRVYGALMWSLGKVLNTPEVVRVYIGSFNDKPVNDSAVGPIGKDLFEREQDDLLCDLKDIPKKACDRRVS

SEQ ID NO: 177646 - protein, 503 aa, Zea Mays
MDIARAAAGVACCKEHQRIYAEWFALADPDGDGRVTGADATSFFAMSALSRADLKQVWAIADSRRQGYLGFAEFVTAMQLVSLAQAGNEITQDSLKREDLSTLDPPVMEGVDELLARSKAVVKRVHPDDNGTTQAQAPSIYHWFGSKSAQKVQMPLTAVTSVIDGLKRLYVEKLKPLEVAYRYNDFSHPLLTNSDFEAKPMVMLLGQYSTGKTTFIKHLLKTSYPGAHVGPEPTTDRFVVVMSGSDGRTIPGNTIAVQADMPFTGLTTFGGAFLSKFECSQMPHPLLEHITFVDTPGVLSGEKQRTQRSYDFTVLNKADQVDTQQLMRVYGALMWSLGKVLNTPEVVRVYIGSFNDKPVNDSAVGPIGKDLFEREQDDLLCDLKDIPKKACDRRVNEFVKRARAAKIHAYIIGHLKKEMPAMMGKAKAQQRLIDNLDEEFAKVQREYHLPAGDFPDVEHFKQVLGGYSIDKFEKLKPKMVQAVDDMLAHDIPELLKNLRNPYE

SEQ ID NO: 177647 - protein, 545 aa, Zea Mays
MDIARAAAGVACCKEHQRIYAEWFALADPDGDGRVTGADATSFFAMSALSRADLKQVWAIADSRRQGYLGFAEFVTAMQLVSLAQAGNEITQDSLKREDLSTLDPPVMEGVDELLARSKAVVKRVHPDDNGTTQAQAPSIYHWFGSKSAQKMPLTAVTSVIDGLKRLYVEKLKPLEVAYRYNDFSHPLLTNSDFEAKPMVMLLGQYSTGKTTFIKHLLKTSYPGAHVGPEPTTDRFVVVMSGSDGRTIPGNTIAVQADMPFTGLTTFGGAFLSKFECSQMPHPLLEHITFVDTPGVLSGEKQRTQRSYDFTGVTSWFAAKCDLILLLFDPHKLDISDEFKRVISSLRGHDDKIRVVLNKADQVDTQQLMRVYGALMWSLGKVLNTPEVVRVYIGSFNDKPVNDSAVGPIGKDLFEREQDDLLCDLKDIPKKACDRRVNEFVKRARAAKIHAYIIGHLKKEMPAMMGKAKAQQRLIDNLDEEFAKVQREYHLPAGDFPDVEHFKQVLGGYSIDKFEKLKPKMVQAVDDMLAHDIPELLKNLRNPYE

SEQ ID NO: 177648 - protein, 384 aa, Zea Mays
MKKGDKICFMANGKEYVAEEIGVLSPNQMQVSELYAGEVGYLSASIRSVADARVGDTITHYSKKAHHALPGYSEATPMVFCGLFPIDADQFEELREALEKLQLNDAALKFEPESSSAMGFGFRCGFLGLLHMEIVQERLEREYNLNLIITAPSVVYRVNCADGETVECSNPSLLPEPGKRRSIEEPYVKIEMLTPKDYIGSIMELTQDRRGEFKEMNFITESRAKLIYELPLAEMVGDFFDQLKSRSKGYASMEYSVVGYRESQLVKLDIQINGDPVEALSTIVHRDKAYAVGRALTQKLKELIPRQMFRVPIQACIGTKVIASEALSAIRKDVLSKCYGGDISRKKKLLKKQAEGKKRMKAIGRVDVPQEAFMAVLRLEKEVL

SEQ ID NO: 177649 - protein, 932 aa, Zea Mays
MPIDGKLHKVPCVQFAFSDDIVLSESIERAVNVIADSVCSVLLDTIIKGDPRIQAAKVIWVESDAASWVKHTRKVSKGESALEIIVEKDDAVSNGDAWRTAIDACLPVLNLIDTRRSIPYGIQQVRELIGISCAFDQVVQRLSTTVKMVNKGVLKDHLILVANSMTCTGNLIGFNIAGYKATFRSLKVQVPFTESTLFTPMKCFEKAAEKCDSDSLGCVVSSSAWGKHAAVGTGSSFQILWNENQLKSNKEYGDGLYDFLALVRTDQEKTDYMFLDDVDYLVEENAADDMCLSPEPDGTLGKPTFEDNFEEQNIQKGSSWEIGITTNSSWEQNASVANDSGDWGGWSSGGGAAAKPADQDNSWEVHAKVQDNSTTDWGGWSVEKPTGEATVSGEPAETDTWADKGAKMESDAGDGNWEKSSTPEASKKNDSSENTWDKRKGDGGDGAWGNRSDDGHGNWEHPSNWNGQSLDVDQDTWGNARGKKKADGNYCQWEEQPSNYKQKKTNADHDSSYNNVMPSSEIAWNAGDGTGRPNAKSNAESSWGEEDKMESDDHPKVPKESDTWNTGRSNESPWDNTDALQDSWVKSAARNNNTQDGSWDKVVSMKDLDSLQDSWSKATIQTNDAQNDSWDNVAKNAPDSAAEDSWGAATPAETTDSGNKEWKSDGWGAKSGNWSSQRNNPGRPPRRPDERGPPPPRQRFELTVAEKNILLEVEPIKLRVRSIFREACDGVRLNPEDEKFILEKVLEHHPEKQSKVSGEIDYLTVNKHQTFQDTRCFFVVSTDGSQADFSYLKCLENFVRKSYTEDADTFCMKYLRPRRRQAPPADVGTASGAPDEVPPSTAAETEQGTPPAPQAEVPQETWGSPAVPLEGGTHIAGPDSTGDAVILGEQHDLTPASPAVAPQVASEPDTTDGTGLLGKAPQADWGPRFDAD

SEQ ID NO: 177650 - protein, 1898 aa, Zea Mays
MEEDHSVILISEGAIKSIKLSLSTGEEICTYSINECPVTHPSQLGNPFLGLPLEAGKCESCGASENDKCEGHFGYIELPVPIYHPCHVTELRQLLSLICLKCLRIKKGKVKQSNGKGNAAPTLCSYCRDIPALSLKEIKTTDGAIRLELRAPHNKHMTERSWNFLDKYGFHHGGCSHHRTLLPEEALNILKKVPDDTRRKLAARGYIVQTGYVMKYLPVPPNCLYIPEFTDGQSIMSYDISIALLKKVLQKIEQIKRSRSGSPNFESHDAESCDLQLAIGQYIRLRGTTRGPQDNTKRFTVGSADSAALSTKQWLEKMRTLFISKGSGFSSRSVLTGDPYIGLGVVGLPSEVAKRMTFEEQVTDININRLQDVVDKGLCLTYRDGQATYAITVGSKGYTTLKVGQTISRRIVDGDVVFLNRPPSTHKHSLQAFYAYVHDDHTVKINPLMCGPFSADFDGDCVHIYYPQSLAAKAEALELFSVERQLISSHSGKVNLQLGNDSLVAMKAMSHTTMLHKELANQLAMFVPFSLLAPAVIKPVPSWTISQIVQGAFPANLTCQGDTHLVRDSTIIRLDLGKESVQDSFPDLVSSILREKGPKEALQFLNVLEPLLMEFLLLDGLSISLRDFNVPKALLEEAQKDIRNQSLILEQSRCSTSQFVEFRVENNLKNVKQQISDSVGKFSDLGLLIDPKKEASMSKVVQQVGFVGLQLYREGKLYSRRLVEDCFTNFVNKHLAIGDEYPPEAYGLVQSSYFHGLNPYEELIHAISTREAMIRSSRGLSEPGTLFKNLMAILRDVVICYDGTVRNICSNSIIQLKYGEDDETDSSSVVPPGEPVGVLAATAISNPAYKAVLDSSQSNNASWESMKEILQTRTSYKNDVKDRKVVLFLNDCSCAKKFCKERAALAVQSCLKRVTLGDCATDICIEHQKQINLDGTSEAAPTLVGHIHLDKGHLERINISTQDILQKCQEVSGRFGKKKGHLCHIFKKITFATCDCSFTQMPIDGKLHKVPCVQFAFSDDIVLSESIERAVNVIADSVCSVLLDTIIKGDPRIQAAKVIWVESDAASWVKHTRKVSKGESALEIIVEKDDAVSNGDAWRTAIDACLPVLNLIDTRRSIPYGIQQVRELIGISCAFDQVVQRLSTTVKMVNKGVLKDHLILVANSMTCTGNLIGFNIAGYKATFRSLKVQVPFTESTLFTPMKCFEKAAEKCDSDSLGCVVSSSAWGKHAAVGTGSSFQILWNENQLKSNKEYGDGLYDFLALVRTDQEKTDYMFLDDVDYLVEENAADDMCLSPEPDGTLGKPTFEDNFEEQNIQKGSSWEIGITTNSSWEQNASVANDSGDWGGWSVEKPTGEATVSGEPAETDTWADKGAKMESDAGDGNWEKSSTPEASKKNDSSENTWDKRKGDGGDGAWGNRSDDGHGNWEHPSNWNGQSLDVDQDTWGNARGKKKADGNYCQWEEQPSNYKQKKTNADHDSSYNNVMPSSEIAWNAGDGTGRPNAKSNAESSWGEEDKMESDDHPKVPKESDTWNTGRSNESPWDNTDALQDSWVKSAARNNNTQDGSWDKVVSMKDLDSLQDSWSKATIQTNDAQNDSWDNVAKNAPDSAAEDSWGAATPAETTDSGNKEWKSDGWGAKSGNWSSQRNNPGRPPRRPDERGPPPPRQRFELTVAEKNILLEVEPIKLRVRSIFREACDGVRLNPEDEKFILEKVLEHHPEKQSKVSGEIDYLTVNKHQTFQDTRCFFVVSTDGSQADFSYLKCLENFVRKSYTEDADTFCMKYLRPRRRQAPPADVGTASGAPDEVPPSTAAETEQGTPPAPQAEVPQETWGSPAVPLEGGTHIAGPDSTGDAVILGEQHDLTPASPAVAPQVASEPDTTDGTGLLGKAPQADWGPRFDAD

SEQ ID NO: 177651 - protein, 1125 aa, Zea Mays
MEEDHSVILISEGAIKSIKLSLSTGEEICTYSINECPVTHPSQLGNPFLGLPLEAGKCESCGASENDKCEGHFGYIELPVPIYHPCHVTELRQLLSLICLKCLRIKKGKVKQSNGKGNAAPTLCSYCRDIPALSLKEIKTTDGAIRLELRAPHNKHMTERSWNFLDKYGFHHGGCSHHRTLLPEEALNILKKVPDDTRRKLAARGYIVQTGYVMKYLPVPPNCLYIPEFTDGQSIMSYDISIALLKKVLQKIEQIKRSRSGSPNFESHDAESCDLQLAIGQYIRLRGTTRGPQDNTKRFTVGSADSAALSTKQWLEKMRTLFISKGSGFSSRSVLTGDPYIGLGVVGLPSEVAKRMTFEEQVTDININRLQDVVDKGLCLTYRDGQATYAITVGSKGYTTLKVGQTISRRIVDGDVVFLNRPPSTHKHSLQAFYAYVHDDHTVKINPLMCGPFSADFDGDCVHIYYPQSLAAKAEALELFSVERQLISSHSGKVNLQLGNDSLVAMKAMSHTTMLHKELANQLAMFVPFSLLAPAVIKPVPSWTISQIVQGAFPANLTCQGDTHLVRDSTIIRLDLGKESVQDSFPDLVSSILREKGPKEALQFLNVLEPLLMEFLLLDGLSISLRDFNVPKALLEEAQKDIRNQSLILEQSRCSTSQFVEFRVENNLKNVKQQISDSVGKFSDLGLLIDPKKEASMSKVVQQVGFVGLQLYREGKLYSRRLVEDCFTNFVNKHLAIGDEYPPEAYGLVQSSYFHGLNPYEELIHAISTREAMIRSSRGLSEPGTLFKNLMAILRDVVICYDGTVRNICSNSIIQLKYGEDDETDSSSVVPPGEPVGVLAATAISNPAYKAVLDSSQSNNASWESMKEILQTRTSYKNDVKDRKVVLFLNDCSCAKKFCKERAALAVQSCLKRVTLGDCATDICIEHQKQINLDGTSEAAPTLVGHIHLDKGHLERINISTQDILQKCQEVSGRFGKKKGHLCHIFKKITFATCDCSFTQMPIDGKLHKVPCVQFAFSDDIVLSESIERAVNVIADSVCSVLLDTIIKGDPRIQAAKVIWVESDAASWVKHTRKVSKGESALEIIVEKDDAVSNGDAWRTAIDACLPVLNLIDTRRSIPYGIQQF

SEQ ID NO: 177652 - protein, 1615 aa, Zea Mays
MRTLFISKGSGFSSRSVLTGDPYIGLGVVGLPSEVAKRMTFEEQVTDININRLQDVVDKGLCLTYRDGQATYAITVGSKGYTTLKVGQTISRRIVDGDVVFLNRPPSTHKHSLQAFYAYVHDDHTVKINPLMCGPFSADFDGDCVHIYYPQSLAAKAEALELFSVERQLISSHSGKVNLQLGNDSLVAMKAMSHTTMLHKELANQLAMFVPFSLLAPAVIKPVPSWTISQIVQGAFPANLTCQGDTHLVRDSTIIRLDLGKESVQDSFPDLVSSILREKGPKEALQFLNVLEPLLMEFLLLDGLSISLRDFNVPKALLEEAQKDIRNQSLILEQSRCSTSQFVEFRVENNLKNVKQQISDSVGKFSDLGLLIDPKKEASMSKVVQQVGFVGLQLYREGKLYSRRLVEDCFTNFVNKHLAIGDEYPPEAYGLVQSSYFHGLNPYEELIHAISTREAMIRSSRGLSEPGTLFKNLMAILRDVVICYDGTVRNICSNSIIQLKYGEDDETDSSSVVPPGEPVGVLAATAISNPAYKAVLDSSQSNNASWESMKEILQTRTSYKNDVKDRKVVLFLNDCSCAKKFCKERAALAVQSCLKRVTLGDCATDICIEHQKQINLDGTSEAAPTLVGHIHLDKGHLERINISTQDILQKCQEVSGRFGKKKGHLCHIFKKITFATCDCSFTQMPIDGKLHKVPCVQFAFSDDIVLSESIERAVNVIADSVCSVLLDTIIKGDPRIQAAKVIWVESDAASWVKHTRKVSKGESALEIIVEKDDAVSNGDAWRTAIDACLPVLNLIDTRRSIPYGIQQVRELIGISCAFDQVVQRLSTTVKMVNKGVLKDHLILVANSMTCTGNLIGFNIAGYKATFRSLKVQVPFTESTLFTPMKCFEKAAEKCDSDSLGCVVSSSAWGKHAAVGTGSSFQILWNENQLKSNKEYGDGLYDFLALVRTDQEKTDYMFLDDVDYLVEENAADDMCLSPEPDGTLGKPTFEDNFEEQNIQKGSSWEIGITTNSSWEQNASVANDSGDWGGWSSGGGAAAKPADQDNSWEVHAKVQDNSTTDWGGWSVEKPTGEATVSGEPAETDTWADKGAKMESDAGDGNWEKSSTPEASKKNDSSENTWDKRKGDGGDGAWGNRSDDGHGNWEHPSNWNGQSLDVDQDTWGNARGKKKADGNYCQWEEQPSNYKQKKTNADHDSSYNNVMPSSEIAWNAGDGTGRPNAKSNAESSWGEEDKMESDDHPKVPKESDTWNTGRSNESPWDNTDALQDSWVKSAARNNNTQDGSWDKVVSMKDLDSLQDSWSKATIQTNDAQNDSWDNVAKNAPDSAAEDSWGAATPAETTDSGNKEWKSDGWGAKSGNWSSQRNNPGRPPRRPDERGPPPPRQRFELTVAEKNILLEVEPIKLRVRSIFREACDGVRLNPEDEKFILEKVLEHHPEKQSKVSGEIDYLTVNKHQTFQDTRCFFVVSTDGSQADFSYLKCLENFVRKSYTEDADTFCMKYLRPRRRQAPPADVGTASGAPDEVPPSTAAETEQGTPPAPQAEVPQETWGSPAVPLEGGTHIAGPDSTGDAVILGEQHDLTPASPAVAPQVASEPDTTDGTGLLGKAPQADWGPRFDAD

SEQ ID NO: 177653 - protein, 152 aa, Zea Mays
MQARVVVFPVKGRAWCFALPRASAAAPAADGALPRPTLRDLWRGISSGSRTAPEKAEAVVDFVADKMNRAWVGFGSAPEGSMKSRIHSFGLKLLSRVRPSEVLLKSVTKDVSALEIVHPASINSRLVRRRLRHIAVSSQEISVWLGLFASSY

SEQ ID NO: 177654 - protein, 208 aa, Zea Mays
MQARVVVFPVKGRAWCFALPRASAAAPAADGALPRPTLRDLWRGISSGSRTAPEKAEAVVDFVADKMNRAWVGFGSAPEGSMKSRIHSFGLKLLSRVRPSEVLLKSVTKDVSALEIVHPASINSRLVRRRLRHIAVRGASVHKKFLYYRYQTFHSFGCYFVLILIGELYRFVKLVLHSESASSVMVKASEYHLQVSGSIPLGANFVHG

SEQ ID NO: 177655 - protein, 255 aa, Zea Mays
MQARVVVFPVKGRAWCFALPRASAAAPAADGALPRPTLRDLWRGISSGSRTAPEKAEAVVDFVADKMNRAWVGFGSAPEGSMKSRIHSFGLKLLSRVRPSEVLLKSVTKDVSALEIVHPASINSRLVRRRLRHIAVRGASVHKKFLYYRYQTFHSFGCYFVLILIGELYSERLELLVSDCSDKWKVLEEKINSVKDGKPSENARNSPWKLRPSEKLDRFLEGRNLDEGLDCDTILSICQEYDLDKIDVLKYRDLL

SEQ ID NO: 177656 - protein, 451 aa, Zea Mays
MSRGIVSRLTVGAEVQKLCAQAIDAMESLFSGVSPAGSRIPRPCMVPPNFVKFEAITQTSVMVFLDLVHYPMLAQEATSFNIWHRMAVTEAYLTNPTGIILPPSKKLPVTGLAPATSYIFKIIAFKNSIELGSWEIRTKTSYQKDDPRGSMPGGTRLGHNSESLKANSDGQSDPSSEGVDSNNNTAVYADLNKSPESDFEYCENPEILDSDKASRRLSEHIDDLQNIQMAADRVTEVTELEESPGLSASALDEEPNACVQAVLLREPNPLGHNQRTVVPRSQHASNVLGGNELVIVGPRYAGSVPPIATRGLENSKESGGRGFKPKPCNNIFQNGSSKPEREPGNSSNKRTAGKTEDLGHKDSSSEVSYEYCVRVVRWLECEGYIETNFRVKFLTWFSLRATPQERKIVGVYVDTLIEDPVSLSGQLVDSFSEAVYSKKRTPSGFCMDLWH

SEQ ID NO: 177657 - protein, 327 aa, Zea Mays
MGSGNLVTKKVVRRPSSIDQDIKFDQSWVEDVACPICLDSPHNAVLLRCASYEKGCRPFICDTDQTRSNCLERFRGAHGLPLPVPANARASSRTVAPLNSIHTITISSSNANNNRPACPLCRGDVMGWFVIGEARSHLNQKRRCCEESRCSYVGSFHELQRHTQQKHPDSRPSAIDPARRADWENLQRSSDVVDVLSTIHAQVPNGVVLGDYVIEYGDGDEAGDDDYEVYHGVRASWWTSCIFCKAFCRSSPPGGVRRRTRTGERRSSGGSGTRSSSNRSSSSQERFTLDEVDDGYVVAGAMARAAVSGTMDARYRDPTLGHRRSHS

SEQ ID NO: 177658 - protein, 632 aa, Zea Mays
MDHGGEDRVVAASLAAARRTLRAGLDKSRALGHALARAGPRLKEIQAALPVLEAAVRPIRAPRAELAAAGPHIDRAVGPAAAVLKVFDAVHGLEPPLLAPGAAGSGAAGDLPGYLAVLAQLEEAHRFLADNCGLAAQWLADIVEYLGDRFLVDPRFLADIEVTLDELKAPPTGDLDGGLLAAALGILEAEFRRLLADHSAPLAMPQPGAAAGSTAPSRVPAAAVHKLTLILDRLVANGRQDRCVAVYIDARGGVVSASLRALGLDYLREPSQDAQALGPALELWGRHLEFVVRRLLESERQLCAKVFGLHKDVASACFAEVAAQAGVLEFLRFGRAVADAKKDPIKLQRLLEVFDSLNKLRLDFNRLFGGKACAEIQSQTRDLVKLLIDGAVEIFEELIVQVELQRHMPPPVDGGVPRLVTFVVEYCNRLLGEQYRPMLGQVLTIHRSWRKEVFNDRMLVDVVLNIVKALEANFDVWSKAYDNATLSYLFMMNTHWHFFRHLKATKLGEILGDVWLREHEQYKDYYLSMFIRESWGALSPLLNREGLILFSKGQATARDLVKQRLKTFNSSFDEMHCRQSSWVIPDKDLRERTCNLVVQTIVPAYRSYLQNYGPLVEQDGNTSKYVRMDGRN

SEQ ID NO: 177659 - protein, 866 aa, Zea Mays
MLYPSRVGQLQMLAFDPCASQISGWDFIYAEYVVAAGHHHRSIVWQIAEDYSHCEFLLRLPGYCPMPAFRDVIDVPLVVRRLHRSRTEVRKELGIANDVKVVIFNFGGQPAGWELKKEWLPDGWLCLVCGASDTQELPLNFIKLAKDAYTPDLMAASDCMLGKIGYGTVSEALAYNLPFVFVRRDYFNEEPFLRNMLEHYQCGIEMIRRDLLTGHWKPYLQRAITLQPCYDGPINGGKVAAHILQDTAVGKKYISGKLSGARRLRDAIVLGYQLQRAPGRDVGIPYWYSHSEKEISVGPAPTSHDMNGSDESSFEDFEILHGDMQGLTDTMSFLKSLSGLVGNDLRSPEKQTRERAAASVLFDWEEEIYVARAPGRLDVMGGIADYSGSLVLQMPIREACHVAVQRSDPTKQKQWKHTQARQLANGGAVPVLQIVSFGSELSNRAPTFDMDLSDFMDGDKPISYDNVKEYFSRDPSQKWAAYVAGTIFVLMAELGVRFKDSMSILVSSSVPEGKGVSSSASVEVASMSAIAAAYGLNIAPRDLALLCQKVENRVVGAPCGVMDQMTSACGEANKLLAMVCQPAEVKELVNIPTHIRFWGLDSGIRHSVGGTDYGSVRVGTYMGRKMIKCAASNLLSELLLSCTSTQPGDSSPDEYEGHGVDLLKSEASMEYLCNLPPHRYEAVFAKEIPETITGDAFLEKYGDHNDAVTEVDPKRSYCVKAPTRHPIYENFRVEAFKALLTAAKTDEQLSALGELMFQCHYSYNACGLGSDGTDRLVNLVQEIRHRKSSRAGGPSLFGAKITGGGSGGSVCVMGKNCLKSSEEILEIQKRYKAATGYLPTVFDGSSPGAGKFGYLKIRRRSTSPSD

SEQ ID NO: 177660 - protein, 707 aa, Zea Mays
MFGKIGYGTVSEALAYNLPFVFVRRDYFNEEPFLRNMLEHYQCGIEMIRRDLLTGHWKPYLQRAITLQPCYDGPINGGKVAAHILQDTAVGKKYISGKLSGARRLRDAIVLGYQLQRAPGRDVGIPYWYSHSEKEISVGPAPTSHDMNGSDESSFEDFEILHGDMQGLTDTMSFLKSLSGLVGNDLRSPEKQTRERAAASVLFDWEEEIYVARAPGRLDVMGGIADYSGSLVLQMPIREACHVAVQRSDPTKQKQWKHTQARQLANGGAVPVLQIVSFGSELSNRAPTFDMDLSDFMDGDKPISYDNVKEYFSRDPSQKWAAYVAGTIFVLMAELGVRFKDSMSILVSSSVPEGKGVSSSASVEVASMSAIAAAYGLNIAPRDLALLCQKVENRVVGAPCGVMDQMTSACGEANKLLAMVCQPAEVKELVNIPTHIRFWGLDSGIRHSVGGTDYGSVRVGTYMGRKMIKCAASNLLSELLLSCTSTQPGDSSPDEYEGHGVDLLKSEASMEYLCNLPPHRYEAVFAKEIPETITGDAFLEKYGDHNDAVTEVDPKRSYCVKAPTRHPIYENFRVEAFKALLTAAKTDEQLSALGELMFQCHYSYNACGLGSDGTDRLVNLVQEIRHRKSSRAGGPSLFGAKITGGGSGGSVCVMGKNCLKSSEEILEIQKRYKAATGYLPTVFDGSSPGAGKFGYLKIRRRSTSPSD

SEQ ID NO: 177661 - protein, 638 aa, Zea Mays
MFLMPGLIITLYVTGALNTVLSSEHQKEIRRYLYNHQNEDGGWGLHIEGPSTMFGSALTYVTLRLLGEGPDSGDGAMEKGRNWILDHGGATYITSWGKFWLSVLGVFEWSGNNPVPPEVWLLPYLLPFHPGRMWCHCRMVYLPMCYIYGKRFVGRITPLVLELRKELFKDPYSKIDWDKARNLCAKEDLYYPHPFVQDVLWATLHKFVEPVMMSWPGSKLREKALETAMQHVHYEDENTRYICIGPVNKVLNMLACWIEDPNSEAFKLHIPRVYDYLWLAEDGMKMQGYNGSQLWDTAFIVQAIVATNLTEEFGPTLKLAHNYIKKSQVLDDCPGDLNDWYRHTSKGAWPFSTADHGWPISDCTAEGLKASLLLSKISPEIVGGPIEANRFYDAVSCLMSYMNDNGGFATYELTRSYAWLELINPAETFGDIVIDYPYVECTSAAIQALTSFRKLYPGHRRKEVDSCISKAANFIESIQKSDGSWYGSWAVCFTYGTWFGVKGLIAAGRTFESSPAIRKACGFLLSKELPSGGWGESYLSSQDQVYTNLKGNRAHAANTGWAMLALIDAGQAQRDPAPLHRAAKVLINLQSEDGEFPQQEIIGVFNKNCMISYSQYRNTFPIWALGEYRCRVLGAGKR

SEQ ID NO: 177662 - protein, 506 aa, Zea Mays
MWCHCRMVYLPMCYIYGKRFVGRITPLVLELRKELFKDPYSKIDWDKARNLCAKEDLYYPHPFVQDVLWATLHKFVEPVMMSWPGSKLREKALETAMQHVHYEDENTRYICIGPVNKVLNMLACWIEDPNSEAFKLHIPRVYDYLWLAEDGMKMQGYNGSQLWDTAFIVQAIVATNLTEEFGPTLKLAHNYIKKSQVLDDCPGDLNDWYRHTSKGAWPFSTADHGWPISDCTAEGLKASLLLSKISPEIVGGPIEANRFYDAVSCLMSYMNDNGGFATYELTRSYAWLELINPAETFGDIVIDYPYVECTSAAIQALTSFRKLYPGHRRKEVDSCISKAANFIESIQKSDGSWYGSWAVCFTYGTWFGVKGLIAAGRTFESSPAIRKACGFLLSKELPSGGWGESYLSSQDQVYTNLKGNRAHAANTGWAMLALIDAGQAQRDPAPLHRAAKVLINLQSEDGEFPQQEIIGVFNKNCMISYSQYRNTFPIWALGEYRCRVLGAGKR

SEQ ID NO: 177663 - protein, 586 aa, Zea Mays
MFGSALTYVTLRLLGEGPDSGDGAMEKGRNWILDHGGATYITSWGKFWLSVLGVFEWSGNNPVPPEVWLLPYLLPFHPGRMWCHCRMVYLPMCYIYGKRFVGRITPLVLELRKELFKDPYSKIDWDKARNLCAKEDLYYPHPFVQDVLWATLHKFVEPVMMSWPGSKLREKALETAMQHVHYEDENTRYICIGPVNKVLNMLACWIEDPNSEAFKLHIPRVYDYLWLAEDGMKMQGYNGSQLWDTAFIVQAIVATNLTEEFGPTLKLAHNYIKKSQVLDDCPGDLNDWYRHTSKGAWPFSTADHGWPISDCTAEGLKASLLLSKISPEIVGGPIEANRFYDAVSCLMSYMNDNGGFATYELTRSYAWLELINPAETFGDIVIDYPYVECTSAAIQALTSFRKLYPGHRRKEVDSCISKAANFIESIQKSDGSWYGSWAVCFTYGTWFGVKGLIAAGRTFESSPAIRKACGFLLSKELPSGGWGESYLSSQDQVYTNLKGNRAHAANTGWAMLALIDAGQAQRDPAPLHRAAKVLINLQSEDGEFPQQEIIGVFNKNCMISYSQYRNTFPIWALGEYRCRVLGAGKR

SEQ ID NO: 177664 - protein, 149 aa, Zea Mays
MWRLRIAEGGGDPWLRTKNAHVGRQVWEFDASADPDPAVDAARRAFAGSRGHLKHSADLLMRIQFAKENPLELDLPAIKLGEHEDVTEEAVSTTLRRAISRLSTLQAHDGHWPGDYGGPMFLMPGLIITLYVTGALNTVLSSEHQKEIQ

SEQ ID NO: 177665 - protein, 464 aa, Zea Mays
MFLMPGLIITLYVTGALNTVLSSEHQKEIRRYLYNHQNEDGGWGLHIEGPSTMFGSALTYVTLRLLGEGPDSGDGAMEKGRNWILDHGGATYITSWGKFWLSVLGVFEWSGNNPVPPEVWLLPYLLPFHPGRMWCHCRMVYLPMCYIYGKRFVGRITPLVLELRKELFKDPYSKIDWDKARNLCAKEDLYYPHPFVQDVLWATLHKFVEPVMMSWPGSKLREKALETAMQHVHYEDENTRYICIGPVNKVLNMLACWIEDPNSEAFKLHIPRVYDYLWLAEDGMKMQGYNGSQLWDTAFIVQAIVATNLTEEFGPTLKLAHNYIKKSQVLDDCPGDLNDWYRHTSKGAWPFSTADHGWPISDCTAEGLKASLLLSKISPEIVGGPIEANRFYDAVSCLMSYMNDNGGFATYELTRSYAWLELINPAETFGDIVIDYPNPGPDIIQKTIPWAPQERGGQLYQQSC

SEQ ID NO: 177666 - protein, 823 aa, Zea Mays
MDSPSDSQLPFFPSTEVLVKCLFLIAPYAVVHSLRSYSRIILCSHHPCLTSSSSPAGVYKRLQRRLRQEQIFFVDLITPNISVICKHFIGLQERTLHDSFSESDIKIFYTPEGQLSTEQGVYIAEAVANKNTKLAKGRFRAYDDQMQETARSIVPAKNEKKESSGIGKRETGKSTKRTAPIDKAKTAKEEARELLLKEEASVRMKVGQVQKDLSLMLDALGKLAIANPIFTHGQLPSLVNYVEPLLSSPIVSDAAFCTMLRLARCTAPPLCNWALDIAAAIRVISVGDFEMVLDLTPVIMEDDSKKPSSGIFEQIVNGLTIACKAGPLPADSFTFVFPIMERILLSSKKTCLHDDVLHILSMHMDPILPLPRPRMLSVLYHVLSTVPAYQPSVGPMLNELCLGLRGHELAQALVGVYAKELHVRLACLTAIKCVPVHSVQRDLQVSTSLWIAAHDPEKVVAELAEELWDRFGFDAITDYSGIFNALSHKNYNVRAASAEALAAALDENQDKMQDALSTLFSLYIRDIGTSVEFGDAHWLGRQGIALALHSIADVLASKDLPVVMTFLISRALADPNVDVRGRMINAGILIIDRHGKENVPLLFPIFESYLNKRASTTFLLIIVLASDEKTYDLVREGVVIFTGALAKHLSKDDPKVHSVIEKLLDVLNTPSEAVQRAVSDCLSPLMVSKQEEGQALVSRLLDRMMKCEKYGERRGAAFGLAGVVKGFGISSLKKYGIAVTLQKNLEDRMSAKSREGALLGFECLCEKLGKLFEPYVIQMLPFLLVCFSDQVLAVREAAECAARAMMSQLTGPGVKLVLPSLLK

SEQ ID NO: 177667 - protein, 1423 aa, Zea Mays
MGAQEEAVDEMLRAAAAEVSTSSVKRRLRIFHHTLPPLIAKAIESPSDTVLLVDLIFQTLPIYDDRASRKAVDDLVIQALGEPTFMKPFAAVLVQSMEKNLKVTNPLTSLKLLRWSHYLLKWSQFATLTKGAFTRLANAQAVLCQVLMDGSFRRRRTCKQLFIHLFSEHSGIYKMYIEELRDLRISMRDSPAFLNLILDFTITSPSLSTQYQSVFLDLYVKIILSSKDRPPKAATEAFKPLFLNIGHEDFKNTIIPSCIKMLKRNPEIVLQSIGYLLKTVHLDLSKYSMEFMPVVLHQARHSDEERRINALSIIGTLSEKSSDPDALPSMVNAIKAVLGGSEGKLSLLYQRIGMINALEQLSRSPPKQIGRLAPSVSTFLLTCYKDDGIEEVKLAILSAIGSWALVSAEAVQPDVVSFIAAGLKEKDTLRKGHLKFLRVICKNSESLTKVASLLDHLIQLSKTGFSKATQRLDGIYALFAVSRLAAVDTKADGAILKEKLWTLIAQNEPSLISLQLLPKLADDDCLAVLDLVQSLFVEQFFRVREYFSIHSLLQLLIYLLCHPSWEVRKVAYDVTKKIFSSSSGLAEDILFLFTDWLSLVGERLSILKQGDMDSPSDSQLPFFPSTEVLVKCLFLIAPYAVVHSLRSYSRIILCSHHPCLTSSSSPAGVYKRLQRRLRQEQIFFVDLITPNISVICKHFIGLQERTLHDSFSESDIKIFYTPEGQLSTEQGVYIAEAVANKNTKLAKGRFRAYDDQMQETARSIVPAKNEKKESSGIGKRETGKSTKRTAPIDKAKTAKEEARELLLKEEASVRMKVGQVQKDLSLMLDALGKLAIANPIFTHGQLPSLVNYVEPLLSSPIVSDAAFCTMLRLARCTAPPLCNWALDIAAAIRVISVGDFEMVLDLTPVIMEDDSKKPSSGIFEQIVNGLTIACKAGPLPADSFTFVFPIMERILLSSKKTCLHDDVLHILSMHMDPILPLPRPRMLSVLYHVLSTVPAYQPSVGPMLNELCLGLRGHELAQALVGVYAKELHVRLACLTAIKCVPVHSVQRDLQVSTSLWIAAHDPEKVVAELAEELWDRFGFDAITDYSGIFNALSHKNYNVRAASAEALAAALDENQDKMQDALSTLFSLYIRDIGTSVEFGDAHWLGRQGIALALHSIADVLASKDLPVVMTFLISRALADPNVDVRGRMINAGILIIDRHGKENVPLLFPIFESYLNKRASDEKTYDLVREGVVIFTGALAKHLSKDDPKVHSVIEKLLDVLNTPSEAVQRAVSDCLSPLMVSKQEEGQALVSRLLDRMMKCEKYGERRGAAFGLAGVVKGFGISSLKKYGIAVTLQKNLEDRMSAKSREGALLGFECLCEKLGKLFEPYVIQMLPFLLVCFSDQVLAVREAAECAARAMMSQLTGPGVKLVLPSLLK

SEQ ID NO: 177668 - protein, 1389 aa, Zea Mays
MGAQEEAVDEMLRAAAAEVSTSSVKRRLRIFHHTLPPLIAKAIESPSDTVLLVDLIFQTLPIYDDRASRKAVDDLVIQALGEPTFMKPFAAVLVQSMEKNLKVTNPLTSLKLLRWSHYLLKWSQFATLTKGAFTRLANAQAVLCQVLMDGSFRRRRTCKQLFIHLFSEHSGIYKMYIEELRDLRISMRDSPAFLNLILDFTITSPSLSTQYQSVFLDLYVKIILSSKDRPPKAATEAFKPLFLNIGHEDFKNTIIPSCIKMLKRNPEIVLQSIGYLLKTVHLDLSKYSMEFMPVVLHQARHSDEERRINALSIIGTLSEKSSDPDALPSMVNAIKAVLGGSEGKLSLLYQRIGMINALEQLSRSPPKQIGRLAPSVSTFLLTCYKDDGIEEVKLAILSAIGSWALVSAEAVQPDVVSFIAAGLKEKDTLRKGHLKFLRVICKNSESLTKVASLLDHLIQLSKTGFSKATQRLDGIYALFAVSRLAAVDTKADGAILKEKLWTLIAQNEPSLISLQLLPKLADDDCLAVLDLVQSLFVEQFFRVREYFSIHSLLQLLIYLLCHPSWEVRKVAYDVTKKIFSSSSGLAEDILFLFTDWLSLVGERLSILKQGDMDSPSDSQLPFFPSTEVLVKCLFLIAPYAVVHSLRSYSRIILCSHHPCLTSSSSPAGVYKRLQRRLRQEQIFFVDLITPNISVICKHFIGLQERTLHDSFSESDIKIFYTPEGQLSTEQGVYIAEAVANKNTKLAKGRFRAYDDQMQETARSIVPAKNEKKESSGIGKRETGKSTKRTAPIDKAKTAKEEARELLLKEEASVRMKVGQVQKDLSLMLDALGKLAIANPIFTHGQLPSLVNYVEPLLSSPIVSDAAFCTMLRLARCTAPPLCNWALDIAAAIRVISVGDFEMVLDLTPVIMEDDSKKPSSGIFEQIVNGLTIACKAGPLPADSFTFVFPIMERILLSSKKTCLHDDVLHILSMHMDPILPLPRPRMLSVLYHVLSTVPAYQPSVGPMLNELCLGLRGHELAQALVGVYAKELHVRLACLTAIKCVPVHSVQRDLQVSTSLWIAAHDPEKVVAELAEELWDRFGFDAITDYSGIFNALSHKNYNVRAASAEALAAALDENQDKMQDALSTLFSLYIRDIGTSVEFGDAHWLGRQGIALALHSIADVLASKDLPVVMTFLISRALADPNVDVRGRMINAGILIIDRHGKENVPLLFPIFESYLNKRASTTFLLIIVLASDEKTYDLVREGVVIFTGALAKHLSKDDPKVHSVIEKLLDVLNTPSEAVQRAVSDCLSPLMVSKQEEGQALVSRLLDRMMKCEKYGERRGAAFGLAGVVKGFGISSLKKYGIAVTLQKNLEDRMSAKSREGALLGFECLCEKLGKLFEPARSC

SEQ ID NO: 177669 - protein, 1474 aa, Zea Mays
MGAQEEAVDEMLRAAAAEVSTSSVKRRLRIFHHTLPPLIAKAIESPSDTVLLVDLIFQTLPIYDDRASRKAVDDLVIQALGEPTFMKPFAAVLVQSMEKNLKVTNPLTSLKLLRWSHYLLKWSQFATLTKGAFTRLANAQAVLCQVLMDGSFRRRRTCKQLFIHLFSEHSGIYKMYIEELRDLRISMRDSPAFLNLILDFTITSPSLSTQYQSVFLDLYVKIILSSKDRPPKAATEAFKPLFLNIGHEDFKNTIIPSCIKMLKRNPEIVLQSIGYLLKTVHLDLSKYSMEFMPVVLHQARHSDEERRINALSIIGTLSEKSSDPDALPSMVNAIKAVLGGSEGKLSLLYQRIGMINALEQLSRSPPKQIGRLAPSVSTFLLTCYKDDGIEEVKLAILSAIGSWALVSAEAVQPDVVSFIAAGLKEKDTLRKGHLKFLRVICKNSESLTKVASLLDHLIQLSKTGFSKATQRLDGIYALFAVSRLAAVDTKADGAILKEKLWTLIAQNEPSLISLQLLPKLADDDCLAVLDLVQSLFVEQFFRVREYFSIHSLLQLLIYLLCHPSWEVRKVAYDVTKKIFSSSSGLAEDILFLFTDWLSLVGERLSILKQGDMDSPSDSQLPFFPSTEVLVKCLFLIAPYAVVHSLRSYSRIILCSHHPCLTSSSSPAGVYKRLQRRLRQEQIFFVDLITPNISVICKELLSQDGLFSSNNQVQSAALCSLSTLMTITPNDTFLEFEKHFIGLQERTLHDSFSESDIKIFYTPEGQLSTEQGVYIAEAVANKNTKLAKGRFRAYDDQMQETARSIVPAKNEKKESSGIGKRETGKSTKRTAPIDKAKTAKEEARELLLKEEASVRMKVGQVQKDLSLMLDALGKLAIANPIFTHGQLPSLVNYVEPLLSSPIVSDAAFCTMLRLARCTAPPLCNWALDIAAAIRVISVGDFEMVLDLTPVIMEDDSKKPSSGIFEQIVNGLTIACKAGPLPADSFTFVFPIMERILLSSKKTCLHDDVLHILSMHMDPILPLPRPRMLSVLYHVLSTVPAYQPSVGPMLNELCLGLRGHELAQALVGVYAKELHVRLACLTAIKCVPVHSVQRDLQVSTSLWIAAHDPEKVVAELAEELWDRFGFDAITDYSGIFNALSHKNYNVRAASAEALAAALDENQDKMQDALSTLFSLYIRDIGTSVEFGDAHWLGRQGIALALHSIADVLASKDLPVVMTFLISRALADPNVDVRGRMINAGILIIDRHGKENVPLLFPIFESYLNKRASTTFLLIIVLASDEKTYDLVREGVVIFTGALAKHLSKDDPKVHSVIEKLLDVLNTPSEAVQRAVSDCLSPLMVSKQEEGQALVSRLLDRMMKCEKYGERRGAAFGLAGVVKGFGISSLKKYGIAVTLQKNLEDRMSAKSREGALLGFECLCEKLGKLFEPYVIQMLPFLLVCFSDQVLAVREAAECAARAMMSQLTGPGVKLVLPSLLK

SEQ ID NO: 177670 - protein, 1463 aa, Zea Mays
MGAQEEAVDEMLRAAAAEVSTSSVKRRLRIFHHTLPPLIAKAIESPSDTVLLVDLIFQTLPIYDDRASRKAVDDLVIQALGEPTFMKPFAAVLVQSMEKNLKVTNPLTSLKLLRWSHYLLKWSQFATLTKGAFTRLANAQAVLCQVLMDGSFRRRRTCKQLFIHLFSEHSGIYKMYIEELRDLRISMRDSPAFLNLILDFTITSPSLSTQYQSVFLDLYVKIILSSKDRPPKAATEAFKPLFLNIGHEDFKNTIIPSCIKMLKRNPEIVLQSIGYLLKTVHLDLSKYSMEFMPVVLHQARHSDEERRINALSIIGTLSEKSSDPDALPSMVNAIKAVLGGSEGKLSLLYQRIGMINALEQLSRSPPKQIGRLAPSVSTFLLTCYKDDGIEEVKLAILSAIGSWALVSAEAVQPDVVSFIAAGLKEKDTLRKGHLKFLRVICKNSESLTKVASLLDHLIQLSKTGFSKATQRLDGIYALFAVSRLAAVDTKADGAILKEKLWTLIAQNEPSLISLQLLPKLADDDCLAVLDLVQSLFVEQFFRVREYFSIHSLLQLLIYLLCHPSWEVRKVAYDVTKKIFSSSSGLAEDILFLFTDWLSLVGERLSILKQGDMDSPSDSQLPFFPSTEVLVKCLFLIAPYAVVHSLRSYSRIILCSHHPCLTSSSSPAGVYKRLQRRLRQEQIFFVDLITPNISVICKELLSQDGLFSSNNQVQSAALCSLSTLMTITPNDTFLEFEKHFIGLQERTLHDSFSESDIKIFYTPEGQLSTEQGVYIAEAVANKNTKLAKGRFRAYDDQMQETARSIVPAKNEKKESSGIGKRETGKSTKRTAPIDKAKTAKEEARELLLKEEASVRMKVGQVQKDLSLMLDALGKLAIANPIFTHGQLPSLVNYVEPLLSSPIVSDAAFCTMLRLARCTAPPLCNWALDIAAAIRVISVGDFEMVLDLTPVIMEDDSKKPSSGIFEQIVNGLTIACKAGPLPADSFTFVFPIMERILLSSKKTCLHDDVLHILSMHMDPILPLPRPRMLSVLYHVLSTVPAYQPSVGPMLNELCLGLRGHELAQALVGVYAKELHVRLACLTAIKCVPVHSVQRDLQVSTSLWIAAHDPEKVVAELAEELWDRFGFDAITDYSGIFNALSHKNYNVRAASAEALAAALDENQDKMQDALSTLFSLYIRDIGTSVEFGDAHWLGRQGIALALHSIADVLASKDLPVVMTFLISRALADPNVDVRGRMINAGILIIDRHGKENVPLLFPIFESYLNKRASDEKTYDLVREGVVIFTGALAKHLSKDDPKVHSVIEKLLDVLNTPSEAVQRAVSDCLSPLMVSKQEEGQALVSRLLDRMMKCEKYGERRGAAFGLAGVVKGFGISSLKKYGIAVTLQKNLEDRMSAKSREGALLGFECLCEKLGKLFEPYVIQMLPFLLVCFSDQVLAVREAAECAARAMMSQLTGPGVKLVLPSLLK

SEQ ID NO: 177671 - protein, 784 aa, Zea Mays
MDSPSDSQLPFFPSTEVLVKCLFLIAPYAVVHSLRSYSRIILCSHHPCLTSSSSPAGVYKRLQRRLRQEQIFFVDLITPNISVICKHFIGLQERTLHDSFSESDIKIFYTPEGQLSTEQGVYIAEAVANKNTKLAKGRFRAYDDQMQETARSIVPAKNEKKESSGIGKRETGKSTKRTAPIDKAKTAKEEARELLLKEEASVRMKVGQVQKDLSLMLDALGKLAIANPIFTHGQLPSLVNYVEPLLSSPIVSDAAFCTMLRLARCTAPPLCNWALDIAAAIRVISVGDFEMVLDLTPVIMEDDSKKPSSGIFEQIVNGLTIACKAGPLPADSFTFVFPVLYHVLSTVPAYQPSVGPMLNELCLGLRGHELAQALVGVYAKELHVRLACLTAIKCVPVHSVQRDLQVSTSLWIAAHDPEKVVAELAEELWDRFGFDAITDYSGIFNALSHKNYNVRAASAEALAAALDENQDKMQDALSTLFSLYIRDIGTSVEFGDAHWLGRQGIALALHSIADVLASKDLPVVMTFLISRALADPNVDVRGRMINAGILIIDRHGKENVPLLFPIFESYLNKRASTTFLLIIVLASDEKTYDLVREGVVIFTGALAKHLSKDDPKVHSVIEKLLDVLNTPSEAVQRAVSDCLSPLMVSKQEEGQALVSRLLDRMMKCEKYGERRGAAFGLAGVVKGFGISSLKKYGIAVTLQKNLEDRMSAKSREGALLGFECLCEKLGKLFEPYVIQMLPFLLVCFSDQVLAVREAAECAARAMMSQLTGPGVKLVLPSLLK

SEQ ID NO: 177672 - protein, 775 aa, Zea Mays
MDSPSDSQLPFFPSTEVLVKCLFLIAPYAVVHSLRSYSRIILCSHHPCLTSSSSPAGVYKRLQRRLRQEQIFFVDLITPNISVICKELLSQDGLFSSNNQVQSAALCSLSTLMTITPNDTFLEFEKHFIGLQERTLHDSFSESDIKIFYTPEGQLSTEQGVYIAEAVANKNTKLAKGRFRAYDDQMQETARSIVPAKNEKKESSGIGKRETGKSTKRTAPIDKAKTAKEEARELLLKEEASVRMKVGQVQKDLSLMLDALGKLAIANPIFTHGQLPSLVNYVEPLLSSPIVSDAAFCTMLRLARCTAPPLCNWALDIAAAIRVISVGDFEMVLDLTPVIMEDDSKKPSSGIFEQIVNGLTIACKAGPLPADSFTFVFPVLYHVLSTVPAYQPSVGPMLNELCLGLRGHELAQALVGVYAKELHVRLACLTAIKCVPVHSVQRDLQVSTSLWIAAHDPEKVVAELAEELWDRFGFDAITDYSGIFNALSHKNYNVRAASAEALAAALDENQDKMQDALSTLFSLYIRDIGTSVEFGDAHWLGRQGIALALHSIADVLASKDLPVVMTFLISRALADPNVDVRGRMINAGILIIDRHGKENVPLLFPIFESYLNKRASTTFLLIIVLASDEKTYDLVREGVVIFTGALAKHLSKDDPKVHSVIEKLLDVLNTPSEAVQRAVSDCLSPLMVSKQEEGQALVSRLLDRMMKCEKYGERRGAAFGLAGVVKGFGISSLKKYGIAVTLQKNLEDRMSAKSREGALLGFECLCEKLGKLFEP

SEQ ID NO: 177673 - protein, 330 aa, Zea Mays
MGSAGKHQLLSFMDELIPTIRTALCDSTQEVRESAGLAFSTLYKSAGLQAIDEIVPTLLRALEDDDTSATALDGLKQILSVRTAAVLPHILPKLVQPPLSSFNAHALGALAEVAGPGLNSHIGTVLPALILAMDDEDADVQNSARKAAETVLLVIDEEGVETLIPELLRGINDSQASMRRGSAYLIGFLFKNTKLYLADEASDMMSTLIILLSDTDKATVSAALEAFSRVVASVPKEQLPTHIKLVRDAVSTARDKERRRRKGVPILVPGLCLPKALQPFLPIYQQGLISGSAETKEQAAEGLGELIDVTSEKTLKEVVVPITGFFCVYS

SEQ ID NO: 177674 - protein, 674 aa, Zea Mays
MGSAGKHQLLSFMDELIPTIRTALCDSTQEVRESAGLAFSTLYKSAGLQAIDEIVPTLLRALEDDDTSATALDGLKQILSVRTAAVLPHILPKLVQPPLSSFNAHALGALAEVAGPGLNSHIGTVLPALILAMDDEDADVQNSARKAAETVLLVIDEEGVETLIPELLRGINDSQASMRRGSAYLIGFLFKNTKLYLADEASDMMSTLIILLSDTDKATVSAALEAFSRVVASVPKEQLPTHIKLVRDAVSTARDKERRRRKGVPILVPGLCLPKALQPFLPIYQQGLISGSAETKEQAAEGLGELIDVTSEKTLKEVVVPITGPLIRILGDRFPWQVKSAILSTLTIIIMKGGIALKPFLPQLQTTFVKCLQDNNRSVRARAAAALGKLSALSTRVDPLVSDLLSMLQSGDESVKESVLSALKGVIKHAGKSVSSAIRSRGCALLEDLLQAEADDVRSCAAKVIGTLSQYMEETEISDLVQILLNMSTSSDWCTRHGALLSFSYISMHSPSKLCHLASFPSLVDLLKGSLKDDKFPVREVATRTLGKILCFELQPEAGTLQLVQLLILALRDDSSEVRRRSLSCIKAAAKTNHSALATHHSILGPAIAEALKDSSMPVRLAAERCALHVFQLTKDNVTAAQKYLGMTGLEVKKIAKLDVDSDGSESSDDDKRT

SEQ ID NO: 177675 - protein, 91 aa, Zea Mays
MIPARRASGDPSDAGRELPTQRAMTGSERERRRQGRREHGLRTRGGAVKEDRSAAAKDDGNASGKEDGTAAGWSLGSDGSVLRNGNRDKQP

SEQ ID NO: 177676 - protein, 539 aa, Zea Mays
MINNISISNMEAKAKEFNEVIQEQYYPWFAQYMVMKRASIEPNFHDLYLKFFDKVNSKSLNKEILKATYENCKVLLRSNLIKSSSEERSLLKNLGSWLGKFTIGRNQALRAKEIDPKSLIVEVLLRSDLIKSSSEERSLLKNLGSWLGKFTIGRNQALRAKEIDPKSLIVEAYEKGLMIAVIPFTSKILEPCQSSIAYRPPNPWTMGILSLLAEIYNLPNLKMNLKFDIEVLNIPFFDSFFIDFVSALATHGHAKCSFGISGAIKNLTVDIKDVKPTSLLKDRLREVEGNPDFSNKDVTASQTPVVAEVPSGTIPSLTHMEQQPEVNITSRAMSLPNILNQYAAPVRLPTNSTVEDDKVALMMPEQVPSLTQVSPAQTQSTSPSPFSVNQLMAAIPREEIRFKINPKDYALESDNNTITRSAHLMVGTLAGSLAHVTCKEPLRVALYSNLRNLIQNLMSGSETIEQLIHTLINDNLDLGCAIIEAVATCQARIIKFDVGYVVMVTGGRNTGRVGVIKNREKHKGSFETIHVLLGAFCYV

SEQ ID NO: 177677 - protein, 115 aa, Zea Mays
MVGTLAGSLAHVTCKEPLRVALYSNLRNLIQNLMSGSETIEQLIHTLINDNLDLGCAIIEAVATCQARIIKFDVGYVVMVTGGRNTGRVGVIKNREKHKGSFETIHVLLGAFCYV

SEQ ID NO: 177678 - protein, 79 aa, Zea Mays
MMAGERGETAASLVDKLVLVWCACRRCTSWSFFLSDEDLGWTPSEFVLMHGLLAMQAEAAAAEILDAWFYCRIFYYLVF

SEQ ID NO: 177679 - protein, 334 aa, Zea Mays
MEAYKLWVRRNRDLVRSLESLANGLTWILPERFANSEIAPEAVYALLGIVSSVNQHIIDAPTENHSFASKEQSIPWGLVVSVLKDVEAVVEVAAQHFVGDDRKWSFLAVTEAVKAGVRLAAFRESGYKMLLQGGEVVNEEEVTVLENSYGVNGNGVPAIYPMDGHAENGHKTMAKGLDGKNGFVSKSLEKRAVAALNKFGENAKMMSDPMWIRRLQPTPEPTVMVAEKPTLASIWSAKGGTGRLFVLGEVVHIFRPLVYVLLIRKFGIKSWTPWLVSLAVELTSLGVHSHATDMNHRLGKVHQLSSAERDELKRRKMMWALYVMRDPFFASVTS

SEQ ID NO: 177680 - protein, 956 aa, Zea Mays
MLKPVPSIIPMADGGSSLLSFKRKDLIWVCQQGADYVELFIYLGEPCHVCQLLLTVSHGAEDSSYPATVDVRVGSSIDSLKLVVEGACIPQCSNGTNLLIPVTGRTDPEDLAVTGKSARPNVQESSYLPLLYDFEELEGELNFLNRVVALSFHPSAVSRTPITLGEIEVLGVSLPWADMLTNSERAPEFMEFINKKSSSAHCNLGSKSFGNSSMPGNDSHGIDESYTKSSSLVQPCGSENLLDFLTGDFDMSESHITQNTFGAGEQTNFLDDGFDVNPFAPALEVPVPVAKVNKEVEECGSTQLYIKFFESLSGYNKGKGLDFEQTMKLEIKRLRLGLSAAERDQALLSIGVIPATLDPNRLIDYSYLLKLSSLADNLALLGHTVLEDRANASIGLEKGSEHAIDFWNISENDEFCYGGACEVRALSSLQALASRENQSVFMECFQCEKTVCKACCAGKGAFLLLNTYRELKIYGGSQSGGYSALTDSFVCKSCCSEIIKRALYVDYVRVLHSLRRKDRSEKAALSAVNQVCQLEYKKASDLSQSIQFGQRQLKQILDGEESLAEFPYANFLQMVETANDSEPLLSLLAPFGTGEYTSYWKAPQGITSVEFSIVLGGLSDIAGVSIIVSSCGYSASDCPIVEIWASNKIHREDRTFIGKWDVQDIISSSPQLRGPEKSSRLSEEPRHIKFHFPNPIRCRIISIKMTLSHRGSHSTKFSEEFDLLSLNDSSSYESKPTNLHNSFIHAKRIVVFGSLLRKEMEPDTSGGIMRMKSYLDRSPALGRFRIPVEAERLRDNDLVLEQYLLANSPGIAGFRLDSFSVIRPRVTHSPSSSELDMREFSLTRMEDRFINPAILYIQVTVVKESGKLVVEEYRLPEVKANTPLYFDFPDLQQDARCVIFRLLGDVTAFVDDISELENLNLRNLPLASGLSLSNKIKLYYYADTYEMGKIGSLSAV

SEQ ID NO: 177681 - protein, 788 aa, Zea Mays
MFHSKSLPRPKDTSVVVVVLETTEVYIVISLSTRRDTQVVYVDPTTGALRYLGKHGEDVFDSEAAALNHITNGSRVLSKSTTYAKAVLGYAVLGSHALLLVATQLSASVPNLPGGGCIYTLAESQWIKIQLQNPQPQGTGEQKNIRELANLDIDGKFFFCETRDVTRPFPSPITLREPDEEFVWNEWLSKPFKDIGLPGHCVILLQGFAECRNFGGAGQQGGLVALIARRSRLHPGTRYLARGLNACSGTGNEVECEQLVWVPRKGGQRIPFSSYIWRRGTIPIWWGAEIKNAVSVEAEIYVANDPYNGSLQYYQRLGKRYGNKSSEANVSRQKSSGRVPIICVNLLRYGEGKTESVLVDHFKESIRYMNSTGKLGSTWIQLINYDWHATVKLKGQQQTVEGLWRHLKPPTMVIGFSEGNYYDARQQLNECKGSVICNDDVNGGFCMESIQNGVIRFNCADSLDRTNAASYFGALQVFVEQCSRLSISLDIDAMFGLSSRYSEYDGRNTRSLPPGWEERFDSVTGKSFYIDHNTRTTTWEHPCQEAPQKPWKRFDMTFDQFKGSTMLAPVNQLAELFLLAGDIHATLYTGSKAMHSDILNIFKEETGKFSKFSAVENVKITVLRRYQNFMNDSSRQKQLEMFLGLRLYRHLPSIPMFPLKVLSRPSGCMLKPVPSIIPMADGGSSLLSFKRKDLIWVCQQGADYVELFIYLGEPCHVCQLLLTVSHGAEDSSYPATVDVRVGSSIDSLKLVVESLGELIQRTWLLQGKVRGPMFKRAPIFLCYMTLKS

SEQ ID NO: 177682 - protein, 1479 aa, Zea Mays
MFHSKSLPRPKDTSVVVVVLETTEVYIVISLSTRRDTQVVYVDPTTGALRYLGKHGEDVFDSEAAALNHITNGSRVLSKSTTYAKAVLGYAVLGSHALLLVATQLSASVPNLPGGGCIYTLAESQWIKIQLQNPQPQGTGEQKNIRELANLDIDGKFFFCETRDVTRPFPSPITLREPDEEFVWNEWLSKPFKDIGLPGHCVILLQGFAECRNFGGAGQQGGLVALIARRSRLHPGTRYLARGLNACSGTGNEVECEQLVWVPRKGGQRIPFSSYIWRRGTIPIWWGAEIKNAVSVEAEIYVANDPYNGSLQYYQRLGKRYGNKSSEANVSRQKSSGRVPIICVNLLRYGEGKTESVLVDHFKESIRYMNSTGKLGSTWIQLINYDWHATVKLKGQQQTVEGLWRHLKPPTMVIGFSEGNYYDARQQLNECKGSVICNDDVNGGFCMESIQNGVIRFNCADSLDRTNAASYFGALQVFVEQCSRLSISLDIDAMFGLSSRYSEYDGRNTRSLPPGWEERFDSVTGKSFYIDHNTRTTTWEHPCQEAPQKPWKRFDMTFDQFKGSTMLAPVNQLAELFLLAGDIHATLYTGSKAMHSDILNIFKEETGKFSKFSAVENVKITVLRRYQNFMNDSSRQKQLEMFLGLRLYRHLPSIPMFPLKVLSRPSGCMLKPVPSIIPMADGGSSLLSFKRKDLIWVCQQGADYVELFIYLGEPCHVCQLLLTVSHGAEDSSYPATVDVRVGSSIDSLKLVVEGACIPQCSNGTNLLIPVTGRTDPEDLAVTGKSARPNVQESSYLPLLYDFEELEGELNFLNRVVALSFHPSAVSRTPITLGEIEVLGVSLPWADMLTNSERAPEFMEFINKKSSSAHCNLGSKSFGNSSMPGNDSHGIDESYTKSSSLVQPCGSENLLDFLTGDFDMSESHITQNTFGAGEQTNFLDDGFDVNPFAPALEVPVPVAKVNKEVEECGSTQLYIKFFESLSGYNKGKGLDFEQTMKLEIKRLRLGLSAAERDQALLSIGVIPATLDPNRLIDYSYLLKLSSLADNLALLGHTVLEDRANASIGLEKGSEHAIDFWNISENDEFCYGGACEVRALSSLQALASRENQSVFMECFQCEKTVCKACCAGKGAFLLLNTYRELKIYGGSQSGGYSALTDSFVCKSCCSEIIKRALYVDYVRVLHSLRRKDRSEKAALSAVNQVCQLEYKKASDLSQSIQFGQRQLKQILDGEESLAEFPYANFLQMVETANDSEPLLSLLAPFGTGEYTSYWKAPQGITSVEFSIVLGGLSDIAGVSIIVSSCGYSASDCPIIPVEAERLRDNDLVLEQYLLANSPGIAGFRLDSFSVIRPRVTHSPSSSELDMREFSLTRMEDRFINPAILYIQVTVVKESGKLVVEEYRLPEVKANTPLYFDFPDLQQDARCVIFRLLGDVTAFVDDISELENLNLRNLPLASGLSLSNKIKLYYYADTYEMGKIGSLSAV

SEQ ID NO: 177683 - protein, 1278 aa, Zea Mays
MFHSKSLPRPKDTSVVVVVLETTEVYIVISLSTRRDTQVVYVDPTTGALRYLGKHGEDVFDSEAAALNHITNGSRVLSKSTTYAKAVLGYAVLGSHALLLVATQLSASVPNLPGGGCIYTLAESQWIKIQLQNPQPQGTGEQKNIRELANLDIDGKFFFCETRDVTRPFPSPITLREPDEEFVWNEWLSKPFKDIGLPGHCVILLQGFAECRNFGGAGQQGGLVALIARRSRLHPGTRYLARGLNACSGTGNEVECEQLVWVPRKGGQRIPFSSYIWRRGTIPIWWGAEIKNAVSVEAEIYVANDPYNGSLQYYQRLGKRYGNKSSEANVSRQKSSGRVPIICVNLLRYGEGKTESVLVDHFKESIRYMNSTGKLGSTWIQLINYDWHATVKLKGQQQTVEGLWRHLKPPTMVIGFSEGNYYDARQQLNECKGSVICNDDVNGGFCMESIQNGVIRFNCADSLDRTNAASYFGALQVFVEQCSRLSISLDIDAMFGLSSRYSEYDGRNTRSLPPGWEERFDSVTGKSFYIDHNTRTTTWEHPCQEAPQKPWKRFDMTFDQFKGSTMLAPVNQLAELFLLAGDIHATLYTGSKAMHSDILNIFKEETGKFSKFSAVENVKITVLRRYQNFMNDSSRQKQLEMFLGLRLYRHLPSIPMFPLKVLSRPSGCMLKPVPSIIPMADGGSSLLSFKRKDLIWVCQQGADYVELFIYLGEPCHVCQLLLTVSHGAEDSSYPATVDVRVGSSIDSLKLVVEGACIPQCSNGTNLLIPVTGRTDPEDLAVTGKSARPNVQESSYLPLLYDFEELEGELNFLNRVVALSFHPSAVSRTPITLGEIEVLGVSLPWADMLTNSERAPEFMEFINKKSSSAHCNLGSKSFGNSSMPGNDSHGIDESYTKSSSLVQPCGSENLLDFLTGDFDMSESHITQNTFGAGEQTNFLDDGFDVNPFAPALEVPVPVAKVNKEVEECGSTQLYIKFFESLSGYNKGKGLDFEQTMKLEIKRLRLGLSAAERDQALLSIGVIPATLDPNRLIDYSYLLKLSSLADNLALLGHTVLEDRANASIGLEKGSEHAIDFWNISENDEFCYGGACEVRALSSLQALASRENQSVFMECFQCEKTVCKACCAGKGAFLLLNTYRELKIYGGSQSGGYSALTDSFVCKSCCSEIIKRALYVDYVRVLHSLRRKDRSEKAALSAVNQVCQLEYKKASDLSQSIQFGQRQLKQILDGEESLAEFPYANFLQMVETANDSEPLLSLLAPFGTGEYTSYWKAPQGRDMGE

SEQ ID NO: 177684 - protein, 91 aa, Zea Mays
MLLLPLIINDQLPSPVSTAKQFDYLLARPNSRAGFRISRLLNPTEQNVKDTEKRGGGGGSDLAFERGLCRSEERPSQRRAEVVATVRLVRP

SEQ ID NO: 177685 - protein, 150 aa, Zea Mays
MNQEKTVKLMIWFQDLRSVHISIQEMNVQVTTYLKKSTSARTFSTDTHQSLVLVSQLNSLRVLHSSYHYQEKAIKIFINKSMLLLPLIINDQLPSPVSTAKQFDYLLARPNSRAGFRISRLAFERGLCRSEERPSQRRAEVVATVRLVRP

SEQ ID NO: 177686 - protein, 158 aa, Zea Mays
MAMATSTFSPRPASLRPLRAGGKPVGLLPFPRRLACATASGEAPPVEQRDEAEPALAAASNGAAVKSEAPPPPPAPAPVPAFRDARWVNGTWDLAKFDKGSGVDWDAVIDAEARRRRWLEDYPEATNTDEAVVFATSIIPWWAWMKRFHLPEAEKLNA

SEQ ID NO: 177687 - protein, 267 aa, Zea Mays
MLLVSGLTTILHTFLGSRLPLIQGSSFVYLAPALVIANSEEFRNLSDNKFKHIMRELQGAILVGSVFQIILGYTGLMSLFLRLINPVVVAPTIAAVGLAFFSYGFPQAGSCVEISMPLILLVLLCTLYMRKISLFGNHIFLVYAVPLSVAIVWAYAFFLTAGGAYNFKGCRSNIPSSNILLDSCRRHLETMRRCRTDVSTAWKTAAWVRVPYPFQWGPPTFHFKTGIIMIIVSLVAPVDSVCSFSQQNRHSSASVKKCFGCLMASVP

SEQ ID NO: 177688 - protein, 465 aa, Zea Mays
MASSVSAAAKAAAAFAHKVKSAMTMTEKILARASERAALEPGENVWVDVDVLMTHDVCGPGAFDIFKKEFGEDARVWDREKLVVIPDHYIFTSDGRAKRNVDILRDFCAEQNIKYFYDIKDLSDFRANPDYKGVCHIALAQEGHCRPGEVLLGTDSHTCNAGAFGQFATGIGNTDAGFVLGTGKALLKVPPTIRFILDGEMPPYLLAKDLILQIIGEISVSGATYKSMEFVGSTVESLTMEERMTLCNMVIEAGGKNGVVPADETTFKYLEGKTSVDYEPVYSDAQARFFSDYRFDVSKLEPVVAKPHSPDNRAPARECKDVKIDRVYIGSCTGGKTEDFLAAAKVFLASGKKVKVPTFLVPATQKVWLDIYSLPVPGSGGKTCSQIFEEAGCDTPASPNCGACLGGPRDTYARMNEPTVCVSTTNRNFPGRMGHKEGQIYLASPYTAAASALTGYVTDPRDFLM

SEQ ID NO: 177689 - protein, 304 aa, Zea Mays
MLVWAATASPPSTPSAVPFAPPHRAAAPRPPPPLCRSLPGLLCAGLIPPPRAAASDGDVFWEEPDDGSGSDYEDDGPEQRRALRFPSSSPSYRLEASAQQEQDLRREIELLLTPEEKATLDQHETPDVTRISSPKWHPLHSYALALQIPLMDKLLNSGVDINLVDRDGFTSLHKAVIGKKEAVISHLLRKGANPHVRDRDGATPLHYAVQAGALQTVKLLIKYKVDVNVADNDGWTPLHLAIQSRNRDIAKVLLVNGADKTRRTKDGRTALDLSLCFGRDFKSYDLAKLVKLIPANRDFSVHGL

SEQ ID NO: 177690 - protein, 197 aa, Zea Mays
MVLWELTAITAYFLGLRRTYRLALRIQRRLIPPNHPRIRDFVYRRTRDVFNVAVSVHKNIQQRDIEVGRNLGNAILRWLDRMKPSAEIRPRLPGPPNGSTAEQFRHVSSASRGAGAQKTSSSSKASPHDSSGKMLFSRLNIGPKHFPVLPTLAQPNRISASSQCRRFSYSYAPFPSVTARRKGVFREDIAQLMVSDV

SEQ ID NO: 177691 - protein, 260 aa, Zea Mays
MHPFGHYPMPTNGHAETHGAAPSAPEMNGKSEPGRTSAPSANGITSHSESGSESESEGSDDNSQNDSHSKDNDGKEDGNSQNGMSYSGSQGVVNQTMAMLPMQPGAMVGGVPSSTAANLNIGVDYWAAPGSAAVPAAHGKAPAGSARGDQWDERELKKQKRKQSNRESARRSRLRKQAECEELGQRAEALRSENSSLRAELERIRKEYEQLLSQNASLKEKLGAASSDSLPDMNEQNDGDGDGGYRKQPDSDGHQPGSES

SEQ ID NO: 177692 - protein, 328 aa, Zea Mays
MGSNDPNTPSKASKASEQDQPPATTTSSGTASVYPEWPSFQAYSAIPPHAFFPPTVAANPQAHPYMWGAQPIVPPYGTPPPPPYVMYPPGTVYAHPSTPPAMHPFGHYPMPTNGHAETHGAAPSAPEMNGKSEPGRTSAPSANGITSHSESGSESESEGSDDNSQNDSHSKDNDGKEDGNSQNGMSYSGSQGVVNQTMAMLPMQPGAMVGGVPSSTAANLNIGVDYWAAPGSAAVPAAHGKAPAGSARGDQWDERELKKQKRKQSNRESARRSRLRKQAECEELGQRAEALRSENSSLRAELERIRKEYEQLLSQNASLKMFIFFPLQ

SEQ ID NO: 177693 - protein, 302 aa, Zea Mays
MGSNDPNTPSKASKASEQDQPPATTTSSGTASVYPEWPSFQAMHPFGHYPMPTNGHAETHGAAPSAPEMNGKSEPGRTSAPSANGITSHSESGSESESEGSDDNSQNDSHSKDNDGKEDGNSQNGMSYSGSQGVVNQTMAMLPMQPGAMVGGVPSSTAANLNIGVDYWAAPGSAAVPAAHGKAPAGSARGDQWDERELKKQKRKQSNRESARRSRLRKQAECEELGQRAEALRSENSSLRAELERIRKEYEQLLSQNASLKEKLGAASSDSLPDMNEQNDGDGDGGYRKQPDSDGHQPGSES

SEQ ID NO: 177694 - protein, 652 aa, Zea Mays
MKHPLHRDGESYPSPPPQRRPRGFASAPAPAAGASPRRRGVQEREREREKERTKLRERHRRAITGRMLAGLRQHGNFPLPARADMNDVLAALARAAGWTVQPDGTTFRSSNQPLLPPPPQLHGAFQVASVETPALINTLSSYAIGTPLDSQASALQTDDSLSPSSLDSVVADRRIKTENHGNSSSVSSLNCMDNDQQLTRSVLFPDDYTKTPYIPVYASLPMGIINSHCQLVDPESVRAELRQLKSLNVDGVVVDCWWGIVEAWTPRKYEWSGYRDLFGIIKEFKLKVQVVLSFHGSGETGSGDVLISLPKWIMEIAKENQDIFFTDREGRRNTECLSWGIDKERVLRGRTGIEVCFDFMRSFHMEFRNLSEEGLVSSIEIGLGASGELRYPSCPETMGWKYPGIGEFQCYDRYMQKNLRQSALSRGHLFWARGPDNAGYYNSRPHETGFFCDGGDYDSYYGRFFLNWYSGVLMDHVDQVLSLATLAFDGAEIVVKVPSIYWWYRTASHAAELTAGFYNTTNRDGYSPVFRMLKKHSVILKLVCYGPEYTVHEKDDDEAFADPEGLTWQVINAAWDQGLPLCIESALPCRNGEAYSRILDTAKPRDDPDRHHAASFAYRQQQQPPLREACLSELCTFVKCMHEWGRLNLVSN

SEQ ID NO: 177695 - protein, 364 aa, Zea Mays
MKHPLHRDGESYPSPPPQRRPRGFASAPAPAAGASPRRRGVQEREREREKERTKLRERHRRAITGRMLAGLRQHGNFPLPARADMNDVLAALARAAGWTVQPDGTTFRSSNQPLLPPPPQLHGAFQVASVETPALINTLSSYAIGTPLDSQASALQTDDSLSPSSLDSVVADRRIKTENHGNSSSVSSLNCMDNDQLTRSVLFPDDYTKTPYIPVYASLPMGIINSHCQLVDPESVRAELRQLKSLNVDGVVVDCWWGIVEAWTPRKYEWSGYRDLFGIIKEFKLKVQVVLSFHGSGETGSGDVLISLPKWIMEIAKENQDIFFTDREGRRNTECLSWGIDKERVLRGRTGIEVLGHTWSVLIS

SEQ ID NO: 177696 - protein, 407 aa, Zea Mays
MKHPLHRDGESYPSPPPQRRPRGFASAPAPAAGASPRRRGVQEREREREKERTKLRERHRRAITGRMLAGLRQHGNFPLPARADMNDVLAALARAAGWTVQPDGTTFRSSNQPLLPPPPQLHGAFQVASVETPALINTLSSYAIGTPLDSQASALQTDDSLSPSSLDSVVADRRIKTENHGNSSSVSSLNCMDNDQQLTRSVLFPDDYTKTPYIPVYASLPMGIINSHCQLVDPESVRAELRQLKSLNVDGVVVDCWWGIVEAWTPRKYEWSGYRDLFGIIKEFKLKVQVVLSFHGSGETGSGDVLISLPKWIMEIAKENQDIFFTDREGRRNTECLSWGIDKERVLRGRTGIEVCFDFMRSFHMEFRNLSEEGLVSSIEIGLGASGELRYPSCPETMGWKYPGIVL

SEQ ID NO: 177697 - protein, 634 aa, Zea Mays
MKHPLHRDGESYPSPPPQRRPRGFASAPAPAAGASPRRRGVQEREREREKERTKLRERHRRAITGRMLAGLRQHGNFPLPARADMNDVLAALARAAGWTVQPDGTTFRSSNQPLLPPPPQLHGAFQVASVETPALINTLSSYAIGTPLDSQASALQTDDSLSPSSLDSVVADRRIKTENHGNSSSVSSLNCMDNDQQLTRSVLFPDDYTKTPYIPVYASLPMGIINSHCQLVDPESVRAELRQLKSLNVDGVVVDCWWGIVEAWTPRKYEWSGYRDLFGIIKEFKLKVQVVLSFHGSGETGSGDVLISLPKWIMEIAKENQDIFFTDREGRRNTECLSWGIDKERVLRGRTGIEVCFDFMRSFHMEFRNLSEEGLVSSIEIGLGASGELRYPSCPETMGWKYPGIGEFQCYDRYMQKNLRQSALSRGHLFWARGPDNAGYYNSRPHETGFFCDGGDYDSYYGRFFLNWYSGVLMDHVDQVPSIYWWYRTASHAAELTAGFYNTTNRDGYSPVFRMLKKHSVILKLVCYGPEYTVHEKDDDEAFADPEGLTWQVINAAWDQGLPLCIESALPCRNGEAYSRILDTAKPRDDPDRHHAASFAYRQQQQPPLREACLSELCTFVKCMHGEAPQNGEG

SEQ ID NO: 177698 - protein, 579 aa, Zea Mays
MKHPLHRDGESYPSPPPQRRPRGFASAPAPAAGASPRRRGVQEREREREKERTKLRERHRRAITGRMLAGLRQHGNFPLPARADMNDVLAALARAAGWTVQPDGTTFRSSNQPLLPPPPQLHGAFQVASVETPALINTLSSYAIGTPLDSQASALQTDDSLSPSSLDSVVADRRIKTENHGNSSSVSSLNCMDNDQQLTRSVLFPDDYTKTPYIPVYASLPMGIINSHCQLVDPESVRAELRQLKSLNVDGVVVDCWWGIVEAWTPRKYEWSGYRDLFGIIKEFKLKVQVVLSFHGSGETGSGDVLISLPKWIMEIAKENQDIFFTDREGRRNTECLSWGIDKERVLRGRTGIECYDRYMQKNLRQSALSRGHLFWARGPDNAGYYNSRPHETGFFCDGGDYDSYYGRFFLNWYSGVLMDHVDQVPSIYWWYRTASHAAELTAGFYNTTNRDGYSPVFRMLKKHSVILKLVCYGPEYTVHEKDDDEAFADPEGLTWQVINAAWDQGLPLCIESALPCRNGEAYSRILDTAKPRDDPDRHHAASFAYRQQQQPPLREACLSELCTFVKCMHGEAPQNGEG

SEQ ID NO: 177699 - protein, 127 aa, Zea Mays
MRAASGLAGSWLAQEARDREEYVGMLGWAVSSHWTRLKGSGTGSPGLGNNTGDYARLAAALRDDHGLPAAVVARVTRPDWLRNAAGLADASYWRGTLRPRPVLDWREDITDRAFSWGLARARVHGRV

SEQ ID NO: 177700 - protein, 133 aa, Zea Mays
MPQGLGNNTGDYARLAAALRDDHGLPAAVVARVTRPDWLRNAAGLADASYWRGTLRPRPVLDWYLKRVDDAVSEARELCAPGGKISLIGHSAGGWLARVYMAEFDASDISLLLTLGTPHLYGSSIMTQKWTNV

SEQ ID NO: 177701 - protein, 587 aa, Zea Mays
MNSLLRPPLPGPTPRLSARRRVSSPAPVRVGSAVLAGGERRCQRGLAVATSVAPSWMEEAGVAVLEEGGRRNPSVSDSYRAAGLPQPNATVLDAQARVCTGPAQTRPLGEEQAMRVLDTILRSAIGELKEEPVSSAQLGAFFAGMTIRANSFPEATQWSEGERRAMSIFWPRLVQVLPPEVKFIADPEGTILGANGLAEPRYVGQGTGEMRLVGALREVLAGGHLGYEEVQCVLKDILPIGSSSDSTVVSQALLAAFLIGQRMNRETDRELKAYCLAFDDELGPPPVADVKSLTHYGEPYDGNTRFFKSTLFVAAVRACYGESCLLHGVEWMPPKGGITEGQMLKFMGANIHLSPTQAKILLEDETAGFAYLNLQEACPPLYSIIGLREHIKKRPPLATSEKVQQFVRARGRESMVAGFYHEGYEDPLLMLMRRRTVHAGLVVKGEEGALSMTTKERSAHASKGLPVNHCSGFRTPNSINSSKTDGIPRESFRVIVNAQELGFESTETPRTDRSILKNLEFGLAALGGEKGAAYDRIVLNAAMADHLLGCSGAEDIDAALDRAREAIDSGEALRRLMSYIKISHRVS

SEQ ID NO: 177702 - protein, 357 aa, Zea Mays
MNSLLRPPLPGPTPRLSARRRVSSPAPVRVGSAVLAGGERRCQRGLAVATSVAPSWMEEAGVAVLEEGGRRNPSVSDSYRAAGLPQPNATVLDAQARVCTGPAQTRPLGEEQAMRVLDTILRSAIGELKEEPVSSAQLGAFFAGMTIRANSFPEATQWSEGERRAMSIFWPRLVQVLPPEVKFIADPEGTILGANGLAEPRYVGQGTGEMRLVGALREVLAGGHLGYEEVQCVLKDILPIGSSSDSTVVSQALLAAFLIGQRMNRETDRELKAYCLAFDDELAVRACYGESCLLHGVEWMPPKGGITEGQMLKFMGANIHLSPTQAKILLEDETAGFAYLNLQEACPPLDGVMNFSY

SEQ ID NO: 177703 - protein, 295 aa, Zea Mays
MNSLLRPPLPGPTPRLSARRRVSSPAPVRVGSAVLAGGERRCQRGLAVATSVAPSWMEEAGVAVLEEGGRRNPSVSDSYRAAGLPQPNATVLDAQARVCTGPAQTRPLGEEQAMRVLDTILRSAIGELKEEPVSSAQLGAFFAGMTIRANSFPEATQWSEGERRAMSIFWPRLVQVLPPEVKFIADPEGTILGANGLAEPRYVGQGTGEMRLVGALREVLAGGHLGYEEVQCVLKDILPIGSSSDSTVVSQALLAAFLIGQRMNRETDRELKAYCLAFDDELGNSRKASGSSLLW

SEQ ID NO: 177704 - protein, 555 aa, Zea Mays
MNSLLRPPLPGPTPRLSARRRVSSPAPVRVGSAVLAGGERRCQRGLAVATSVAPSWMEEAGVAVLEEGGRRNPSVSDSYRAAGLPQPNATVLDAQARVCTGPAQTRPLGEEQAMRVLDTILRSAIGELKEEPVSSAQLGAFFAGMTIRANSFPEATQWSEGERRAMSIFWPRLVQVLPPEVKFIADPEGTILGANGLAEPRYVGQGTGEMRLVGALREVLAGGHLGYEEVQCVLKDILPIGSSSDSTVVSQALLAAFLIGQRMNRETDRELKAYCLAFDDELAVRACYGESCLLHGVEWMPPKGGITEGQMLKFMGANIHLSPTQAKILLEDETAGFAYLNLQEACPPLYSIIGLREHIKKRPPLATSEKVQQFVRARGRESMVAGFYHEGYEDPLLMLMRRRTVHAGLVVKGEEGALSMTTKERSAHASKGLPVNHCSGFRTPNSINSSKTDGIPRESFRVIVNAQELGFESTETPRTDRSILKNLEFGLAALGGEKGAAYDRIVLNAAMADHLLGCSGAEDIDAALDRAREAIDSGEALRRLMSYIKISHRVS

SEQ ID NO: 177705 - protein, 335 aa, Zea Mays
MNSLLRPPLPGPTPRLSARRRVSSPAPVRVGSAVLAGGERRCQRGLAVATSVAPSWMEEAGVAVLEEGGRRNPSVSDSYRAAGLPQPNATVLDAQARVCTGPAQTRPLGEEQAMRVLDTILRSAIGELKEEPVSSAQLGAFFAGMTIRANSFPEATQWSEGERRAMSIFWPRLVQVLPPEVKFIADPEGTILGANGLAEPRYVGQGTGEMRLVGALREVLAGGHLGYEEVQCVLKDILPIGSSSDSTVVSQALLAAFLIGQRMNRETDRELKAYCLAFDDELAVRACYGESCLLHGVEWMPPKKDKCLNSWVQTYTYPQHKPRYCWRMKLLVLHT

SEQ ID NO: 177706 - protein, 196 aa, Zea Mays
MTIRANSFPEATQWSEGERRAMSIFWPRLVQVLPPEVKFIADPEGTILGANGLAEPRYVGQGTGEMRLVGALREVLAGGHLGYEEVQCVLKDILPIGSSSDSTVVSQALLAAFLIGQRMNRETDRELKAYCLAFDDELGPPPVADVKSLTHYGEPYDGNTRFFKSTLFVAAVRACYGESCLLHGVEWMPPKVFRVE

SEQ ID NO: 177707 - protein, 56 aa, Zea Mays
MMIQFGVIEVEDLYFFFLESAGELRDIILKKKDNYRRKQKRRLWRPVTGIQKPIHV

SEQ ID NO: 177708 - protein, 83 aa, Zea Mays
MPAKRSGALAVTVRVASTTTTRPSRKKVVDPRTRINKAGRPCTHIKFLCRRRRRRWLPGTWNPVQGKQIDKCNRILPIVYTVS

SEQ ID NO: 177709 - protein, 530 aa, Zea Mays
MIHPAKKAKLEVQEDINVIGNFDFSSIHSHTTSPAKAITDDIMSESVAQQKSIPDIMSIVDGEVYRRDPGRELAKPVGRRAGDKPGPRVKKIFRKEEGKESSALVQKLQKEIKEVVRDTGTNILEKDESFDEKLLTAFRAAIGKSVDGPAKSTNTNQLIRTRRSLLQKGKKRENLTKKLYGTSTGRRRSDWHRDWEVEFWKYRCSPGINPEKIETLQSVLQLLKKSSEMDKESAKGKREENNNSSILSRLYLADASVVPRKDDIRPLSALAGCAPLEKSSQIKASCNKSSSIPAGGNETMKISSPSSTGKASSYSILNKEAPSRRENRNSQPSQDKRNQSSGDIKQDKRKWALEILARKNASSITNKDQTGGNDALKGNFPLLAQLPVDMRPQLAAGSNKKVPVSVRQATRQHAKAKSDNDTSTLTKRTESGSDQISQEATSEGTNVSGSDMEEDLNRAAISNQKNELEDDTAPEHIVHKDTVSFNSAEDALRKAGLFDSPPNSPERGNTAVEGNSESTAVSNCPKFSQK

SEQ ID NO: 177710 - protein, 573 aa, Zea Mays
MIHPAKKAKLEVQEDINVIGNFDFSSIHSHTTSPAKAITDDIMSESVAQQKSIPDIMSIVDGEVYRRDPGRELAKPVGRRAGDKPGPRVKKIFRKEEGKESSALVQKLQKEIKEVVRDTGTNILEKDESFDEKLLTAFRAAIGKSVDGPAKSTNTNQLIRTRRSLLQKGKKRENLTKKLYGTSTGRRRSDWHRDWEVEFWKYRCSPGINPEKIETLQSVLQLLKKSSEMDKESAKGKREENNNSSILSRLYLADASVVPRKDDIRPLSALAGCAPLEKSSQIKASCNKSSSIPAGGNETMKISSPSSTGKASSYSILNKEAPSRRENRNSQPSQDKRNQSSGDIKQDKRKWALEILARKNASSITNKDQTGGNDALKGNFPLLAQLPVDMRPQLAAGSNKKVPVSVRQKANLDVIRRCADTELAIADAVNVEKGIYERSNSKSIYVNLCSQATRQHAKAKSDNDTSTLTKRTESGSDQISQEATSEGTNVSGSDMEEDLNRAAISNQKNELEDDTAPEHIVHKDTVSFNSAEDALRKAGLFDSPPNSPERGNTAVEGNSESTAVSNCPKFSQK

SEQ ID NO: 177711 - protein, 313 aa, Zea Mays
MFIVNAGPGFRLLWNTVKSFLDPKTTAKIHIVQSGGVHCARQIVTISNGEEKFITYAKPKRHAMRGSDTSTAESGSEADDAVSPKALRSYISHPKLTPVREEVKMVRATSFSTRVPEYDVPVVDKAVDATWKREQPRKAPSVPQDADSSVKTASKPSGRPWDKIAANLMACLMAIVMLVRSIKDLATMRLSSKGGSEESYCTLYPDSVQKEEFRPPSPFPGFAEADLFAVVLQRLGELEEKVQMLQEKPSEMPCEKEELLNAAVRRVDALEAELIVTKKALHEALIRQEELLANIDSKEIARAQRKKKTMFCY

SEQ ID NO: 177712 - protein, 363 aa, Zea Mays
MFIVNAGPGFRLLWNTVKSFLDPKTTAKIHVLGNKYQSKLLETIDASELPEFLGGTCTCPEYGGCLKAEKGPWKDPNILKIVQSGGVHCARQIVTISNGEEKFITYAKPKRHAMRGSDTSTAESGSEADDAVSPKALRSYISHPKLTPVREEVKMVRATSFSTRVPEYDVPVVDKAVDATWKREQPRKAPSVPQDADSSVKTASKPSGRPWDKIAANLMACLMAIVMLVRSIKDLATMRLSSKGGSEESYCTLYPDSVQKEEFRPPSPFPGFAEADLFAVVLQRLGELEEKVQMLQEKPSEMPCEKEELLNAAVRRVDALEAELIVTKKALHEALIRQEELLANIDSKEIARAQRKKKTMFCY

SEQ ID NO: 177713 - protein, 99 aa, Zea Mays
MIMSFLCDYQEHGYYKSTVVTITSFSWMHICYTGSAATIRCISGDANQNVLKKETAREELRELLDLLNGGNEIPAHTRGVRRKRCSSQLPYPCMINMNE

SEQ ID NO: 177714 - protein, 378 aa, Zea Mays
MTSKRSERCDASGDIRVDGNRSTIYVGGIEREWRTKPYARYHDPVAMAHVREYTLKALPEPGAAAAPACTRNHSVPGFLFSNGGFSGNLYHDYTDVLVPLFISTHQFRGRVQFLVSGMKPWWVGKFTPFFRQLTRHDVIDVDKDGEVHCFPRIVVGATFHRDMGVDPRRAPGHVSAVDFKRALRAAFGLKREAASRGGGGGATGDGKPRLLIISRRGSRRFLNSREMAVAAGDAGFEVRVAEPDQRTDMAAFAALVNSADAMVGVHGAGLTNMVFLPRGAVLVQVVPFGGLEWLTGVTFKEPAADMEVSYMDYHVRLEESSLVDQYPRGHQVLTDPYAVHRQGWDALKTAYLDKQNIRMDLDRFRATLREVMARLPSP

SEQ ID NO: 177715 - protein, 353 aa, Zea Mays
MPLGQRPGDKSDARYCGVEVLDFPAGEDLPAVLNHSLASAFDFILVPLVDPNYRPAPGSVLPVSASDLILGPAQWSNHVVGKISEWIDLDSEDERLRLDSELTLKQEIAWASHVSLQACVLPAPRRSFCGNYARVVNQILQGLTNMHLWLRLPLEKSEPMDDDLDKIKNNSHTSEIVDSWELWNSFRLLCDHSSQLCVALDILSTLPSINSLARWFGEPVRAAILQTEAFLTNAKGYPCLSKRHQSLLTGFFKHSVQVIISGRSNHNVFPVSEGVLSGDESYAEDSRVRHALTPYLEYIAYLYRKMDPLPEQERIEINYRDFLQSPLQPLMDNLEAQTYETFEKDVVKYTQFP

SEQ ID NO: 177716 - protein, 341 aa, Zea Mays
MFSQYLKECSQVTRATQKPLMDNLEAQTYETFEKDVVKYTQYRRAVAKALVDRVADDAVSTTRTVLMVVGAGRGPLVRASLQAAEETGRKLKVYAVEKNPNAVITLHSLIKLEGWESLVTVISSDMRCWDAPEKADVLVSELLGSFGDNELSPECLDGAQRFLKPDGISIPSSYTSFIQPITASKLHNDIKAHKDIAHFETAYVVKLHRIATLAPPQQVFTFTHPNFSPNASNQRYTKLQFEMLPDMGSCLVHGFAGYFDSVLYKDVHLGIEPNTATPNMFSWFPIFFPLRKPIYVPEGSPIEVHFWRCCAPTKVWYEWAVTTPTLSPIHNSNGRSYWVGL

SEQ ID NO: 177717 - protein, 176 aa, Zea Mays
MAEEAASLEAPPPLHNPSLRKSSLDDETRALVVPDAAALPASPPSAVEANFARYFVAAHVVFKEEGVISTVDFNVGKSDRSEMKVTGKRKRNAQHLQENSALCKVCVNDKSFIVRCCVKGSLLEINERLIKQPDLLNTAADREGYIAVFQPKPADWLKIKDKFLSYEDYKNLRGVC

SEQ ID NO: 177718 - protein, 378 aa, Zea Mays
MNGCRPIQDAKVVVSPTHYLFQIYRNGVTFLACTQVEMAPLMAVEFLSRVADVLTDYLGDLNEDIIKDNFVIVYQILDEMMDNGFPLTTEPNILKEMITPPNIVNKMLNVVTGKSSTLGSKLPDAAASFVPWRRTTVKDASNEVYVNIVEELDACVNREGVLVKCEAYGEVQVNCSLPGVPELTMSFANPAIINDVTFHPCVRFRPWESNQILSFVPPDGQFKLMSYRVQKLKKTPIYVKPQLTSDSGNCRVSVMVGIRNDPGKPIDSITVQFQLPPLIVSADLTANYGTVDILADKTCLWTIGQIPKDKAPALSGNLRLEEGLAQLHALPTFQVKFRIMGVALSGLQIDKLDVKNTPNAPYKGFRAQTQAGKYEVRS

SEQ ID NO: 177719 - protein, 421 aa, Zea Mays
MLQCIFLLSDSGEVMVEKQMAAHCVDRAICAWFWDYVVAHAAGDPSKVLQVVVSPTHYLFQIYRNGVTFLACTQVEMAPLMAVEFLSRVADVLTDYLGDLNEDIIKDNFVIVYQILDEMMDNGFPLTTEPNILKEMITPPNIVNKMLNVVTGKSSTLGSKLPDAAASFVPWRRTTVKDASNEVYVNIVEELDACVNREGVLVKCEAYGEVQVNCSLPGVPELTMSFANPAIINDVTFHPCVRFRPWESNQILSFVPPDGQFKLMSYRVQKLKKTPIYVKPQLTSDSGNCRVSVMVGIRNDPGKPIDSITVQFQLPPLIVSADLTANYGTVDILADKTCLWTIGQIPKDKAPALSGNLRLEEGLAQLHALPTFQAAHQVDLLQQVLLHPLLHNLRRLRQNRHRTTCHLASTQGYLWNLQLYV

SEQ ID NO: 177720 - protein, 150 aa, Zea Mays
MMDNGFPLTTEPNILKEMITPPNIVNKMLNVVTGKSSTLGSKLPDAAASFVPWRRTTVKDASNEVYVNIVEELDACVNREGVLVKCEAYGEVQVNCSLPGVPELTMSFANPAIINDVTFHPCVRFRPWESNQILSFVPPDGQFKLMSYRN

SEQ ID NO: 177721 - protein, 391 aa, Zea Mays
MLQCIFLLSDSGEVMVEKQMAAHCVDRAICAWFWDYVVAHAAGDPSKVLQVVVSPTHYLFQIYRNGVTFLACTQVEMAPLMAVEFLSRVADVLTDYLGDLNEDIIKDNFVIVYQILDEMMDNGFPLTTEPNILKEMITPPNIVNKMLNVVTGKSSTLGSKLPDAAASFVPWRRTTVKDASNEVYVNIVEELDACVNREGVLVKCEAYGEVQVNCSLPGVPELTMSFANPAIINDVTFHPCVRFRPWESNQILSFVPPDGQFKLMSYRVQKLKKTPIYVKPQLTSDSGNCRVSVMVGIRNDPGKPIDSITVQFQLPPLIVSADLTANYGTVDILADKTCLWTIGQIPKDKAPALSGNLRLEEGLAQLHALPTFQHQQQKSRSRASAASSRPA

SEQ ID NO: 177722 - protein, 99 aa, Zea Mays
MLNIYIQIASVPAYRHLEDRPLSPSPTPTAPLWASPPSSDHDLSTLRARCRSSLPAAIDLSGGVDACMDDALNVFGEMGTRVGMVTIIHGGWTSRLYRG

SEQ ID NO: 177723 - protein, 206 aa, Zea Mays
MGNICGGSGKDRVAEDFRPSSPGTTMTSKTSGSITTSLSTTGKLSSVGSSFMASASSRSTSGGFDEGAKYSDGQILEAPNLRTFTFVELKTATKNFRPDSVLGEGGFGRVYKGWVDEKTMAPTRNSTGMVVAVKKLNSESMQGFEEWQSEINFLGRLSHPNLVKLLGYCWEDKELLLVYEFMAKGSLENHLFRSEFLRIKLRARFT

SEQ ID NO: 177724 - protein, 335 aa, Zea Mays
MDPEAGAACPGTTMTSKTSGSITTSLSTTGKLSSVGSSFMASASSRSTSGGFDEGAKYSDGQILEAPNLRTFTFVELKTATKNFRPDSVLGEGGFGRVYKGWVDEKTMAPTRNSTGMVVAVKKLNSESMQGFEEWQSEINFLGRLSHPNLVKLLGYCWEDKELLLVYEFMAKGSLENHLFRRGCAPLSWELRLKIAIGAARGLAFLHASEKQVIYRDFKASNILLDANYNAKLSDFGLAKLGPTGSNSHITTRVMGTYGYAAPEYVATGTCPHFSHVTSWYDHTLLPYNELSTLPPRASRFEAETYTATQTRLSVRHNQYNAVVLALQTFPHLIV

SEQ ID NO: 177725 - protein, 181 aa, Zea Mays
MTSKTSGSITTSLSTTGKLSSVGSSFMASASSRSTSGGFDEGAKYSDGQILEAPNLRTFTFVELKTATKNFRPDSVLGEGGFGRVYKGWVDEKTMAPTRNSTGMVVAVKKLNSESMQGFEEWQSEINFLGRLSHPNLVKLLGYCWEDKELLLVYEFMAKGSLENHLFRSEFLRIKLRARFT

SEQ ID NO: 177726 - protein, 405 aa, Zea Mays
MTSKTSGSITTSLSTTGKLSSVGSSFMASASSRSTSGGFDEGAKYSDGQILEAPNLRTFTFVELKTATKNFRPDSVLGEGGFGRVYKGWVDEKTMAPTRNSTGMVVAVKKLNSESMQGFEEWQSEINFLGRLSHPNLVKLLGYCWEDKELLLVYEFMAKGSLENHLFRRGCAPLSWELRLKIAIGAARGLAFLHASEKQVIYRDFKASNILLDANYNAKLSDFGLAKLGPTGSNSHITTRVMGTYGYAAPEYVATGHLYVKSDVYGFGVVMLEMLSGQRALDPNRPSGQLSLADWAKPYLADRRRLARLMDPRFEGQYNSRQAFQAAQLTLGCLAGDPRSRPSMKEVVETLERVEAVKSRARGGGSGSGSGRAGAAAHHRSPRVGGGARAASRPAANGHNARPAR

SEQ ID NO: 177727 - protein, 322 aa, Zea Mays
MTSKTSGSITTSLSTTGKLSSVGSSFMASASSRSTSGGFDEGAKYSDGQILEAPNLRTFTFVELKTATKNFRPDSVLGEGGFGRVYKGWVDEKTMAPTRNSTGMVVAVKKLNSESMQGFEEWQSEINFLGRLSHPNLVKLLGYCWEDKELLLVYEFMAKGSLENHLFRRGCAPLSWELRLKIAIGAARGLAFLHASEKQVIYRDFKASNILLDANYNAKLSDFGLAKLGPTGSNSHITTRVMGTYGYAAPEYVATGTCPHFSHVTSWYDHTLLPYNELSTLPPRASRFEAETYTATQTRLSVRHNQYNAVVLALQTFPHLIV

SEQ ID NO: 177728 - protein, 230 aa, Zea Mays
MTKEINKSNTRLHGRATADDARPKEEEGAAILYALVAGSTPGGMAYHDPDKLKKYDLEDLRKTPNPFYLESDKKAGNGYSFVRTPSPAPGVDESPFMTWGEIDGTPLRLDSDETPGGSERAHFKMPPPPARDVKAHLLSRDAARKIKERSNTFHRPPLPSPARGVSASPRTLSRAAQKFVRNAISKSAKSSSAIDESLRASYRGSTPSASTPKSRFSRDPGLASRSPSTR

SEQ ID NO: 177729 - protein, 155 aa, Zea Mays
MSGEEEENAAELKIGEGQVPDELRGGDHPGAQVRADPAARVVGVGPVVAGVAGVREVAAVREALQPLQEPRRRAPGPRDAEPLRPRRVRALHARQPLPRHQRRGHRARPLPQVRRQVRRRPRGREDREDAQRPLPHQEVRVEREPSLLLSSFLLE

SEQ ID NO: 177730 - protein, 418 aa, Zea Mays
MPLANREDRTTVASGRGSADSVLFGAMDPVAGTAEHRGPVEVRARAPGKIILTGEHAVVHGSAAVAAAIDLYTNSSLLLRPAGPGEGGGAGSSAVELDLRDSGLTFSWPCSRLRGALGEEISANPGAPAPCSPDQLAAIARLLQDQDIPEAKIWLSAGLSAFLFLYTSILGCRPGKAVVSSDLPMGAGLGSSAAFCVSMSGALLTAAGAVSVGAHRGAEGWEVLEKGALELVNQWAFQGEKIIHGKMIKFKKGELTNLESRNPVKMLITDTRVGRNTKALVAGVSERASRHPDAMASVFHAVNTISEELSSIVELVAEDEIAITSKEDKLAELMEMNQGLLQCMGVSHSSIETVLRTTLKYSLVSKLTGAGGGGCVLTLIPTLSSNIVLEKVTRELESHGYRCFKVEVGGRGLQVFRG

SEQ ID NO: 177731 - protein, 247 aa, Zea Mays
MGAGLGSSAAFCVSMSGALLTAAGAVSVGAHRGAEGWEVLEKGALELVNQWAFQGEKIIHGKPSGIDNSVSTFGKMIKFKKGELTNLESRNPVKMLITDTRVGRNTKALVAGVSERASRHPDAMASVFHAVNTISEELSSIVELVAEDEIAITSKEDKLAELMEMNQGLLQCMGVSHSSIETVLRTTLKYSLVSKLTGAGGGGCVLTLIPTLSSNIVLEKVTRELESHGYRCFKVEVGGRGLQVFRG

SEQ ID NO: 177732 - protein, 440 aa, Zea Mays
MPLANREDRTTVASGRGSADSVLFGAMDPVAGTAEHRGPVEVRARAPGKIILTGEHAVVHGSAAVAAAIDLYTNSSLLLRPAGPGEGGGAGSSAVELDLRDSGLTFSWPCSRLRGALGEEISANPGAPAPCSPDQLAAIARLLQDQDIPEAKIWLSAGLSAFLFLYTSILGCRPGKAVVSSDLPMGAGLGSSAAFCVSMSGALLTAAGAVSVGAHRGAEGWEVLEKGALELVNQWAFQGEKIIHGKPSGIDNSVSTFGKMIKFKKGELTNLESRNPVKMLITDTRVGRNTKALVAGVSERASRHPDAMASVFHAVNTISEELSSIVELVAEDEIAITSKEDKLAELMEMNQGLLQCMGVSHSSIETVLRTTLKYSLVSKLTGAGGGGCVLTLIPTLSSNIVLEKVTRELESHGYRCFKVEFLCCTTCLLRPLIRKPADDE

SEQ ID NO: 177733 - protein, 266 aa, Zea Mays
MARTRSRIAWLKDGDANTKLFYSWSRYRKRKNFIAKIHDGEQLVTSHSDKAEVFRSFYSDLIGTGQQRSRSVNLDTIGLQHIDLQGLEQQFSEEEVWNTIKQLPPDKAPGPDGFTGRFYKTCWSIIKKDIMAAILTVWNKDFRNFRYLNTAFITLLPKKEDAILAKDFRPISLIHSFAKLITKVMANRLSGYMDKLISKNQSAFIKGRFIQDNFMLVQQTAKIAACSKNSPEFFSSWTFPRPSIRYLGPSFLKCWKKLDSAPYGEM

SEQ ID NO: 177734 - protein, 665 aa, Zea Mays
MPPPEMQKRKLARICDLVSSSLLLHLEPAPSPPRQLTREGERQLLLALSTTIRRWDQEEDEWACELFQETLSDSGEVHSCCLLPEARPYDGFGCLANIVSMLVGFLDFCSDYVKHSAGNILISVSSTLIKFESIWIQFIELAWGAIHAASKCVHNTSHSTTDSNSDDSTSSGTRITSFMTALSEHRLNTSRQTMSSLFRVLHAILKFLKQSDSDLKDDFICLSIHQIHKMPWNLFHQLHAGGLASCAKDSRFSTSNDSAQSRILTGSLLQLLGSLLDQSYLRDTDGQDMFVKLVDVVPKIASLSLGGQHDGSKSLYQYLKHKILMVMMRLKPYIQQDCSHIVSWLKLLRRYFGDLLHQPISQHIAKPENCLEDSPFLLDMVDLVESQDKSTRHLQRQAIYLFLSCSICLSYNRNDGALQCSCKRDECLLGHKVQGCSNHCNCFGLSEISDWFQKCYLNGSIDSKSSSFALSFLELYMEEDDMLFSILLQLLDAPLVFLKIANFETKELVGVKLFSSIFDPVHLFHLLLFLLHYDHMVLVDYLISRDVGVLCAQYLLRCLRLVSQSWHAFVDDSVYSTKIEKLNCKRQRISGDKDSDRASSSNQYKNGSGCDKEVEDSRKLFLDAKKCLYLLKRTLEDLQKKDLFPYNPKPLLRSLARFQELGEQG

SEQ ID NO: 177735 - protein, 538 aa, Zea Mays
MPPPEMQKRKLAHICDLVSSSLLLHLEPAPSPPRQLTREGERQLLLALSTVNKTIRRWDQEEDEWACELFQETLSDSGEVHSCCLLPEARPYDGFGCLANIVSMLVGFLDFCSDYVKHSAGNILISVSSTLIKFESIWIQFIELAWGAIHAASKCVHNTSHSTTDSNSDDSTSSGTRITSFMTALSEHRLNTSRQTMSSLFRVLHAILKFLKQSDSDLKDDFICLSIHQIHKMPWNLFHQLHAGGLASCAKDSRFSTSNDSAQSRILTGSLLQLLGSLLDQSYLRDTDGQDMFVKLVDVVPKIASLSLGGQHDGSKSLYQYLKHKILMVMMRLKPYIQQDCSHIVSWLKLLRRYFGDLLHQPISQHIAKPENCLEDSPFLLDMVDLVESQDKSTRHLQRQAIYLFLSCSICLSYNRNDGALQCSCKRDECLLGHKVQGCSNHCNCFGLSEISDWFQKCYLNGSIDSKSSSFALSFLELYMEEDDMLFSILLQLLDAPLVFLKIANFETKELVGVKLFSSIFDPVHLFHLLLFLCCNHH

SEQ ID NO: 177736 - protein, 429 aa, Zea Mays
MPPPEMQKRKLAHICDLVSSSLLLHLEPAPSPPRQLTREGERQLLLALSTVNKTIRRWDQEEDEWACELFQETLSDSGEVHSCCLLPEARPYDGFGCLANIVSMLVGFLDFCSDYVKHSAGNILISVSSTLIKFESIWIQFIELAWGAIHAASKCVHNTSHSTTDSNSDDSTSSGTRITSFMTALSEHRLNTSRQTMSSLFRVLHAILKFLKQSDSDLKDDFICLSIHQIHKMPWNLFHQLHAGGLASCAKDSRFSTSNDSAQSRILTGSLLQLLGSLLDQSYLRDTDGQDMFVKLVDVVPKIASLSLGGQHDGSKSLYQYLKHKILMVMMRLKPYIQQDCSHIVSWLKLLRRYFGDLLHQPISQHIAKPENCLEDSPFLLDMVDLVESQDKSTRHLQRLVSEVLSKWEYRLKIIKFRVILSGIVYGGG

SEQ ID NO: 177737 - protein, 981 aa, Zea Mays
MPPPTRGRGRGRGRGRGRGRGRGRGRPSKDTVAEDSAHATEESGEENLQEKVQEGGKVNLTEKVQEGGEENLTEKVQEGGEENLTEKENEGIVEVSKPPQRRRKDPVADPSSLESSGFMRFRERRNASAVQEQGPKKRRITEDSNMCHQCQRNDSGRVVRCQGCVVRKRKYRYCVKCIKRWYPHLSEDDFANNCPVCQNNCNCKACLRGDITRSGGYSVSEQDKIKFSMRIVHFLLPWLKQFHQEQMQEKSAEAATKGIDADKLEVPLTICGKKERIYCNNCRTSIVDFHRTCNKCNYDLCLQCCQELRRGLVSGNDAKVDGGGKQDFLSGVSHDKIISKGPSDGQNDMLIDSVVPGENNTSSLRQWSVNKDGTIPCPPNAFGGCGSSLLELKCLFKEKFIAELLEKANSALNNEMEVKIEGSKCPCFTESGDMDDGISRKSSCRENSCDNYIYCPTATDVQNGSLDHFQEHWLKGEPVIVRDTLALTSGLSWEPMVMWRALREKKEKVERLSVLALECLGWCEVDVNIHMFFAGYSSGLVGPDDLPLLLKLKDWPPHSSFEERLPRHGAEFMSALPFREYTDPKWGPLNLAVKLPDNVNKPDLGPKTYIAYGVSKELGIGDSVTKLHCDMSDAVNILTHTDEIKLKAKRIAAVEKKKRCLGMKILSTKEASGGLQRCADYFGMPTAPSESNKEPRPEECVNELGIKQPVQHVASEEQEGVQDDAKADANVMNVSFGKGKSEDSFGTINGTNSGDKIESPSGLAERTLTQPTTKGCSKQRGRSSNGRGNRTKKIEEGNASGLIAVAPESEDDDDDAAFIDGNQAEGGALWDIFRREDVSKLHDYLMKHAHEFRHCNFEPVKQVTHPIHDQCFYLTIEHKRKLKEEYGVEPWTFEQKLGEAVFIPAGCPHQSCIKVALDFVSPENVRECIRLTEGFRLLPKWHKVNEDKLEVKKIALHAFNQAIKDITDESSNSNESKWIRR

SEQ ID NO: 177738 - protein, 876 aa, Zea Mays
MPPPTRGRGRGRGRGRGRGRGRGRGRPSKDTVAEDSAHATEESGEENLQEKVQEGGKVNLTEKVQEGGEENLTEKVQEGGEENLTEKENEGIVEVSKPPQRRRKDPVADPSSLESSGFMRFRERRNASAVQEQGPKKRRITEDSNMCHQCQRNDSGRVVRCQGCVVRKRKYRYCVKCIKRWYPHLSEDDFANNCPVCQNNCNCKACLRGDITRSGGYSVSEQDKIKFSMRIVHFLLPWLKQFHQEQMQEKSAEAATKGIDADKLEVPLTICGKKERIYCNNCRTSIVDFHRTCNKCNYDLCLQCCQELRRGLVSGNDAKVDGGGKQDFLSGVSHDKIISKGPSDGQNDMLIDSVVPGENNTSSLRQWSVNKDGTIPCPPNAFGGCGSSLLELKCLFKEKFIAELLEKANSALNNEMEVKIEGSKCPCFTESGDMDDGISRKSSCRENSCDNYIYCPTATDVQNGSLDHFQEHWLKGEPVIVRDTLALTSGLSWEPMVMWRALREKKEKVERLSVLALECLGWCEVNILTHTDEIKLKAKRIAAVEKKKRCLGMKILSTKEASGGLQRCADYFGMPTAPSESNKEPRPEECVNELGIKQPVQHVASEEQEGVQDDAKADANVMNVSFGKGKSEDSFGTINGTNSGDKIESPSGLAERTLTQPTTKGCSKQRGRSSNGRGNRTKKIEEGNASGLIAVAPESEDDDDDAAFIDGNQAEGGALWDIFRREDVSKLHDYLMKHAHEFRHCNFEPVKQVTHPIHDQCFYLTIEHKRKLKEEYGVEPWTFEQKLGEAVFIPAGCPHQVRNLKSCIKVALDFVSPENVRECIRLTEGFRLLPKWHKVNEDKLEVKKIALHAFNQAIKDITDESSNSNESKWIRR

SEQ ID NO: 177739 - protein, 997 aa, Zea Mays
MAAEALGAMRSRYRSAAIEPLRLRLSNPSDSGCGRYVFRNLISAMLLAYMHMESGEENLQEKVQEGGKVNLTEKVQEGGEENLTEKVQEGGEENLTEKENEGIVEVSKPPQRRRKDPVADPSSLESSGFMRFRERRNASAVQEQGPKKRRITEDSNMCHQCQRNDSGRVVRCQGCVVRKRKYRYCVKCIKRWYPHLSEDDFANNCPVCQNNCNCKACLRGDITRSGGYSVSEQDKIKFSMRIVHFLLPWLKQFHQEQMQEKSAEAATKGIDADKLEVPLTICGKKERIYCNNCRTSIVDFHRTCNKCNYDLCLQCCQELRRGLVSGNDAKVDGGGKQDFLSGVSHDKIISKGPSDGQNDMLIDSVVPGENNTSSLRQWSVNKDGTIPCPPNAFGGCGSSLLELKCLFKEKFIAELLEKANSALNNEMEVKIEGSKCPCFTESGDMDDGISRKSSCRENSCDNYIYCPTATDVQNGSLDHFQEHWLKGEPVIVRDTLALTSGLSWEPMVMWRALREKKEKVERLSVLALECLGWCEVDVNIHMFFAGYSSGLVGPDDLPLLLKLKDWPPHSSFEERLPRHGAEFMSALPFREYTDPKWGPLNLAVKLPDNVNKPDLGPKTYIAYGVSKELGIGDSVTKLHCDMSDAVNILTHTDEIKLKAKRIAAVEKKKRCLGMKILSTKEASGGLQRCADYFGMPTAPSESNKEPRPEECVNELGIKQPVQHVASEEQEGVQDDAKADANVMNVSFGKGKSEDSFGTINGTNSGDKIESPSGLAERTLTQPTTKGCSKQRGRSSNGRGNRTKKIEEGNASGLIAVAPESEDDDDDAAFIDGNQAEGGALWDIFRREDVSKLHDYLMKHAHEFRHCNFEPVKQVTHPIHDQCFYLTIEHKRKLKEEYGVEPWTFEQKLGEAVFIPAGCPHQVRNLKSCIKVALDFVSPENVRECIRLTEGFRLLPKWHKVNEDKLEVKKIALHAFNQAIKDITDESSNSNESKWIRR

SEQ ID NO: 177740 - protein, 354 aa, Zea Mays
MKVNILTHTDEIKLKAKRIAAVEKKKRCLGMKILSTKEASGGLQRCADYFGMPTAPSESNKEPRPEECVNELGIKQPVQHVASEEQEGVQDDAKADANVMNVSFGKGKSEDSFGTINGTNSGDKIESPSGLAERTLTQPTTKGCSKQRGRSSNGRGNRTKKIEEGNASGLIAVAPESEDDDDDAAFIDGNQAEGGALWDIFRREDVSKLHDYLMKHAHEFRHCNFEPVKQVTHPIHDQCFYLTIEHKRKLKEEYGVEPWTFEQKLGEAVFIPAGCPHQVRNLKSCIKVALDFVSPENVRECIRLTEGFRLLPKWHKVNEDKLEVKKIALHAFNQAIKDITDESSNSNESKWIRR

SEQ ID NO: 177741 - protein, 376 aa, Zea Mays
MSLCLRAADEERRWEVAGAKGLAHLAAPLVNILTHTDEIKLKAKRIAAVEKKKRCLGMKILSTKEASGGLQRCADYFGMPTAPSESNKEPRPEECVNELGIKQPVQHVASEEQEGVQDDAKADANVMNVSFGKGKSEDSFGTINGTNSGDKIESPSGLAERTLTQPTTKGCSKQRGRSSNGRGNRTKKIEEGNASGLIAVAPESEDDDDDAAFIDGNQAEGGALWDIFRREDVSKLHDYLMKHAHEFRHCNFEPVKQVTHPIHDQCFYLTIEHKRKLKEEYGVEPWTFEQKLGEAVFIPAGCPHQSCIKVALDFVSPENVRECIRLTEGFRLLPKWHKVNEDKLEVKKIALHAFNQAIKDITDESSNSNESKWIRR

SEQ ID NO: 177742 - protein, 335 aa, Zea Mays
MQSGYGGVSEFQQFIMDGGFAMSAPPPPQQQQPQTATAQELGGPFRYQPLHHHALPPQHHHHAPHMPPHFAHFGGRAAARVGVLLRAAGAAADGAPGEPPPAVPGGHGAARAGPRRAGRGVAAAGGRQVRPRGRRARAGPRQRRGAGGRHHRLPGEDLGRVHHAAAAGVRRRRRGGGRKGAGAVRRRGRGGGPRGWRVAAPQLVAVAQARGGGADPGADGAGGAVPGARAQGPAVGGGERAHGGGGLRPQRQALQGEVGEHQQVLPQGQGERQEAAGARQDVPLLRRAGPPLLPLGPGKAGELGAAGRGGQVPRRALRPAGVRDGQGAGLRRRGQ

SEQ ID NO: 177743 - protein, 70 aa, Zea Mays
MEECMSRLRSRHDADNRGWNPLHVAARKGDLKEGGHVKIMDELLERRTKGACGCELTLASSDSLIACIFR

SEQ ID NO: 177744 - protein, 55 aa, Zea Mays
MAYCCDTYPRGTRVWVLHTRRGTRVWVLHTRRGTRVWVLHTRIRTCFTRWVEVSA

SEQ ID NO: 177745 - protein, 87 aa, Zea Mays
MEECMSRLRSRHDADNRGWNPLHVAARKGDLKEGGHVKIMDELLERRTKGACGCGGIYKWEKKKKKIANKRLYARQIIGLLHVVRRR

SEQ ID NO: 177746 - protein, 70 aa, Zea Mays
MLNRMGGRGSTWRNPFFVWKNFPTSSLTLTATLPPIMKDLTQEIHLGANPFIRRVWNKNGHLTLLYAFSK

SEQ ID NO: 177747 - protein, 73 aa, Zea Mays
MFSFCFSCCYPTPLHLAAQGGHVKIMDELLERRTKGACGCGGIYKWEKKKKKIANKRLYARQIIGLLHVVRRR

SEQ ID NO: 177748 - protein, 696 aa, Zea Mays
MPASSYSDQSFTGQSDEETEELSKITLENKDIQLDINIREEKHHESCSSSQQVNFDTEGTRSSEASLLGTVGSEKKLEELKQKSGRCVSAVEKANVELEHGIDGGQALDEKCDHASAKAAKAPPSKGREADETADTDKEAFGSRTEKTRRRLQPAAAMLLREFTGADIDADNEREERGRSSSSVATGRSDALVQLLMKGRPAHGDESRQLQSLMQLCEMRSIGSEDLLAAFVPILVGMLGQPATAGASPGVMLLAARALANLVYVLPSCSAISEEHAPNRLFASWNLPADASEFVMEAVPSLTNLLNHHDSKVLEHASVCLTVTRIAEAFAYYPDELDELCNHGLVAQAASLIALGNSSGQEPLSTSTYTGLIRLLSTCASGSLLAVKTLLLLGISGTLKDFLSGPALISGTLVPRAVTRPADQIFEIVILADNLLPHMPAIIIELPTYYHAYKDSSTNKSASIKQEGAGSTGNEKSGNERLLRDQPKLLEQFGMDLLPTMTQVYGSSVNAPIHRKCLSIIGKLMYYSSAETVQSLLGTTNISRHSCMERSSSVDSCSSDSRNNDGKASRDIFQVVCEGRCRSCCGVTYMFGILQAPTQWLVRCHLRIKVMILPCHHVRQHWRGGDVAAENSSVDESNSSNLGVTYSTTIASEALNTSLHFVVSDHAKSFKDKYFLTDTDSGDIGVTDDLLKLRAF

SEQ ID NO: 177749 - protein, 808 aa, Zea Mays
MEATSPHPPTTIRRNPPRRARPPPTPLAGDKSKPSPLSRLLEGEAAFAASVPCPPQEERLKVFLRIRPLPDRDRSRPLPAAKDPRRKPKQVGAPGELCLAPDGPNSVVLTVPRSKLVDPKRGRTEVFDGFSAVFPSDSTQHDIFAQVMNPLVDDFLGGKSGLLVAMGPTGSGKTHTIFGSPRNPGILPLTLRRIFNAQGESKVSRKPTRSFFFSMFEIFSEGKGERILDLLSDTVECVLQQSVIKGLQEVSLSNPADAESLVSRGMLKRSTAATNANSNSSRSQCIITIRADSEHLLSSAVLTIADLAGAEREKRTRNQGSRLLESNFINNTSMVFSLCLRSLLEHQKNQKKPLEKHFKNSMLTRYLRDYLEGRKKMTLILNVKPGDDDYLDTSFLLRQASPYMKIKYTSLDDSFDLASQKRINVSLICQENKKKRKVQKPAVLVVERKENVDTDDISKVSEKDGVHHVSLNPEMPRESENAVESMKELIRDKDIEIMELKKELKAVRYCSCKSSPINEDDSVDHDDSSSFGQAAQSLVNISNQADLGSNDASEDNFHVELQALHKESDKSESFTVPTPAPTGGAMPASSYSDQSFTEDDALLCLNTEQTSTVGQSDEETEELSKITLENKDIQLDINIREEKHHESCSSSQQVNFDTEGTRSSEASLLGTVGSEKKLEELKQKSGRCVSAVEKANVELEHGIDGGQALDEKCDHASAKAAKAPPSKGREADETADTDKEAFGSRTEKTRRRLQPAAAMLLREFTGADIDADNEREERGRSSSSVATGRSDALVQLLMKGRPVRGLAS

SEQ ID NO: 177750 - protein, 775 aa, Zea Mays
MEATSPHPPTTIRRNPPRRARPPPTPLAGDKSKPSPLSRLLEGEAAFAASVPCPPQEERLKVFLRIRPLPDRDRSRPLPAAKDPRRKPKQVGAPGELCLAPDGPNSVVLTVPRSKLVDPKRGRTEVFDGFSAVFPSDSTQHDIFAQVMNPLVDDFLGGKSGLLVAMGPTGSGKTHTIFGSPRNPGILPLTLRRIFNAQGESKVSRKPTRSFFFSMFEIFSEGKGERILDLLSDTVECVLQQSVIKGLQEVSLSNPADAESLVSRGMLKRSTAATNANSNSSRSQCIITIRADSEHLLSSAVLTIADLAGAEREKRTRNQGSRLLESNFINNTSMVFSLCLRSLLEHQKNQKKPLEKHFKNSMLTRYLRDYLEGRKKMTLILNVKPGDDDYLDTSFLLRQASPYMKIKYTSLDDSFDLASQKRINVSLICQENKKKRKVQKPAVLVVERKENVDTDDISKVSEKDGVHHVSLNPEMPRESENAVESMKELIRDKDIEIMELKKELKAVRYCSCKSSPINEDDSVDHDDSSSFGQAAQSLVNISNQADLGSNDASEDNFHVELQALHKESDKSESFTVPTPAPTGGAMPASSYSDQSFTEDDALLCLNTEQTSTVGQSDEETEELSKITLENKDIQLDINIREEKHHESCSSSQQVNFDTEEKANVELEHGIDGGQALDEKCDHASAKAAKAPPSKGREADETADTDKEAFGSRTEKTRRRLQPAAAMLLREFTGADIDADNEREERGRSSSSVATGRSDALVQLLMKGRPVRGLAS

SEQ ID NO: 177751 - protein, 467 aa, Zea Mays
MEATSPHPPTTIRRNPPRRARPPPTPLAGDKSKPSPLSRLLEGEAAFAASVPCPPQEERLKVFLRIRPLPDRDRSRPLPAAKDPRRKPKQVGAPGELCLAPDGPNSVVLTVPRSKLVDPKRGRTEVFDGFSAVFPSDSTQHDIFAQVMNPLVDDFLGGKSGLLVAMGPTGSGKTHTIFGSPRNPGILPLTLRRIFNAQGESKVSRKPTRSFFFSMFEIFSEGKGERILDLLSDTVECVLQQSVIKGLQEVSLSNPADAESLVSRGMLKRSTAATNANSNSSRSQCIITIRADSEHLLSSAVLTIADLAGAEREKRTRNQGSRLLESNFINNTSMVFSLCLRSLLEHQKNQKKPLEKHFKNSMLTRYLRDYLEGRKKMTLILNVKPGDDDYLDTSFLLRQASPYMKIKYTSLDDSFDLASQKRINVSLICQENKKKRKVQKPAVLVVERKENVDTDDISKVSEKGSVY

SEQ ID NO: 177752 - protein, 898 aa, Zea Mays
MEATSPHPPTTIRRNPPRRARPPPTPLAGDKSKPSPLSRLLEGEAAFAASVPCPPQEERLKVFLRIRPLPDRDRSRPLPAAKDPRRKPKQVGAPGELCLAPDGPNSVVLTVPRSKLVDPKRGRTEVFDGFSAVFPSDSTQHDIFAQVMNPLVDDFLGGKSGLLVAMGPTGSGKTHTIFGSPRNPGILPLTLRRIFNAQGESKVSRKPTRSFFFSMFEIFSEGKGERILDLLSDTVECVLQQSVIKGLQEVSLSNPADAESLVSRGMLKRSTAATNANSNSSRSQCIITIRADSEHLLSSAVLTIADLAGAEREKRTRNQGSRLLESNFINNTSMVFSLCLRSLLEHQKNQKKPLEKHFKNSMLTRYLRDYLEGRKKMTLILNVKPGDDDYLDTSFLLRQASPYMKIKYTSLDDSFDLASQKRINVSLICQENKKKRKVQKPAVLVVERKENVDTDDISKVSEKDGVHHVSLNPEMPRVSRSEAIMTNFARALLTVLRQYKHKLLESENAVESMKELIRDKDIEIMELKKELKAVRYCSCKSSPINEDDSVDHDDSSSFGQAAQSLVNISNQADLGSNDASEDNFHVELQALHKESDKSESFTVPTPAPTGGAMPASSYSDQSFTGQSDEETEELSKITLENKDIQLDINIREEKHHESCSSSQQVNFDTEGTRSSEASLLGTVGSEKKLEELKQKSGRCVSAVEKANVELEHGIDGGQALDEKCDHASAKAAKAPPSKGREADETADTDKEAFGSRTEKTRRRLQPAAAMLLREFTGADIDADNEREERGRSSSSVATGRSDALVQLLMKGRPAHGDESRQLQSLMQLCEMRSIGSEDLLAAFVPILVGMLGQPATAGASPGVMLLAARALANLVYVLPSCSAVVHYGAILLCSTAHR

SEQ ID NO: 177753 - protein, 906 aa, Zea Mays
MEATSPHPPTTIRRNPPRRARPPPTPLAGDKSKPSPLSRLLEGEAAFAASVPCPPQEERLKVFLRIRPLPDRDRSRPLPAAKDPRRKPKQVGAPGELCLAPDGPNSVVLTVPRSKLVDPKRGRTEVFDGFSAVFPSDSTQHDIFAQVMNPLVDDFLGGKSGLLVAMGPTGSGKTHTIFGSPRNPGILPLTLRRIFNAQGESKVSRKPTRSFFFSMFEIFSEGKGERILDLLSDTVECVLQQSVIKGLQEVSLSNPADAESLVSRGMLKRSTAATNANSNSSRSQCIITIRADSEHLLSSAVLTIADLAGAEREKRTRNQGSRLLESNFINNTSMVFSLCLRSLLEHQKNQKKPLEKHFKNSMLTRYLRDYLEGRKKMTLILNVKPGDDDYLDTSFLLRQASPYMKIKYTSLDDSFDLASQKRINVSLICQENKKKRKVQKPAVLVVERKENVDTDDISKVSEKDGVHHVSLNPEMPRVSRSEAIMTNFARALLTVLRQYKHKLLESENAVESMKELIRDKDIEIMELKKELKAVRYCSCKSSPINEDDSVDHDDSSSFGQAAQSLVNISNQADLGSNDASEDNFHVELQALHKESDKSESFTVPTPAPTGGAMPASSYSDQSFTGQSDEETEELSKITLENKDIQLDINIREEKHHESCSSSQQVNFDTEGTRSSEASLLGTVGSEKKLEELKQKSGRCVSAVEKANVELEHGIDGGQALDEKCDHASAKAAKAPPSKGREADETADTDKEAFGSRTEKTRRRLQPAAAMLLREFTGADIDADNEREERGRSSSSVATGRSDALVQLLMKGRPAHGDESRQLQSLMQLCEMRSIGSEDLLAAFVPILVGMLGQPATAGASPGVMLLAARALANLVYVLPSCSAISEEHAPNRLFASWCANGCSKAT

SEQ ID NO: 177754 - protein, 450 aa, Zea Mays
MPRVSRSEAIMTNFARALLTVLRQYKHKLLESENAVESMKELIRDKDIEIMELKKELKAVRYCSCKSSPINEDDSVDHDDSSSFGQAAQSLVNISNQADLGSNDASEDNFHVELQALHKESDKSESFTVPTPAPTGGAMPASSYSDQSFTGQSDEETEELSKITLENKDIQLDINIREEKHHESCSSSQQVNFDTEGTRSSEASLLGTVGSEKKLEELKQKSGRCVSAVEKANVELEHGIDGGQALDEKCDHASAKAAKAPPSKGREADETADTDKEAFGSRTEKTRRRLQPAAAMLLREFTGADIDADNEREERGRSSSSVATGRSDALVQLLMKGRPAHGDESRQLQSLMQLCEMRSIGSEDLLAAFVPILVGMLGQPATAGASPGVMLLAARALANLVYVLPSCSAISEEHAPNRLFASWNLPADASEFVMEAVPSLTNLLNHHDSK

SEQ ID NO: 177755 - protein, 929 aa, Zea Mays
MEATSPHPPTTIRRNPPRRARPPPTPLAGDKSKPSPLSRLLEGEAAFAASVPCPPQEERLKVFLRIRPLPDRDRSRPLPAAKDPRRKPKQVGAPGELCLAPDGPNSVVLTVPRSKLVDPKRGRTEVFDGFSAVFPSDSTQHDIFAQVMNPLVDDFLGGKSGLLVAMGPTGSGKTHTIFGSPRNPGILPLTLRRIFNAQGESKVSRKPTRSFFFSMFEIFSEGKGERILDLLSDTVECVLQQSVIKGLQEVSLSNPADAESLVSRGMLKRSTAATNANSNSSRSQCIITIRADSEHLLSSAVLTIADLAGAEREKRTRNQGSRLLESNFINNTSMVFSLCLRSLLEHQKNQKKPLEKHFKNSMLTRYLRDYLEGRKKMTLILNVKPGDDDYLDTSFLLRQASPYMKIKYTSLDDSFDLASQKRINVSLICQENKKKRKVQKPAVLVVERKENVDTDDISKVSEKDGVHHVSLNPEMPRVSRSEAIMTNFARALLTVLRQYKHKLLESENAVESMKELIRDKDIEIMELKKELKAVRYCSCKSSPINEDDSVDHDDSSSFGQAAQSLVNISNQADLGSNDASEDNFHVELQALHKESDKSESFTVPTPAPTGGAMPASSYSDQSFTEDDALLCLNTEQTSTVGQSDEETEELSKITLENKDIQLDINIREEKHHESCSSSQQVNFDTEEKANVELEHGIDGGQALDEKCDHASAKAAKAPPSKGREADETADTDKEAFGSRTEKTRRRLQPAAAMLLREFTGADIDADNEREERGRSSSSVATGRSDALVQLLMKGRPAHGDESRQLQSLMQLCEMRSIGSEDLLAAFVPILVGMLGQPATAGASPGVMLLAARALANLVYVLPSCSAISEEHAPNRLFASWNLPADASEFVMEAVPSLTNLLNHHDSKVLLKCRQSHLCVMICLSSDTHC

SEQ ID NO: 177756 - protein, 584 aa, Zea Mays
MAVLKQLDFFSTEVQRVALSTAANICRNLPADASEFVMEAVPSLTNLLNHHDSKVLEHASVCLTVTRIAEAFAYYPDELDELCNHGLVAQAASLIALGNSSGQEPLSTSTYTGLIRLLSTCASGSLLAVKTLLLLGISGTLKDFLSGPALISGTLVPRAVTRPADQIFEIVILADNLLPHMPAIIIELPTYYHAYKDSSTNKSASIKQEGAGSTGNEKSGNERLLRDQPKLLEQFGMDLLPTMTQVYGSSVNAPIHRKCLSIIGKLMYYSSAETVQSLLGTTNISSFLAGILAWNDLQVLIPALQIAEIMMEKLPETFSKLFVREGSNTMARQVPPQDKEQLDKIISEMLSELSKVNGVSTFEFIRSGVTTALLDYLSCGTFGKEKSSRIGNGGSRLTSGLSALAQPFKLRLSPAQGEKPLRDYSSNIVLINPFASLAAVEGFLWPRVQHSEVASKPIIPSGNNSESVVPGTIAGASLATAMDQSGRRPTTRSKSSAAWGGTSKKDSHDESTTTAKGKLGDSNECNIGSASFSQVQPSSGSGARNTSSRGPDSTEFQSTSTFGSFVAATMAGLASVGGRSVIGG

SEQ ID NO: 177757 - protein, 236 aa, Zea Mays
MLSELSKVNGVSTFEFIRSGVTTALLDYLSCGTFGKEKSSRIGNGGSRLTSGLSALAQPFKLRLSPAQGEKPLRDYSSNIVLINPFASLAAVEGFLWPRVQHSEVASKPIIPSGNNSESVVPGTIAGASLATAMDQSGRRPTTRSKSSAAWGGTSKKDSHDESTTTAKGKLGDSNECNIGSASFSQVQPSSGSGARNTSSRGPDSTEFQSTSTFGSFVAATMAGLASVGGRSVIGG

SEQ ID NO: 177758 - protein, 250 aa, Zea Mays
MEAVPSLTNLLNHHDSKVLEHASVCLTVTRIAEAFAYYPDELDELCNHGLVAQAASLIALGNSSGQEPLSTSTYTGLIRLLSTCASGSLLAVKTLLLLGISGTLKDFLSGPALISGTLVPRAVTRPADQIFEIVILADNLLPHMPAIIIELPTYYHAYKDSSTNKSASIKQEGAGSTGNEKSGNERLLRDQPKLLEQFGMDLLPTMTQVYGSSVNAPIHRKCLSIIGKLMYYSSAETVQSLLGTTNISRF

SEQ ID NO: 177759 - protein, 368 aa, Zea Mays
MGSKSVDEVLDAAAAGVHYSALRLDGQASATTSGLENGHQEPFVIGVAGGASSGKSTVCKMIIDQLRDQRVVVVTQESFYYGLTDEELVHVHNYNFDHPDAFHTELLLSCMQNLKCGKAVDIPNYNFKTYKSVPNARKVNPSDVIILEGILVFHDSRLRDLMNMKIFVDTDADVRLTRRIHRDTIDKGRDLKAVLEQFSKFVKPAFEDFILPTKKYADVIIPRGGDNDVAIDLIVQHIRTKLGQHDLRKIHPNLYVIQTTYQIRGMHTIIRDAATATHDFIFYADRLIRLVVEHGLGHLPFQEKQVITPTGSVYTGVEFSKRLCGISVIRSGESMENALRACCKGIKIGKILIHREAHLSKFTKRYCK

SEQ ID NO: 177760 - protein, 344 aa, Zea Mays
MGSKSVDEVLDAAAAGVHYSALRLDGQASATTSGLENGHQEPFVIGVAGGASSGKSTVCKMIIDQLRDQRVVVVTQESFYYGLTDEELVHVHNYNFDHPDAFHTELLLSCMQNLKCGKAVDIPNYNFKTYKSVPNARKVNPSDVIILEGILVFHDSRLRDLMNMKIFVDTDADVRLTRRIHRDTIDKGRDLKAVLEQFSKFVKPAFEDFILPTKKYADVIIPRGGDNDVAIDLIVQHIRTKLGQHDLRKIHPNLYVIQTTYQIRGMHTIIRDAATATHDFIFYADRLIRLVVEHGLGHLPFQEKQVITPTGSVYTGVEFSKRLCGISVIRRHSHKEGEMSFVQV

SEQ ID NO: 177761 - protein, 382 aa, Zea Mays
MDASKLRELRDFVEACKKNPSLLADPNLSFFRDYLQSLGAKIPAAAPSFESPKVTLPIHLLLYPPRRSSMDDIDDDGDDDDDLDMRDPTPERDELDEEIVESDLELEGEIVQSDHDDPPQKMGNPSVEVTEENRDASQEAKGKAMEAISEGKLEDAIEHLTNAIVLNPLSAIMYGTRASVFIKMKKPAAAIRDANAALEINPDSAKGYKTRGMAYAMLGKWEEAAHDLHTASNMDYDEEINAVLKKVEPNAHKIVEHRRKYERLRKEREEKRAQRDRLRQRAEAQAAYDKAKRKEQSSSRSSGGASPRGFPGGMPGGGFPRGMPGGGFPGGGMPGGFPGGGMPGGFPGGVPGNVDMSKILNDPDLMAAFSDPEVMAALQDGM

SEQ ID NO: 177762 - protein, 82 aa, Zea Mays
MRMNKHNNGAVFLFFTEEASCCHYIPDKESRSRAHDNKHSTVCTHAPIQMLLLIFILPKSECLPSATTSPVAALATMTCVPE

SEQ ID NO: 177763 - protein, 516 aa, Zea Mays
MSAAPDEFLAQGTYLAAPEPFSPSIFLDLPPTPRPNGDDPTSDDPASSDDLVLPFISRMLMEEDIDDKFFYQFPDHPALLSAQQPYAQILSDATASSSSDSATAISSGTVGNSTLSSSSLAAASAEPTWPYDPIELSQLLRSPPYPDMGVGLDDFTTEEVNAVFLPGQDAAFQPSPAFFVTGGSGQRLSASLTAQNVGGVGAQQQRVSLVAQDAGDSVAIQRSAFLNGAEETKTEATTLPAGDGDHAALLSAFLGAQNGENMDMLNVAFLKGMEEAKKFLPTNNSLLVDLDDTYGQSLPTDRDTKPCTAFAATQVKEEEVVVDVISMFGGSSNGRGRKNSHTQEDLESEMGRNSKLMMPEQEETGASELFDELMSCKYDGFLKHMQDLRIAMDSESEKSVRRVSGKGARGKQHGNEFVDLHTMLIHCAQAMATGDRRSATEMLKQIKQHSSLRGDATQRLAYCFAEGLEVRLAGTGSQVYQSLMAKRTSVVEFLKAYKLFLAAISLNKVEKVGLQR

SEQ ID NO: 177764 - protein, 268 aa, Zea Mays
MLNMAFLKGMEEAKKFLPTNNSLLIGLDETSCKSLPKDRYIKPYTAFAATQVKEEEEHVVVHGNGMPMFGGSRSTNGRVRKNHRAEGDDLEAETGRSSKLMMPEQEETGANELYDEIMNCTYEGFMKRMEDLRIAMDSESEKSARKVSRKGARGRQQLVNEVVDLRTMLIHCAQSVATGDRRSAAEVLKQIKHHSSPKGDATQRLAHCFAMGLEARLAGTGSQAYQSLMAQHTSVVEFLKAYSLYMAASCFMKDWITYSLLRLSMCGT

SEQ ID NO: 177765 - protein, 529 aa, Zea Mays
MMQVKHPNVVRFIGYCSNTEHELMRKEGKYIKVEVRERLLCFEHISNGSLRSHITGVIMLELVTGSKEEPDITNVLRRWSHRWKKSGQRTPSFQRHQVSKCIGLAKRCKEVEPTRRPSICDILAALGKMEDMNCSDQQVDEEVTYLEDMLGIEPLDLHFLVEPTKQISCSVHLTNATNDCFAFIVQTTNPKQYCIQPDRGVVPPRSECSVAIVLSQEPTHNKRCSMEDELSVQSTRVDEGVTAADVSEALFTGKEDRTVDHVSLMVGFDMSPSPPEEQTEDFTFAPLASLYDEEPQLSAAKVSVWTSNQLGRSGRFSKKKLVSILKSWRARLKVSSHKKLETPKHDCEIPEAVEHEEVAAPRCPKGPLPQRDLSPLGEACSRMNMTAIHEILVNRHYRDDDLDPNVPSLEEWTQQSRDMLDDRKRGDFTFRDKDFRAAIDWYTKCMDVGPKKASPTVLVRRSCCHLMCGNLDAALRDAMQAQRQYPDCPTSLYMQAVALSKLGMHSQAMGMLIEASEMEANQKKTRKAA

SEQ ID NO: 177766 - protein, 484 aa, Zea Mays
MSLKSDIYSLGVIMLELVTGSKEEPDITNVLRRWSHRWKKSGQRTPSFQRHQVSKCIGLAKRCKEVEPTRRPSICDILAALGKMEDMNCSDQQVDEEVTYLEDMLGIEPLDLHFLVEPTKQISCSVHLTNATNDCFAFIVQTTNPKQYCIQPDRGVVPPRSECSVAIVLSQEPTHNKRCSMEDELSVQSTRVDEGVTAADVSEALFTGKEDRTVDHVSLMVGFDMSPSPPEEQTEDFTFAPLASLYDEEPQLSAAKVSVWTSNQLGRSGRFSKKKLVSILKSWRARLKVSSHKKLETPKHDCEIPEAVEHEEVAAPRCPKGPLPQRDLSPLGEACSRMNMTAIHEILVNRHYRDDDLDPNVPSLEEWTQQSRDMLDDRKRGDFTFRDKDFRAAIDWYTKCMDVGPKKASPTVLVRRSCCHLMCGNLDAALRDAMQAQRQYPDCPTSLYMQAVALSKLGMHSQAMGMLIEASEMEANQKKTRKAA

SEQ ID NO: 177767 - protein, 453 aa, Zea Mays
MSLKSDIYSLGVIMLELVTGSKEEPDITNVLRRWSHRWKKSGQRTPSFQRHQVSKCIGLAKRCKEVEPTRRPSICDILAALGKMEDMNCSDQQVDEEVTYLEDMLGIEPLDLHFLVEPTKQISCSVHLTNATNDCFAFIVQTTNPKQYCIQPDRGVVPPRSECSVAIVLSQEPTHNKRCSMEDELSVQSTRVDEGVTAADVSEALFTGKEDRTVDHVSLMVGFDMSPSPPEEQTEDFTFAPLASLYDEEPQLSAAKVSVWTSNQLGRSGRFSKKKLVSILKSWRARLKVSSHKKLETPKHDCEIPEAVEHEEVAAPRCPKGPLPQRDLSPLGEACSRMNMTAIHEILVNRHYRDDDLDPNVPSLEEWTQQSRDMLDDRKRGDFTFRDKDFRAAIDCVWMWGQRRRHQQFSFDAVAATSCAATWTPPSAMQCKRSVSIPTAQPHCTCKQWHFQS

SEQ ID NO: 177768 - protein, 299 aa, Zea Mays
MSLKSDIYSLGVIMLELVTGSKEEPDITNVLRRWSHRWKKSGQRTPSFQRHQVSKCIGLAKRCKEVEPTRRPSICDILAALGKMEDMNCSDQQVDEEVTYLEDMLGIEPLDLHFLVEPTKQISCSVHLTNATNDCFAFIVQTTNPKQYCIQPDRGVVPPRSECSVAIVLSQEPTHNKRCSMEDELSVQSTRVDEGVTAADVSEALFTGKEDRTVDHVSLMVGFDMSPSPPEEQTEDFTFAPLASLYDEEPQLSAAKVSVWTSNQVRVCAFSLWIPSPDWIMHDSLSECAFTVGAFWSLL

SEQ ID NO: 177769 - protein, 625 aa, Zea Mays
MMQVKHPNVVRFIGYCSNTEHELMRKEGKYIKVEVRERLLCFEHISNGSLRSHITDGLRGLEWHARYKIIKGICEGLHHLHMEKNIIHMDLKPANILVHDQMVPKIADFGLSRLAEVSRTMSNERLLSLGYCAPEYQYHGKMSLKSDIYSLGVIMLELVTGSKEEPDITNVLRRWSHRWKKSGQRTPSFQRHQVSKCIGLAKRCKEVEPTRRPSICDILAALGKMEDMNCSDQQVDEEVTYLEDMLGIEPLDLHFLVEPTKQISCSVHLTNATNDCFAFIVQTTNPKQYCIQPDRGVVPPRSECSVAIVLSQEPTHNKRCSMEDELSVQSTRVDEGVTAADVSEALFTGKEDRTVDHVSLMVGFDMSPSPPEEQTEDFTFAPLASLYDEEPQLSAAKVSVWTSNQLGRSGRFSKKKLVSILKSWRARLKVSSHKKLETPKHDCEIPEAVEHEEVAAPRCPKGPLPQRDLSPLGEACSRMNMTAIHEILVNRHYRDDDLDPNVPSLEEWTQQSRDMLDDRKRGDFTFRDKDFRAAIDWYTKCMDVGPKKASPTVLVRRSCCHLMCGNLDAALRDAMQAQRQYPDCPTSLYMQAVALSKLGMHSQAMGMLIEASEMEANQKKTRKAA

SEQ ID NO: 177770 - protein, 545 aa, Zea Mays
MGSTHKEEVGVLEEILDGRKEPRKLSLSVLKHITNDFSHERIIGYGGCGEVYKGILQNGSVAVKKIFSNLNVEDKEFDREIQSMMQVKHPNVVRFIGYCSNTEHELMRKEGKYIKVEVRERLLCFEHISNGSLRSHITGVIMLELVTGSKEEPDITNEVTYLEDMLGIEPLDLHFLVEPTKQISCSVHLTNATNDCFAFIVQTTNPKQYCIQPDRGVVPPRSECSVAIVLSQEPTHNKRCSMEDELSVQSTRVDEGVTAADVSEALFTGKEDRTVDHVSLMVGFDMSPSPPEEQTEDFTFAPLASLYDEEPQLSAAKVSVWTSNQLGRSGRFSKKKLVSILKSWRARLKVSSHKKLETPKHDCEIPEAVEHEEVAAPRCPKGPLPQRDLSPLGEACSRMNMTAIHEILVNRHYRDDDLDPNVPSLEEWTQQSRDMLDDRKRGDFTFRDKDFRAAIDWYTKCMDVGPKKASPTVLVRRSCCHLMCGNLDAALRDAMQAQRQYPDCPTSLYMQAVALSKLGMHSQAMGMLIEASEMEANQKKTRKAA

SEQ ID NO: 177771 - protein, 535 aa, Zea Mays
MGSTHKEEVGVLEEILDGRKEPRKLSLSVLKHITNDFSHERIIGYGGCGEVYKGILQNGSVAVKKIFSNLNVEDKEFDREIQSMMQVKHPNVVRFIGYCSNTEHELMRKEGKYIKVEVRERLLCFEHISNGSLRSHITDGLRGLEWHARYKIIKGICEGLHHLHMEKNIIHMDLKPANILVHDQMVPKIADFGLSRLAEVSRTMSNERLLSLGYCAPEYQYHGKMSLKSDIYSLGVIMLELVTGSKEEPDITNVLRRWSHRWKKSGQRTPSFQRHQVSKCIGLAKRCKEVEPTRRPSICDILAALGKMEDMNCSDQQVDEEVTYLEDMLGIEPLDLHFLVEPTKQISCSVHLTNATNDCFAFIVQTTNPKQYCIQPDRGVVPPRSECSVAIVLSQEPTHNKRCSMEDELSVQSTRVDEGVTAADVSEALFTGKEDRTVDHVSLMVGFDMSPSPPEEQTEDFTFAPLASLYDEEPQLSAAKVSVWTSNQLGRSGRFSKKKLVSILKSWRARLKVTLTYHPIRNSRLQSMTVRFLKL

SEQ ID NO: 177772 - protein, 581 aa, Zea Mays
MGSTHKEEVGVLEEILDGRKEPRKLSLSVLKHITNDFSHERIIGYGGCGEVYKGILQNGSVAVKKIFSNLNVEDKEFDREIQSMMQVKHPNVVRFIGYCSNTEHELMRKEGKYIKVEVRERLLCFEHISNGSLRSHITGVIMLELVTGSKEEPDITNVLRRWSHRWKKSGQRTPSFQRHQVSKCIGLAKRCKEVEPTRRPSICDILAALGKMEDMNCSDQQVDEEVTYLEDMLGIEPLDLHFLVEPTKQISCSVHLTNATNDCFAFIVQTTNPKQYCIQPDRGVVPPRSECSVAIVLSQEPTHNKRCSMEDELSVQSTRVDEGVTAADVSEALFTGKEDRTVDHVSLMVGFDMSPSPPEEQTEDFTFAPLASLYDEEPQLSAAKVSVWTSNQLGRSGRFSKKKLVSILKSWRARLKVSSHKKLETPKHDCEIPEAVEHEEVAAPRCPKGPLPQRDLSPLGEACSRMNMTAIHEILVNRHYRDDDLDPNVPSLEEWTQQSRDMLDDRKRGDFTFRDKDFRAAIDCVWMWGQRRRHQQFSFDAVAATSCAATWTPPSAMQCKRSVSIPTAQPHCTCKQWHFQS

SEQ ID NO: 177773 - protein, 482 aa, Zea Mays
MEKNIIHMDLKPANILVHDQMVPKIADFGLSRLAEVSRTMSNERLLSLGYCAPEYQYHGKMSLKSDIYSLGVIMLELVTGSKEEPDITNEVTYLEDMLGIEPLDLHFLVEPTKQISCSVHLTNATNDCFAFIVQTTNPKQYCIQPDRGVVPPRSECSVAIVLSQEPTHNKRCSMEDELSVQSTRVDEGVTAADVSEALFTGKEDRTVDHVSLMVGFDMSPSPPEEQTEDFTFAPLASLYDEEPQLSAAKVSVWTSNQSARLQLGRSGRFSKKKLVSILKSWRARLKVSSHKKLETPKHDCEIPEAVEHEEVAAPRCPKGPLPQRDLSPLGEACSRMNMTAIHEILVNRHYRDDDLDPNVPSLEEWTQQSRDMLDDRKRGDFTFRDKDFRAAIDWYTKCMDVGPKKASPTVLVRRSCCHLMCGNLDAALRDAMQAQRQYPDCPTSLYMQAVALSKLGMHSQAMGMLIEASEMEANQKKTRKAA

SEQ ID NO: 177774 - protein, 612 aa, Zea Mays
MGSTHKEEVGVLEEILDGRKEPRKLSLSVLKHITNDFSHERIIGYGGCGEVYKGILQNGSVAVKKIFSNLNVEDKEFDREIQSMMQVKHPNVVRFIGYCSNTEHELMRKEGKYIKVEVRERLLCFEHISNGSLRSHITGVIMLELVTGSKEEPDITNVLRRWSHRWKKSGQRTPSFQRHQVSKCIGLAKRCKEVEPTRRPSICDILAALGKMEDMNCSDQQVDEEVTYLEDMLGIEPLDLHFLVEPTKQISCSVHLTNATNDCFAFIVQTTNPKQYCIQPDRGVVPPRSECSVAIVLSQEPTHNKRCSMEDELSVQSTRVDEGVTAADVSEALFTGKEDRTVDHVSLMVGFDMSPSPPEEQTEDFTFAPLASLYDEEPQLSAAKVSVWTSNQLGRSGRFSKKKLVSILKSWRARLKVSSHKKLETPKHDCEIPEAVEHEEVAAPRCPKGPLPQRDLSPLGEACSRMNMTAIHEILVNRHYRDDDLDPNVPSLEEWTQQSRDMLDDRKRGDFTFRDKDFRAAIDWYTKCMDVGPKKASPTVLVRRSCCHLMCGNLDAALRDAMQAQRQYPDCPTSLYMQAVALSKLGMHSQAMGMLIEASEMEANQKKTRKAA

SEQ ID NO: 177775 - protein, 674 aa, Zea Mays
MGSTHKEEVGVLEEILDGRKEPRKLSLSVLKHITNDFSHERIIGYGGCGEVYKGILQNGSVAVKKIFSNLNVEDKEFDREIQSMMQVKHPNVVRFIGYCSNTEHELMRKEGKYIKVEVRERLLCFEHISNGSLRSHITDGLRGLEWHARYKIIKGICEGLHHLHMEKNIIHMDLKPANILVHDQMVPKIADFGLSRLAEVSRTMSNERLLSLGYCAPEYQYHGKMSLKSDIYSLGVIMLELVTGSKEEPDITNVLRRWSHRWKKSGQRTPSFQRHQVSKCIGLAKRCKEVEPTRRPSICDILAALGKMEDMNCSDQQVDEEVTYLEDMLGIEPLDLHFLVEPTKQISCSVHLTNATNDCFAFIVQTTNPKQYCIQPDRGVVPPRSECSVAIVLSQEPTHNKRCSMEDELSVQSTRVDEGVTAADVSEALFTGKEDRTVDHVSLMVGFDMSPSPPEEQTEDFTFAPLASLYDEEPQLSAAKSARLQLGRSGRFSKKKLVSILKSWRARLKVSSHKKLETPKHDCEIPEAVEHEEVAAPRCPKGPLPQRDLSPLGEACSRMNMTAIHEILVNRHYRDDDLDPNVPSLEEWTQQSRDMLDDRKRGDFTFRDKDFRAAIDCVWMWGQRRRHQQFSFDAVAATSCAATWTPPSAMQCKRSVSIPTAQPHCTCKQWHFQS

SEQ ID NO: 177776 - protein, 705 aa, Zea Mays
MGSTHKEEVGVLEEILDGRKEPRKLSLSVLKHITNDFSHERIIGYGGCGEVYKGILQNGSVAVKKIFSNLNVEDKEFDREIQSMMQVKHPNVVRFIGYCSNTEHELMRKEGKYIKVEVRERLLCFEHISNGSLRSHITDGLRGLEWHARYKIIKGICEGLHHLHMEKNIIHMDLKPANILVHDQMVPKIADFGLSRLAEVSRTMSNERLLSLGYCAPEYQYHGKMSLKSDIYSLGVIMLELVTGSKEEPDITNVLRRWSHRWKKSGQRTPSFQRHQVSKCIGLAKRCKEVEPTRRPSICDILAALGKMEDMNCSDQQVDEEVTYLEDMLGIEPLDLHFLVEPTKQISCSVHLTNATNDCFAFIVQTTNPKQYCIQPDRGVVPPRSECSVAIVLSQEPTHNKRCSMEDELSVQSTRVDEGVTAADVSEALFTGKEDRTVDHVSLMVGFDMSPSPPEEQTEDFTFAPLASLYDEEPQLSAAKSARLQLGRSGRFSKKKLVSILKSWRARLKVSSHKKLETPKHDCEIPEAVEHEEVAAPRCPKGPLPQRDLSPLGEACSRMNMTAIHEILVNRHYRDDDLDPNVPSLEEWTQQSRDMLDDRKRGDFTFRDKDFRAAIDWYTKCMDVGPKKASPTVLVRRSCCHLMCGNLDAALRDAMQAQRQYPDCPTSLYMQAVALSKLGMHSQAMGMLIEASEMEANQKKTRKAA

SEQ ID NO: 177777 - protein, 413 aa, Zea Mays
MNGFYPCVIMLELVTGSKEEPDITNEVTYLEDMLGIEPLDLHFLVEPTKQISCSVHLTNATNDCFAFIVQTTNPKQYCIQPDRGVVPPRSECSVAIVLSQEPTHNKRCSMEDELSVQSTRVDEGVTAADVSEALFTGKEDRTVDHVSLMVGFDMSPSPPEEQTEDFTFAPLASLYDEEPQLSAAKVSVWTSNQLGRSGRFSKKKLVSILKSWRARLKVSSHKKLETPKHDCEIPEAVEHEEVAAPRCPKGPLPQRDLSPLGEACSRMNMTAIHEILVNRHYRDDDLDPNVPSLEEWTQQSRDMLDDRKRGDFTFRDKDFRAAIDWYTKCMDVGPKKASPTVLVRRSCCHLMCGNLDAALRDAMQAQRQYPDCPTSLYMQAVALSKLGMHSQAMGMLIEASEMEANQKKTRKAA

SEQ ID NO: 177778 - protein, 268 aa, Zea Mays
MDEEEEEDEKEEQDVQYCVAEMTKPGQRLIIARGGKGGLGNAFVMKEMRPSKANRQEKIARLSTGQPGTESILILELKSIADVGLVGLPNAGKSTLLSALSRAQPEIADYEFTTLRPNIGSLTYEDYFSVKVADIPGLIKGAHENRGLGHAFLRHIERTKVIAYVLDLAATLNGRKGIPPWEQLHDLVTELEHYQKGMTRRPSLIVANKIDEEGAEEMYEELKRRVQGVPIFPVCAILQEGVPDLRVGLRNLMDDSDPQGVDFEENDC

SEQ ID NO: 177779 - protein, 550 aa, Zea Mays
MWRRQQTLLRRLPPLRVVAQAPASWPACRLGRFCGSVPEKRKGKAAPLQVSYFHIRFPESISPSDCLLMGLVQARGMVDRFRMRAKGGDGGNGCVSLRRSRSNRQGMPDGGSGGKGGDVILECSRSIWDFSGLQHHMRGGRGGNGVSKNQIGTRGTVIHLVEGEQPSLTVNKPTRALDPWDIPSAEEHSSDLDQIVNIVAEGFDGGLSHRHIAPKHNTDGNDTVKGSSSHSEDPKYFHTCSKLQFSNSNRDVRIYSCQEGTDEKDQTESEDEEFWEDEDEFDMDEEEEEDEKEEQDVQYCVAEMTKPGQRLIIARGGKGGLGNAFVMKEMRPSKANRQEKIARLSTGQPGTESILILELKSIADVGLVGLPNAGKSTLLSALSRAQPEIADYEFTTLRPNIGSLTYEDYFSVKVADIPGLIKGAHENRGLGHAFLRHIERTKVIAYVLDLAATLNGRKGIPPWEQLHDLVTELEHYQKGMTRRPSLIVANKIDEEGAEEMYEELKRRVQGVPIFPVCAILQEGVPDLRVGLRNLMDDSDPQGVDFEENDC

SEQ ID NO: 177780 - protein, 76 aa, Zea Mays
MDACILYVSIWTAALPWVTTFIAVAAILSREVVLLANFAAVKWRAVFTIVWKAEWWPQPGDDAACQKNVAPPVIYI

SEQ ID NO: 177781 - protein, 99 aa, Zea Mays
MHFIHSLYILMMIDMYIDQVAARMDACILYVSIWTAALPWVTTFIAVAAILSREVVLLANFAAVKWRAVFTIVWKAEWWPQPGDDAACQKNVAPPVIYI

SEQ ID NO: 177782 - protein, 112 aa, Zea Mays
MYMHPPRHSALSGTHLPLHYWMDRHGQTTNKLIHQNMKSQQHVVLAALIVVVVATILVQTTPPPRGAEAAIIPGNVSAPNAVVFGVVPCSTGSSINVATAPPFPSRRRMMGS

SEQ ID NO: 177783 - protein, 1179 aa, Zea Mays
MSIHICKNGYMPGYEVWVHHGWVTRRSRSTGVGLLMAVRGSTYMIRQYIKEPGFNVANEMASINQEIRQIGRMMVISGNILEPPEWILQAQDLACDVQDFTDIYTWLQSKSRRRALAHIGYIAQLKDRISSLREWQQRGGSSSSSSQQERAAALSFSRRSCGPCAPEDVLVGIDQPRKELSDLIFEREDVVHIVQQKPRVVSVVGYSGIGKTALARAVYYDRSVRSAFDDVAWVVASECSHGCDLVSKICQQVKDEQAGNGAVVVPDCYRLKEIMRDKRFLIVIDDLHGAGMWNDIKGVFSETHSGSRIIVTTSIQSVAAACTPEPRYIYRMPSLGNLDSEKLLWMRVGRHASRTPALEHALGNDTLKKCGGLPLALISVANHLCLGKALFEEMDRVLAKCYDSLPDNAHRMCLLSLSTFPQGHVMKRKRLIRRWIAEGLAVVGDCELSAEQVAGNIFDVLIDRNVTEPVLTAGHGSRSKVKACLVLGVIKDFINKTAVSNETVAIIQNDELLLPNRMLVAHRPVRRLLVHGGTTKKSEAVAKAIGLDQVRSLTICNAVPFDFQGCWLLRVLDLEACQGIDKSILGSICKLVFLKYLSLRGTDVYGIPKKVKKLQCLETLDLRDTRVEELPIQVLMLPRLAHLFGKFELPPQLKHGHRTARRRRSRLQAFFSQRSRLQTLSGFVMVDDSNSFEHMMITIKSLRKVKVWCKNSISSHQERHLASSLQQRLVAGNSNPLESLSIDFGNESINFLNDVGAISALIGSMKLQGRLTSLPSFMTSYDTTLSQLQLSSTGLGIEALSLLQILRRLVSLKLAQDGDGFWGDCFAVKKDGFPSLLRLCIQARELPQLHIHEGGMSSLTSLELLCPMFASRGQSDSDSDSDSDNLSPVAFRYAYAETYSEKRSKQVLSVEKPKAVDPGISFKEPSSETRSEGTEIQEIDSPKTSKEAGPSIGFKEPSSETRSEGTEIQEIDSPKTSKEAGPSIGFKDIILPENTFRRNFSKQVKSRFDLKQHFKGMEYLQCLNELVLHRSVSDEVLDAWTKRASSHINRPKVTRQCTRAALSIGRGPGTAKHEKEGQHRSQLMKNRGSETAIHEEVAEQHSSVETSREEAGLFQEQTSDTGHKEEEEEYMSEDWALSQPCDMLIGNRMTVRCLGWPDSWRLRSGMISSPMLICRPLGP

SEQ ID NO: 177784 - protein, 257 aa, Zea Mays
MAPAARTRVCLVALVVALAFLFLLDGGVHAASSAAEQRRRQVRSLLRRLNKPAVATIESPDGDTIDCVDISKQPAFDHPSLKNHTIQMMPSCHPQQGGLYNKSNDVAHSALTQTWHQNGKCPENTVPIRRTREEDVLDIVQRYGRKKWPSSWSNDPNRYDDDVPDAASVLRGHQHAIASAPGDDNYYGTQATFNLWEPTVERNQGFSLAQLWITSGSYANNDLNTIEAGWQVCTRIAIQDSSSTGLGMRTTKQDVTT

SEQ ID NO: 177785 - protein, 106 aa, Zea Mays
MVDHRSNAPTEGRGAREGSGTAGGGRPFLRKCDLTEHLKQLQCRTLIFVSENSQLNSETVHLTSKLDMRYCALVEATNNHLRVYHYTSFFATIMSTYGTIYAYYKG

SEQ ID NO: 177786 - protein, 505 aa, Zea Mays
MSDDPTNGGGGDRVEDVVRAEGETQPRDDGLSKSKDRDKDREKDKDRDRRRDRDRDRGRDRDRDRDRDRDRDRDRDKDRQSRHHRERREQRDRPDDHRVRDSERRRERDKDGHRRHRSRSRSRGRDRRSRSRSRSKRVSGFDAPPPQAMGSTFPVIPTPSQLPGSSLPNIGGMFPNMLPFGVAGQFNPLVIQPQAMTQQATRHARRVYVGGLPPSANEQTVAIYFNQVMAAIGGNTAGPGDAVLNVYINHDKKFAFVEMRSVEEASNAMALDGIMFEGAPVKVRRPTDYNPSLAAALGPSQPSPNLNLAAVGLTAGSNGGLEGPDRIFVGGLPYYFTEAQDLTVTDIACAALNGIKMGDKTLTVRRANQGASQPRPEQESILLQAQQQVQLQKLVYQVGALPTKVVCLTQVVTADELKDDEEYEDIMEDMRLEAGKYGNLVKVIIPRPDPSGQPVVGVGKVFLEYADIDGAAKAKTALHGRKFGGNPVVAVCYAEDKFANGEYDG

SEQ ID NO: 177787 - protein, 531 aa, Zea Mays
MAKTSEVIAGIALGIPLMNGVLVPIITILVNRFFSILLTDTSRKLSNLENLTIPSLKETLVQVEEQRMVRAPKDAQSESDLRTLDGLTTELKAALYEAEEILDLVDYYRIKKRIADDAEENGRSRWVQQTLRAFRTSMARCQGSSWVRHLHDCVGLCVACCKGTLFRRSGEQLPISHASSVSMAQRLRGWYRHLVHHIPSSSRSVMQWLRHWFQHLVFNFAKLCESGTQTLPGLPAADVIATNQDWSYKVIGINSNQNDGTATASFLLTIARHNLTKRIEHIENVLNDLKKSHLLNQQSTISSSSNKEKSSRHEDIQYLYRSIERKVIGRDKEREKLISMLRRGPGPDTPSSSSSKHYSVIGIYGIAGSGKSTLAQYVCDYEKAEGQHFDPVMFIHVSQTFRVDKIFRDMLREIRKDRQSDSNSVKCLHDELKEKLRGKCFLLVLDDLWVSRENQEERAILLTVLDAGQSGSRVLVTAQKKDVAAALGAEEQIPIPDMEEEQYFSMFMHYALEGINRLVLKGIEQTSSSVM

SEQ ID NO: 177788 - protein, 521 aa, Zea Mays
MAKTSEVIAGIALGIPLMNGVLVPIITILVNRFFSILLTDTSRKLSNLENLTIPSLKETLVQVEEQRMVRAPKDAQSESDLRTLDGLTTELKAALYEAEEILDLVDYYRIKKRIADDAEENGRSRWVQQTLRAFRTSMARCQGSSWVRHLHDCVGLCVACCKGTLFRRSGEQLPISHASSVSMAQRLRGWYRHLVHHIPSSSRSVMQWLRHWFQHLVFNFAKLCESGTQTLPGLPAADVIATNQDWSYKVIGINSNQNDGTATASFLLTIARHNLTKRIEHIENVLNDLKKSHLLNQQSTISSSSNKEKSSRHEDIQYLYRSIERKVIGRDKEREKLISMLRRGPGPDTPSSSSSKHYSVIGIYGIAGSGKSTLAQYVCDYEKAEGQHFDPVMFIHVSQTFRVDKIFRDMLREIRKDRQSDSNSVKCLHDELKEKLRGKCFLLVLDDLWVSRENQEERAILLTVLDAGQSGSRVLVTAQKKDVAAALGAEEQIPIPDMEEEQYFSMFMHYALEGTFFGSVA

SEQ ID NO: 177789 - protein, 526 aa, Zea Mays
MAKTSEVIAGIALGIPLMNGVLVPIITILVNRFFSILLTDTSRKLSNLENLTIPSLKETLVQVEEQRMVRAPKDAQSESDLRTLDGLTTELKAALYEAEEILDLVDYYRIKKRIADDAEENGRSRWVQQTLRAFRTSMARCQGSSWVRHLHDCVGLCVACCKGTLFRRSGEQLPISHASSVSMAQRLRGWYRHLVHHIPSSSRSVMQWLRHWFQHLVFNFAKLCESGTQTLPGLPAADVIATNQDWSYKVIGINSNQNDGTATASFLLTIARHNLTKRIEHIENVLNDLKKSHLLNQQSTISSSSNKEKSSRHEDIQYLYRSIERKVIGRDKEREKLISMLRRGPGPDTPSSSSSKHYSVIGIYGIAGSGKSTLAQYVCDYEKAEGQHFDPVMFIHVSQTFRVDKIFRDMLREIRKDRQSDSNSVKCLHDELKEKLRGKCFLLVLDDLWVSRENQEERAILLTVLDAGQSGSRVLVTAQKKDVAAALGAEEQIPIPDMEEEQYFSMFMHYALEALRRRWDSQTLAG

SEQ ID NO: 177790 - protein, 534 aa, Zea Mays
MAKTSEVIAGIALGIPLMNGVLVPIITILVNRFFSILLTDTSRKLSNLENLTIPSLKETLVQVEEQRMVRAPKDAQSESDLRTLDGLTTELKAALYEAEEILDLVDYYRIKKRIADDAEENGRSRWVQQTLRAFRTSMARCQGSSWVRHLHDCVGLCVACCKGTLFRRSGEQLPISHASSVSMAQRLRGWYRHLVHHIPSSSRSVMQWLRHWFQHLVFNFAKLCESGTQTLPGLPAADVIATNQDWSYKVIGINSNQNDGTATASFLLTIARHNLTKRIEHIENVLNDLKKSHLLNQQSTISSSSNKEKSSRHEDIQYLYRSIERKVIGRDKEREKLISMLRRGPGPDTPSSSSSKHYSVIGIYGIAGSGKSTLAQYVCDYEKAEGQHFDPVMFIHVSQTFRVDKIFRDMLREIRKDRQSDSNSVKCLHDELKEKLRGKCFLLVLDDLWVSRENQEERAILLTVLDAGQSGSRVLVTAQKKDVAAALGAEEQIPIPDMEEEQYFSMFMHYALEANLALDLLPIGDGLTPAATAG

SEQ ID NO: 177791 - protein, 532 aa, Zea Mays
MAKTSEVIAGIALGIPLMNGVLVPIITILVNRFFSILLTDTSRKLSNLENLTIPSLKETLVQVEEQRMVRAPKDAQSESDLRTLDGLTTELKAALYEAEEILDLVDYYRIKKRIADDAEENGRSRWVQQTLRAFRTSMARCQGSSWVRHLHDCVGLCVACCKGTLFRRSGEQLPISHASSVSMAQRLRGWYRHLVHHIPSSSRSVMQWLRHWFQHLVFNFAKLCESGTQTLPGLPAADVIATNQDWSYKVIGINSNQNDGTATASFLLTIARHNLTKRIEHIENVLNDLKKSHLLNQQSTISSSSNKEKSSRHEDIQYLYRSIERKVIGRDKEREKLISMLRRGPGPDTPSSSSSKHYSVIGIYGIAGSGKSTLAQYVCDYEKAEGQHFDPVMFIHVSQTFRVDKIFRDMLREIRKDRQSDSNSVKCLHDELKEKLRGKCFLLVLDDLWVSRENQEERAILLTVLDAGQSGSRVLVTAQKKDVAAALGAEEQIPIPDMEEEQYFSMFMHYALEGFCFTVYIHLQPTIFLPNG

SEQ ID NO: 177792 - protein, 570 aa, Zea Mays
MAKTSEVIAGIALGIPLMNGVLVPIITILVNRFFSILLTDTSRKLSNLENLTIPSLKETLVQVEEQRMVRAPKDAQSESDLRTLDGLTTELKAALYEAEEILDLVDYYRIKKRIADDAEENGRSRWVQQTLRAFRTSMARCQGSSWVRHLHDCVGLCVACCKGTLFRRSGEQLPISHASSVSMAQRLRGWYRHLVHHIPSSSRSVMQWLRHWFQHLVFNFAKLCESGTQTLPGLPAADVIATNQDWSYKVIGINSNQNDGTATASFLLTIARHNLTKRIEHIENVLNDLKKSHLLNQQSTISSSSNKEKSSRHEDIQYLYRSIERKVIGRDKEREKLISMLRRGPGPDTPSSSSSKHYSVIGIYGIAGSGKSTLAQYVCDYEKAEGQHFDPVMFIHVSQTFRVDKIFRDMLREIRKDRQSDSNSVKCLHDELKEKLRGKCFLLVLDDLWVSRENQEERAILLTVLDAGQSGSRVLVTAQKKDVAAALGAEEQIPIPDMEEEQYFSMFMHYALEGKRVGFFFERERQKICHSNILEEVKINFTNRHSPIKLNNKDLDRTLTQKENDPKNPP

SEQ ID NO: 177793 - protein, 660 aa, Zea Mays
MGTYLVNSHNKLGKIPVFLGVTSCVEFVIQILKKAAKLASEAEARRREAWAGGDVDDHATNQNSESISVQVEHGGDVDDHAPPSAEPAENSVSEISSPVVESHPQSLAEGRTRRQIVRPQRLIQECNVAFALAVAEEVDNVQEPLNYSEAILCTDSEKWMGAMHEEMESLDKNGTWELARLPSGKKAIKCKWIFKRKEGMTPKEPPRFKARLVAKGFSQIPGIDYSDVYSPVVKHSSIRTFLSLVAVHDYELEQLDVKTAFLHGDLEEDIYMDQPEGFIVPGKEDYVCRLKKSLYGLKQSPRQWYKRFDSFMLSKGFQRSQYDSCVYLKFVNGSPTYLLLYVDDMLIAAKSMKEITALKAQLSSEFDMKDLGAAKKILGIEIVRDRKSGLLYLSQKNYIEKVLRRFNMQNTKPVSTPLAPHFKLSAKQCAETDAELEYMSKVPYSSAVGSLMYAMVCSRPDLSHAMSVVARYMSNPGKEHWKAVQWIFRYLRGSSSACLCFGKSGDGLIGYVDSDYGGDLDRRRSLSGYVFTIGDCAVSWKARLQDTVALSTTEAEYMAIAEVTKEALWLKGIYSELCGIKSCITIYCDSQSAIHLTKDQMITEKSKHIDIRYHFIRDIIDKGLVKVCKISTDNNPADMMTKHVSVAKFELCSNLVGIIN

SEQ ID NO: 177794 - protein, 129 aa, Zea Mays
MNYLHHCSPPIVHRDLKSSNLLVDKNWTVKVADFGLSRLKLETFLRTKTGKGTPQWMAPEVLCNEPSDEKSDVYSYGVILWELVTQKIPWDNLNTMQVIGAVGFMDQRLDIPSDTDPKWASMIESCWDR

SEQ ID NO: 177795 - protein, 300 aa, Zea Mays
MLAGLSCTQGNHKNLFTLVYFFCKNQKYNIDNPERYVLLIVFMYALGYTIHYVVNFQNTYPSYAQVSLMKKLRHPNIILFMGAVASPERLCIVTEFLPRGSLFRLLQKNTAKLDPRRRVHMAIDIARGMNYLHHCSPPIVHRDLKSSNLLVDKNWTVKVADFGLSRLKLETFLRTKTGKGTPQWMAPEVLCNEPSDEKSDVYSYGVILWELVTQKIPWDNLNTMQVIGAVGFMDQRLDIPSDTDPKWASMIESCWDSDPQKRPSFLEVLDRLRDLQKQYSLQAQMQRNLSADALLKGAVK

SEQ ID NO: 177796 - protein, 662 aa, Zea Mays
MAAEELLRKLRELEEGQAELKREISKLVPEQQQQHHHHHYHSSRRPPQPSPVRRALPAAPSLPSRLQRVGRVGLTDRQHIRALHALGQAVHIIAPGGKLIYWNRYAEQMYGYSTSEAVGHDAVELLVHPDDAEAANNIIGNIFMGKCWRGKFPVKKKSGERFFIVANNTPLYDDDGSLVGLICLSVDTKTLEDIIGPSTSMKSHTHPVKPRFQVNNRPKCNLLNKSSIESEQTVQSSIASKITTLTGQNCGGSECPYSEDDSKEELTSSGNTPRGDVLHGGIVKGDNFPGKSSKTSSEDSGDGNERLCKISSKTEDLLAKKGISWPWKGHEHSGPDKGHMNPLQFHDKQDNDQIHLVGPESIIIPDYQDSDSTQESRYEVTGNWWSFNNDSFNSLGSSLSSNSSAIERVDLEADCLDYEILWEDLVLGEQVGQGSCGTVYHAQWYGSDVAVKLFSKQEYSDEMIDTFRQEVSLMKKLRHPNIILFMGAVASPERLCIVTEFLPRGSLFRLLQKNTAKLDPRRRVHMAIDIARGMNYLHHCSPPIVHRDLKSSNLLVDKNWTVKVADFGLSRLKLETFLRTKTGKGTPQWMAPEVLCNEPSDEKSDVYSYGVILWELVTQKIPWDNLNTMQVIGAVGFMDQRLDIPSDTDPKWASMIESCWDR

SEQ ID NO: 177797 - protein, 695 aa, Zea Mays
MAAEELLRKLRELEEGQAELKREISKLVPEQQQQHHHHHYHSSRRPPQPSPVRRALPAAPSLPSRLQRVGRVGLTDRQHIRALHALGQAVHIIAPGGKLIYWNRYAEQMYGYSTSEAVGHDAVELLVHPDDAEAANNIIGNIFMGKCWRGKFPVKKKSGERFFIVANNTPLYDDDGSLVGLICLSVDTKTLEDIIGPSTSMKSHTHPVKPRFQVNNRPKCNLLNKSSIESEQTVQSSIASKITTLATKVTNRVRSRMKTGQNCGGSECPYSEDDSKEELTSSGNTPRGDVLHGGIVKGDNFPGKSSKTSSEDSGDGNERLCKISSKTEDLLAKKGISWPWKGHEHSGPDKGHMNPLQFHDKQDNDQIHLVGPESIIIPDYQDSDSTQESRYEVTGNWWSFNNDSFNSLGSSLSSNSSAIERVDLEADCLDYEILWEDLVLGEQVGQGSCGTVYHAQWYGSVSLMKKLRHPNIILFMGAVASPERLCIVTEFLPRGSLFRLLQKNTAKLDPRRRVHMAIDIARGMNYLHHCSPPIVHRDLKSSNLLVDKNWTVKVADFGLSRLKLETFLRTKTGKGTPQWMAPEVLCNEPSDEKSDVYSYGVILWELVTQKIPWDNLNTMQVIGAVGFMDQRLDIPSDTDPKWASMIESCWDSDPQKRPSFLEVLDRLRDLQKQYSLQAQMQRNLSADALLKGAVK

SEQ ID NO: 177798 - protein, 462 aa, Zea Mays
MKTGQNCGGSECPYSEDDSKEELTSSGNTPRGDVLHGGIVKGDNFPGKSSKTSSEDSGDGNERLCKISSKTEDLLAKKGISWPWKGHEHSGPDKGHMNPLQFHDKQDNDQIHLVGPESIIIPDYQDSDSTQESRYEVTGNWWSFNNDSFNSLGSSLSSNSSAIERVDLEADCLDYEILWEDLVLGEQVGQGSCGTVYHAQWYGSDVAVKLFSKQEYSDEMIDTFRQEVSLMKKLRHPNIILFMGAVASPERLCIVTEFLPRGSLFRLLQKNTAKLDPRRRVHMAIDIARGMNYLHHCSPPIVHRDLKSSNLLVDKNWTVKVADFGLSRLKLETFLRTKTGKGTPQWMAPEVLCNEPSDEKSDVYSYGVILWELVTQKIPWDNLNTMQVIGAVGFMDQRLDIPSDTDPKWASMIESCWDSDPQKRPSFLEVLDRLRDLQKQYSLQAQMQRNLSADALLKGAVK

SEQ ID NO: 177799 - protein, 392 aa, Zea Mays
MALWNGIGQVASIAQLAGVDAYGLISMIVEAAKTVKRNRETCQLLARRARMIGDLLHQLERTQLMQHMETRNPVEHLEETLRHAYVLITSCRNSSYLYNCCMGGKQADRLREVQNEITFYLQLFPLVSFVDNTRTWERLLSRACPLCTTENMDELHAAAHHVEHEDGSEAIKATKFENLGSHPTLKPDIDQMEGQVMRMGGLVNLIGGTKGAELSCFTFSHILAATDNFSEKNLVGKGGFGYVYKGNLINGLNVAIKRFDACSSYQGPHEFRTEIDAIPNLRHKNIIGLLGYCVQGEESILVYEYMSNKCLASVIAGKFLGLLNWSKRLQIIKGIADGLAFLHGHSQMCIVHRDIKPSNILLDHEMNAKITDFGLALMLAPKSTAEVPVLGT

SEQ ID NO: 177800 - protein, 515 aa, Zea Mays
MALWNGIGQVASIAQLAGVDAYGLISMIVEAAKTVKRNRETCQLLARRARMIGDLLHQLERTQLMQHMETRNPVEHLEETLRHAYVLITSCRNSSYLYNCCMGGKQADRLREVQNEITFYLQLFPLVSFVDNTRTWERLLSRACPLCTTENMDELHAAAHHVEHEDGSEAIKATKFENLGSHPTLKPDIDQMEGQVMRMGGLVNLIGGTKGAELSCFTFSHILAATDNFSEKNLVGKGGFGYVYKGNLINGLNVAIKRFDACSSYQGPHEFRTEIDAIPNLRHKNIIGLLGYCVQGEESILVYEYMSNKCLASVIADETKRGLLNWSKRLQIIKGIADGLAFLHGHSQMCIVHRDIKPSNILLDHEMNAKITDFGLALMLAPKSTAEVPVLGTYGYADPEYIVTGKISEKADIYGFGIVLFEIISGRSIHSYMKAEGTRELPYPAYVSICLAAAHKYNPKTLHKLVDPLLRVDEHERAQIMECVRVAQLCVDHRAKHRPVMSEVVTMLGMAASKG

SEQ ID NO: 177801 - protein, 319 aa, Zea Mays
MALWNGIGQVASIAQLAGVDAYGLISMIVEAAKTVKRNRETCQLLARRARMIGDLLHQLERTQLMQHMETRNPVEHLEETLRHAYVLITSCRNSSYLYNCCMGGKQADRLREVQNEITFYLQLFPLVSFVDNTRTWERLLSRACPLCTTENMDELHAAAHHVEHEDGSEAIKATKFENLGSHPTLKPDIDQMEGQVMRMGGLVNLIGGTKGAELSCFTFSHILAATDNFSEKNLVGKGGFGYVYKGNLINGLNVAIKRFDACSSYQGPHEFRTEIDAIPNLRHKNIIGLLGYCVQGEESILVYEYMSNKCLASVIAGGC

SEQ ID NO: 177802 - protein, 261 aa, Zea Mays
MRNLRPRPHHTPLPSLHLLPPTPVLLERRESLARVRRTLFHVSRRPPSPPSAASTLATPRGRSSRAATALTPCVDLGPSFGANNRRRSGATFPAPPLLSRMLSPTTRPAARTDERSGTSPEKPLLRRWVLRAPSRGSTWLGLQSPSAMRSRTPSPTTLCTGSGTMSAGGEAEMKELPEELACLACETSAQVVAAGPAASAPLMCRMKKGEPIKLVFTGKKKGITPVASFSALDKEGEDPTPSAAAEPKPSNDPAEDDISTL

SEQ ID NO: 177803 - protein, 206 aa, Zea Mays
MRNLRPRPHHTPLPSLHLLPPTPVLLERRESLARVRRTLFHVSRRPPSPPSAASTLATPRGRSSRAATALTPCVDLGPSFGANNRRRSGATFPAPPLLSRMLSPTTRPAARTDERSGTSPEKPLLRRWVLRAPSRGSTWLGLQSPSAMRSRTPSPTTLCTGSGTMSAGGEAEMKELPEELACLACETSAQVVAAGPAASAPLMCRM

SEQ ID NO: 177804 - protein, 64 aa, Zea Mays
MLYTKHIKKLKRLFTYPPNIISYFYLVVSLMQILVEEDEAPVSHQKKLTPPQKKSRKQRQVDLV

SEQ ID NO: 177805 - protein, 60 aa, Zea Mays
MRLLKMVSSMNEVAQDDSSGGRRSASLPPKETDTTTKKIKKTETSRSCIAFIEKLLIHMS

SEQ ID NO: 177806 - protein, 119 aa, Zea Mays
MGSQHSDRVDGSSEARGRSAARSAAAAISWQRRTMTTLLPRSGSWQRQRTAPPSSAIRPLLPASRSEVVSGRAGGRVDHRGLVRWACHRRLAVEEATMSITLSQIACPNTDGCHGLMHG

SEQ ID NO: 177807 - protein, 160 aa, Zea Mays
MGSQHSDRVDGSSVGLLLEQHQLRPPAAASRAPPQITSKATRPLLATAKNDVVDKGSSAAASFSRSSSSSSSRAPAPTVSPTTACPFLHRCFFCHGELADGRDIYMYRGERAFCSEECRCRHILAEEDDDDTTTSVGVVAAAADCSTQLRHQALAASFTF

SEQ ID NO: 177808 - protein, 223 aa, Zea Mays
MDHLDRWRGVQWDLNTAIELMDHQACSWSSTSCAHQQQHQEHHLKSQARPLVPSSPPPRTTSSTRAAPPPLPSAALPLLLLPVHRRRRCRRRPPALSCTGASSATGSSPTAGTYTCTEARGRSAARSAAAAISWQRRTMTTLLPRSGSWQRQRTAPPSSAIRPLLPASRSEVVSGRAGGRVDHRGLVRWACHRRLAVEEATMSITLSQIACPNTDGCHGLMHG

SEQ ID NO: 177809 - protein, 66 aa, Zea Mays
MAQPQPSHLAVGHSKLHACQTHTHTHTHTHAMFIFLTLFTSYTKAVRSCKLSIGSFYYLSKVLGVS

SEQ ID NO: 177810 - protein, 491 aa, Zea Mays
MHTDDVFLASLLPDREDRGGQTQKRSLTTAAAMAASCGGRVVVFPFPFQGHFNPVMRLARALHARGVGITVFHTAGARAPDPADYPADYRFVPVPVEVAPELMASEDIAAIVTALNAACEAPFRDRLSALLSAADGEAGEAGGRVRCVLTDVSWDAVLSAARGLGVPALGVMTASAATFRVYMAYRTLVDKGYLPVREERKDDAVAELPPYRVKDLLRHETCDLEEFADLLGRVVAAARLSSGLIFHTFPFIEAGTLGEIRDDMSVPVYAVAPLNKLVPAATASLHGEVQADRGCLRWLDAQRARSVLYVSFGSMAAMDPHEFVELAWGLADAGRPFVWVVRPNLIRGFESGALPDGVEDRVRGRGVVVSWAPQEEVLAHPAVGGFFTHCGWNSTVEAVSEGVPMICHPRHGDQYGNARYVCHVWKVGTEVAGDQLERGEIKAAIDRLMGGSEEGEGIRKRMNELKIAADKGIDESAGSDLTNLVHLINSY

SEQ ID NO: 177811 - protein, 63 aa, Zea Mays
MKKTDKMNSPHRNFFPPCSPQGTTHTHPCISASLTAAELLVENIHGLCSSTLQLLQYSQFNAF

SEQ ID NO: 177812 - protein, 106 aa, Zea Mays
MKLMWLLIRKILSLKQQDLVELENVNKVETAVDLIHKPTGIRIFCTEERSQLQNRERAFQLLRAKLYEIKLREQQESLRNQRKLQVRCQFFLKRSYLPKVVAVESN

SEQ ID NO: 177813 - protein, 189 aa, Zea Mays
MEAFLAGLFRAPPRAVPAPRGTPLPSLPLFYGRRRRRPSSSVVCMAEPYLIAKLDSAEKAWKEMSVRLADPDIVSDPSEYQKIAQSVSELDQVVTTYRQFKDCERQLEATKALEKENEGDPDMLEMIASELEALSNQLAELEEKMKFLLLPSDPLDSRNILLEVRAGAGGDEAGIWAGDLVGSHVPEIL

SEQ ID NO: 177814 - protein, 366 aa, Zea Mays
MEAFLAGLFRAPPRAVPAPRGTPLPSLPLFYGRRRRRPSSSVVCMAEPYLIAKLDSAEKAWKEMSVRLADPDIVSDPSEYQKIAQSVSELDQVVTTYRQFKDCERQLEATKALEKENEGDPDMLEMIASELEALSNQLAELEEKMKFLLLPSDPLDSRNILLEVRAGAGGDEAGIWAGDLVRMYQRYCERNNWKFKPVSCSEAEMGGYKTYVMEVKGKQVYSKLKFESGVHRVQRVPLTEAMGRVHTSTATVAIMPEADEVDVVIDPKDIELKTARSGGAGGQNVNKVETAVDLIHKPTGIRIFCTEERSQLQNRERAFQLLRAKLYEIKLREQQESLRNQRKLQVRCQFFLKRSYLPKVVAVESN

SEQ ID NO: 177815 - protein, 503 aa, Zea Mays
MEAKGDIPVSRSGHTVIRAGPVLILFGGEDAKGKKLHDLHMFDLKSLTWLPLNYKGAGPSPRSNHVAALYDDRVLLIFGGQSKSKTLNDIHALDFETMVWSRVKTHGHHPSPRAGCCGALCGTKWYIAGGGSKKKRHPETWVFDVLESRWSVCVVPPSSSITTKKGFSMVPLYYRDKIVLVAFGGNKKEPSDKVEVLVVLQNEHCFSWRSAPEVEPLLYDESPPGSRELADHLSSCAPPYPTSSAARSGLAATAENSCGRKPLPDSLLRTSNLGGSSLRRQFRQEEECSSLAQKLQKPIDDDRYKDAADECSEHQPPSATNPKPRNDARRSSPEVVVDAKARRLLGRSSSDMNNHQDARVAALVRRNVALEEQLSAALASKDEAEKNLSLVIDSKDGLEKRLAEKDREVEALREKATGLELAQEEANSLSNTVHADNVRLEREVAFLKAVMDETQKELHSTRGVLAGERARAFQLQVEVFHLKQRLQTMEGRSPAAPRKPQNA

SEQ ID NO: 177816 - protein, 335 aa, Zea Mays
MVPLYYRDKIVLVAFGGNKKEPSDKVEVLVVLQNEHCFSWRSAPEVEPLLYDESPPGSRELADHLSSCAPPYPTSSAARSGLAATAENSCGRKPLPDSLLRTSNLGGSSLRRQFRQEEECSSLAQKLQKPIDDDRYKDAADECSEHQPPSATNPKPRNDARRSSPEVVVDAKARRLLGRSSSDMNNHQDARVAALVRRNVALEEQLSAALASKDEAEKNLSLVIDSKDGLEKRLAEKDREVEALREKATGLELAQEEANSLSNTVHADNVRLEREVAFLKAVMDETQKELHSTRGVLAGERARAFQLQVEVFHLKQRLQTMEGRSPAAPRKPQNA

SEQ ID NO: 177817 - protein, 91 aa, Zea Mays
MSSLIGVFSFLEMTHGFLTIPSTWGFQSNGEMELPINHWLNQLPACPGLSPPVQASDHRRWEHIARNPFLTLFVLWSVPSSVAVMFCYCKL

SEQ ID NO: 177818 - protein, 79 aa, Zea Mays
MQDAPFDQSFPFQYFIFPLFLVFISLTSAHMCRCQFIDQENSLSVLQNISFFHYFCCLIFLFFPIHLKNIGICRQTIHN

SEQ ID NO: 177819 - protein, 320 aa, Zea Mays
MEQEKTRAPPSISVKPPRPQPCSYSTHPPSALATAGVAIQKLSVLLLDLDVAVHLLLPYVHHLLHDVSMVCGGGGHKHAGLLGACAWGGGGMGEISTGITGEVVAPTACSGCARVEAGTRGEISTGSANGVGGRACDGGLVGGASRRGFGALESQAQRSPMAGGPNFPQPNRPQSPLLPSPFTFRETNMPQVGVIQLALQNNSTGLVLSWQNDVFVVAEPGELADRFLQSVKTILSTLLRGCNRKGAYSLSKISCLSELVAEWPSFEIGGIHHRYIGRQTQLVLNRVLMLGSQAQTVIGRPILPDAVVHAVVEEHVLTTL

SEQ ID NO: 177820 - protein, 248 aa, Zea Mays
MEQEKTRAPPSISVKPPRPQPCSYSTHPPSALATAGVAIQKLSVLLLDLDVAVHLLLPYVHHLLHDVSMVCGGGGHKHAGLLGACAWGGGGMGEISTGITGEVVAPTACSGCARVEAGTRGEISTGSANGVGGRACDGGLVGGASRRGFGALESQAQRSPMAGGPNFPQPNRPQSPLLPSPFTFRETVSGGRRTPARRRRTDGALRRGDAEEVFGNLRAKEATRCGAEHGAGGPERRAQPAWRGGVRA

SEQ ID NO: 177821 - protein, 661 aa, Zea Mays
MQPDPSPNFPLPSAPMWRPISQPRMPLQKGVCTTSKWRLATASLLSSPRCRCSTFGVLELTLPSTRSSRTWTGCAPRSPRWMLSGPTERASAAPPCQVSLVPPVPLLRRPASSELRARSPPLDRVRGTHLLPSTTLMALDSDTASTATSGIVDFGIQLPMAATRSRVCGVPPSPTFSFAQPNGFGGGDVDLRGALNKHGGGLPKLTFPTFDGSSPKLWQRRCEKYFEMYATEEMVWVKVATMYFEGAAGRWLQSVEPRLPSLSWVQFCRLVQDRFGREQHELVIRKLFHIRQTSTVQDYVDRFSELVDLLVTYEHTTDPLYYTMRFIDGLRDDIKSVILVQRPSTLDTACALALLQEEAEASRPREVRRGDAHLSYKTPTKTSSYQDWDKHSPQASDRPTSMVSDPSSSDSKVASLRAYRRARGLCQYCADKWVKGHKCSPTIQLHVMQELWDLLTPESQEPEAEFQDTSEQFMILLSTEAVSSKSSRSTFRLSGSLFGQELLMLLDSGSSHCFLNTSLASSLTGVNQLAQPLSVTVANGNKLQCTAELTNAEWTCQGLSFTSSFKLLPIPCYDAIIGMDWLESCSPMYVDWKHKWISLSHLGKSALLQGVQPTTPSASLLELRHTAPDQSEIFQLQIAHDSSVPEALAQLISGLTVSHQQ

SEQ ID NO: 177822 - protein, 96 aa, Zea Mays
MEGGLGSAPSRLLGMCPCAGARPSTATASPSGYAVGRHPPLLRFSIINGRNQGVHAFVAQIMDEDGTVLPNIHIADCGHKIGLNGVDNGRIWWVIC

SEQ ID NO: 177823 - protein, 321 aa, Zea Mays
MLLGWMGTTGMVFWCAVLPGPKALRPSPRLQEEETLLSISDFFSLWTCVSVQQRLLWNYLILLPAIDRYRRSDGAVASISTSTSICIEPIWDFGEGGACLYCTASASVHILWAFAILSGLLTIQFWFKERLSEVSWIMGAFCSCLQPDYSDHHGNQTSSAFRNCMCLRCFTQQLINAYTVLFRAGAVHSVSPAIEATPVDSTESSFDTYRSPPRPLPYDDPRFSPPARDWLRSENPSHSPEESEPLRANEDDEEMETPSIIQKASKTNYNTKMKICSSTYGDKVPPREHGNYFSYFSPSAEDEDVCPTCLEGIIAIIIFFS

SEQ ID NO: 177824 - protein, 274 aa, Zea Mays
MAEKMSTLIIVVDLDCRKCYHKIRKILCQLQDHERIRTISFDDKSKTVTMVGPFDPQRLACKLRCKGGKVVRDVYIVDANGGGGGGGKPPPPQNVPDDGPPAPAPAPVRSGGKSKNKNKNKQQQQQQPPPTERPPSPPPPPPPETAPGPPPPEEMRPPMDLPPSPQHQHHPPPPMPMPMPGNERPPPPPMPMLMPAECVIPTVEIPSWPAAPPVGPCGCPCCAPCYQGYYEGCRCYCCGRLYGTTVRPLPAPCGAYRGCRTFSDDDPSAACSVM

SEQ ID NO: 177825 - protein, 80 aa, Zea Mays
MLISEINQNHESRAPDNLTRNVGLIRELNNNIRRVVGLYADLSASFARTMDHASSEGDSSGTGNNGRAGAGAGHKRVRPA

SEQ ID NO: 177826 - protein, 65 aa, Zea Mays
MLLSLSSSSSSSSSPHLLFSRPNCLSASSQLLLLLPTALRSLVPGARLDSSLFIGRKDWLPRYSY

SEQ ID NO: 177827 - protein, 87 aa, Zea Mays
MSWVFIFASPTITATTDVEWGDDVRRVLSSAHGFHQSSVSRASSRLQQEEDGEADDEPRHGQRQRRRRSTHAQVLHEALAGGRGRAP

SEQ ID NO: 177828 - protein, 649 aa, Zea Mays
MKSTVFSTAVVSIGYALLGWDFAALSEANHHMEKEFELLNGPSIEGITLAASTFGAIVITIFSGALLDWLGRRVILVYSSLVLFSGGVLMLWSPNIYIVLLARLIVGSGSGLVFTCVPIYISETSPSNMRGLLGTMPQFMFFIGTIFSYCLIFWLTLMSSPSWRIMIGAIFAPSIVYFALLVYYLPESPRWLASDGKISEARVSLQWLRGKKHDVSAAIVEGVDIISDSTVGAARAQSFSGTSASHTWPRSTFYWQLSDPLVDLLGSVHENMSEGGSRRNSFFPVFNSFSFPEHEHMNEHRDGNSDQQTRETYYAGEANNGDGLRASLLSQAASVEVNDTNTSFTSEGSSSYLRRHGTSVLAQEFMASIHDYDIEEEEEEIHGFALPHQSAPRDMESTGRHPFRHQIVRLSETADMKFKWRVLLQPGIRHALCYGMLIQALQQSTGISGLLRCAPEIFEQSGVASLFSDIGLSPHSTSILMSTLNALLILPCITAAMLLMDVCGRRVIVLATTPVLILSLSVMSMSTLVNMGPFESAVLFHFALTICFWSYVIGLGPIPNILCSEIFPTKARATCASFCSLSFWFGGLLSAYCFPVMLSTIGLGGACGIYALVCCAPLFLVYYRIPETKMLNLELIAELFKLSRQEHVQ

SEQ ID NO: 177829 - protein, 443 aa, Zea Mays
MTSHRPAGEIAAIVEGVDIISDSTVGAARAQSFSGTSASHTWPRSTFYWQLSDPLVDLLGSVHENMSEGGSRRNSFFPVFNSFSFPEHEHMNEHRDGNSDQQTRETYYAGEANNGDGLRASLLSQAASVEVNDTNTSFTSEGSSSYLRRHGTSVLAQEFMASIHDYDIEEEEEEIHGFALPHQSAPRDMESTGRHPFRHQIVRLSETADMKFKWRVLLQPGIRHALCYGMLIQALQQSTGISGLLRCAPEIFEQSGVASLFSDIGLSPHSTSILMSTLNALLILPCITAAMLLMDVCGRRVIVLATTPVLILSLSVMSMSTLVNMGPFESAVLFHFALTICFWSYVIGLGPIPNILCSEIFPTKARATCASFCSLSFWFGGLLSAYCFPVMLSTIGLGGACGIYALVCCAPLFLVYYRIPETKMLNLELIAELFKLSRQEHVQ

SEQ ID NO: 177830 - protein, 142 aa, Zea Mays
MGPCALLGSSSALRLLRCVINCAKTLWRPNPAKDLPCNQPIRHSSKLPRIVRSKDIVTLHPDMILRYHDGSGGVAFAGVDKVGDGVPLHPDDALDDRFARVLRGDHQHDVPRRDPAEPHADPVHRHRVARQVQGRQHAGAPH

SEQ ID NO: 177831 - protein, 261 aa, Zea Mays
MMYGAKTDRDKDNKWRSLKEQRNDPSAYEDIDLGISETNVNANDRQEPVLVRNIPPYDPTADTSENAYLLDEIIPKSMREHLLEIVRHFESGEISSKGYGSFVSKRVHKLKELQGEDKKRFAWILSYIQHLLSLLARNGSMSNRKWKGRNENQISHGPATPQAVYRRLLFMFTEPGSSVMPTEKKELLTNYILVLTLFADDFRSNPSDICEDLKMTRQNLKPYYDQLGCKSVTEGAFKSTFMTLPAPLKFPKEVTRKRRRQ

SEQ ID NO: 177832 - protein, 447 aa, Zea Mays
MDSPVCSLSKTLEPSPMADLETLATPAPASASTKKKKKHSKKHKAASDAPTNVTVDASLMGGSSYVAAAPVVGYFPSGYDPLTTAAGAESAPGTQLFRHEKHPTWVDLVVRSPGGGHDFVGRSYAGEAAVPQVCDYALGVLDKASGTLRIVPIAGKKHPAHSQHSEVASEAASAAGNDELKVQDLTMMYGAKTDRDKDNKWRSLKEQRNDPSAYEDIDLGISETNVNANDRQEPVLVRNIPPYDPTADTSENAYLLDEIIPKSMREHLLEIVRHFESGEISSKGYGSFVSKRVHKLKELQGEDKKRFAWILSYIQHLLSLLARNGSMSNRKWKGRNENQISHGPATPQAVYRRLLFMFTEPGSSVMPTEKKELLTNYILVLTLFADDFRSNPSDICEDLKMTRQNLKPYYDQLGCKSVTEGAFKSTFMTLPAPLKFPKEVTRKRRRQ

SEQ ID NO: 177833 - protein, 913 aa, Zea Mays
MQQSVDTQDELLHDVEDVTERETHAEEVISNDIFEIHVVETDITSGKSEVDSEIVTVDPEPDRANQNFTDTNYQNYGTTDISSERHEVSLIPSAQDAVQEKIVILSSSEAVEGSLDAVPEKVVILSSSETVDSSYAVSCILDDTVHDASDISQADGVQHEEHSSISDGSTEKLISEESSLVCYGVPSNKKDLVNIAVQESKAFILKNPASQILEESGPGLDVSTDSVSLSHADSAPDLACQHVSPNVEDTTSYEPGIGPEDVTKNSVVENGACSGELVVSVIQTSAGDGLTKCIAHPAVFSNKIEVEGSPTSAGFSSLISVEVQNTKLEDDTNKSSSVIGDEAGFVPEATAELDEEAEPVISLSEYTEEIQFQFSDAENFADRKATDDMVANKTTGEVEHDESDCDTEKQEEGDVGLVNDLENCSASLKPVSSPVSIPAIDFQSGNSNREAKSLPNLRSHIHDLERSYSFQLSRSLQSTAENNGIDLVKSMNYAFLEQKSEAIGDFSEENNSPPEVTNTVALDGNHADDLKVDAFIPFAELSLCRHLLSEGMGEDAACSAFDSEKVTLEEFRNMKQSLMRNNKLVVRIAGRYFPWDAAAPIVLGMISFSEEQVFEPKGMINVERVEQSAAPGGSWSIWPFSFRRTRTITAIQPVCESIVETSVSTPKELTHFKELDRERNKSRVKRIERKVRSLTPTSDELASLDLREGRNVVTFTFSTAIVGKQQVDCHIYLWRWNTRIVISDVDGTITKSDVLGQFMPLVGVDWSQNGVAHLFSAIKDGKALPDGPVVISPDGLFPSLYREVIRRAPHEFKISCLEAIKDLFPHDSNPFYAGFGNRDTDELSYLKVGIPMGKIFIINPKGEVAVNRRVDTKSYTSLHALVHGMFPPILSSSEQEDYNAWNYWKMPLPDVDL

SEQ ID NO: 177834 - protein, 1015 aa, Zea Mays
MYAVGKVGSLISRSVYTVSGPFHPFGGAVDIVVVQQQDGSFKSSPWYVRFGKFQGVLKSREKVVDISVNGVDAGFHMYLDSNGEAYFLRNADPNGEEGEFIVSPASSGDEREVPIQEAQLRKSKSTSCDSSTMEADVGEGKILARTTSRRITILERMFGRKSIKNNAHAVDRVSSLERAEVAAELLDTKWSTNLPRSSKPNGSNDEPSKSNNDQMETSKPVFSEHSLDHGKEMDSNDNAHCNSCSPRGGRNSSADETDPCLQATIVKKEVVEIHARESSDFTDNITSITHQQGSESSSNDLGTDKLMQQSVDTQDELLHDVEDVTERETHAEEVISNDIFEIHVVETDITSGKSEVDSEIVTVDPEPDRANQNFTDTNYQNYGTTDISSERHEVSLIPSAQDAVQEKIVILSSSEAVEGSLDAVPEKVVILSSSETVDSSYAVSCILDDTVHDASDISQADGVQHEEHSSISDGSTEKLISEESSLVCYGVPSNKKDLVNIAVQESKAFILKNPASQILEESGPGLDVSTDSVSLSHADSAPDLACQHVSPNVEDTTSYEPGIGPEDVTKNSVVENGACSGELVVSVIQTSAGDGLTKCIAHPAVFSNKIEVEGSPTSAGFSSLISVEVQNTKLEDDTNKSSSVIGDEAGFVPEATAELDEEAEPVISLSEYTEEIQFQFSDAENFADRKATDDMVANKTTGEVEHDESDCDTEKQEEGDVGLVNDLENCSASLKPVSSPVSIPAIDFQSGNSNREAKSLPNLRSHIHDLERSYSFQLSRSLQSTAENNGIDLVKSMNYAFLEQKSEAIGDFSEENNSPPEVTNTVALDGNHADDLKVDAFIPFAELSLCRHLLSEGMGEDAACSAFDSEKVTLEEFRNMKQSLMRNNKLVVRIAGRYFPWDAAAPIVLDGLFPSLYREVIRRAPHEFKISCLEAIKDLFPHDSNPFYAGFGNRDTDELSYLKGEVAVNRRVDTKSYTSLHALVHGMFPPILSSSEQEDYNAWNYWKMPLPDVDL

SEQ ID NO: 177835 - protein, 208 aa, Zea Mays
MGEDAACSAFDSEKVTLEEFRNMKQSLMRNNKLVVRIAGRYFPWDAAAPIVLGMISFSEEQVFEPKGMINVERVEQSAAPGGSWSIWPFSFRRTRTITAIQPVCESIVETSVSTPKELTHFKELDRERNKSRVKRIERKVRSLTPTSDELASLDLREGRNVVTFTFSTAIVGKQQVDCHIYLWRWNTRIVISDVDGTITKKMDTSFYF

SEQ ID NO: 177836 - protein, 1234 aa, Zea Mays
MYAVGKVGSLISRSVYTVSGPFHPFGGAVDIVVVQQQDGSFKSSPWYVRFGKFQGVLKSREKVVDISVNGVDAGFHMYLDSNGEAYFLRNADPNGEEGEFIVSPASSGDEREVPIQEAQLRKSKSTSCDSSTMEADVGEGKILARTTSRRITILERMFGRKSIKNNAHAVDRVSSLERAEVAAELLDTKWSTNLPRSSKPNGSNDEPSKSNNDQMETSKPVFSEHSLDHGKEMDSNDNAHCNSCSPRGGRNSSADETDPCLQATIVKKEVVEIHARESSDFTDNITSITHQQGSESSSNDLGTDKLMQQSVDTQDELLHDVEDVTERETHAEEVISNDIFEIHVVETDITSGKSEVDSEIVTVDPEPDRANQNFTDTNYQNYGTTDISSERHEVSLIPSAQDAVQEKIVILSSSEAVEGSLDAVPEKVVILSSSETVDSSYAVSCILDDTVHDASDISQADGVQHEEHSSISDGSTEKLISEESSLVCYGVPSNKKDLVNIAVQESKAFILKNPASQILEESGPGLDVSTDSVSLSHADSAPDLACQHVSPNVEDTTSYEPGIGPEDVTKNSVVENGACSGELVVSVIQTSAGDGLTKCIAHPAVFSNKIEVEGSPTSAGFSSLISVEVQNTKLEDDTNKSSSVIGDEAGFVPEATAELDEEAEPVISLSEYTEEIQFQFSDAENFADRKATDDMVANKTTGEVEHDESDCDTEKQEEGDVGLVNDLENCSASLKPVSSPVSIPAIDFQSGNSNREAKSLPNLRSHIHDLERSYSFQLSRSLQSTAENNGIDLVKSMNYAFLEQKSEAIGDFSEENNSPPEVTNTVALDGNHADDLKVDAFIPFAELSLCRHLLSEGMGEDAACSAFDSEKVTLEEFRNMKQSLMRNNKLVVRIAGRYFPWDAAAPIVLGMISFSEEQVFEPKGMINVERVEQSAAPGGSWSIWPFSFRRTRTITAIQPVCESIVETSVSTPKELTHFKELDRERNKSRVKRIERKVRSLTPTSDELASLDLREGRNVVTFTFSTAIVGKQQVDCHIYLWRWNTRIVISDVDGTITKSDVLGQFMPLVGVDWSQNGVAHLFSAIKENGYQLLFLSARAISQAHITRQFLFNLKQDGKALPDGPVVISPDGLFPSLYREVIRRAPHEFKISCLEAIKDLFPHDSNPFYAGFGNRDTDELSYLKGEVAVNRRVDTKSYTSLHALVHGMFPPILSSSEQEDYNAWNYWKMPLPDVDL

SEQ ID NO: 177837 - protein, 1235 aa, Zea Mays
MYAVGKVGSLISRSVYTVSGPFHPFGGAVDIVVVQQQDGSFKSSPWYVRFGKFQGVLKSREKVVDISVNGVDAGFHMYLDSNGEAYFLRNADPNGEEGEFIVSPASSGDEREVPIQEAQLRKSKSTSCDSSTMEADVGEGKILARTTSRRITILERMFGRKSIKNNAHAVDRVSSLERAEVAAELLDTKWSTNLPRSSKPNGSNDEPSKSNNDQMETSKPVFSEHSLDHGKEMDSNDNAHCNSCSPRGGRNSSADETDPCLQATIVKKEVVEIHARESSDFTDNITSITHQQGSESSSNDLGTDKLMQQSVDTQDELLHDVEDVTERETHAEEVISNDIFEIHVVETDITSGKSEVDSEIVTVDPEPDRANQNFTDTNYQNYGTTDISSERHEVSLIPSAQDAVQEKIVILSSSEAVEGSLDAVPEKVVILSSSETVDSSYAVSCILDDTVHDASDISQADGVQHEEHSSISDGSTEKLISEESSLVCYGVPSNKKDLVNIAVQESKAFILKNPASQILEESGPGLDVSTDSVSLSHADSAPDLACQHVSPNVEDTTSYEPGIGPEDVTKNSVVENGACSGELVVSVIQTSAGDGLTKCIAHPAVFSNKIEVEGSPTSAGFSSLISVEVQNTKLEDDTNKSSSVIGDEAGFVPEATAELDEEAEPVISLSEYTEEIQFQFSDAENFADRKATDDMVANKTTGEVEHDESDCDTEKQEEGDVGLVNDLENCSASLKPVSSPVSIPAIDFQSGNSNREAKSLPNLRSHIHDLERSYSFQLSRSLQSTAENNGIDLVKSMNYAFLEQKSEAIGDFSEENNSPPEVTNTVALDGNHADDLKVDAFIPFAELSLCRHLLSEGMGEDAACSAFDSEKVTLEEFRNMKQSLMRNNKLVVRIAGRYFPWDAAAPIVLGMISFSEEQVFEPKGMINVERVEQSAAPGGSWSIWPFSFRRTRTITAIQPVCESIVETSVSTPKELTHFKELDRERNKSRVKRIERKVRSLTPTSDELASLDLREGRNVVTFTFSTAIVGKQQVDCHIYLWRWNTRIVISDVDGTITKSDVLGQFMPLVGVDWSQNGVAHLFSAIKENGYQLLFLSARAISQAHITRQFLFNLKQDGKALPDGPVVISPDGLFPSLYREVIRRAPHEFKISCLEAIKDLFPHDSNPFYAGFGNRDTDELSYLKVGIPMGKIFIINPKGEVAVNRRVDTKSYTSLHALVHGMFPPILSSSEQASIPV

SEQ ID NO: 177838 - protein, 1252 aa, Zea Mays
MYAVGKVGSLISRSVYTVSGPFHPFGGAVDIVVVQQQDGSFKSSPWYVRFGKFQGVLKSREKVVDISVNGVDAGFHMYLDSNGEAYFLRNADPNGEEGEFIVSPASSGDEREVPIQEAQLRKSKSTSCDSSTMEADVGEGKILARTTSRRITILERMFGRKSIKNNAHAVDRVSSLERAEVAAELLDTKWSTNLPRSSKPNGSNDEPSKSNNDQMETSKPVFSEHSLDHGKEMDSNDNAHCNSCSPRGGRNSSADETDPCLQATIVKKEVVEIHARESSDFTDNITSITHQQGSESSSNDLGTDKLMQQSVDTQDELLHDVEDVTERETHAEEVISNDIFEIHVVETDITSGKSEVDSEIVTVDPEPDRANQNFTDTNYQNYGTTDISSERHEVSLIPSAQDAVQEKIVILSSSEAVEGSLDAVPEKVVILSSSETVDSSYAVSCILDDTVHDASDISQADGVQHEEHSSISDGSTEKLISEESSLVCYGVPSNKKDLVNIAVQESKAFILKNPASQILEESGPGLDVSTDSVSLSHADSAPDLACQHVSPNVEDTTSYEPGIGPEDVTKNSVVENGACSGELVVSVIQTSAGDGLTKCIAHPAVFSNKIEVEGSPTSAGFSSLISVEVQNTKLEDDTNKSSSVIGDEAGFVPEATAELDEEAEPVISLSEYTEEIQFQFSDAENFADRKATDDMVANKTTGEVEHDESDCDTEKQEEGDVGLVNDLENCSASLKPVSSPVSIPAIDFQSGNSNREAKSLPNLRSHIHDLERSYSFQLSRSLQSTAENNGIDLVKSMNYAFLEQKSEAIGDFSEENNSPPEVTNTVALDGNHADDLKVDAFIPFAELSLCRHLLSEGMGEDAACSAFDSEKVTLEEFRNMKQSLMRNNKLVVRIAGRYFPWDAAAPIVLGMISFSEEQVFEPKGMINVERVEQSAAPGGSWSIWPFSFRRTRTITAIQPVCESIVETSVSTPKELTHFKELDRERNKSRVKRIERKVRSLTPTSDELASLDLREGRNVVTFTFSTAIVGKQQVDCHIYLWRWNTRIVISDVDGTITKSDVLGQFMPLVGVDWSQNGVAHLFSAIKENGYQLLFLSARAISQAHITRQFLFNLKQDGKALPDGPVVISPDGLFPSLYREVIRRAPHEFKISCLEAIKDLFPHDSNPFYAGFGNRDTDELSYLKVGIPMGKIFIINPKGEVAVNRRVDTKSYTSLHALVHGMFPPILSSSEQASIPEDYNAWNYWKMPLPDVDL

SEQ ID NO: 177839 - protein, 871 aa, Zea Mays
MYAVGKVGSLISRSVYTVSGPFHPFGGAVDIVVVQQQDGSFKSSPWYVRFGKFQGVLKSREKVVDISVNGVDAGFHMYLDSNGEAYFLRNADPNGEEGEFIVSPASSGDEREVPIQEAQLRKSKSTSCDSSTMEADVGEGKILARTTSRRITILERMFGRKSIKNNAHAVDRVSSLERAEVAAELLDTKWSTNLPRSSKPNGSNDEPSKSNNDQMETSKPVFSEHSLDHGKEMDSNDNAHCNSCSPRGGRNSSADETDPCLQATIVKKEVVEIHARESSDFTDNITSITHQQGSESSSNDLGTDKLMQQSVDTQDELLHDVEDVTERETHAEEVISNDIFEIHVVETDITSGKSEVDSEIVTVDPEPDRANQNFTDTNYQNYGTTDISSERHEVSLIPSAQDAVQEKIVILSSSEAVEGSLDAVPEKVVILSSSETVDSSYAVSCILDDTVHDASDISQADGVQHEEHSSISDGSTEKLISEESSLVCYGVPSNKKDLVNIAVQESKAFILKNPASQILEESGPGLDVSTDSVSLSHADSAPDLACQHVSPNVEDTTSYEPGIGPEDVTKNSVVENGACSGELVVSVIQTSAGDGLTKCIAHPAVFSNKIEVEGSPTSAGFSSLISVEVQNTKLEDDTNKSSSVIGDEAGFVPEATAELDEEAEPVISLSEYTEEIQFQFSDAENFADRKATDDMVANKTTGEVEHDESDCDTEKQEEGDVGLVNDLENCSASLKPVSSPVSIPAIDFQSGNSNREAKSLPNLRSHIHDLERSYSFQLSRSLQSTAENNGIDLVKSMNYAFLEQKSEAIGDFSEENNSPPEVTNTVALDGNHADDLKVDAFIPFAELSLCRHLLSEGMGEDAACSAFDSEK

SEQ ID NO: 177840 - protein, 396 aa, Zea Mays
MWGRHYWGGGRRPSWAPGGNGAGTGGVVVMFAWLSSQERHVRAYVELYAAHGWACLVCHSDFLTLFFPEKAAMLADRVIGELVKVLKITPVPVVFASFSGGPKGCTYKVLQLIERRCEGQLSMDEYQLVRDCLCGQMYDSSPVDFVSDLGTRFLLDPSVLKMSEPPRVLSWMTKGIASGLDVLFINKFEEQRKDYWETLYSSVHFGPILILCSEDDQLATYSVVQNFGQHLLELGGDVSLIKWHSSPHVGHYKHHPEEYRAAVTELLKKASTLYASRRQLNGHAVGTSEHTDAPAPASTSKSNPHRDAASSVGRSSQGPPQPELLSMPGVESSGLRCGVLGQALYGVCVPKDVEEGWDLAPPSASSDGMGRRVRAAAAPPRRGSFRPMRCVRRSRL

SEQ ID NO: 177841 - protein, 68 aa, Zea Mays
MKNGESSFPSSSPRSWTIRISGRTWCRPPALSPAAPHRSFVVTRSLPGSPHRSPSHLVLDTWEASCSF

SEQ ID NO: 177842 - protein, 252 aa, Zea Mays
MIIVNIVHDISRMFRRGSPRMNLIQAAAMQRVSPRSTTNKRKKRTSPKVGRLRANWNSGLEKGLVQILQDHNNDCYKGQNGWSSEAWNRIVKLFHEKFPYVTFTKCQIQDKEKELKRDYKALKEARQQSGVSWDERLCRIEAKEPIWNNLTTSNERLKKFRTKSFPLFEALGELHDDERKQDEVEKRVTTNANEDDFPTTTCIAIVDGMEELSDDEKVDAYDVFKDAQNRAIFMTTKDATRIKWLRKKIART

SEQ ID NO: 177843 - protein, 182 aa, Zea Mays
MFRRGSPRMNLIQAAAMQRVSPRSTTNKRKKRTSPKVGRLRANWNSGLEKGLVQILQDHNNDCYKGQNGWSSEAWNRIVKLFHEKFPYVTFTKCQIQDKEKELKRDYKALKEARQQSGVSWDERLCRIEAKEPIWNNLTTSNERLKKFRTKSFPLFEALGELHDGMLSMFFFILVLSLLFLS

SEQ ID NO: 177844 - protein, 240 aa, Zea Mays
MFRRGSPRMNLIQAAAMQRVSPRSTTNKRKKRTSPKVGRLRANWNSGLEKGLVQILQDHNNDCYKGQNGWSSEAWNRIVKLFHEKFPYVTFTKCQIQDKEKELKRDYKALKEARQQSGVSWDERLCRIEAKEPIWNNLTTSNERLKKFRTKSFPLFEALGELHDDERKQDEVEKRVTTNANEDDFPTTTCIAIVDGMEELSDDEKVDAYDVFKDAQNRAIFMTTKDATRIKWLRKKIART

SEQ ID NO: 177845 - protein, 310 aa, Zea Mays
MPSPTTSGPGTLPPIWTSSSSSTISTSHCRRWQEVERLRAERNAVANKMKGKLDPSVRQALVEEGKNLKEGLIALEEDLVQLTDKLQLEAQSIPNTTHPDVPVGGEESSVLRKEVGSQRSFNFAIKDHLQLGKELDLFDFDAAAEVSGSKFYYLKNEAVLLEMALVNWAISEVSKKGFTPLITPEIVRSSVVEKCGFQPRAKNTQVYSIEDSDQCLIGTAEIPVGGIHMDSILAESALPLKYVAYSHCFRTEAGAAGAATRGLYRVHQFSKVEMFIFCRPEESGKWHEELITIEEDLYASLGLHFNLPEI

SEQ ID NO: 177846 - protein, 431 aa, Zea Mays
MPSPTTSGPGTLPPIWTSSSSSTISTSHCRRWQEVERLRAERNAVANKMKGKLDPSVRQALVEEGKNLKEGLIALEEDLVQLTDKLQLEAQSIPNTTHPDVPVGGEESSVLRKEVGSQRSFNFAIKDHLQLGKELDLFDFDAAAEVSGSKFYYLKNEAVLLEMALVNWAISEVSKKGFTPLITPEIVRSSVVEKCGFQPRAKNTQVYSIEDSDQCLIGTAEIPVGGIHMDSILAESALPLKYVAYSHCFRTEAGAAGAATRGLYRVHQFSKVEMFIFCRPEESGKWHEELITIEEDLYASLGLHFKTLDMATGDLGAPAYRKFDIEAWMPGLERYGEISSASNCTDYQSRRLGIRYRPSPSEPPSTSTKKGKGAASGPTQFVHTLNATAVAVPRLIVCILENFQQGDGSIVVPEPLRPYMGGLELLSPKFK

SEQ ID NO: 177847 - protein, 156 aa, Zea Mays
MKYCQSLLFTAFPWPVRVKISYSFIRYCCRKGDYYRYLAEFSTGTEKKAASDQSLMAYQHAMVVASSELSPAHQIRLGLALNLSVFFYEIMNSHERACQVAKQAFDEALTEINSGEGVYKDSTLMMQLLKDNLALWTSELTGGEASKGNGDVDMEG

SEQ ID NO: 177848 - protein, 222 aa, Zea Mays
MLEVPQSSLVHLPCHSDFCLVAPWPSGLNLRSNGPRNSVNSCKLFQELTVAGFCQFLHVGANCFDVIVSVGEEANDPAVALHRNLERGSQLRSERPVCFARAGHERQRGHDTGYCSVPRAWMECPSNFHYELFRGKMNLSTSSSAAAPRTGGVLLPVAIAVQILQRVYDRPAEDRHSVQAMRPLCDVMESISNPAPRPNPGDDGLITTSCFPTAFGSGFGAV

SEQ ID NO: 177849 - protein, 434 aa, Zea Mays
MLPRHGHVCRLLLLPRLRPMSTSATTAFPPTDSAPFFSAAPGSFLDPTALAPDDAIALLPSVADSEGSAAALALFRRLSSRPDMRRLMRLYATAATAFVARGNLPMAHEAARAMVAAFAEAGRLREAADMLLELRSHGLPLVVETANWVLRVGLRHPGCFAHAREAFDGMARAAGGVRPDHRSFRALVLGCCREGRFEEADALLAAMWAQGFCLDSATCTVVVRAFCRQGRFRNVTDLFRRMSEMGTPPNMVNYSAWIDGLCERGYVKQAFHVLEEMVGKGLKPNVYTHTSLIDGLCKIGWMERAFRLFLKLVKSSSYKPNVHTYTVMIGGYCKEGKLARAEMLLGRMVEQGLAPNTNTYTTLIHGHCKGGSFDRAFELMNKMKLEGFLPNIYTYNAIIGGFCKKGKIQEAYKVLRMATSQGLHLDKDTVDLAN

SEQ ID NO: 177850 - protein, 718 aa, Zea Mays
MGSSPSKATGEDALVLCKDRMRHIRQAIDSRDALSAAHLSYTQSLRSVGTALRQYAESEISPESSLSISEVDKSPSHSSMASPSPSRAVESVASLGHRASPSITPPSTRIHCMKAAATTPLTFVIDQSTAEFVGRESPVSAFVPPPPPLPPELCTTWDFFDPIDAAGTSSSNNENEVTLNFSRLRDLRESRVAEVVPLKEVEEEIMSRRHTEISDDNTPPEQEREPKQGGTGKPSQLVDTSTKATSEQVAAKLEESEMEKELCAEAEDPSEFITHRAKDFVSSMKDIETRFMRAAEAGNEVSRMLETKKIRLDICAKIPVKLPSARFVSALRVCCNRDVILNQETAQHVSKVVTWKRSVSSLSSSSKSALMTSIMKDDVDDSNSDFVEEFAMVSGSHSSTLDRLHAWERKLYDEIKASENVRKAYDEKCNLLRRQFARGLNAQVIDKTRAVVKDLHSRVSVVIQAVDAISKRIEKIRDEELQPQLVELIQGLIRMWKLMLECHHKQFITITLAYHVKDSTSARQGEHHHHRQAAMHLWNEMDSFSSSFRNWVTAHKSYVEALNAWLQKCVLQPPQDRRRRKRKVSFPPRQAVSPPIFILCGDWLARTEPLPADELCRSLKDVMQLLRGSFEHRDEQNRPRSGESQECGMLENSSEQEAAAKSGSCAASAEGLQSRLTAVLDRLTKFSEASLKCYEELKQNYEMACADYRRVGPNAQLA

SEQ ID NO: 177851 - protein, 675 aa, Zea Mays
MGSSPSKATGEDALVLCKDRMRHIRQAIDSRDALSAAHLSYTQSLRSVGTALRQYAESEISPESSLSISEVDKSPSHSSMASPSPSRAVESVASLGHRASPSITPPSTRIHCMKAAATTPLTFVIDQSTAEFVGRESPVSAFVPPPPPLPPELCTTWDFFDPIDAAGTSSSNNENEEREPKQGGTGKPSQLVDTSTKATSEQVAAKLEESEMEKELCAEAEDPSEFITHRAKDFVSSMKDIETRFMRAAEAGNEVSRMLETKKIRLDICAKIPGSPVKLPSARFVSALRVCCNRDVILNQETAQHVSKVVTWKRSVSSLSSSSKSALMTSIMKDDVDDSNSDFVEEFAMVSGSHSSTLDRLHAWERKLYDEIKASENVRKAYDEKCNLLRRQFARGLNAQVIDKTRAVVKDLHSRVSVVIQAVDAISKRIEKIRDEELQPQLVELIQGLIRMWKLMLECHHKQFITITLAYHVKDSTSARQGEHHHHRQAAMHLWNEMDSFSSSFRNWVTAHKSYVEALNAWLQKCVLQPPQDRRRRKRKVSFPPRQAVSPPIFILCGDWLARTEPLPADELCRSLKDVMQLLRGSFEHRDEQNRPRSGESQECGMLENSSEQEAAAKSGSCAASAEGLQSRLTAVLDRLTKFSEASLKCYEELKQNYEMACADYRRVGPNAQLA

SEQ ID NO: 177852 - protein, 357 aa, Zea Mays
MLHKQEGFAFSHCTTCKAPYYLRVHSHTDRKWRTLKFRFFVTRDILFIFALVQIIISALAYLVHFIDGCQQYWLRTAWAFDNEVSFYYICGALMFFALLGLSGCFITCYDRRVRNDLAQPCRELCLCCCQPGMCADCHLPGTLCMWTDCTTCFEGCATTAGECGGCLGGAGEAGLPLLLIMGVIVLGLFTVIGIFYSVLVATMVGQRIWQRHYHILAKRLLTKEMVAKDKAQSAPASHDEVDLDELLDDPELEKLHAERIAALKKEVEKREVLKRQGHGEYREITEGDFLGEVTGSEKVICHFYHREFYRCKIMDKHLKALAPVYVGTKFVKLDAENAPFFVAKLAIKTLPCVILFK

SEQ ID NO: 177853 - protein, 243 aa, Zea Mays
MLPFWPSMKLIFICWLVLPYFNGAAYVYQNYVRPAFIKNQMVNIWYVPQKKGLLGKSDDFLTALDKFIEENGTDALKKLANKAGKPFKQSGKSSKDQKETKSSKDSKEPKPSKDAKQPKPSKDTKEPKPPKVSKSPKDSKEQKKATLKDPKKAPKDSKGLKKALKDPKEQESLEDPKEHTAKKAGKRVTFAEVEPEKELKASNSDWHPSSDFHAAYPEQNPWASGFMIFEDENSYWNRGPLDC

SEQ ID NO: 177854 - protein, 298 aa, Zea Mays
MCAVPRPLVALAYPLYASIKAIETKSPVDDQQWLTYWVLYSLITLFELTFASIIQWLPFWPSMKLIFICWLVLPYFNGAAYVYQNYVRPAFIKNQMVNIWYVPQKKGLLGKSDDFLTALDKFIEENGTDALKKLANKAGKPFKQSGKSSKDQKETKSSKDSKEPKPSKDAKQPKPSKDTKEPKPPKVSKSPKDSKEQKKATLKDPKKAPKDSKGLKKALKDPKEQESLEDPKEHTAKKAGKRVTFAEVEPEKELKASNSDWHPSSDFHAAYPEQNPWASGFMIFEDENSYWNRGPLDC

SEQ ID NO: 177855 - protein, 146 aa, Zea Mays
MCGQFGVPFWEFFFATLIGKAIIKTHIQTLFIVSLCNNQLLYLMEKELIWIFGHIPGFSATLPSVIAKLHAAKDKYLSPPTPVSASSQMEEKSWNLSFTLVWNSIVWLVLLNFSVKIITSTAQDYLKKQQDMEMERVSDSPPPEQN

SEQ ID NO: 177856 - protein, 379 aa, Zea Mays
MLQYLKRLATYILRKSGLFFLLIVLVVASGILLSISDGLHKKHVQEFLNYAKFVLWWISLGVASSIGLGSGLHTFVLYLGPHIALFTIKAVQCGRIDLKTAPYDTIQLKVGPSWLDKKCSEFGPPVYPASAHSVRIPVFDLLPQIQLEAVLWGIGTALGELPPYFISRAARLSGSKSKAVKELDAATSKEDGTVASTLDRSKRWLLSHSQHLNFFSILILASVPNPLFDLAGIMCGQFGVPFWEFFFATLIGKAIIKTHIQTLFIVSLCNNQLLYLMEKELIWIFGHIPGFSATLPSVIAKLHAAKDKYLSPPTPVSASSQMEEKSWNLSFTLVWNSIVWLVLLNFSVKIITSTAQDYLKKQQDMEMERVSDSPPPEQN

SEQ ID NO: 177857 - protein, 398 aa, Zea Mays
MGRRKMSAAAPPSRSWSNVGGSVIPELLAKHKMDLENLTLTKHPIRTLHFFLLAMLQYLKRLATYILRKSGLFFLLIVLVVASGILLSISDGLHKKHVQEFLNYAKFVLWWISLGVASSIGLGSGLHTFVLYLGPHIALFTIKAVQCGRIDLKTAPYDTIQLKIQLEAVLWGIGTALGELPPYFISRAARLSGSKSKAVKELDAATSKEDGTVASTLDRSKRWLLSHSQHLNFFSILILASVPNPLFDLAGIMCGQFGVPFWEFFFATLIGKAIIKTHIQTLFIVSLCNNQLLYLMEKELIWIFGHIPGFSATLPSVIAKLHAAKDKYLSPPTPVSASSQMEEKSWNLSFTLVWNSIVWLVLLNFSVKIITSTAQDYLKKQQDMEMERVSDSPPPEQN

SEQ ID NO: 177858 - protein, 219 aa, Zea Mays
MTACDEAVSEAITNLKSRLKSESKARSLTKKEQLVLSLEKQYPGDVGVLAAFFLNFVKLNPGEALYVSANEPHAYLSGECIECMATSDNVVRAGLTPKYRDVQTLCSMLTYNQAFPEILQGMPVQPYVTRYTPSTDEFEVDRYLLPPGKSVTMSPVPGPSIFIVLTGEGEIQAGFMTGSAKAKEGDVFFVPANTKVKLYTSCPRSMQLYRAGVNSSFLS

SEQ ID NO: 177859 - protein, 412 aa, Zea Mays
MASTTASLAPAAALERLGLLAAPTDADDPSPPLPAPLPGLLPLRCAVQHYEWGRRGADSLVARLAGDGDGRPCAELWMGTHPAAPSSLAPDVSLRDWVARNPAALGRAVAARWGGDLPFLFKVLSVAKALSIQAHPDRELAAALHALRPATYRDANHKPEMAVAVTEFHALCGFAATQELKEVLRTVPEVQELVDKEESRKLLSVKEQDGGIGVRSYLKSAFTKLMTACDEAVSEAITNLKSRLKSESKARSLTKKEQLVLSLEKQYPGDVGVLAAFFLNFVKLNPGLTPKYRDVQTLCSMLTYNQAFPEILQGMPVQPYVTRYTPSTDEFEVDRYLLPPGKSVTMSPVPGPSIFIVLTGEGEIQAGFMTGSAKAKEGDVFFVPANTKVKLYTSCPRSMQLYRAGVNSSFLS

SEQ ID NO: 177860 - protein, 383 aa, Zea Mays
MASTTASLAPAAALERLGLLAAPTDADDPSPPLPAPLPGLLPLRCAVQHYEWGRRGADSLVARLAGDGDGRPCAELWMGTHPAAPSSLAPDVSLRDWVARNPAALGRAVAARWGGDLPFLFKVLSVAKALSIQAHPDRELAAALHALRPATYRDANHKPEMAVAVTEFHALCGFAATQELKEVLRTVPEVQELVDKEESRKLLSVKEQDGGIGVRSYLKSAFTKLMTACDEAVSEAITNLKSRLKSESKARSLTKKEQLVLSLEKQYPGDVGVLAAFFLNFVKLNPGEALYVSANEPHAYLSGECIECMATSDNVVRAGLTPKYRDVQTLCSMLTYNQVSCFAPSINFHRSFIITISLLSFIIGHLMMKCDYSKHVGFGYNQT

SEQ ID NO: 177861 - protein, 101 aa, Zea Mays
MALLLLRHALSMSDNEGNDDDASTIFSLFLLRAAGFLLPCYIMAWIFSILHRRRQRQEEAALAAAEVAFILQSARGRALQFAIAPDSPATPQHEPVSQQQQ

SEQ ID NO: 177862 - protein, 271 aa, Zea Mays
MKTRAAFDRCAQTLSRPVLQATTTRGEKDTKEKKTRAGRREKEPKKKLGICSLQAVRRPDGKGKRGRAAAEVAVGEYAHRACVQRWCNEKGDTTCEICHEEYKPGYTAPPRVQPDETTIDIDGDLVMDLRDPRILAVAAAQHRLLEAEYDGYASTDASGAAFCRSAALILMALLLLRHALSMSDNEGNDDDASTIFSLFLLRAAGFLLPCYIMAWIFSILHRRRQRQEEAALAAAEVAFILQSARGRALQFAIAPDSPATPQHEPVSQQQQ

SEQ ID NO: 177863 - protein, 55 aa, Zea Mays
MKHKTEIWSGAVHRQQNAGHTTSSLFSLFILFFLSIYTELSSLLSTRSIRASTKI

SEQ ID NO: 177864 - protein, 73 aa, Zea Mays
MTKNRELVEVKRDEQYRELLARRDRELDLKEQEMEFKIMAVNIDDVPEDKRAYYLNLQQRIMEKSHRNNNSST

SEQ ID NO: 177865 - protein, 226 aa, Zea Mays
MAMGATVRAAAADAVVTFLWVLCASALGASTAAVTSYLGVQEGAGHYALLVTTSLLSVLLFTFDLLCGALGGASFNPTDFAASYAAGAVGGALAISELMPAQYKHTLAGPSLKVDPHTGALAEGVLTFVITLTVLWVIVKGPRNVILKTLLLSTSIVSVILAGAEYTGPSMNPANAFGWAYVNNWHNTWEQLYVYWICPFIGAMLAGWIFRVVFLPPAPKPKTKKA

SEQ ID NO: 177866 - protein, 473 aa, Zea Mays
MDVSKKYETDYRILHAITTGHSWYGQWGFKLNKGSFGITSEEYLKAMDNLSLTPLSHFFPHSRYPRNQLQDTISFYRSLSKQPLTTIRELFLYVLGLATSKSSNMHYGSMHKEHSHTHVQDTWPDEEIKRATEIAIKVLRAVEKTRWVTMRILKAAMYHSIGSPQLVDYCLKTLGTRTIDGMMVAVRCNSDTNTLEYRLMDEPIVLPNVSMPTQDHLRRDIKFLHDALLHPHTMHPYKPENCYEHGKRSAMVLLDCKQFTKHYDLEQEFLPQNPSMLHLWCQVEVLDQVGDPPCIPPELLTLPQTATVSDLKVEATRTFRGIYLMLHSFVADRLVDCGTASESTQLKLLFGANGTVRVQGRCASGERRVGIYRMERGVDKWTVRCSCGAKDDDGERMLSCDSCHVWQHTRCVGISDFDQVPKKYVCNSCKLLNKRKSRGHGPVYNIGPSKRFKIGAGGFSSRWGIFLRPPADM

SEQ ID NO: 177867 - protein, 389 aa, Zea Mays
MPIGWSRHPVCGRRYHFIIRNEYKTCKHCDHCGLMAQSFGTRCPTCKYVISSDDPEDWDYRQLDNPRHLLHGIVHDNGFGHLVRINGREGGSSLLTGIQLMGFWDWLCRYLRVRLMDEPIVLPNVSMPTQDHLRRDIKFLHDALLHPHTMHPYKPENCYEHGKRSAMVLLDCKQFTKHYDLEQEFLPQNPSMLHLWCQVEVLDQVGDPPCIPPELLTLPQTATVSDLKVEATRTFRGIYLMLHSFVADRLVDCGTASESTQLKLLFGANGTVRVQGRCASGERRVGIYRMERGVDKWTVRCSCGAKDDDGERMLSCDSCHVWQHTRCVGISDFDQVPKKYVCNSCKLLNKRKSRGHGPVYNIGPSKRFKIGAGGFSSRWGIFLRPPADM

SEQ ID NO: 177868 - protein, 619 aa, Zea Mays
MPIGKQILSNEMMIVMAGESQYHRLFFYNLIGWSRHPVCGRRYHFIIRNEYKTCKHCDHCGLMAQSFGTRCPTCKYVISSDDPEDWDYRQLDNPRHLLHGIVHDNGFGHLVRINGREGGSSLLTGIQLMGFWDWLCRYLRVRKVSLMDVSKKYETDYRILHAITTGHSWYGQWGFKLNKGSFGITSEEYLKAMDNLSLTPLSHFFPHSRYPRNQLQDTISFYRSLSKQPLTTIRELFLYVLGLATSKSSNMHYGSMHKEHSHTHVQDTWPDEEIKRATEIAIKVLRAVEKTRWVTMRILKAAMYHSIGSPQLVDYCLKTLGTRTIDGMMVAVRCNSDTNTLEYRLMDEPIVLPNVSMPTQDHLRRDIKFLHDALLHPHTMHPYKPENCYEHGKRSAMVLLDCKQFTKHYDLEQEFLPQNPSMLHLWCQVEVLDQVGDPPCIPPELLTLPQTATVSDLKVEATRTFRGIYLMLHSFVADRLVDCGTASESTQLKLLFGANGTVRVQGRCASGERRVGIYRMERGVDKWTVRCSCGAKDDDGERMLSCDSCHVWQHTRCVGISDFDQVPKKYVCNSCKLLNKRKSRGHGPVYNIGPSKRFKIGAGGFSSRWGIFLRPPADM

SEQ ID NO: 177869 - protein, 421 aa, Zea Mays
MPIGWSRHPVCGRRYHFIIRNEYKTCKHCDHCGLMAQSFGTRCPTCKYVISSDDPEDWDYRQLDNPRHLLHGIVHDNGFGHLVRINGREGGSSLLTGIQLMGFWDWLCRYLRVRKVSLMDVSKKYETDYRILHAITTGHSWYGQWGFKLNKGSFGITSEEYLKAMDNLSLTPLSHFFPHSRYPRNQLQDTISFYRSLSKQPLTTIRELFLYVLGLATSKSSNMHYGSMHKEHSHTHVQDTWPDEEIKRATEIAIKVLRAVEKTRWVTMRILKAAMYHSIGSPQLVDYCLKTLGTRTIDGMMVAVRCNSDTNTLEYRLMDEPIVLPNVSMPTQDHLRRDIKFLHDALLHPHTMHPYKPENCYEHGKRSAMVLLDCKQFTKHYDLEQEFLPQNPSMLHLWCQVEVLDQPIGLLTVERQVSQLN

SEQ ID NO: 177870 - protein, 151 aa, Zea Mays
MLLFLQQFLFGKLIVIYDNFCSLQLRRTNCKNCLVWAKSDDIGREIIKLSKDVIVGYVVMVDKFTNRRTELVRIEGAKVAGIYHPLIHEKVMKVMRRHDRRVFAWTVDDSSSMKKMLYEHVDAIVTSNPSLLQQLMQETRAECMEDGFALP

SEQ ID NO: 177871 - protein, 1024 aa, Zea Mays
MAAGNEWINGYLEAILDAGTRLRGPWQQQGGAASLTAALPRLLAEAGGQQGAAAYSPTRYFVEEVVSRFDDRDLHKTWTKVVAMRNSQERSNRLVNLCWRIWHVARKKKQVQREYARQLAQRRLEQELGSREAAEELSDGEKDGAPDAAQQPVSVAAPDGRIARIGSEARIVSDDEGGDGGKDDRNLYIVLISIHGLVRGENMELGRDADTGGQVKYVVELARALAATAGVHRVDLLTRQISCPDVDWTYGEPVEMITHQADDGDGSGGGAYIVRLPCGPRDKYLPKESLWPHIPEFVDRALAHVTNVARALGDQQQQQPDAGAGAGAAAPVWPYVVHGHYADAAEAAAHLASALNVPMVMTGHSLGRNKLEQLLKLGRMPRAEIQGTYRIARRIEAEETGLDAADMVVTSTKQEIEEQWGLYDGFDLMVERKLRVRRRRGLSCLGRYMPRMVVIPPGMDFSYVDTQDLAEGDADLQMLMSPGKAKKPLPPIWSEVLRFFVNPHKPMILALSRPDPKKNVTTLLKAYGESRHLRELANLTLILGNRHDIEEMSGGAATVLTAVLKLIDRYDLYGCVAYPKHHKQTDVPHIYRLAAKTKGVFINPALVEPFGLTLIEAAAYGLPVVATKNGGPVDIIKARWAECRRNGLRNIHRFSWPHHCRLYLSHVAANCDHPAPHQLLRVPASPRAALAEHGTDDSLSESLRGLSISIDASHDLKAGDSAAAIMDALRRRRSADRPPSSAARAIGHAPGRRQGLLVLAVDCYNGDGTPDAERMKKAVDLALSAAAAAGGRLGCVLSTGMTIAEAADALSACGVDPAGFDALVCSSGADLCYPWREVAADDEYAGHVAFRWPGNHVRAAVPRLGKAEGAQEADLAFDEAACSGPCHAYAAAGASKVKKVDSIRQSLRMRGFRCNLVYTRACTRLNVIPLSASRPRALRYLSIQWGIDLSKVAVLVGDKGDTDRERLLPGLHRTLVLPELVCHGSEELRRDQDGFLAEDVVSMDSPNILTLAEYQAAVDILKAI

SEQ ID NO: 177872 - protein, 614 aa, Zea Mays
MAAGNEWINGYLEAILDAGTRLRGPWQQQGGAASLTAALPRLLAEAGGQQGAAAYSPTRYFVEEVVSRFDDRDLHKTWTKVVAMRNSQERSNRLVNLCWRIWHVARKKKQVQREYARQLAQRRLEQELGSREAAEELSDGEKDGAPDAAQQPVSVAAPDGRIARIGSEARIVSDDEGGDGGKDDRNLYIVLISIHGLVRGENMELGRDADTGGQVKYVVELARALAATAGVHRVDLLTRQISCPDVDWTYGEPVEMITHQADDGDGSGGGAYIVRLPCGPRDKYLPKESLWPHIPEFVDRALAHVTNVARALGDQQQQQPDAGAGAGAAAPVWPYVVHGHYADAAEAAAHLASALNVPMVMTGHSLGRNKLEQLLKLGRMPRAEIQGTYRIARRIEAEETGLDAADMVVTSTKQEIEEQWGLYDGFDLMVERKLRVRRRRGLSCLGRYMPRMVVIPPGMDFSYVDTQDLAEGDADLQMLMSPGKAKKPLPPIWSEVLRFFVNPHKPMILALSRPDPKKNVTTLLKAYGESRHLRELANLTLILGNRHDIEEMSGGAATVLTAVLKLIDRYDLYGCVAYPKHHKQTDVPHIYRLAAKTKPPLHVLQHLLQDKYIL

SEQ ID NO: 177873 - protein, 614 aa, Zea Mays
MAAGNEWINGYLEAILDAGTRLRGPWQQQGGAASLTAALPRLLAEAGGQQGAAAYSPTRYFVEEVVSRFDDRDLHKTWTKVVAMRNSQERSNRLVNLCWRIWHVARKKKQVQREYARQLAQRRLEQELGSREAAEELSDGEKDGAPDAAQQPVSVAAPDGRIARIGSEARIVSDDEGGDGGKDDRNLYIVLISIHGLVRGENMELGRDADTGGQVKYVVELARALAATAGVHRVDLLTRQISCPDVDWTYGEPVEMITHQADDGDGSGGGAYIVRLPCGPRDKYLPKESLWPHIPEFVDRALAHVTNVARALGDQQQQQPDAGAGAGAAAPVWPYVVHGHYADAAEAAAHLASALNVPMVMTGHSLGRNKLEQLLKLGRMPRAEIQGTYRIARRIEAEETGLDAADMVVTSTKQEIEEQWGLYDGFDLMVERKLRVRRRRGLSCLGRYMPRMVVIPPGMDFSYVDTQDLAEGDADLQMLMSPGKAKKPLPPIWSEVLRFFVNPHKPMILALSRPDPKKNVTTLLKAYGESRHLRELANLTLILGNRHDIEEMSGGAATVLTAVLKLIDRYDLYGCVAYPKHHKQTDVPHIYRLAAKTKTTSTFKTKKQLQQTTT

SEQ ID NO: 177874 - protein, 422 aa, Zea Mays
MARVAAMVVVMVLLQQLASSYSYTVAAHADAAGVLGRKAGVVVDETPVEKSPAGPGRYAVIFDAGSTGSRVYIFRFGRQMDLLRIGDEIEFFAKLKPGLSSYAGRPQEAAKSILPLLEKAKSIVPSWLMKRTPVKLGATAGLRLIGNQQADQILDAVRDLVHKKSKFQYKPNWINVLEGSQEASYLWVALNYLLDKLGGEYSQTVGVIDLGGGSVQMAYAVSANAAARAPAVPDGEDPYITKEYFKGKQYNVYVHSYLRYGSFASRAEILMSKNGPFSSCMLRGFSGKYTYNGQQFDATARPEGALYDKCRGEIAKAMNLKAPCKTAKNCTFCGVWKGGGGAGQNDIYVASGFYYLASHIAKLQAQRPLLPHSGLRLRRPANSMSTEQKWPTQMFLTVMCRTCVWILLTRTHCSLTASVCSQ

SEQ ID NO: 177875 - protein, 117 aa, Zea Mays
MPFSRPAVGFLVRLVGVRPSCCPPSRAFAAVRAQKIQLPKKKRRLDEVCLERFQQYSRTYIQSWILQGKVIVDGRVVNKAGTQVSDKSVIEIKAEIPKYDISLRQLSKDLILIVMER

SEQ ID NO: 177876 - protein, 308 aa, Zea Mays
MAASDALQSIVYSRGSLRLLDQRKLPLEMEYIDVKSSADGWNAIRDMVVRGAPAIAIAAALALAVEVSDLDFIGTPEEAASFVSKKLEYLVSSRPTAVNLSDAATKLQTLVSKAAETAKDSKSIFQVYIEAAETMLVDDVADNKAIGSHGAVFLQRQLANSKKISVLTHCNTGSLATAGYGTALGVIRALHSGGVLEKAFCTETRPFNQGSRLTAFELVHEKIPATLIADSAAAALMKQGHVQAVIVGADRIAANGDTANKIGTYNLAISAKHHSVQFYVSAPVVWESKLLHPVYQSGTQLSMLLQQI

SEQ ID NO: 177877 - protein, 286 aa, Zea Mays
MYAFSTTTYVGFQAVMTEEMSEKFRGLPGVVFILPDSYLYPETKEYGGDKYDNGVITPRPPPVHYSRPSRTDRNRNYRGNYQDGPPQQGNYQNNRPPPEGGYQNNPPQQGNYQTYRSQQDGRGYAPQQNYAQGGQDGRGFGRNDYTDRSGYNGPPDFRSQTQYQGHVNPAGQGQGYNNPQERSNFSQGQGGGFRPGGPSAPGSYGQPSAPGSYGQPNTLGNYGQVPPSVNPGGNRVPGVNPSYGGDGRQGAGPAYGGDNWQRGSGQYPSPGEGQGNWQAVRADVFH

SEQ ID NO: 177878 - protein, 296 aa, Zea Mays
MACLVGYIYEEAKKRMYAFSTTTYVGFQAVMTEEMSEKFRGLPGVVFILPDSYLYPETKEYGGDKYDNGVITPRPPPVHYSRPSRTDRNRNYRGNYQDGPPQQGNYQNNRPPPEGGYQNNPPQQGNYQTYRSQQDGRGYAPQQNYAQGGQDGRGFGRNDYTDRSGYNGPPDFRSQTQYQGHVNPAGQGQGYNNPQERSNFSQGQGGGFRPGGPSAPGSYGQPSAPGSYGQPNTLGNYGQVPPSVNPGGNRVPGVNPSYGGDGRQGAGPAYGGDNWQRGSGQYPSPGEGQGNWQGRQ

SEQ ID NO: 177879 - protein, 200 aa, Zea Mays
MYAFSTTTYVGFQAVMTEEMSEKFRGLPGVVFILPDSYLYPETKEYGGDKYDNGVITPRPPPVHYSRPSRTDRNRNYRGNYQDGPPQQGNYQNNRPPPEGGYQNNPPQQGNYQTYRSQQDGRGYAPQQNYAQGGQDGRGFGRNDYTDRSGYNGPPDFRSQTQYQGHVNPAGQGQGYNNPQERSNFSQGQGGGTSISESWW

SEQ ID NO: 177880 - protein, 265 aa, Zea Mays
MYAFSTTTYVGFQAVMTEEMSEKFRETKEYGGDKYDNGVITPRPPPVHYSRPSRTDRNRNYRGNYQDGPPQQGNYQNNRPPPEGGYQNNPPQQGNYQTYRSQQDGRGYAPQQNYAQGGQDGRGFGRNDYTDRSGYNGPPDFRSQTQYQGHVNPAGQGQGYNNPQERSNFSQGQGGGFRPGGPSAPGSYGQPSAPGSYGQPNTLGNYGQVPPSVNPGGNRVPGVNPSYGGDGRQGAGPAYGGDNWQRGSGQYPSPGEGQGNWQGRQ

SEQ ID NO: 177881 - protein, 234 aa, Zea Mays
MFQKTAIHKCNLEGKPVIITRVVDSMIDNLRPTRAEATDVANAVLDGTDGILLGAETLRGLYPVDAVSTVGRICAEAETVYNQPLQFKKVMWHVGDPMPHEESVASAAVGSAIKVKAAAIVVFTFSGRAARLVAKYRPTMPILAVIFPREGSDPSKWRSYGTTQARQCFAVRGVYPLMGSTDEAETGGLTKEEYGIKLAMSYGRSVGIVKPFDRLIIFEKIGDSSVVKIIECEG

SEQ ID NO: 177882 - protein, 157 aa, Zea Mays
MVHSCNLAAVAGMLLSVLLLEENSIDDAADGDDDDNDIDGERSHGLIAKLHVLAAEAVNHVWHGFVVDDVLLVWVLEPGPELLQAAALGLLRQCPVVEPPCLLLAQHVVHLSQADELLRRHLERQRRRVRVVLLGQPPVRRLDLLDVRLWRYAKEPG

SEQ ID NO: 177883 - protein, 513 aa, Zea Mays
MQGASHMLLEEPFRLASVLSPAKPKVFPSLTKIVGTLGPNSHSVEIIQECLTAGMSVARFDFSWMDAAYHQETLDNLRKAAQNVKKLCPVMLDTLGPEIQVHNSTGEPIELKAGNHVIITPDICKALSAEILPIKFGDLAKAVKKGDTLFMGQYLFTGSETTSVWLENAATLDGPIFTLHASQVHINLPTLSEYDKHVISTWGSCNSVDIISLSHTRSAEDVRELRAFLQAHALPDTQIYAKIENSEGLDHFDDILNAADGIIISRGDLGIDLPPENVFMFQKTAIHKCNLEGKPVIITRVVDSMIDNLRPTRAEATDVANAVLDGTDGILLGAETLRGLYPVDAVSTVGRICAEAETVYNQPLQFKKVMWHVGDPMPHEESVASAAVGSAIKVKAAAIVVFTFSGRAARLVAKYRPTMPILAVIFPREGSDPSKWRSYGTTQARQCFAVRGVYPLMGSTDEAETGGLTKEEYGIKLAMSYGRSVGIVKPFDRLIIFEKIGDSSVVKIIECEG

SEQ ID NO: 177884 - protein, 221 aa, Zea Mays
MQGASHMLLEEPFRLASVLSPAKPKVFPSLTKIVGTLGPNSHSVEIIQECLTAGMSVARFDFSWMDAAYHQETLDNLRKAAQNVKKLCPVMLDTLGPEIQVHNSTGEPIELKAGNHVIITPDICKALSAEILPIKFGDLAKAVKKGDTLFMGQYLFTGSETTSVWLEVVETSGENVNCLVKNAATLDGPIFTLHASQVHINLPTLSEYDKHVTQTSLNFFT

SEQ ID NO: 177885 - protein, 132 aa, Zea Mays
MCPRRLGCRRAGGCPAQGRPVQDPPHELPQREDTQGHLLRKLQAPHRPAQRRRDVHEEGAGAGEVHHAQRALLGDQHGVRPDAQGGEPALHHEDGGLELHCKLAPPAGQACRTANGHEKLKALQSSSLCSTQ

SEQ ID NO: 177886 - protein, 358 aa, Zea Mays
MATAGKVIKCRAAVAWEAGKPLSIEEVEVAPPQAMEGQTPVFPRILGHEAGGIVESVGEGVTELAPGDHVLPVFTGECKECAHCKSEESNMCDLLRINVDRGVMIGDGKSRFTISGQPIFHFVGTSTFSEYTVIHVGCLAKINPEAPLDKVCILSCGISTGLGATLNVAKPAKGSTVAIFGLGAVGLAAMEGARLAGASRIIGVDINPAKYEQAKKFGCTEFVNPKDHDKPVQEVLIELTNGGVDRSVECTGNINAMISAFECVHDGWGVAVLVGVPHKDDQFKTHPMNFLSEKTLKGTFFGNYKPRTDLPNVVEMYMKKELELEKFITHSVPFSEINTAFDLMLKGESLRCIMRMED

SEQ ID NO: 177887 - protein, 379 aa, Zea Mays
MASQPPPEPAPAEAGLESMEGLVLDTVISRAGARPAAALACASTRLRTAVADDSLWRRFCGEDLGLDAPVDPEGRPLPSFQVAYKVWSESFGMYPLPMVKRVRQFWTSMKTWLSENFPEAYKTLCEGVSEAQLKSAEDDLGFKLPMPTKLLYRFCNAQLPFSEDHDTNKSISTYGLIGGYAFYDHWVNVHLSPLEQIVEETKDFYREFPDVFHGRKFIVVATSWFHPKTFLLDCSNGELYVGTYNLPIGGMLPCVPKALIKPAGNDLAQDGLLLWLEEHLRRLQSGMIKTRMLMASRYISLYPEAPPSCSSAVTNGIKYPLLLPGEDEFVYESCTPLPQVPGSVEGSFSFVPGKLSRPEGKPFEVMVAPFPLDVPEYIF

SEQ ID NO: 177888 - protein, 251 aa, Zea Mays
MYPLPMVKRVRQFWTSMKTWLSENFPEAYKTLCEGVSEAQLKSAEDDLGFKLPMPTKLLYRFCNAQLPFSEDHDTNKSISTYGLIGGYAFYDHWVNVHLSPLEQIVEETKDFYREFPDVFHGRKFIVVATSWFHPKTFLLDCSNGELYVGTYNLPIGGMLPCVPKALIKPAGNDLAQDGLLLWLEEHLRRLQSGMIKTRMLMASRYISLYPEAPPSCSSAVTNGIKNILGGLGKNLCSLTQFACQFQRHAC

SEQ ID NO: 177889 - protein, 63 aa, Zea Mays
MRQVTPHQKIGVQSHLLWFNHFQTLEAECGNLGPSLNGKCSFDLQLKINAELRIKMKWAGTYL

SEQ ID NO: 177890 - protein, 110 aa, Zea Mays
MQKGKADVISDGKTVTQVSTFGSPRRCGGQGDILSGSVAVFASWARHFVLTNEEPTEKRVNPMTLGCIAASLLLRKAASHAFEKNKRSTVTSDIIEFLGKSLEDICPAEH

SEQ ID NO: 177891 - protein, 174 aa, Zea Mays
MERFDCIVVGPGLGRDPFLLECVSNIMRHARQANIPTVVDGDGLFLVNNNLNLVEGNPLAILTPNVYEYKRLVQKVLNCDVDEESASEQLIALCQKIGDVTIMQKGKADVISDGKTVTQVSTFGSPRRCGGQGDILSGSVAVFASWARHFVLTNEEPTEKSCLPSTPESCVTCF

SEQ ID NO: 177892 - protein, 360 aa, Zea Mays
MSRPTGAWRLGMATCTIPAAPRAHVGRLPGIRQAARPALLLPSFSSSTLLCHRLPPILPLVLQLLRVRANHAMAASAGTVYEADAEAVVRRITPALDRARHKGQAGKIAVIGGCREYTGAPYFAAISALKVGADLSHVFCTKDAATVIKSYSPELIVHPILEESYSVRVDERASVSSKILTEVAKWMERFDCIVVGPGLGRDPFLLECVSNIMRHARQANIPTVVDGDGLFLVNNNLNLVEGNPLAILTPNVYEYKRLVQKVLNCDVDEESASEQLIALCQKIGDVTIMQKGKADVISDGKTVTQVSTFGSPRRCGGQGDILSGSVAVFASWARHFVLTNEEPTEKSCLPSTPESCVTCF

SEQ ID NO: 177893 - protein, 297 aa, Zea Mays
MVSMIVGEIANFAAYAFAPAILVTPLGALSIIISAALAHAILQEKLHTFGILGCVLCVVGSITIVLHAPQERDIDSVKEVWDLATEPAFLCYAAIVVASALVLIYFVVPHHGQTNIMVYIGVCSLLGSLTVMSVRALGIALKLTFSGTNQLFYPQTWAFAVIVATCVSTQINYLNKALDTFNTAVVSPIYYVMFTSLTIIASVIMFKDWDHQNPTQIVTEMCGFMTILSGTFLLHKTKDMTESPGQCLSTRRSKHASQNAFAIEVVPLKCQDSIDDETLTLSLPQEALGDHFALRHD

SEQ ID NO: 177894 - protein, 489 aa, Zea Mays
MRGRKRQQVSASSAAALVKGRESTKQKEKEARKEKEAREAGREPAAKERQMRRKEPAKEKEVREEGKENDKHKEKAKTKANVCPQFFKVFFPEQSTERLRIPPMFNQHLKEQQPTGAVSLRGPSGNRWQAALASESESEAAWCFDQGWKEFVTDHSLRLGHFLVFTRDGPAQFSVAVFSSSGVIDPAALDARPTANGGAAVKLEDGEGVGVRGDVDAGGDTSSEVSLLPAEEGDGGATGRRTGATSGGAGGASEMSLVLREEGRGVTGKRARATTSDLPADASAPKKHSALAKKAGKRRPQAATSKDVSMIVHNPTFSLLDESKTFNKTQIRDKNVPRSGKFLLRTTKAPVVISQRRRVTEEEKCLALRKAMEFKSKHPFTMQIMIESYVYVGFFMNIACEFVRESLPRTSKKMTLWDPMGKPWDVSYVYYGDRAAGSFGGGWGRFALGNNLEKSDVCVFELFEEDNMRVHIYRVVPEITPLLRASNKD

SEQ ID NO: 177895 - protein, 111 aa, Zea Mays
MDLNFLNRSIQIRTYSMYHLHPTRELWDFFFKKRPKSVTVMERSTYCSSLLIVWYIFCKTTENCRRIMASLQSYSGVAIIIHLGSPCPATTFPYYPKNKQSFTENKEKPNN

SEQ ID NO: 177896 - protein, 444 aa, Zea Mays
MAIRSKAWISLLLALAVALSARAEEEPAAAAEGEAVLTLDVDSFDEAVAKHPFMVVEFYAPWCGHCKKLAPEYENAAKALSKHDPPIVLAKVDANEEKNRPLATKYEIQGFPTIKIFRDQGKNIQEYKGPREADGIVDYLKKQVGPASKEIKSPEDATALIDDKKIYIVGIFAEFSGTEFTNFMEVAEKLRSDYDFGHTLHANHLPRGDAAVERPLVRLLKPFDELVVDSKDFDVAALMKFIDASTIPRVVTFDKNPDNHPYLMKFFQSSAPKAMLFLNFSTGPFDSFKSAYSAAAEEFKDKEIKFLIGDIEASQGAFQYFGLKEDQTPLILIQDGDSKKFLKVHVEADQIVAWLKEYFDGKLTPFRKSEPIPEVNNEPVKVVVADNVHDFVFKSGKNVLIEFYAPWCGHCKNKETAGAATTTTTQAPPASEKAAAAEPVKDEL

SEQ ID NO: 177897 - protein, 378 aa, Zea Mays
MLNALDHRHPEGVREEVIVDLVGQCRSYQSRVMDLVNSTGDESLLFQALGLNDELQRVVQRHDDIAKGIPPGTGAPLPASGNVNQGTAPPRPTAVSFSPLLNVHEDDEPEDEFSVLSRRSARDGAVAQNNVPSAPRNERSYPSPLLPPPPASKRPVYTEASSVDYLSGDSYKSEKVSDDFINPTAPANISTSSHSKAEAHPPPSYGGRPDRVSDDFINPTAPSFSAPSRPTNEEPARPSVKRQESLPDDDFINPTALPGFSSSSATKESGEDLPKAPWEAQAAAGSLPPPPARYGQRQQYFEQNVYSGGSNEGGYNGLTTQTEGLSLNPRSSENERSAARPAASRPAKPEDSLFKDLVDFAKTKPSSPSKPANSRRTR

SEQ ID NO: 177898 - protein, 385 aa, Zea Mays
MSAAVACAERATNDMLIGPDWAVNIELCDIINMDPGQAKDTLKLLKKRLASKNTKVQILTLYVLETLSKNCGDIVHQQIVERDILSEMVKIVKKKPDLSVREKILSLIDTWQVAFGGPSGKYRQYHAAYQELRAAGVDFPPREENSVPLFTPPQTQPLRHPHLYTPPGQSYEDAAIQASLQSAPPASALRFLSEIQSARGIVDVLDEMLNALDHRHPEGVREEVIVDLVGQCRSYQSRVMDLVNSTGDESLLFQALGLNDELQRVVQRHDDIAKGIPPGTGAPLPASGNVNQGTAPPRPTAVSFSPLLNVHEDDEPEDEFSVLSRRSARDGAVAQNNVPSAPRNERSYPSPLLPPPPASKRPVYTEKHIHLRVMVAGQTEYLTTS

SEQ ID NO: 177899 - protein, 88 aa, Zea Mays
MLKDVDGFGTQQQEEIPPTTLHTPIPFSPKTAHVAPHNCSLQLLDVEHCSPPNRARLPWLACMVEARRANNIGTMRTARIFLEHAMKL

SEQ ID NO: 177900 - protein, 536 aa, Zea Mays
MRVLPHVVEQIKSTLVHRYTRLITAASASSPVSLRALLPIHARAIVLGVSANPAFATSLLAGVAPASLAYARRVFDATPVRDAYMWNTLLRAHSHSQLSHAADTLALYKRMRAAGVAPDHYTYPIVLPACAAARELWLGRAVHGDVVRFALAGDGFVHSALITMYFQEGEVADAELVFAESHGSSRTVVSWTSMVAGYVQNYYFGEAVALFGTMIAEGVLPNEITLISFLPCLQGQEWLDAGEMVHGFVIRLGFDANIPLANALIAMYGKCGSIPMAQTLFEGMPARSLASWNTMVAMYEQHADVVEAIKFFRRMLTEKVGFDCVTLVSVLSACARSGALQTGKWVHELARNHGLDTDARIGNVLVDMYAKCGEIASARNVFDCLRMRSVVSWSAMISAYANHGASEEALKLFSLMKNEGVRPNSFTFTAVLVACGHSGLVEEGLKHFNSILSDYQMSPTLEHYACMVDMLGRAGRLIEAYEIIRGMSLCPDKCVWGAFLAGCKLHAGMLKDAERMRWAMKEMELNKTAGRSAINQ

SEQ ID NO: 177901 - protein, 156 aa, Zea Mays
MSQRDVDYSCGFCGYPLNLSSSNRSTSEVGSSYKKSLKKGLISFISVDLSRFTQVDKVSCFPLTWRSYRPKTKLLCRKCGASIGYGYGEPAALCSFDPASSSSSSTSQKYLIKIQALQPSDGTQKRVREECFWFDLQELVQGSEPWSEITNIPLLF

SEQ ID NO: 177902 - protein, 77 aa, Zea Mays
MMDRRIHFSFNIRYIYTWENGLSIFVSQCSSIKIYFCLLSPITKKFRERFSTIHLITINICFIQPADNIMPTYITEN

SEQ ID NO: 177903 - protein, 79 aa, Zea Mays
MKQAAKYPRVAFCGYTIPHPSEKKVNIRLQTTGDAAKDVLKDALQNLMIMCQHVRGTMDTAVVNHRAKNAAEEMDVDQN

SEQ ID NO: 177904 - protein, 155 aa, Zea Mays
MCYNDWTVVQVLHGFMEPYFRGTVSPMMDGPYDAIELETRISKLKESMCNLHSLQMKLKVPEDEPLQTNIRASLLWSEKESFEEYNESFIPGRPERLSFAAYQTVSGMSDELLTVQNYKIQAMDSTDTLERLNTGIKFVEHNIGMIAARLAIQNI

SEQ ID NO: 177905 - protein, 292 aa, Zea Mays
MAASAPIHLLLSPSRSTWPPQDPSLRPIPPLHAWPARQRHLRAARCALSPPTPSLDLPLLPFQPAEVLIPSESKTLHLYEARYIALLEEALYKREKSFVHFVLDPVVDSSTKASFAVRYGCLVHIESVQKLEIGALLSIRGVCRVNISNLLDMEPYFRGTVSPMMDGPYDAIELETRISKLKESMCNLHSLQMKLKVPEDEPLQTNIRASLLWSEKESFEEYNESFIPGRPERLSFAAYQTVSGMSDELLTVQNYKIQAMDSTDTLERLNTGIKFVEHNIGMIAARLAIQNI

SEQ ID NO: 177906 - protein, 247 aa, Zea Mays
MWVKQSTKDTVTSLLPDGLIDKNTGLVIGSALYFRGRWLDRTDTRSDAVQKFCCLDRTCVDVPFVEYDRTRPFAVHDGFKVIKLPYQQGNNERKFSMYIFLPDAHDGLFELAKKVFAEPSFLEQHLPTEKRHVDIKIPKFTVSFQVNMKQFLKEMGLELPFLRDADFTDMVKEDGSRNPLYLSDILHKAVLEVNDEGVEETSVRIGIGKPSPGEHFVADHPFFFVIREEVSGSVMFMGHILDPSSQS

SEQ ID NO: 177907 - protein, 98 aa, Zea Mays
MFDGAAERVPDDAPLFRRVESLERGPRLHLSLIVEVARGDRVLGFVCSAWPDDLAVRHVLTFAASGGSSGGGRRGGRDFEKLWGEEREAVTKFLKERH

SEQ ID NO: 177908 - protein, 215 aa, Zea Mays
MAGTSSWSSSSSCASSFGSPDHDVVCVTEPDSVGAAAVAVADAEGSVKFLCSYGGRILPRRTDGTLRYVGGDNRVLSVDRPIRFYVLQRKLRELCGGWEAHLRCQLPTEDLDALISVTCDDDLAKLLEEYDEASKDRLQSLKIRAFLFPTRTPAPSILQRRSPPSIAHLHWQNTSPPAAAGVSLTCAPRWWAAPQASRQAQAPQAQNYDRHSLGV

SEQ ID NO: 177909 - protein, 199 aa, Zea Mays
MDLNFWGAVYPTYFALPYLKASRGNIVVTASVAGRVPTARMSFYNASKGAVIRFYETLRAELGSHVRVTILMPGYVVSNLTKGRGLQKDGRVGVDEEARDINVGPMPVGKTESLAEVVVASVRRGDYYVTWPGWYWPFHMVMCAAPELLDWFSRAFYVSKSGGQDGGAALSKKILEAVGGKKFLYPQTIRCQQTTMGAS

SEQ ID NO: 177910 - protein, 327 aa, Zea Mays
MSSKDAVLNAFLSCFMHVGLALVLLVYLPAASVLRLLVRPLLANKQAEDLRGKVVLVTGASSGIGEHLVYEYARNGACVALVARTEVALRAVAKAARDLGSPDVLVVPADVTKVDDAKRAVDETLAHFGKLNHLVANAGIWSSCFFEEITNITAFHNVMDLNFWGAVYPTYFALPYLKASRGNIVVTASVAGRVPTARMSFYNQRRRDTFLRDAKGRAGVARARHHPHARLRRLQPHQGQGPPEGRPRRRRRGGPRHQRGADAGGQDGVAGGGGGGERAARGLLRDVARLVLALPHGHVRRAGAARLVLPGLLRLQVRRPGRRRRAE

SEQ ID NO: 177911 - protein, 320 aa, Zea Mays
MSSKDAVLNAFLSCFMHVGLALVLLVYLPAASVLRLLVRPLLANKQAEDLRGKVVLVTGASSGIGEHLVYEYARNGACVALVARTEVALRAVAKAARDLGSPDVLVVPADVTKVDDAKRAVDETLAHFGKLNHLVANAGIWSSCFFEEITNITAFHNVMDLNFWGAVYPTYFALPYLKASRGNIVVTASVAGRVPTARMSFYNASKGAVIRFYETLRAELGSHVRVTILMPGYVVSNLTKGRGLQKDGRVGVDEEARDINVGPMPVGKTESLAEVVVASVRRGDYYVTWAGWVKLMKCFYSFSFFLFFSFSLPLISPLSV

SEQ ID NO: 177912 - protein, 226 aa, Zea Mays
MDDNVVTEEDLNANFLIPPDESIYGGRSRAQVCCESLIDFNPMVRVFVEKGDPSLIDGEFLDKFDIVVLSRASLKTKKKPGGATEQQELTYSSLQEAISVPWNSLPKKTAKLYFAMRVLEDYELSEGRSPGETTLSDIDAVLARRKDMCDKMSLNESRIPTTLVERLLAAGKKEHPPVCAILGGILGQEVIKSISCKGDPVKNFFYFDVADGKGVIEDIPPPPPAK

SEQ ID NO: 177913 - protein, 215 aa, Zea Mays
MDDNVVTEEDLNANFLIPPDESIYGGRSRAQVCCESLIDFNPMVRVFVEKGDPSLIDGEFLDKFDIVVLSRASLKTKKKPGGATEQQELTYSSLQEAISVPWNSLPKKTAKLYFAMRVLEDYELSEGRSPGETTLSDIDAVLARRKDMCDKMSLNESRIPTTLVERLLAAGKKEHPPEVIKSISCKGDPVKNFFYFDVADGKGVIEDIPPPPPAK

SEQ ID NO: 177914 - protein, 291 aa, Zea Mays
MVILYPGCVAPTVHRDFLPRWVLLNNSSRMYCHVFPDRTKPKRQYRHQWVPCFSKGSSFQDPLPSVKPSRLLPAEELKTYPNTVPEEIFNTIILDDSDAFYVLELSTSREFSSSLDKNSAILICLFDVDGDSLLQRVPAIYLGQPTHGFKTEQQIPFQSGSVDIVTFKGSKLKTIKEVWIGLESGSWRLDGLSLKVIHGPVGQPKEINGTPEQKFSGLQYTFENVNVFLGDDGASVAEARPTAITDLSGVGLSDLQQGMLSSRSKASSIQEVALEGSCTCCCSKDRLMVCL

SEQ ID NO: 177915 - protein, 99 aa, Zea Mays
MHILQIFHRKVYPESAALARNLTKKSRKRGSGAYHKPEPAASKLRCLKEQRAPGFGCCASRASFGGAASPIDGDDDDELNGSKSGHWIKTDAEYLVLEL

SEQ ID NO: 177916 - protein, 565 aa, Zea Mays
MLAYIMLPQMQVAIFSSIACSPTSQFRRLQFLDLSIKSRPYHFSQSCLMALAAAPASGDSQSGPQRNYQVVVAATRDMGIGKGGVMPWKLLGDLKFFKELTLTTTDPAKKNAVIMGRKTWESIPVKSRPLPGRLNVILTRSGSFDFATVENVVICGSMKSALELLASTPYCLSIEKVFVIGGGQVLREYLNGPACEAIHLTDIQSSIECDTFIPPVDFSVFQPWYSSFPVVESNIRHSFVTFVRVRKSVAETHESNGKESTEIDTKNDKFEIENFSFLPKIVYDRHEEYQYLNLVEDIIRFGAQKNDRTGTGTLSKFGCQMRFNLRKNFPLLTTKRVFWRGVVEELLWFISGSTNAKVLQEKGIHIWDGNASREYLDREEGDLGPVYGFQWRHFGAEYTDMHADYTGKGFDQLMDVIDKIKNNPDDRRIILSAWNPSDLKKMALPPCHMFAQFYVENGELSCQMYQRSADMGLGVPFNIASYSLLTYMIAQVCDLSPGDFVHVIGDAHVYRNHVRALEEQIQKMPKPFPILKINPSKKDIDSFMASDFKLVGYDPHQKLEMKMAV

SEQ ID NO: 177917 - protein, 571 aa, Zea Mays
MLAYIMLPQMQVAIFSSIACSPTSQFRRLQFLDLSIKSRPYHFSQSCLMALAAAPASGDSQSGPQRNYQVVVAATRDMGIGKGGVMPWKLLGDLKFFKELTLTTTDPAKKNAVIMGRKTWESIPVKSRPLPGRLNVILTRSGSFDFATVENVVICGSMKSALELLASTPYCLSIEKVFVIGGGQVLREYLNGPACEAIHLTDIQSSIECDTFIPPVDFSVFQPWYSSFPVVESNIRHSFVTFVRVRKSVAETHESNGKESTEIDTKNDKFEIENFSFLPKIVYDRHEEYQYLNLVEDIIRFGAQKNDRTGTGTLSKFGCQMRFNLRKNFPLLTTKRVFWRGVVEELLWFISGSTNAKVLQEKGIHIWDGNASREYLDRIGLAHREEGDLGPVYGFQWRHFGAEYTDMHADYTGKGFDQLMDVIDKIKNNPDDRRIILSAWNPSDLKKMALPPCHMFAQFYVENGELSCQMYQRSADMGLGVPFNIASYSLLTYMIAQVCDLSPGDFVHVIGDAHVYRNHVRALEEQIQKMPKPFPILKINPSKKDIDSFMASDFKLVGYDPHQKLEMKMAV

SEQ ID NO: 177918 - protein, 245 aa, Zea Mays
MRFNLRKNFPLLTTKRVFWRGVVEELLWFISGSTNAKVLQEKGIHIWDGNASREYLDREEGDLGPVYGFQWRHFGAEYTDMHADYTGKGFDQLMDVIDKIKNNPDDRRIILSAWNPSDLKKMALPPCHMFAQFYVENGELSCQMYQRSADMGLGVPFNIASYSLLTYMIAQVCDLSPGDFVHVIGDAHVYRNHVRALEEQIQKMPKPFPILKINPSKKDIDSFMASDFKLVGYDPHQKLEMKMAV

SEQ ID NO: 177919 - protein, 587 aa, Zea Mays
MSSGGDVPMTDQTDDDPYEDEFDEEDEMNMYRVQGTLREWVTRDEVRRFIAKKFKEFLLTYVHPKNDQGEFEYVRLINEMVLANKCSLEIDYKQFIYIHPNIAIWLADAPQSVLEVMEEVAKNVVFDLHKNYRNIHQKIYVRISNLPVYDQIRNIRQIHLNTMIRIGGVVTRRSGVFPQLQQVKYDCNKCGTILGPFFQNSYTEVKVGSCPECQSKGPFTVNVEQTIYRNYQKLTLQESPGIVPAGRLPRYKEVILLNDLIDCARPGEEIEVTGIYTNNFDLSLNTKNGFPVFATVVEANYVAKKQDLFSAYKLTDEDKAEIEKLSKDPRIGERIIKSIAPSIYGHEDIKTAIALAMFGGQEKNVKGKHRLRGDINVLLLGDPGTAKSQFLKYVEKTGHRAVYTTGKGASAVGLTAAVHKDPVTREWTLEGGALVLADRGICLIDEFDKMNDQDRVSIHEAMEQQSISISKAGIVTSLQARCSVIAAANPVGGRYDSSKTFTQNVELTDPIISRFDVLCVVKDIVDPFTDEMLARFVVDSHARSQPKGANLEDRVSTDVDDDPLAAARQADPDVLSQDMLKKYMMPI

SEQ ID NO: 177920 - protein, 776 aa, Zea Mays
MDDSENNAPSTPGSPGFSTDRLPPNTTTSRGATDPSSYSDDDGEAEVDPHVLPDDDDPAAVAAPDEDEEGEDLFNDNYLDDYRRMDEHDQYESVGLDDSLEDERNLDEIMADRRAAEAELDAREVRTGATADRKLPRMLHDQDTDDDTNFRRPKRHRASFRQPSGPRTPRSDDDGDGATPSSPGRSHRGMSSGGDVPMTDQTDDDPYEDEFDEEDEMNMYRVQGTLREWVTRDEVRRFIAKKFKEFLLTYVHPKNDQGEFEYVRLINEMVLANKCSLEIDYKQFIYIHPNIAIWLADAPQSVLEVMEEVAKNVVFDLHKNYRNIHQKIYVRISNLPVYDQIRNIRQIHLNTMIRIGGVVTRRSGVFPQLQQVKYDCNKCGTILGPFFQNSYTEVKVGSCPECQSKGPFTVNVEQTIYRNYQKLTLQESPGIVPAGRLPRYKEVILLNDLIDCARPGEEIEVTGIYTNNFDLSLNTKNGFPVFATVVEANYVAKKQDLFSAYKLTDEDKAEIEKLSKDPRIGERIIKSIAPSIYGHEDIKTAIALAMFGGQEKNVKGKHRLRGDINVLLLGDPGTAKSQFLKYVEKTGHRAVYTTGKGASAVGLTAAVHKDPVTREWTLEGGALVLADRGICLIDEFDKMNDQDRVSIHEAMEQQSISISKAGIVTSLQARCSVIAAANPVGGRYDSSKTFTQNVELTDPIISRFDVLCVVKDIVDPFTDEMLARFVVDSHARSQPKGANLEDRVSTDVDDDPLAAARQADPDVLSQDMLKKYMMPI

SEQ ID NO: 177921 - protein, 153 aa, Zea Mays
MWITWISDMQHMYWIWFPPCTKHGSCSMTLSARKVSAARGAASVPEEVFHRAKGVQLCNIQAYQCTPAFFADSYPLNQFSSEVIASRLPVPPSARVISERHIISVVPVTRVTMARRKQSFSFYVVGYSRDVFIRDYPSKFCWGLCCCFEWLGK

SEQ ID NO: 177922 - protein, 207 aa, Zea Mays
MNLTPVQEERLQRLKHRMKVYFDPSRRDHQEALKALWHATYPDQELEGLISEQWKDMGWQGRDPSTDFRGAGFISLENLLFFAKTFSASFQRLLNKQCGNRATWEYPFAVAGVNITFMIMQMLDLQSTKPRTFVRAIFIQMLSEDEWAFDLLYCVAFVVMDKQWLDKNASYMDFNEVLKSTRAQLERELMLDDVIRIEDMPSYSLLC

SEQ ID NO: 177923 - protein, 107 aa, Zea Mays
MDLNSRRASSSSPGWEHAESAPTSVVAFGGTPSRCIRLKKSSARSPCPRFASPEMRGFHAAGTRRSGSPSNTAKASSMAPFLTYMSTSAVPRMGPTATPRATIRSCT

SEQ ID NO: 177924 - protein, 668 aa, Zea Mays
MGPIRCSRCKAYINPFMKFVDQGRHFVCNLCGFRNDTPREYMCNLGPDGRRRDADDRPELSRGTVEFVATKEFLVRDPMPAVYFFLIDVSMNAIQTGATAAACSAISQSISDLPEGPRTMVGIATFDSAIHFYSLKRAQQQPLMLIVPDVQDVYTPLQTDLILPVSECRENLEQLLESIPNMFENNRVADSAFGAAMKAGFLAMKSTGGKLLVFQSVLPSLGIGSLSAREAEGRANITTGDKEAHKLLQPVDNTLQTMALEFAEYQVCVDVFLTTQSYVDIASISVVPQTTGGRVYYYYPFSALSDPAKLFNDLRWNISRPQGFEAVMRVRCSQGLQVQDYFGNFCKRVPTDIDLPAIDSDKTVMVTFKHDDKLPENVECGFQCALLYTTVYGQRRIRVINLSLSCTNLLANLFRYADLETQFACFLKQAANGIPTSSLPRIRDEATNTCINILQSYRKHCASVTSSGQLILPEALKLLPLYTLALVKSVGLRTDGRLDDRSYWISLVSSVSVVLAVPLVFPRLIPIHDLTSRDDDDSLVPSPLMLKSENVQEDGVYLLENGEDGLVYVGNMVNPATLEQIFGVSSLAALPAQLALEQFDNELSRKINEVVNEIRRQRCSYLRLRLCRRGEPSGDFFRSFLIEDKAPGVFSYEEFLVHVHRQIQSKMT

SEQ ID NO: 177925 - protein, 1041 aa, Zea Mays
MASSPQQPPPFATQNPTAQGPGQGPPVSGTGALPGAFSNLQISRGAAPPPGAPRGLTPQQAPPAFAALSGPPPAAARPFFPGSPPAPPFVRAPTAAASVSPPFGGQPGVVSQQPPPFGGPPGAASQPPPPFGVAPGVVSQAPPPFGGPPTAASQAPPPFGGPPAMASQVPSPFVGHSVAASQAAPFGVPPVAGSHPPPFGGPPGAGPHPAPPLRQTFPGQSGPMASAAAWTQPTPPSFGAPQQSPPPFSSRPVGQPPFATQSAPVAQQLPFMGPPRANAPAFGPPSWQTQGAGSGAMQPPMRMPGIPGSMQPNTLGPPGTPTMTYSPHAGTQVSTPSKIDPNQIPRPMPESSVIIYETRQGGQATIPPAASSEFIVKDTGNCSPRLMRCTVNQIPCTGDLLMTSGMPLALMVQPFSLPHPSEEPIQLVDFGEMGPIRCSRCKAYINPFMKFVDQGRHFVCNLCGFRNDTPREYMCNLGPDGRRRDADDRPELSRGTVEFVATKEFLVRDPMPAVYFFLIDVSMNAIQTGATAAACSAISQSISDLPEGPRTMVGIATFDSAIHFYSLKRAQQQPLMLIVPDVQDVYTPLQTDLILPVSECRENLEQLLESIPNMFENNRVADSAFGAAMKAGFLAMKSTGGKLLVFQSVLPSLGIGSLSAREAEGRANITTGDKEAHKLLQPVDNTLQTMALEFAEYQVCVDVFLTTQSYVDIASISVVPQTTGGRVYYYYPFSALSDPAKLFNDLRWNISRPQGFEAVMRVRCSQGLQVQDYFGNFCKRVPTDIDLPAIDSDKTVMVTFKHDDKLPENVECGFQCALLYTTVYGQRRIRVINLSLSCTNLLANLFRYADLETQFACFLKQAANGIPTSSLPRIRDEATNTCINILQSYRKHCASVTSSGQLILPEALKLLPLYTLALVKSVGLRTDGRLDDRSYWISLVSSVSVVLAVPLVFPRLIPIHDLTSRDDDDSLVPSPLMLKSENVQEDGVYLLENGEDGLVYVGNMVNPATLEQIFGVSSLAALPAQHWSSLTTNSRGRLTKL

SEQ ID NO: 177926 - protein, 231 aa, Zea Mays
MIEETKLSRKKDTSIERIGFLSRFEVTNEEHPLSSGKSSLWNQYFQDSELLEQIDRDVKRTHPDISFFSSKSNQESLRRILIIFSKLNPSIRYVQGMNEVLAPLFYVFKNDPDPSNSASAEADAYFCFVELLSGFRDNYCKHLDNSSVGIRSTLSKLSQLLKRHDEELWRHMEVTTKDTLMRICCAMLILVRKRLLAGDFTANVQLLQHYPATNIDHLLHIANRLRGTVPG

SEQ ID NO: 177927 - protein, 77 aa, Zea Mays
MAAEGEKKMITLKSSDGEEFEVEEAVAMESQTIRHMIEDDCADNAPPPPVRTSRTGMRTSSRSTRPRFSTSSWLQTI

SEQ ID NO: 177928 - protein, 150 aa, Zea Mays
MAAEGEKKMITLKSSDGEEFEVEEAVAMESQTIRHMIEDDCADNGIPLPNVNSKILSKVIEYCNNTAASGEDLKNWDADFVKVDQATLFDLILAANYLNIKGLLDLTCQTVADMIKGKTPEEIRKTFNIKNDFTPEEEEEIRRENQWAFE

SEQ ID NO: 177929 - protein, 92 aa, Zea Mays
MRFPSNVTFTTTEWFVLTGTFLKLFSYRKFREAAIPQVPCHHGVLAAHVVTMPAWHKLWISCHLTVPSIWTGMESKLFSPPSHRSKATYLVS

SEQ ID NO: 177930 - protein, 548 aa, Zea Mays
MLRGSSGFYCYAIFEHDRAYPALNITEARLVFKLNTAKFNYMAITDDIQRYMPSAADREEPRAVPLAYKEAVLLVDPKEPQFRGEVDDKYQYSLDNKDNVVHGWISRGDPNAVGFWVITPSNEFKSGGPLKRELTSHVGPTSLTMFMGTHYVGKYMVANINDGEAWKKVLGPVFIYLNSGPSRGELWEDAKARARAEAASWPYSFLASPEFPKAAERGSVVGRLLVRDSHEKHGMPAGSSAFVGLASPGPPGSWATESKGYQFWTRAAPDGTFRIANVREGVYGLYAFVPGFLGDYCYGSPLTVAPGRAIGVGDLVFEPPRSGPTVWEIGVPDRTAAEFYVPDPDPRYVNRLFVVRDRYRQYGLWERYADLYPDKDLVFTVGESDESKDWFFAHVTRKVGQVAVPTTWQIRFSLDRVVADDDTYTLRISLAASQMCRLQVQVNGDARRGRDFTTPDMGDDNAITRHGIHGSQWSLECVVGGHLLRQGDNTIDIKLIAQQGPKGPAMVAGVMYDYIRLEGPPSRGVASSRIPAFSLHRILFLLAFLVMS

SEQ ID NO: 177931 - protein, 538 aa, Zea Mays
MLRGSSGFYCYAIFEHDRAYPALNITEARLVFKLNTAKFNYMAITDDIQRYMPSAADREEPRAVPLAYKEAVLLVDPKEPQFRGEVDDKYQYSLDNKDNVVHGWISRGDPNAVGFWVITPSNEFKSGGPLKRELTSHVGPTSLTYMVANINDGEAWKKVLGPVFIYLNSGPSRGELWEDAKARARAEAASWPYSFLASPEFPKAAERGSVVGRLLVRDSHEKHGMPAGSSAFVGLASPGPPGSWATESKGYQFWTRAAPDGTFRIANVREGVYGLYAFVPGFLGDYCYGSPLTVAPGRAIGVGDLVFEPPRSGPTVWEIGVPDRTAAEFYVPDPDPRYVNRLFVVRDRYRQYGLWERYADLYPDKDLVFTVGESDESKDWFFAHVTRKVGQVAVPTTWQIRFSLDRVVADDDTYTLRISLAASQMCRLQVQVNGDARRGRDFTTPDMGDDNAITRHGIHGSQWSLECVVGGHLLRQGDNTIDIKLIAQQGPKGPAMVAGVMYDYIRLEGPPSRGVASSRIPAFSLHRILFLLAFLVMS

SEQ ID NO: 177932 - protein, 497 aa, Zea Mays
MAITDDIQRYMPSAADREEPRAVPLAYKEAVLLVDPKEPQFRGEVDDKYQYSLDNKDNVVHGWISRGDPNAVGFWVITPSNEFKSGGPLKRELTSHVGPTSLTYMVANINDGEAWKKVLGPVFIYLNSGPSRGELWEDAKARARAEAASWPYSFLASPEFPKAAERGSVVGRLLVRDSHEKHGMPAGSSAFVGLASPGPPGSWATESKGYQFWTRAAPDGTFRIANVREGVYGLYAFVPGFLGDYCYGSPLTVAPGRAIGVGDLVFEPPRSGPTVWEIGVPDRTAAEFYVPDPDPRYVNRLFVVRDRYRQYGLWERYADLYPDKDLVFTVGESDESKDWFFAHVTRKVGQVAVPTTWQIRFSLDRVVADDDTYTLRISLAASQMCRLQVQVNGDARRGRDFTTPDMGDDNAITRHGIHGSQWSLECVVGGHLLRQGDNTIDIKLIAQQGPKGPAMVAGVMYDYIRLEGPPSRGVASSRIPAFSLHRILFLLAFLVMS

SEQ ID NO: 177933 - protein, 470 aa, Zea Mays
MPPAPMRWRRGGRSSSRLLQRALLLAAFSAAALILLVLQHHHGPKRPNPSAASHARDSSDELLDDSPPAERDPDASDPAVVVDRATCATVEMMGEEAAGAGRGSPEQASLRVREMIRRHFELHGAERVRMLPAHEFCKQGFVLGKASEAGFGNEMYKILTAGALSVMLNRSLIIGQTRGLYPFGEYISYTNQSFTIHEIKHLWRKHRCARTYGRDLNIRVDIFENPTETNVLCSDWNSWKDSIIWFDGATDAVGIQFFLKNVHPRMKAAASALFGLPDSLYARPNTFGELMRAIISPSSKVQEAVDWALKGVNPDIVLHMRMMANRPVRARKAAVLCIKKALQFSHIKGTALVALVSDTPAFVKEIKSDISEFAEVLNFDYKLFAKTSSLEIVGNDKPLDFRSRDWGSAPRWVAFVDFFIAAQARYAVVTGAHRRVGTTYAQLITALAAANRGLYPFEEHISYTNQSFTI

SEQ ID NO: 177934 - protein, 180 aa, Zea Mays
MKARARRQRVPAFGEWNHAYGYGGGGGDQRPVVTHYDLDSAMQMQARRLVVAIPAVPPKPASKVVKWRQSATATLELEDEDGEHEHEDEKKKQLQQQHLGLDVVVGLGLGGAGAGAARKQGKQQSPVVGYQARRRRAAVKTVDQDLYHIPPDMLCHEPRKRLTRRKSLWTGCLGLSCVVA

SEQ ID NO: 177935 - protein, 370 aa, Zea Mays
MGCGPSIPDKYTIGGKGRKRRSVIQEVAVFVPTIRIPVASDIAHPLRGIVSKDLVDRLSTLRAHVASLAEEIYHADVSAVQELQHALEEYLPVVLGLTTKESRLESSVQFRWKTLDDDQECCLASAWYEVLSVVHMMAMLALFEANLLLIPKSSQGGGERKVAEDAKKDVVDSLLRASGCLDYSVHRILVQIPAQVKKGFPSYLQEGMLEAISIQALAQCVEIQLGLASECEKATLSVKRRLACEQVSYFSQAHYCLSGCDTSDSYGKKLLLFLKWKWMEAKAVAYYYHGLVLDKGGEPANHISAVCCLSAADDLLSDSKRACLSFCLANPVTRSQMSLTRSSKRTGICLSKTRTAHSNPFLTYQSLRCR

SEQ ID NO: 177936 - protein, 434 aa, Zea Mays
MDPTTACRSPNSDCFGRPIASAPDSWFDVVERTSDDNNKTLQRTSKTTRCLNLTSYNYLGFAAADEYCVPRVVDSLKKYSASTCSARVDGGTTKLHTELEELVARFVGKPAAVVFGMGYVTNSATIPCLIGKGGLIISDSLNHNSIVNGARGSDATVRVFRHNCPAHLEKVLREQVAGGQPRTHRAWKKIVVVVEGIYSMEGELCKLPEIIAVCKKYKAYTYLDEAHSIGAVGRSGRGVCELLGVDPADVDVMMGTFTKSFGSCGGYIAASEEIVQHLKHTCPGHLYATSMSPPAVQQVISAIRVVLGEDGSSRGAQKLARIRENSNFFRSELKKMGFEVLGDNDSPVMPIMLYNPAKIPAFSRECFRQKVAVITVAFPVTPLLLARARFCISASHTREDLTKALDVISRVGDLVGIKYFPAQRPKIAEAGHGN

SEQ ID NO: 177937 - protein, 525 aa, Zea Mays
MSPSILLLLLPYVLQLMPTSFAQVSTLPLPFGNETATDRDALLQFKASLSQQSPTLVSWNKTSDFCHWTGVTCSLRHKGRVSALNLSSAGLVGSLSPAIGNLTFLKILDLSSNNLQGGIPSTIGRLRRLQYLVFTGNSLHGGITDGLSNCTGLVIIFLGNNHLTGEIPSWLGGFPKLAALDLSKNNLTGSIPPSLGNLTSLQELYLQINQLEGSIPKELGRLKNVQWFALFVNHLSGEVPEAVFNLSSVVAFGVDQNDLHGTLPSNWGNNQPDLEFIYLAINHFTGNVPASLANATMMDTIDLSVNNFTGRMPPEIGTLCPRIFSFDSNQIEASATEGWEFVTLLTNCTRLRVLSFRNNMLAGELPPSVGNLSSTHLQVLYTGWNEIYGNIPPGISNLVNLQKLFLSQNHFTGALPNTIGRLKMMRALGIDGNLLSGTIPPSIGNLTLLQIITMDNNNLEGSLPSSISNLQMLSIATLSRNAFAEITYLVHYPTSATAKACFSSIWMVTPSAEASLRLLLKCMVW

SEQ ID NO: 177938 - protein, 511 aa, Zea Mays
MSPSILLLLLPYVLQLMPTSFAQVSTLPLPFGNETATDRDALLQFKASLSQQSPTLVSWNKTSDFCHWTGVTCSLRHKGRVSALNLSSAGLVGSLSPAIGNLTFLKILDLSSNNLQGGIPSTIGRLRRLQYLVFTGNSLHGGITDGLSNCTGLVIIFLGNNHLTGEIPSWLGGFPKLAALDLSKNNLTGSIPPSLGNLTSLQELYLQINQLEGSIPKELGRLKNVQWFALFVNHLSGEVPEAVFNLSSVVAFGVDQNDLHGTLPSNWGNNQPDLEFIYLAINHFTGNVPASLANATMMDTIDLSVNNFTGRMPPEIGTLCPRIFSFDSNQIEASATEGWEFVTLLTNCTRLRVLSFRNNMLAGELPPSVGNLSSTHLQVLYTGWNEIYGNIPPGISNLVNLQKLFLSQNHFTGALPNTIGRLKMMRALGIDGNLLSGTIPPSIGNLTLLQIITMDNNNLEGSLPSSISNLQMLSIATLSRNAFAEITYLVHYPTSATAKACFSSIWMSLDA

SEQ ID NO: 177939 - protein, 111 aa, Zea Mays
MVPIHDGRRRQPPDVAGIQTVLCLSFPFPLRQGKGPYDEDITSIHTMNGPITRSRARQLNLQVHSTIVNCVSELMLGTMDVLMIRYLGENQQGLGKGRAAKTGRRSSLTQL

SEQ ID NO: 177940 - protein, 843 aa, Zea Mays
MTSSAAAAAAAAQVAGGGGGGEGDAAAAARGGTEDGMYTELWNLCAGPLVTVPRVGDKVYYFPQGHIEQVEASTNQVAEQHMQFYDLPWKILCEVMNVELKAEPDNDEVYAQLTLLPESKPEENGSSEEMPASPPAALARPRVHSFCKTLTASDTSTHGGFSVLRRHADECLPPLDMTRQPPTQELVAKDLHGVEWRFRHIFRGQPRRHLLQSGWSVFVSAKRLVAGDAFIFLRGDSGELRVGVRRAMRQQANVPSSVISSHSMHLGVLATAWHAVNTGTMFTVYYKPRTSPAEFVVPCDRYMESLKRNYPIGMRFKMRFEGEEAPEQRFTGTIVGNVDPDQAGWAESKWRYLKVRWDEASSIPRPERVSPWQIEPAVSPPPINPLPVHRPKRPRSNAVASLPESSAPTKEAAPKVTLETQQHALQRPLQTQDNVAPKSVFGDNSELDSAHKSSLRPSGFDLDKSTIGMQRKLGSDIWMRMNRPDGYSEMLSGYQPPNEGARNSQGFCSLPDQIAAGRPNFWHTVNAHYQDQQGNHNLFPGSWSMMPSSTGFGMNRQSYPMIQEVGGMSQSCTNTKFGNGVYAALPGRGIDRYPSGWFGHTTPGGRVDDAQPRVIKPQPLVLAHGEALKMKGNSCKLFGIHLDSPAKSEPLKSPPSVATPAAEKWMADGIDADKSPEPHKTPKQLGATQVDPVPERCPQASRGTQCKSQGGSTRSCKKVHKQGMALGRSVDLTKFNGYTELVAELDEMFDFNGELKGCSKEWMVVYTDYEGDMMLVGDDPWNMVHKIFVYTREEVQRMNPGALNSRPEDSGLANSTERGSASTAAAREAPGYQSASSLNSDNC

SEQ ID NO: 177941 - protein, 108 aa, Zea Mays
MLDSSSSSGFIPLEISVWIHLSLHTLEFLSVGLLSTERDKSDIWLLEVTKFSFSCRDQLWNRMKIGMVCWQGYSDWCIPEISPVQISCTVHLILTPSFLLPMDNLHPA

SEQ ID NO: 177942 - protein, 57 aa, Zea Mays
MSSCPAFFLPAYKTGSSSGPTTPWAPLPPMESPAGAMGQGHPPPPWHHGHCDSLASD

SEQ ID NO: 177943 - protein, 104 aa, Zea Mays
MKTEMDRHRGSASRRGRGPCGNTVFRVIWLGAAQLCSGHVPTAPESCHEAAQGCRGVPGGRLGVAGLLLRTHAPGAITRPSMGSGAAVGSHRTLAEGHPSFTHW

SEQ ID NO: 177944 - protein, 105 aa, Zea Mays
MFDQAVKLVRPGGVIVYSTCTINPGENEALVRYALDTYKFLSLVSQYPKVGGPGIVGSCELFNKTYTEEWLREDEADLVQRFDPSSSVDTIGFFIAKFDVGEKDE

SEQ ID NO: 177945 - protein, 154 aa, Zea Mays
MDILKLASEMDLSCIKAYKLDALKSVRKTDEARSLGMADNHSEAIETPTEDPCHATVGGRSTSVDEDSSTTTVVFSDNKNLNSKRYISKAELRKNLRQMKNGPGRNNCSGGRVEKSKGFCPNSFDRVLLDAPCSALGLRPRLFAGEVYYKSRGE

SEQ ID NO: 177946 - protein, 266 aa, Zea Mays
MDILKLASEMDLSCIKAYKLDALKSVRKTDEARSLGMADNHSEAIETPTEDPCHATVGGRSTSVDEDSSTTTVVFSDNKNLNSKRYISKAELRKNLRQMKNGPGRNNCSGGRVEKSKGFCPNSFDRVLLDAPCSALGLRPRLFAGEETLESLKKHSKYQRKMFDQAVKLVRPGGVIVYSTCTINPGENEALVRYALDTYKFLSLVSQYPKVGGPGIVGSCELFNKTYTEEWLREDEADLVQRFDPSSSVDTIGFFIAKFDVGEKDE

SEQ ID NO: 177947 - protein, 161 aa, Zea Mays
MDILKLASEMDLSCIKAYKLDALKSVRKTDEARSLGMADNHSEAIETPTEDPCHATVGGRSTSVDEDSSTTTVVFSDNKNLNSKRYISKAELRKNLRQMKNGPGRNNCSGGRVEKSKGFCPNSFDRVLLDAPCSALGLRPRLFAGNSRIAEKTFEVSEENV

SEQ ID NO: 177948 - protein, 338 aa, Zea Mays
MDSHSPTSAAPPAAAETARYTYSPRLRWQPEVEEYFNTAYGRDHFARISEALAHPSCYSCIRVNTLKSSTDAVMHKLLDLVCKNELSAVINGLEVVELNGGDQSQEGCSLVHKCPYAGLENVLFVQGSGPHVLHYGSQPDQAVKEVVVSRKCAESVLRGAQVYVPGVLACSSHVEKGDKVAVSVAIEQPVKEDGWAVGITRGTVLQGLQSDAHYEERKGLYIGQGTAAMSRSAIFRVPHGIAVEMTERVYKLPSFNDVLEGEIFLQNLPSVVTARVLDPQSGERILDMCAAPGGKTTAIAILMRDEGEVVALDRSHNKNLNWLISSPKRKQELNIIFT

SEQ ID NO: 177949 - protein, 480 aa, Zea Mays
MDSHSPTSAAPPAAAETARYTYSPRLRWQPEVEEYFNTAYGRDHFARISEALAHPSCYSCIRVNTLKSSTDAVMHKLLDLVCKNELSAVINGLEVVELNGGDQSQEGCSLVHKCPYAGLENVLFVQGSGPHVLHYGSQPDQAVKEVVVSRKCAESVLRGAQVYVPGVLACSSHVEKGDKVAVSVAIEQPVKEDGWAVGITRGTVLQGLQSDAHYEERKGLYIGQGTAAMSRSAIFRVPHGIAVEMTERVYKLPSFNDVLEGEIFLQNLPSVVTARVLDPQSGERILDMCAAPGGKTTAIAILMRDEGEVVALDRSHNKVMDILKLASEMDLSCIKAYKLDALKSVRKTDEARSLGMADNHSEAIETPTEDPCHATVGGRSTSVDEDSSTTTVVFSDNKNLNSKRYISKAELRKNLRQMKNGPGRNNCSGGRVEKSKGFCPNSFDRVLLDAPCSALGLRPRLFAGNSRIAEKTFEVSEENV

SEQ ID NO: 177950 - protein, 328 aa, Zea Mays
MDSHSPTSAAPPAAAETARYTYSPRLRWQPEVEEYFNTAYGRDHFARISEALAHPSCYSCIRVNTLKSSTDAVMHKLLDLVCKNELSAVINGLEVVELNGGDQSQEGCSLVHKCPYAGLENVLFVQGSGPHVLHYGSQPDQAVKEVVVSRKCAESVLRGAQVYVPGVLACSSHVEKGDKVAVSVAIEQPVKEDGWAVGITRGTVLQGLQSDAHYEERKGLYIGQGTAAMSRSAIFRVPHGIAVEMTERVYKLPSFNDVLEGEIFLQNLPSVVTARVLDPQSGERILDMCAAPGGKTTAIAILMRDEGEVVALDRSHNKIVMVFHGLLQ

SEQ ID NO: 177951 - protein, 331 aa, Zea Mays
MDSHSPTSAAPPAAAETARYTYSPRLRWQPEVEEYFNTAYGRDHFARISEALAHPSCYSCIRVNTLKSSTDAVMHKLLDLVCKNELSAVINGLEVVELNGGDQSQEGCSLVHKCPYAGLENVLFVQGSGPHVLHYGSQPDQAVKEVVVSRKCAESVLRGAQVYVPGVLACSSHVEKGDKVAVSVAIEQPVKEDGWAVGITRGTVLQGLQSDAHYEERKGLYIGQGTAAMSRSAIFRVPHGIAVEMTERVYKLPSFNDVLEGEIFLQNLPSVVTARVLDPQSGERILDMCAAPGGKTTAIAILMRDEGEVVALDRSHNKDIVFVTVETLNLQ

SEQ ID NO: 177952 - protein, 73 aa, Zea Mays
MVHVAVLDLRSLGASVEGSLGLQRRKDGVRVQRGVTASGWSTISCRPCSVTVEPGSAMDRSPFFIILGEICSL

SEQ ID NO: 177953 - protein, 70 aa, Zea Mays
MVHVAVLDLRSLGASVEGSLGLQRRKDGVRVQRGVTASGWSTISCRPCSVTVEPGSAMDRSPFFIILEAK

SEQ ID NO: 177954 - protein, 97 aa, Zea Mays
MVSPAAGRPVSMQNVGEQAGRVGCCAPGGRMTDRKTARARQADGWRVRRTAWGGCAAPRQVAALQHGERLLFSAYRCALQHKPVSIGGRQNKVCRKD

SEQ ID NO: 177955 - protein, 183 aa, Zea Mays
MAGEDCRSGAEMDALVRRLKLHRPSPSPYDPDPAAAPVPATAGDGELFRPRRAAVLVCLFRGDGGELRVILTKRSSSLSTHSAASRHRALQLSRPDADAIARSRPPAAIAPKRRVADAIAPGAASRQTPSVALQAPGMPPGPLLPPPSRTQVCRRPPSRSSVINCLVYGKQVNVYCVFINCLV

SEQ ID NO: 177956 - protein, 229 aa, Zea Mays
MQAREAQLCMSDTCSLHENGHDEISIKAMGQAINKTVMVVELIKRRVGGLHQNSATESVDITDTWEPLEEGLLPLETTRHVSMITVTLSKKPLDTSSPGYQPPIPAEEVKPAFDYDHEDSYPTGRGRGRGGGRRGRGRGMSNGPSPPAYGYNEEWGEEGDYYNRGRGRGRSRGRGRVRGGYSYGYGARGGYYEEQDEYYDDPEEYAPPGRRGRGRGRRGMPWRGRGVYY

SEQ ID NO: 177957 - protein, 243 aa, Zea Mays
MDRYQRVEKPRNDTPISQNEIRITTQGRMRNYISYGMSLLEENGHDEISIKAMGQAINKTVMVVELIKRRVGGLHQNSATESVDITDTWEPLEEGLLPLETTRHVSMITVTLSKKPLDTSSPGYQPPIPAEEVKPAFDYDHEDSYPTGRGRGRGGGRRGRGRGMSNGPSPPAYGYNEEWGEEGDYYNRGRGRGRSRGRGRVRGGYYGEQDEYYDDPEEYAPPGRRGRGRGRRGMPWRGRGVYY

SEQ ID NO: 177958 - protein, 253 aa, Zea Mays
MDRYQRVEKPRNDTPISQNEIRITTQGRMRNYISYGMSLLEENGHDEISIKAMGQAINKTVMVVELIKRRVGGLHQNSATESVDITDTWEPLEEGLLPLETTRHVSMITVTLSKKPLDTSSPGYQPPIPAEEVKPAFDYDHEDSYPTGRGRGRGGGRRGRGRGMSNGPSPPAYGYNEEWGEEGDYYNRGRGRGRSRGRGRVRGGYSYGYGARGGYYEEQDEYYDDPEEYAPPGRRGRGRGRRGMPWRGRGVYY

SEQ ID NO: 177959 - protein, 308 aa, Zea Mays
MAGAGIHPFQQWPPTAAAPPPPGAAASVAVPPPPPVPGAPGTVGPDEVRTIFITGLPADVKERELHNLLRWLPGFEASQINFKGDQPMGFALFSTAHQAIAAKTALQDMVFDAETKVALHTEMAKKNLFVKRCVGIDANAVDQSKRLRTGGDYTHSPYAPPFHPPPPAVSMWGTPGYITAPPPYNPYAAYPVPPVAMTSPAPVTGPTAYAPVQNTKDNPPCNTLFIGNLGDTVVEEELRSLFSVQPGFKQMKVLRQDRNTVCFIEFEDVNAATSVHQTLQGAVIPSSGRGGMRIQFSKNPFGRRKDSA

SEQ ID NO: 177960 - protein, 183 aa, Zea Mays
MAGAGIHPFQQWPPTAAAPPPPGAAASVAVPPPPPVPGAPGTVGPDEVRTIFITGLPADVKERELHNLLRWLPGFEASQINFKGDQPMGFALFSTAHQAIAAKTALQDMVFDAETKVALHTEMAKKNLFVKRLNGCEQVEIILILLMLLHFIHLHQLFPCGEPQVISQRHLLTIHMLRIQSPL

SEQ ID NO: 177961 - protein, 66 aa, Zea Mays
MHSNNTKKNKHYAQVVVCVNSSGMRMRCGTIDILSLSSWQPCVHANIIIYGSCIYRRPCYINIIYA

SEQ ID NO: 177962 - protein, 619 aa, Zea Mays
MRENITTPNGSAVTVDPNASTHADRLTKIKGILSGETSIQLTLQFLYSHNRSDLQILKTIKQAVEMRNSVCHSATICSNAIMHAGTTVDTFLRENLEWLGRATNWAKFSATAGLGVIHRGHLQQGRALMAPYLPQNGAGGSGSPYSEGGALYALGLIHANHGEGIKEFLRESLRNTTSEVVQHGACLGLGLAALGTSDEEICEDIKNILYTDSAVAGEAAGIGLGLLMVGTASEKATEMLAYAHDTQHEKIIRGLSLGIALTVYGREEEADTLIEQMTRDQDPILRYGGMYALALAYRGTANNKAIHQLLHFAVSDVSDDVRRTAVLALGFVLYNEPEQTPRIVSLLSESYNPHVRYGAALAVGISCAGSGLSEAISLLEPLTSDVVDFVRQGALIAMAMVMIQTNESYDPRVGAFRRQLEKIILDKHEDTMSKMGAILASGILDAGGRNVGIRLKSRSKHDRLTAVVGLAVFTQFWYWYPLTYFISLAFSPTALIGLNSDLKVPTFEFLSNAKPSLFDYPKPATQQTAAASVKVPAAILSTYAKSKARAKKDAESKAAPSGFVLLQDLKPTEAEELALTDAPSTAAATTNALASSASEPAAMAVDDEPQPPPAFEYTS

SEQ ID NO: 177963 - protein, 337 aa, Zea Mays
MAQGANFPGFIGAVGGHDGGVNFGGNFCDMAFYQKLGEGSNMSVDSLNSMQTSMHGGSITMSVDNNSSVGSNSDSRTGMLGHPGLKGPVIVGSYSVGHSIFRPGRVSHALSEDALAHALMDNKFPTETLKDYEEWTIDLGKLHLGMPFAQGAFGKLYRGTYNGMDVAIKLLERPEADPEKAQLLEQQFVQEVMMLATLRHPNIVKFIGACRKPLVWCIVTEYAKGGSLKNFLSRRQNRSVPLKLAVKQALDVARGMAYVHGLGFIHRDLKSDNLLISGDKSIKIADFGVARIEVKTEGMTPETGTYRWMAPQVDIVEILYRHHLSRQGPPCPLCSHS

SEQ ID NO: 177964 - protein, 136 aa, Zea Mays
MRKEESPTRNTEGKKEKIQTDGAPLPVALKNPHHPHRQQIDSRKRRPPPHRTVPEPPFSSLTRLPSSAVAGGEASGDHRSISWVNPLKGGRELCASLNGCYKASGPLEPPGWPQNHSFLGANIQMGHQHCQHSRLC

SEQ ID NO: 177965 - protein, 193 aa, Zea Mays
MLYSDAIVQNGATSIVGQCVIQLAKVHGIHTINIIRDRPGSEEAKNKLKQLGADEVFTETQLDMKNVKSLLGALPEPALGFNCVGGNAASLILKLLKQGGTMVTYGGMSKRPVTVPTSYFIFKDLSLRGFWLQKWLNSDKTEDCRRMIDYLLGLVHEGKLKYEMESISFGEFSLALEKALGKHGSQPKQVIKF

SEQ ID NO: 177966 - protein, 176 aa, Zea Mays
MAPQSRLLPPLLQVLRRCRASRSHFSTAPSLVSPPSKAVVYDEHGLPEQVLRLVDVPPAEIGDRDVCVRMMAAPINPSDINRIEGVYPVRPPLPAAVGGYEGVGQVHALGPAVTARLSPGDWVIPSPPSFGTWQTYITKHENVWHKVRSDVPMEYAATITVNPLTALRMLQDFVMP

SEQ ID NO: 177967 - protein, 92 aa, Zea Mays
MVTYGGMSKRPVTVPTSYFIFKDLSLRGFWLQKWLNSDKTEDCRRMIDYLLGLVHEGKLKYEMESISFGEFSLALEKALGKHGSQPKQVIKF

SEQ ID NO: 177968 - protein, 130 aa, Zea Mays
MKNVKSLLGALPEPALGFNCVGGNAASLILKLLKQGGTMVTYGGMSKRPVTVPTSYFIFKDLSLRGFWLQKWLNSDKTEDCRRMIDYLLGLVHEGKLKYEMESISFGEFSLALEKALGKHGSQPKQVIKF

SEQ ID NO: 177969 - protein, 193 aa, Zea Mays
MCLKDDSMQHHKKDLNVQNHQRTIQYDSPKGSTNSSENNLSCDRYSKRAKVARLDGASDNDESQLPPTSEVLPFASSNSSPSEAPSKPDLLIGTPDSASKNYVEQQYEYCVRVVRWLEHEGHMDNDFRVKFLTWFSLKATTQDRRIVGAFVDVLIGDPASLVGQLVDAFKDAICIKEKPSQAQQKDACCKVWH

SEQ ID NO: 177970 - protein, 246 aa, Zea Mays
MDPEKQNEMSLIDKRELVYEVARWPQGAMEILRCWTRRELLELICVELGKERKYTNVPKAKMIAYLLKLVSRNSGKNGQLKNDNPNVMLLGQDNKDEIQMKESDEQSRPLKTANSDSSISREACAGSSVVCSNVACQATPNAGDKYCKRCSCCICNKYDDNKDPSLWLVCSSDNPYSGCSCGVSCHLNCALKNKRAGIVKNGCNKLDCSFYCVSCGKINWLMRYPSDCFSSLINMPWENYHLCLLA

SEQ ID NO: 177971 - protein, 283 aa, Zea Mays
MEPPPLPFADSSSNMAGSFIIRISNRKGNSVVVGAGSGAGNPGALGDHRRVPGRLPAAVHHQAPRRSPQLPPVLRGHWPWRLHCSGRVQGEGGRGHGGLLLAHRSRGHRAGHRHRFRLQQARRHRPGRGGRLQRGRRRDPGVHVPGRSPRRGLQQPEAADERQAPAGGVRRPVPRRGAHVVARQMGVEQNRFATRQFFFSAESPSARISVRRGSEERRPGCDVFSTQRTHLMTSQKKQTSFLRGKGKKTRMETTDGAQRYFGRFHALFTINLLPHYQKADMAV

SEQ ID NO: 177972 - protein, 875 aa, Zea Mays
MHSDGRQCPKTQGGLLRVNCIMDSGNSSCSRTRSGLLRLKGLLDSSGVSSSRTRSGLLRIKSFVDSSDGSCSRSQSDHVRCSPPIVEAIINDEAVLKESPDGLMKKEIPVRTQNEFVRQNSADKAVTKDDSGMRTLPNGSLSEDMPSRTRSGLVRRSPTVKTPDGWMKNDKAAGTRSGLGGGRLVAKTVSKDKRAVEGLPDGWRKEYRPRKNGSFLDVYYIDPVSGYEFRSFKDVHRYLETGDIRQCAVRPKKSTICEVHIIESQTHASASPQHTRPGTADKGIQCEILTSDGIMVPLGELIAPYNGNDTEHTVLPEPENLKAIQGSDNKLETSEHVSVQPVSARNGSRQTKSVKRKERNAEVKSKKRKTSSAVTAVRASPRLAALKVQLEVSIKHEDAMVSINHVDQVQTIEESAIDQAHKSQSGSVDEIHGNLESTFSQLQLSQADTANGMQAMQENTTIHSQPSQLDTLNPTHRSQENSGNQLQSVLTDSSIPKRTTQECTIDEPSQPGINHIHTDQEFTGNQFRSNLPDDTVISLRDIEECTAHSKPSNTDSTGQIQANEENTANQVQSSLTDTVIPVPVIQEYATGYSQLSKANTSNKKQANQEYIADQVQSSLTDTVIPVQVIKEYTTGYPHINKADISNQMQANQENTDDHLYLSQVGCVTQMQIIEENLPKQPQLSQSGTGGRIQIDLESTTNHLLPNYDENSMLQCGLSWAPEQNSGALSTDFWKNVETQASSVSMPINGAPVASFPANVRFHNAAAAAEPALPPQVAPAEAGSDQSGLAFQSVFGNIWSDPCIEFAFKTLTGDIPVLDDTTAVTDYFPEQQDLNKGPAPNRAGSVDNSRNHTQVDVNLPPPALDDFYNGNWFPPQ

SEQ ID NO: 177973 - protein, 789 aa, Zea Mays
MRTLPNGSLSEDMPSRTRSGLVRRSPTVKTLSKDQSVINGLADGSLKEDMPLGTRSGLVRGTLAAKAWIFVDPIKTPDGWMKNDKAAGTRSGLGGGRLVAKTVSKDKRAVEGLPDGWRKEYRPRKNGSFLDVYYIDPVSGYEFRSFKDVHRYLETGDIRQCAVRPKKSTICEVHIIESQTHASASPQHTRPGTADKGIQCEILTSDGIMVPLGELIAPYNGNDTEHTVLPEPENLKAIQGSDNKLETSEHVSVQPVSARNGSRQTKSVKRKERNAEVKSKKRKTSSAVTAVRASPRLAALKVQLEVSIKHEDAMVSINHVDQVQTIEESAIDQAHKSQSGSVDEIHGNLESTFSQLQLSQADTANGMQAMQENTTIHSQPSQLDTLNPTHRSQENSGNQLQSVLTDSSIPKRTTQECTIDEPSQPGINHIHTDQEFTGNQFRSNLPDDTVISLRDIEECTAHSKPSNTDSTGQIQANEENTANQVQSSLTDTVIPVPVIQEYATGYSQLSKANTSNKKQANQEYIADQVQSSLTDTVIPVQVIKEYTTGYPHINKADISNQMQANQENTDDHLYLSQVGCVTQMQIIEENLPKQPQLSQSGTGGRIQIDLESTTNHLLPNYDENSMLQCGLSWAPEQNSGALSTDFWKNVETQASSVSMPINGAPVASFPANVRFHNAAAAAEPALPPQVAPAEAGSDQSGLAFQSVFGNIWSDPCIEFAFKTLTGDIPVLDDTTAVTDYFPEQQDLNKGPAPNRAGSVDNSRNHTQVDVNLPPPALDDFYNGNWFPPQ

SEQ ID NO: 177974 - protein, 247 aa, Zea Mays
MRLRSTDLTDSEKTELADFSAWILNIGNDNIPAIQKPGEMEPTWIQIPFEFLLLPQEDHISALIATMYPEITESYNDPTYLQQRAVLTPTNEIADLINEHVVDLIPGTHKQYLSCDRIASQSNTGGTLDLLYPVEFLNSINSNNFPQHKLLLKEGVPIILLRNLNQSEGLCNDTRLIITALGDMVLEAQILTGTHAGKKVLIPRICLVLKTNKNPFVLERRQYPIKICYAMTINKSQGQTLSQVYTF

SEQ ID NO: 177975 - protein, 291 aa, Zea Mays
MEYTLLPDLAPHKIHAKIQVHVSRKWLFRGATDSGPLQHVDMVLSDREGNAIYAEIPGNLAEQKATNIEEGGVYDISRFRVCAAKTVFKIVDGDKMIQFTFHTIVKRATSPPTTFPLYVYRLTSFDLIEPHVQTTNNFVDVLGVITEIHELTPVHVRSQLTPTVTRTIIIEDLSNKTMKITLWADQAIMFNLHDVYDTNTNKLILVLFVGCLSKIFKGVYLSGGPACRWYFNPTIPEAEPYLTRKFRSTRTINTSKQIKTDVIGRLSIYSFGKIIYYNSYNCSKEASIFRN

SEQ ID NO: 177976 - protein, 291 aa, Zea Mays
MWDSVLHVLTIVHEDGRVPTQAAGLIEKMESFKFVFILKLMLKMLAITNELSQTLQRKNANIVHAMELLDVVKTRMATMRTDSGWESFFQSVKELCAQKGIPVVDMDEEVPIRGRSRRDGFTITNLHYYRTEIFFVVLDKINTELCHRFNEVSSELLVCFSCLDPKNLFCSFDIEKLVRLGTLYDKDFSVIECAMLREQLETYIVHVRRHAAFDWIFGGDFGAALQIKREISVPKQPTDSIDCGCLSASEGFYQSRLRTSFKLSQNSSYISASHTEPGLIPDQKNGIHFIT

SEQ ID NO: 177977 - protein, 293 aa, Zea Mays
MPLLIGFLVVILVPHCKLREKFRFPSSPQILLIAGVFQHLRVSTSPGYAQASNYRKIPLTYLHLIPNQVSYRTRKMEYTLLPDLAPHKIHAKIQVHVSRKWLFRGATDSGPLQHVDMVLSDREGNAIYAEIPGNLAEQKATNIEEGGVYDISRFRVCAAKTVFKIVDGDKMIQFTFHTIVKRATSPPTTFPLYVYRLTSFDLIEPHVQTTNNFVDVLGVITEIHELTPVHVRSQLTPTVTRTIIIEDLSANKSNINSPEKDDGDKETAQLDTIPNNKGKGPADTIESPPKRFK

SEQ ID NO: 177978 - protein, 287 aa, Zea Mays
MWDSVLHVLTIVHEDGRVPTQAAGLIEKMESFKFVFILKLMLKMLAITNELSQTLQRKNANIVHAMELLDVVKTRMATMRTDSGWESFFQSVKELCAQKGIPVVDMDEEVPIRGRSRRDGFTITNLHYYRTEIFFVVLDKINTELCHRFNEVSSELLVCFSCLDPKNLFCSFDIEKLVRLGTLYDKDFSVIECAMLREQLETYIVHVRRHAAFDWIFGGDFGAALQIKREISVPKQPTDSIDCGCLSASEGFYQSRLRTSFKLSQNSSYISASHTEPGLIPDQCKQE

SEQ ID NO: 177979 - protein, 370 aa, Zea Mays
MPLLIGFLVVILVPHCKLREKFRFPSSPQILLIAGVFQHLRVSTSPGYAQASNYRKIPLTYLHLIPNQVSYRTRKMEYTLLPDLAPHKIHAKIQVHVSRKWLFRGATDSGPLQHVDMVLSDREGNAIYAEIPGNLAEQKATNIEEGGVYDISRFRVCAAKTVFKIVDGDKMIQFTFHTIVKRATSPPTTFPLYVYRLTSFDLIEPHVQTTNNFVDVLGVITEIHELTPVHVRSQLTPTVTRTIIIEDLSNKTMKITLWADQAIMFNLHDVYDTNTNKLILVLFVGCLSKIFKGVYLSGGPACRWYFNPTIPEAEPYLTSLQKELCYSFPKIYNILQRWKRSQLSNINPSMNFLQLTHMISRKHDLNVLSQ

SEQ ID NO: 177980 - protein, 243 aa, Zea Mays
MEYTLLPDLAPHKIHAKIQVHVSRKWLFRGATDSGPLQHVDMVLSDREGNAIYAEIPGNLAEQKATNIEEGGVYDISRFRVCAAKTVFKIVDGDKMIQFTFHTIVKRATSPPTTFPLYVYRLTSFDLIEPHVQTTNNFVDVLGVITEIHELTPVHVRSQLTPTVTRTIIIEDLSNKTMKITLWADQAIMFNLHDVYDTNTNKLILVLFVGCLSKIFKGVYLSGGPACRWYFNPTIPEAEPYLT

SEQ ID NO: 177981 - protein, 331 aa, Zea Mays
MWDSVLHVLTIVHEDGRVPTQAAGLIEKMESFKFVFILKLMLKMLAITNELSQTLQRKNANIVHAMELLDVVKTRMATMRTDSGWESFFQSVKELCAQKGIPVVDMDEEVPIRGRSRRDGFTITNLHYYRTEIFFVVLDKINTELCHRFNEVSSELLVCFSCLDPKNLFCSFDIEKLVRLGTLYDKDFSVIECAMLREQLETYIVHVRRHAAFDWIFGGDFGAALQIKREISVPKQPTDSIDCGCLSASEGFYQSRLRTSFKLSQNSSYISASHTEPGLIPDQCSTQLNSKNEAYLTRISYFGYQMALRSLHPTLLILSSVLRFQIQASTL

SEQ ID NO: 177982 - protein, 132 aa, Zea Mays
MSVSDHIKMQPLSFIVTINVLVRTQRRIYSVGNVGHGPTSNFVIFIIPYRIRLEGAGVSASQVHFVPASSRTAGHGPCPIGPFVVHPGGQKISALSSRLLSAACRRRPPASHRARGIADRDIAPHHRTQPHR

SEQ ID NO: 177983 - protein, 80 aa, Zea Mays
MIRHSSYRLQQLKGGKLRLTASGRSTPIEFLSLLRRPRGVTSQTSTRKSTLSPPTSQWDSLCTWCGSASSSAPRRRSSSS

SEQ ID NO: 177984 - protein, 317 aa, Zea Mays
MALRRCNAAAQRRQASPTPNPRYVASSVVHRGPLVVLSLSGGGWCAGASEHEGMIPSVRISPGYAAFSGSSLRLKLHSIPSISSLKPSKYVVSSLKPLYLAPLDGPHTSELKSWRQPLEFRCAASAADDKESKTQVVPVQLEGAQRLKISIYFATWWALNVIFNIYNKKVLNAFPYPWLTSTLSLACGSAMMLFSWATRLVEAPKTDLDFWKVLFPVAVAHTIGHVAATVSMSKVAVSFTHIIKSAEPAFTVLVSKFLLGETFPVPVYLSLLPIIGGCALAAVTELNFNMVGGSLHRACSITYITRCPTCLSIRSLH

SEQ ID NO: 177985 - protein, 614 aa, Zea Mays
MRYKEALGTASCPSCGGPAALGEMSFDEHHLRLENARLRDEIDRISGIAAKHVGKPMVSFPVLSSPLAAAAAAARSPLDLAGAYGVQSAAAGLGADHVLFGAGAGDLLRSVSAGQLDADKPMIVELAVAAMDELLRMARPDALLWGGGASAGAQQQQLDEEEYVRTFPAGLGPRQYGLRPEASRDSAVVIMTCDSLIEILMDANRFAAVFSSIVSRASTHEVLSTGVAGSYNGALQVMSMEFQVPSPLVPTRESYFVRYCKNNPDGTWAVVDVSLDSLRPSPVIKCRRRPSGCLIQEMPNGYSKVTWVEHVEVDDRSVHNLYRPLVNSGLAFGAKRWVGTLDRQCERLASAMASNIPNGDLGVITSIEGRKSMLKLAERMVASFCGGVTASAAHQWTTLSGSGAEDVRVMTRKSVDDPGRPPGIVLNAATSFWLPVPPKRVFDFLRDETSRSEWDILSNGGAVQEMAHIANGRDHGNCVSLLRVNSANSNQSNMLILQESCTDASGSYVVYAPVDVVAMNVVLNGGDPDYVALLPSGFAILPDGPPPAGAAPSHGEGLDTGGGGSLLTVAFQILVDSVPTAKLSLGSVATVNSLIACTVERIKAAVCAEAGNPQ

SEQ ID NO: 177986 - protein, 112 aa, Zea Mays
MPRSLRLGSHQQHPPTLKLSSSQVLPSSYFRQETTAMNTGRPTTRMDVEVNDYQPLGPNNRHDPPILAISLFKGSTPSRHAWRFQTSRCLLIFHHAPSSTKQLIPQPQFKSM

SEQ ID NO: 177987 - protein, 160 aa, Zea Mays
MKAGASTREQQRRLGAVDVTCRGAPSRRDEGEKSRVSTSGTQGEFADFHGQRVRSEHEGDEGERGGAAGRHKRAEVRAAGRAGTAERHEGSRRAPWETEEERCESFTARSRPGRELGCSTACRGGRDGHGGERGRGRSTRAGAEGERDMADKNQREWSAD

SEQ ID NO: 177988 - protein, 201 aa, Zea Mays
MSIYGSTPPPPMSTPGSRARAIGLTITLLSVSGGIHFSSTCGFGLLLSFTGILAGANLVAFGVSKADDNPAPTFPTAFDSARALAAFMRRSTATAGLVMASCAVTAVSSGEADPVLFFAMFALLLLGVSLVIAGARDNNSSDGNAFLKCRRTSSLKYIMCHHFASSCGHFNPICATASRSCCRVRDEDICARINVSSMLPT

SEQ ID NO: 177989 - protein, 82 aa, Zea Mays
MFIVPFLQNKCFGWYYCETSYLKSQKCNCLLYLLYISSHVYVVSYILSKHHENSDNARGNIATIYISNKQRKKRGLKISNCH

SEQ ID NO: 177990 - protein, 115 aa, Zea Mays
MPSFFFGVNFFLSILGPVPWHDGVVGRFGATLDGPSNKRGLPPSILGAAPCVSKTADGPPSPLGAAPCVSKTADGPPSPLGTLEDWMPLTDTSTRLLQNKILISHYTPTLKAKEL

SEQ ID NO: 177991 - protein, 915 aa, Zea Mays
MNENSAIIISDSDDDSIGSIFDDDDQPASAIARLDQNAEGRIINFEDEDWQRSAPAPPSTKPTENNNGQYRILPASLTNGRHAESSRYTFGSVDRIHPHANPYMAMRPGHSTSSRIDSVVEKHNSSTADANDNNKRVLPSSFSNGNTSKSMHPIVASETRKLPLPLSTKKSPNIGENRMGTNIANGNLQPSSSIMARGTSSTLNTHKVDDDDDVIVYGGSSSHRVLPSTFEATNSNNSEVAKGFETHSRLNPENRVLDYAERAVYQEALQNISREKSEDDLPEGVLAVPLLRHQKMALAWMVSKENSSHCAGGILADDQGLGKTVSTIALIQKQRMEQSKFMFVDSDRLKSEALNLDEDDEGEQTVSNEPKKDQGACSLSTSADQKNSEEPSASNKRKPSANMQNKAKKKKKKLKDSNFDLDSGPIARVRWFRVVLDEAQTIKNFRTVVARACCGLRAKRRWCLSGTPIQNAIDDLFSYFRFLKYDPYCTYNSFCTMIKHPIARDAINGYKKLQAVLKVVLLRRTKETVINGKPIINLPPKTINLNKVDFTQEERSFYLMLEERSRQQFKAFAAAGTLKQNYANILLMLLRLRQACDHPILVKGNQSEYGGDGSIEMAKKLPKEVVIDLLAKLEVGSTLCGLCNDTPEDAIVTICGHVFCYQCIHERITTDENMCPAPNCSRTLGLELLFSSGALKICISGKSSSAVASSSSDNESSSISQSSFVSSKIQAAIDILNSIIVMDPLTESYTMESSRSGLGPVKAIVFSQWTGMLDLLELSLNINCIQYRRLDGTMSLNLREKNVKDFNTDPEVRVMIMSLKAGNLGLNMVSACHVILLDLWWNPYAEDQAVDRAHRIGQTRPVTVSRLTVKDTVEDRILALQEEKRTMVNSAFGDDKAGGHATRLTVEDLRYLFRI

SEQ ID NO: 177992 - protein, 762 aa, Zea Mays
MNENSAIIISDSDDDSIGSIFDDDDQPASAIARLDQNAEGRIINFEDEDWQRSAPAPPSTKPTENNNGQYRILPASLTNGRHAESSRYTFGSVDRIHPHANPYMAMRPGHSTSSRIDSVVEKHNSSTADANDNNKRVLPSSFSNGNTSKSMHPIVASETRKLPLPLSTKKSPNIGENRMGTNIANGNLQPSSSIMARGTSSTLNTHKVDDDDDVIVYGGSSSHRVLPSTFEATNSNNSEVAKGFETHSRLNPENRVLDYAERAVYQEALQNISREKSEDDLPEGVLAVPLLRHQKMALAWMVSKENSSHCAGGILADDQGLGKTVSTIALIQKQRMEQSKFMFVDSDRLKSEALNLDEDDEGEQTVSNEPKKDQGACSLSTSAGTSAELFVNQPNNVVNKMVETKAERKKKAKVSTSSASTSRSMTRPAAGTLVVCPASVLKQWSNELTDKVSESAKLSVLVYHGGARTKDPRELAKYDVVVTTYTIVANEVPKQMADDDADQKNSEEPSASNKRKPSANMQNKAKKKKKKLKDSNFDLDSGPIARVRWFRVVLDEAQTIKNFRTVVARACCGLRAKRRWCLSGTPIQNAIDDLFSYFRFLKYDPYCTYNSFCTMIKHPIARDAINGYKKLQAVLKVVLLRRTKDFTQEERSFYLMLEERSRQQFKAFAAAGTLKQNYANILLMLLRLRQACDHPILVKGNQSEYGGDGSIEMAKKLPKEVVIDLLAKLEVGSTLCGLCNVSNLVSILMFACFLSSFLFFLV

SEQ ID NO: 177993 - protein, 2260 aa, Zea Mays
MGDGGVACAVRAVEGFHAGALVRRGGAGEAMPDKGEKAHGHHHQQQHWKNQQSASATDLEEGELLSGEAETNGLPERSMPPKKWRKVLAASAAAVEVEPGEIVSTKQAVPLKKARRNGEVDKVELLPERQRKVKSSGKSTRKSIKDDMEPGEIAPPEKRRDAKSQRADDNSRRPSSSAQKSSLRDSDEEPGEIKPESSTSGSLRKNQPTEPHSINHKHHTDTSDQSGSKSHRKGPKGEGKRSAARHLSGRNREISSPTRDRRDRHERSPGILGRFPHERSRHDRYDRSPSRLERSPHRERARHYESRDHSPYVSPRHRARQPHFRDNTPSRVDNFPRGRVQREDVRDRSPFLHDRSPSERFRPTDTHEASKKSRSGNNSEKSQHKSKSAKQSSKTKSGSNEKNEKISNEKPTESSKYTELPPPPPLPLPPPPPPPPPPPPLPPAVPPPLPPPPEPEPTGVLAEDMIEDMDICDTPPHTSAAPEPTDPIYDIGRWFYLDHFGIEQGPSKLAVLKKLVEDGYLLSDHLIKHADSNRWVTVENAASPLVPSDFPSFYSDTSTQMVNPPEAPGNLLDEALEEASNLASGSEDKQMVEASAEDSEEFYINDRVEALMDGSILVHGQELEIIGELLGADFQPADWQRLSHPEDFTRFHVHIEGDDEIIGGTEFLENRTTDAYGLVSVDNFHHYVESSEWFSGRWSCKGGDWRRNDELGQDTPFRKKLVLNEGYPLCQIPKGSYEDPRRPCKDELYYPVRGKKHDLPLWAFSSTEEDIDGVNDTTKNTVVPGRPGQTRQPPSEVKVMLQVVSINYHVIKDQSSVEPRTKPRGTDRPPSRSSRSHSIGAERSSIHDGSSHFRKHHDHDSQSFHKSKSVPNIPKDHVCTVDELSVNRGDWYYLDGTGHDQGPFSYSELQELVKKDTIIEQSSVFRKIDNTWFPVLKDLKPGSSVPSAAPSSNLIAAFTHPDQYNFGVNQGSSSFHELHPQFAGYTRGKLHELVMKYFKSRELTLAINEVLDPWISAKQPKKEFEAYFSHNSASRNFLPDGGSAKRARLLPDQSDENIHLSEDIIASRKEDICFEELCDGASSVDNDSVNPRAGNASWGLLNDHLLARIFHFMRADLKSLISSAATCKSWNAAAKYYRNMCRFIDLSSVGPLCTDSVFCDIMAGFEKQNIRTLILAGCSNLSSHALGRVLEHLPQISYVHIQGCSHLGDLKNKFQHVKWIRSSLNPEGSYRKMKTLKQIGDGNNYASKVARNFDQLDDSDELDGYFADISKIEGASLFSFGQGFYKRSKLLDARKSSAVLSRDAEMRRLMQRQAENSYRKMEEFVINRLREIMRCNRFDFFIPKVSKIEGRLKNGYYARHGFRTIKHDIRTMCQDALRYKDGNDLDDVKQIVVSFIQLAKRLGNPRYISERNGAAAQDSLDISQYSFDTKLKKKQNKTRANLVAAGADNSSRAFDLEIKRSLSKLKKKDVCSGSETSDDDGYSEGDETESETTVSDTESDFDVNSGAWDLKGNCLKLTEHGESVIDDRILGARMTKASLVPPVTRKYEVIEEYLIVADVEEVQRKMRVSLPDDYSEKLLSQKNGTENLELPEVKDYQPRKVAGDEILEQEVYGIDPYTHNLLSDIMPSDLELSPTDKHIFIEELLLNALNKQVRHFTGLGNTPMTYNIRPVIEEIQRSAEDSGDRRTLKMCLGMLKSMRNRSDQNFVAYRKGLGVVCNKKGGFGVDDFVVEFFGEVYPSWRWYEKQDGIKHIQNNSEDQAPEFYNIMLERPKGDRHGYDLVFVDAMHKANYASRICHSCNPNCEAKVTAVDGKYQIGVYTLRPIAEGEEITFDYNSVTESKEEHEASVCLCGSQVCRGSYLNFSGEGAFEKVLMEFHGVLDRHSLLLQACETDSVSQQDLIDLGRAGLGTCLLAGLPVWLVAYTAHLVRFIYLERQKLPDEILRHNVDEKRQFLIEINMDSEKNDAEVQAEGVLNSRLQQIVHTLDKVRYVMRCIFGDPKNAPPPMVRLSGKSLVSAIWKGDSSIVAELLQSMEPHVEEEVLSDLKAKICAHDPSDSEDIEGGIRNSLLWLRDELRTLPCTYKCRHDAAADLIHLYAYTKCFFRVRDYKTVKSPPVHISPLDLGPKYADKLGPGFQEYCKTYPENYCLAQLIYWYSQNSEPESRLTRARKGCMSLPDVSSFYVKSLKPLQERVYGNRTVRFMLSRMEKQAQRPWPKDRIWVFKSDPRYFGSPMMDAVLNNSPLDKEMVHWLKTRPNVFLG

SEQ ID NO: 177994 - protein, 1875 aa, Zea Mays
MGDGGVACAVRAVEGFHAGALVRRGGAGEAMPDKGEKAHGHHHQQQHWKNQQSASATDLEEGELLSGEAETNGLPERSMPPKKWRKVLAASAAAVEVEPGEIVSTKQAVPLKKARRNGEVDKVELLPERQRKVKSSGKSTRKSIKDDMEPGEIAPPEKRRDAKSQRADDNSRRPSSSAQKSSLRDSDEEPGEIKPESSTSGSLRKNQPTEPHSINHKHHTDTSDQSGSKSHRKGPKGEGKRSAARHLSGRNREISSPTRDRRDRHERSPGILGRFPHERSRHDRYDRSPSRLERSPHRERARHYESRDHSPYVSPRHRARQPHFRDNTPSRVDNFPRGRVQREDVRDRSPFLHDRSPSERFRPTDTHEASKKSRSGNNSEKSQHKSKSAKQSSKTKSGSNEKNEKISNEKPTESSKYTELPPPPPLPLPPPPPPPPPPPPLPPAVPPPLPPPPEPEPTGVLAEDMIEDMDICDTPPHTSAAPEPTDPIYDIGRWFYLDHFGIEQGPSKLAVLKKLVEDGYLLSDHLIKHADSNRWVTVENAASPLVPSDFPSFYSDTSTQMVNPPEAPGNLLDEALEEASNLASGSEDKQMVEASAEDSEEFYINDRVEALMDGSILVHGQELEIIGELLGADFQPADWQRLSHPEDFTRFHVHIEGDDEIIGGTEFLENRTTDAYGLVSVDNFHHYVESSEWFSGRWSCKGGDWRRNDELGQDTPFRKKLVLNEGYPLCQIPKGSYEDPRRPCKDELYYPVRGKKHDLPLWAFSSTEEDIDGVNDTTKNTVVPGRPGQTRQPPSEVKVMLQVVSINYHVIKDQSSVEPRTKPRGTDRPPSRSSRSHSIGAERSSIHDGSSHFRKHHDHDSQSFHKSKSVPNIPKDHVCTVDELSVNRGDWYYLDGTGHDQGPFSYSELQELVKKDTIIEQSSVFRKIDNTWFPVLKDLKPGSSVPSAAPSSNLIAAFTHPDQYNFGVNQGSSSFHELHPQFAGYTRGKLHELVMKYFKSRELTLAINEVLDPWISAKQPKKEFEAYFSHNSASRNFLPEDGGSAKRARLLPDQSDENIHLSEDIIASRKEDICFEELCDGASSVDNDSVNPRAGNASWGLLNDHLLARIFHFMRADLKSLISSAATCKSWNAAAKYYRNMCRFIDLSSVGPLCTDSVFCDIMAGFEKQNIRTLILAGCSNLSSHALGRVLEHLPQISYVHIQGCSHLGDLKNKFQHVKWIRSSLNPEGSYRKMKTLKQIGDGNNYASKVARNFDQLDDSDELDGYFADISKIEGASLFSFGQGFYKRSKLLDARKSSAVLSRDAEMRRLMQRQAENSYRKMEEFVINRLREIMRCNRFDFFIPKVSKIEGRLKNGYYARHGFRTIKHDIRTMCQDALRYKDGNDLDDVKQIVVSFIQLAKRLGNPRYISERNGAAAQDSLDISQYSFDTKLKKKQNKTRANLVAAGADNSSRAFDLEIKRSLSKLKKKDVCSGSETSDDDGYSEGDETESETTVSDTESDFDVNSGAWDLKGNCLKLTEHGESVIDDRILGARMTKASLVPPVTRKYEVIEEYLIVADVEEVQRKMRVSLPDDYSEKLLSQKNGTENLELPEVKDYQPRKVAGDEILEQEVYGIDPYTHNLLSDIMPSDLELSPTDKHIFIEELLLNALNKQVRHFTGLGNTPMTYNIRPVIEEIQRSAEDSGDRRTLKMCLGMLKSMRNRSDQNFVAYRKGLGVVCNKKGGFGVDDFVVEFFGEVYPSWRWYEKQDGIKHIQNNSEDQAPEFYNIMLERPKGDRHGYDLVFVDAMHKANYASRICHSCNPNCEAKKKRIYTYDYAKADMRAIVTAVDGKYQIGVYTLRPIAEGEEITFDYNSVTENMKHQSASVEVKYAAAAI

SEQ ID NO: 177995 - protein, 2251 aa, Zea Mays
MGDGGVACAVRAVEGFHAGALVRRGGAGEAMPDKGEKAHGHHHQQQHWKNQQSASATDLEEGELLSGEAETNGLPERSMPPKKWRKVLAASAAAVEVEPGEIVSTKQAVPLKKARRNGEVDKVELLPERQRKVKSSGKSTRKSIKDDMEPGEIAPPEKRRDAKSQRADDNSRRPSSSAQKSSLRDSDEEPGEIKPESSTSGSLRKNQPTEPHSINHKHHTDTSDQSGSKSHRKGPKGEGKRSAARHLSGRNREISSPTRDRRDRHERSPGILGRFPHERSRHDRYDRSPSRLERSPHRERARHYESRDHSPYVSPRHRARQPHFRDNTPSRVDNFPRGRVQREDVRDRSPFLHDRSPSERFRPTDTHEASKKSRSGNNSEKSQHKSKSAKQSSKTKSGSNEKNEKISNEKPTESSKYTELPPPPPLPLPPPPPPPPPPPPLPPAVPPPLPPPPEPEPTGVLAEDMIEDMDICDTPPHTSAAPEPTDPIYDIGRWFYLDHFGIEQGPSKLAVLKKLVEDGYLLSDHLIKHADSNRWVTVENAASPLVPSDFPSFYSDTSTQMVNPPEAPGNLLDEALEEASNLASGSEDKQMVEASAEDSEEFYINDRVEALMDGSILVHGQELEIIGELLGADFQPADWQRLSHPEDFTRFHVHIEGDDEIIGGTEFLENRTTDAYGLVSVDNFHHYVESSEWFSGRWSCKGGDWRRNDELGQDTPFRKKLVLNEGYPLCQIPKGSYEDPRRPCKDELYYPVRGKKHDLPLWAFSSTEEDIDGVNDTTKNTVVPGRPGQTRQPPSEVKVMLQVVSINYHVIKDQSSVEPRTKPRGTDRPPSRSSRSHSIGAERSSIHDGSSHFRKHHDHDSQSFHKSKSVPNIPKDHVCTVDELSVNRGDWYYLDGTGHDQGPFSYSELQELVKKDTIIEQSSVFRKIDNTWFPVLKDLKPGSSVPSAAPSSNLIAAFTHPDQYNFGVNQGSSSFHELHPQFAGYTRGKLHELVMKYFKSRELTLAINEVLDPWISAKQPKKEFEAYFSHNSASRNFLPEDGGSAKRARLLPDQSDENIHLSEDIIASRKEDICFEELCDGASSVDNDSVNPRAGNASWGLLNDHLLARIFHFMRADLKSLISSAATCKSWNAAAKYYRNMCRFIDLSSVGPLCTDSVFCDIMAGFEKQNIRTLILAGCSNLSSHALGRVLEHLPQISYVHIQGCSHLGDLKNKFQHVKWIRSSLNPEGSYRKMKTLKQIGDGNNYASKVARNFDQLDDSDELDGYFADISKIEGASLFSFGQGFYKRSKLLDARKSSAVLSRDAEMRRLMQRQAENSYRKMEEFVINRLREIMRCNRFDFFIPKVSKIEGRLKNGYYARHGFRTIKHDIRTMCQDALRYKDGNDLDDVKQIVVSFIQLAKRLGNPRYISERNGAAAQDSLDISQYSFDTKLKKKQNKTRANLVAAGADNSSRAFDLEIKRSLSKLKKKDVCSGSETSDDDGYSEGDETESETTVSDTESDFDVNSGAWDLKGNCLKLTEHGESVIDDRILGARMTKASLVPPVTRKYEVIEEYLIVADVEEVQRKMRVSLPDDYSEKLLSQKNGTENLELPEVKDYQPRKVAGDEILEQEVYGIDPYTHNLLSDIMPSDLELSPTDKHIFIEELLLNALNKQVRHFTGLGNTPMTYNIRPVIEEIQRSAEDSGDRRTLKMCLGMLKSMRNRSDQNFVAYRKGLGVVCNKKGGFGVDDFVVEFFGEVYPSWRWYEKQDGIKHIQNNSEDQAPEFYNIMLERPKGDRHGYDLVFVDAMHKANYASRICHSCNPNCEAKVTAVDGKYQIGVYTLRPIAEGEEITFDYNSVTESKEEHEASVCLCGSQVCRGSYLNFSGEGAFEKVLMEFHGVLDRHSLLLQACETDSVSQQDLIDLGRAGLGTCLLAGLPVRFIYLERQKLPDEILRHNVDEKRQFLIEINMDSEKNDAEVQAEGVLNSRLQQIVHTLDKVRYVMRCIFGDPKNAPPPMVRLSGKSLVSAIWKGDSSIVAELLQSMEPHVEEEVLSDLKAKICAHDPSDSEDIEGGIRNSLLWLRDELRTLPCTYKCRHDAAADLIHLYAYTKCFFRVRDYKTVKSPPVHISPLDLGPKYADKLGPGFQEYCKTYPENYCLAQLIYWYSQNSEPESRLTRARKGCMSLPDVSSFYVKSLKPLQERVYGNRTVRFMLSRMEKQAQRPWPKDRIWVFKSDPRYFGSPMMDAVLNNSPLDKEMVHWLKTRPNVFLG

SEQ ID NO: 177996 - protein, 166 aa, Zea Mays
MIPSMPGHVVQAFTLLKSSTEAQSVVASLASDRNVWDAVLKNEKVMEFYKTHQTTLVQTSPNEAVTVELPGKLEDAASENTSSGELPAGSGLSFSDFVDNAKKTVMDVVHNITDFFKDLFDDSAKTQTGAGPSAAEKGPSMADMAVGGSFMALAIAVILVVMFKRA

SEQ ID NO: 177997 - protein, 179 aa, Zea Mays
MGGGVMRTAAKVSIAGGAAAAKSGRFRNAAPVFATAPAAAGSEAAPLVSVSSGEVPPAAAQWAASWELDDWEFADWRDDAAAAAAVVEREATAAAAKPRLVFAPPSREEAEEATTELRDAVERAYFNESPVEVVKEQDKEFNKLATDAMIPSMPGHVVQAFTLLKSSTEAQIEMSGMQY

SEQ ID NO: 177998 - protein, 135 aa, Zea Mays
MELAFLLAAAALLSMAATSLSAARKFSPAPCFSYGELVPCPGAHGCYFSGHVEPSPIDASAPLLLRPTPHPLALPCSPAISLDTPLPLLLPMVALADLSHDVGNSSTSLHGRPKFSREFWNWTIMKRGLHWIAIK

SEQ ID NO: 177999 - protein, 53 aa, Zea Mays
MKTYSNLYRLSVFSLCLIVTKSEITCKVWHLGNMFYLWDPPCDKWLSCCWEKL

SEQ ID NO: 178000 - protein, 61 aa, Zea Mays
MNRVIMPKFDVCVWAVWMLHGQRGIPESLLINKRICIALCPIHDKRSTHIMLTGRIRAHLF

SEQ ID NO: 178001 - protein, 104 aa, Zea Mays
MSMEHSPSNVSLGKIKMPLLPVDLPLLLRVESETAAIRRVRSLTEDSMGSSSESRARCSSVVVERFCFSNTPSASVCRFSELVLSLVRLFFSWSCATRLLGLSA

SEQ ID NO: 178002 - protein, 191 aa, Zea Mays
MAVAAAAHHLPVVPHRLVPVRHTSSSPPPHPASRCSAAGKPPVQLHAAQARASGFAARVAFNPSGNYDLSLSMGEDETPQVQPPPPPTQGRFEIVINNDNIRTLDLSPVEAALGDLSSLTPAASRTLLDQTVGFTISYEREDEYDTRELSEFPDIRLWFVRLDAAYPWFPVVLDWRAGELARYAAMLVPHQ

SEQ ID NO: 178003 - protein, 223 aa, Zea Mays
MRCVDRLKCIWGGLIGLLRGIEKFDASRGFRISTYVYWWIRQGVSRALADNSKTFRLPTYLHERLIAIRGAKYALEDQGIAPTIENIAESLNISEKKVHNATEAVNKVLSLDQQAFPSLNGLPGDTLHSYIEDQNVANDPWHGFEEMYLKEEVNNLINSNLNERERDIIRLYHGIGKQCHTWEDISRQFGLSRERVRQVGLVAMEKLKHAARRKHLDALLEDY

SEQ ID NO: 178004 - protein, 231 aa, Zea Mays
MELRSRAGFRSWDRGIPLLDPLLENQKTFRPKKSAPSGSKGAQLRKHIDATLGSGNLREAVRLPPGEDINEWLAVNTVDFFNQVNMLYGTLTEFCTPESCPTMTAGPKYEYRWADGVQIKKPIEVSAPKYMEYLMDWIEGQLDDESIFPQKLGTPFPPNFKEVVKTIFKRLFRVYAHIYHSHFQKIVSLKEEAHLNTCFKHFILFTNEFGLIDKKELAPLQELIESIIVPY

SEQ ID NO: 178005 - protein, 110 aa, Zea Mays
MLFSQSSSDSTNLSPNLKVYFSLISPPSSASFMVSCGISHFSVSGHTLKAICSWTKSLVPIKEQITPKALWHSSAASFISTFGLRRLKLCQIGRIIIPLIFSRVFRSFFT

SEQ ID NO: 178006 - protein, 52 aa, Zea Mays
MELINEVPPIKLLKVLDLATQSSTSALIWRHLMCASTVVSVMFKFTITKLRR

SEQ ID NO: 178007 - protein, 58 aa, Zea Mays
MELINEVPPIKVDGRIAVCEGASEGVGLGHPIEYICLDLEAPNVCKYCGLRYVQVHHH

SEQ ID NO: 178008 - protein, 170 aa, Zea Mays
MPPPPSLRKPRCPPPGNHARRVTAARNDPTRAPATSCLASVSALSCSTAPSPSLSLLPSPICSTVHTHSPPPFARQHQPQRGLPLPHRSGSYCSPIEPPAALAASSQLMCGFGASKCGSSPTFSRSGVLSPGWASSCRRSPPRARQRETWSWWVRSAACGRTGGSVGAGT

SEQ ID NO: 178009 - protein, 62 aa, Zea Mays
MCGFGASKCGSSPTFSRSGVLSPGWASSCRRSPPRARQRETWSWWVRSAACGRTGGSVGAGT

SEQ ID NO: 178010 - protein, 162 aa, Zea Mays
MSSQPISLLIPKCTSAIILRRAPPWARLTQLLARRVGRLVVAIAALAFLWCSASLSAHNTAPSTPTWQIPVRLFSKLIGHALSSPWRSGGPHHLALCHLSLSPSSLCHQRLLGASACPLHRPCPYSATALRDRAARPKTCIALFVSSSPCYCIRCGAICVCR

SEQ ID NO: 178011 - protein, 72 aa, Zea Mays
MIRGYTPKHLNSIHNMQEGVPTHLFKGTWASSFNRHMNRTDNHCIRNGRDKQARSFFPAGHNQEQQKGKEKR

SEQ ID NO: 178012 - protein, 208 aa, Zea Mays
MSPFHALYGRSCRTPLQWDQPEEKQVFGPDVLLKTEENIKMVWENLKIAQSRQQNYADTRRELSFEIEDFVYLKVSPIRGVRRFGIKGKLAPRYVGPYQILAKRGEVAYQLSLPEDLSAVHDVFHVSQLKKCLCVPEEKLPVEGLEVQEDLTYIEKPTQILETADRVTRRNTIRMCKIRWGHHSEEEATWEREDDLMAKYPELSACQP

SEQ ID NO: 178013 - protein, 58 aa, Zea Mays
MTVSSASIPVLHFVEVVPCTHKSCYPSAKGSRLSYTSTKEARQGNTTRPLQSSTGFRK

SEQ ID NO: 178014 - protein, 551 aa, Zea Mays
MHQEGLNESLIQDCEQIVLSEFSSYRKQLKCRYEDYLSLFGSCRHNFEEGKDGSITQGTLTRNDFSSSRHGNFSEYSTTESDEHEFEKHDGGELICEDESAFFDSIDYFTESDNRSSTMLSGKEVVDSQTHDSSNNIQAQIRRRSRLPDPIEKEKGISLWSIIKDSVGKDLTRVCLPVYFNEPLSSLQKCFEDLEYSYLLDQAYQHGKVGDSLMRILKVAAFAASGYASSVARPCKPFNPLLGETYEADYPDRGIRFFAEKVSHHPMLIACHCEGKGWKFWGDSNLKSKFWGQSIQVEPVGILTLEFEDGEIFQWNKVTTTIHNLILGKLYCSHHGTMHIKGNRQYSCKLKFKEPSLLDRNPHLVQGFVEDNNGNKASFLIGMWDESIYCSNSDTSKVKSADQLKGASLLWEKNKPAPNPTRYNLSSFAITLNELTPGLQEKLPPTDSRLRPDQRHLENGEYEKANAEKLRLERRQRMSTKLQDNGWKSRWFEQDTEDGTYCYKGGYWETRERGFWDGCLDIFGDSRGSSSQHATQKQWSTAISNGASSCL

SEQ ID NO: 178015 - protein, 433 aa, Zea Mays
MLSGKEVVDSQTHDSSNNIQAQIRRRSRLPDPIEKEKGISLWSIIKDSVGKDLTRVCLPVYFNEPLSSLQKCFEDLEYSYLLDQAYQHGKVGDSLMRILKVAAFAASGYASSVARPCKPFNPLLGETYEADYPDRGIRFFAEKVSHHPMLIACHCEGKGWKFWGDSNLKSKFWGQSIQVEPVGILTLEFEDGEIFQWNKVTTTIHNLILGKLYCSHHGTMHIKGNRQYSCKLKFKEPSLLDRNPHLVQGFVEDNNGNKASFLIGMWDESIYCSNSDTSKVKSADQLKGASLLWEKNKPAPNPTRYNLSSFAITLNELTPGLQEKLPPTDSRLRPDQRHLENGEYEKANAEKLRLERRQRMSTKLQDNGWKSRWFEQDTEDGTYCYKGGYWETRERGFWDGCLDIFGDSRGSSSQHATQKQWSTAISNGASSCL

SEQ ID NO: 178016 - protein, 495 aa, Zea Mays
MHQEGLNESLIQDCEQIVLSEFSSYRKQLKCRYEDYLSLFGSCRHNFEEGKDGSITQGTLTRNDFSSSRHGNFSEYSTTESDEHEFEKHDGGELICEDESAFFDSIDYFTESDNRSSTMLSGKEVVDSQTHDSSNNIQAQIRRRSRLPDPIEKEKGISLWSIIKDSVGKDLTRVCLPVYFNEPLSSLQKCFEDLEYSYLLDQAYQHGKVGDSLMRILKVAAFAASGYASSVARPCKPFNPLLGETYEADYPDRGIRFFAEKVTTTIHNLILGKLYCSHHGTMHIKGNRQYSCKLKFKEPSLLDRNPHLVQGFVEDNNGNKASFLIGMWDESIYCSNSDTSKVKSADQLKGASLLWEKNKPAPNPTRYNLSSFAITLNELTPGLQEKLPPTDSRLRPDQRHLENGEYEKANAEKLRLERRQRMSTKLQDNGWKSRWFEQDTEDGTYCYKGGYWETRERGFWDGCLDIFGDSRGSSSQHATQKQWSTAISNGASSCL

SEQ ID NO: 178017 - protein, 214 aa, Zea Mays
MHIKGNRQYSCKLKFKEPSLLDRNPHLVQGFVEDNNGNKASFLIGMWDESIYCSNSDTSKVKSADQLKGASLLWEKNKPAPNPTRYNLSSFAITLNELTPGLQEKLPPTDSRLRPDQRHLENGEYEKANAEKLRLERRQRMSTKLQDNGWKSRWFEQDTEDGTYCYKGGYWETRERGFWDGCLDIFGDSRGSSSQHATQKQWSTAISNGASSCL

SEQ ID NO: 178018 - protein, 269 aa, Zea Mays
MRGGGSGRGHGNDQYSHNHHHSSLCCLSAAPPLAGDATPTLTPEPEAAAASIASTVSTVVVEGVLHKWTNYGRGWRERWFSLRDGVLSYSKIRANAGAKTGAGATDGDGEVRVIGSRVEGARRTEKPAGVVFLKVSAFRESKSDDRRFYIFSPTKTLHLKTNSKVDRVAWIEALILARSVYSLGSLSGRATFVQSDVSISTARLRDRMHQEGLNESLIQDCEQIVLSEFSSYRKQLKCRYEDYLSLFGSCRHNFEEFYIVYYTHICAGR

SEQ ID NO: 178019 - protein, 758 aa, Zea Mays
MRGGGSGRGHGNDQYSHNHHHSSLCCLSAAPPLAGDATPTLTPEPEAAAASIASTVSTVVVEGVLHKWTNYGRGWRERWFSLRDGVLSYSKIRANAGAKTGAGATDGDGEVRVIGSRVEGARRTEKPAGVVFLKVSAFRESKSDDRRFYIFSPTKTLHLKTNSKVDRVAWIEALILARSVYSLGSLSGRATFVQSDVSISTARLRDRMHQEGLNESLIQDCEQIVLSEFSSYRKQLKCRYEDYLSLFGSCRHNFEEGKDGSITQGTLTRNDFSSSRHGNFSEYSTTESDEHEFEKHDGGELICEDESAFFDSIDYFTESDNRSSTMLSGKEVVDSQTHDSSNNIQAQIRRRSRLPDPIEKEKGISLWSIIKDSVGKDLTRVCLPVYFNEPLSSLQKCFEDLEYSYLLDQAYQHGKVGDSLMRILKVAAFAASGYASSVARPCKPFNPLLGETYEADYPDRGIRFFAEKVSHHPMLIACHCEGKGWKFWGDSNLKSKFWGQSIQVEPVGILTLEFEDGEIFQWNKVTTTIHNLILGKLYCSHHGTMHIKGNRQYSCKLKFKEPSLLDRNPHLVQGFVEDNNGNKASFLIGMWDESIYCSNSDTSKVKSADQLKGASLLWEKNKPAPNPTRYNLSSFAITLNELTPGLQEKLPPTDSRLRPDQRHLENGEYEKANAEKLRLERRQRMSTKLQDNGWKSRWFEQDTEDGTYCYKGGYWETRERGFWDGCLDIFGDSRGSSSQHATQKQWSTAISNGASSCL

SEQ ID NO: 178020 - protein, 834 aa, Zea Mays
MAVVNPTNLAIDDDDDDTPISFKRTSNSTKTARPTPSKHEGSSGGNGAPVRIPKPVSPNPQKNGATGASRPLHMKPPSSSPNHRPSGSGQPNSLAQHSSKANSIDMSKLKRPLVKDERSDDSDDEVPIGLRRKVEEKKLKGVDTRVQKTDDSDDDDKPLGLKINSSRMSSNRVNKPVLQRTVPKVEQPDEDSDDDKPLASRLPSNAGPKSGGDVSEDSEDEKPLAARFSKVAGSGNPKIASSSKGLTSDTNGQQSLGKRPLDNSNQTSSALKKAKPSNVSASAIVRREIKTDDNTPLAQRLKMGESSKGKSSAKSVFKKSPASVKKDIKKMKGKGKLKKNMKNSQFSKIMKVPPGSGGGKKWTTLEHNGVIFPPPYKPHGVKMLYNGKPIDLTPEQEEVATMFAVMKDTDYAAKPTFIDNFFTDWRKVLGKNHIIKNFELCDFTPIYEWHLREKERKKQMTTEEKKTLREDKLKQEEKYMWAVVDGVKEKVGNFRVEPPGLFRGRGEHPKMGKLKRRILPSDITINIGKGAPVPECPIPGESWKEVKHDNTVTWLAFWNDPINPKDFKYVFLAASSSLKGQSDKEKYEKSRKLKGHIQRIRENYTKDFKNKDVTRRQIAVATYLIDKLALRAGNEKDDDEADTVGCCTLKVDNVTCMPPNQIQFDFLGKDSIRYFNTVEVEELVYKAIEGFRAGKKPGQDLFDKIDTSRLNAHLKDLMPGLTAKVFRTYNASITLDGILHEETEDGTVLEKIAVYQRANKEVAIICNHQRSVSKSHESQMTRMNEKIDELKSQMEELKADLNKAKKGKPLGYDSEGKPKRNLAPEARLQHLKAR

SEQ ID NO: 178021 - protein, 824 aa, Zea Mays
MAVVNPTNLAIDDDDDDTPISFKRTSNSTKTARPTPSKHEGSSGGNGAPVRIPKPVSPNPQKNGATGASRPLHMKPPSSSPNHRPSGSGQPNSLAQHSSKANSIDMSKLKRPLVKDERSDDSDDEVPIGLRRKVEEKKLKGVDTRVQKTDDSDDDDKPLGLKINSSRMSSNRVNKPVLQRTVPKVEQPDEDSDDDKPLASRLPSNAGPKSGGDVSEDSEDEKPLAARFSKVAGSGNPKIASSSKGLTSDTNGQQSLGKRPLDNSNQTSSALKKAKPSNVSASAIVRREIKTDDNTPLAQRLKMGESSKGKSSAKSVFKKSPASVKKDIKKMKGKGKLKKNMKNSQFSKIMKVPPGSGGGKKWTTLEHNGVIFPPPYKPHGVKMLYNGKPIDLTPEQEEVATMFAVMKDTDYAAKPTFIDNFFTDWRKVLGKNHIIKNFELCDFTPIYEWHLREKERKKQMTTEEKKTLREDKLKQEEKYMWAVVDGVKEKVGNFRVEPPGLFRGRGEHPKMGKLKRRILPSDITINIGKGAPVPECPIPGESWKEVKHDNTVTWLAFWNDPINPKDFKYVFLAASSSLKGQSDKEKYEKSRKLKGHIQRIRENYTKDFKNKDVTRRQIAVATYLIDKLALRAGNEKDDDEADTVGCCTLKVDNVTCMPPNQIQFDFLGKDSIRYFNTVEVEELVYKAIEGFRAGKKPGQDLFDKIDTSRLNAHLKDLMPGLTAKVFRTYNASITLDGILHEETEDGTVLEKIAVYQRANKEVAIICNHQRSVSKSHESQMTRMNEKIDELKMEELKADLNKAKKGKPLGYDSEGKPKRNLAPEA

SEQ ID NO: 178022 - protein, 401 aa, Zea Mays
MILYLMYFQLVNTIYPILQIFAEKPAVRRAYLDFVPKKMSETRFWEKYCRAEYLVRTKNTAAATAEAAGDEELAIFLKNDDILAKEAKLKIKRVDPTLDMEADTGDDYIHLPDHGIHRDGSKETVDADSELARRTLSQDLNRHAAVVLEGRSLDVESTDPKTLAEALARSKKEPPSTSNVDDDNHERLMKVARMTEIEDLQAPRSLLYAPLCIKDPREYFDSQQANALRSLGGSNGGRKAHSCSLSTEEVFHHLMDQMSSVKVNRLNCPIVQSDMALKVLNELNEGISRSRRLNLKNPQEGLLGQLPQHTRDELMDELLRHFWSSYPITSAVLYNKVQRVKEAMTQIYQKLQLIKELAQPDVRHEISRLVKPMTQALDAAFNHDLEQQQKSSKAGNRHNGF

SEQ ID NO: 178023 - protein, 608 aa, Zea Mays
MGSMTIGAKYKTTIKDPGTPGILRMNGDRFTFTPNDPRSAMKFNVDFRTIKVGFVACALGHKFNKVEGNKAALLNLSKEDKAGGYIFEFDNVGNRDQCRDFVARVLGKHQGIVPPRPTVAPENSVASAALEQLSAAEVERRVKLLREDSELQKLHKKFVLGNILQESEFWATRKNLLDDEANKRSKQKPGFKSALVDIRPTTDGRTNKVTFQITPEMIHQIFAEKPAVRRAYLDFVPKKMSETRFWEKYCRAEYLVRTKNTAAATAEAAGDEELAIFLKNDDILAKEAKLKIKRVDPTLDMEADTGDDYIHLPDHGIHRDGSKETVDADSELARRTLSQDLNRHAAVVLEGRSLDVESTDPKTLAEALARSKKEPPSTSNVDDDNHERLMKVARMTEIEDLQAPRSLLYAPLCIKDPREYFDSQQANALRSLGGSNGGRKAHSCSLSTEEVFHHLMDQMSSVKVNRLNCPIVQSDMALKVLNELNEGISRSRRLNLKNPQEGLLGQLPQHTRDELMDHWTAIQELLRHFWSSYPITSAVLYNKVQRVKEAMTQIYQKLQLIKELAQPDVRHEISRLVKPMTQALDAAFNHDLEQQQKSSKAGNRHNGF

SEQ ID NO: 178024 - protein, 392 aa, Zea Mays
MIHQIFAEKPAVRRAYLDFVPKKMSETRFWEKYCRAEYLVRTKNTAAATAEAAGDEELAIFLKNDDILAKEAKLKIKRVDPTLDMEADTGDDYIHLPDHGIHRDGSKETVDADSELARRTLSQDLNRHAAVVLEGRSLDVESTDPKTLAEALARSKKEPPSTSNVDDDNHERLMKVARMTEIEDLQAPRSLLYAPLCIKDPREYFDSQQANALRSLGGSNGGRKAHSCSLSTEEVFHHLMDQMSSVKVNRLNCPIVQSDMALKVLNELNEGISRSRRLNLKNPQEGLLGQLPQHTRDELMDHWTAIQELLRHFWSSYPITSAVLYNKVQRVKEAMTQIYQKLQLIKELAQPDVRHEISRLVKPMTQALDAAFNHDLEQQQKSSKAGNRHNGF

SEQ ID NO: 178025 - protein, 342 aa, Zea Mays
MILYLMYFQLVNTIYPILQIFAEKPAVRRAYLDFVPKKMSETRFWEKYCRAEYLVRTKNTAAATAEAAGDEELAIFLKNDDILAKEAKLKIKRVDPTLDMEADTGDDYIHLPDHGIHRDGSKETVDADSELARRTLSQDLNRHAAVVLEGRSLDVESTDPKTLAEALARSKKEIEDLQAPRSLLYAPLCIKDPREYFDSQQANALRSLGGSNGGRKAHSCSLSTEEVFHHLMDQMSSVKVNRLNCPIVQSDMALKVLNELNEGISRSRRLNLKNPQEGLLGQLPQHTRDELMDVRCCIHYWFCLYVLSMELCKLSIFSALDGYPGIATPFLVIVSNNKCSTL

SEQ ID NO: 178026 - protein, 594 aa, Zea Mays
MGSMTIGAKYKTTIKDPGTPGILRMNGDRFTFTPNDPRSAMKFNVDFRTIKGHKFNKVEGNKAALLNLSKEDKAGGYIFEFDNVGNRDQCRDFVARVLGKHQGIVPPRPTVAPENSVASAALEQLSAAEVERRVKLLREDSELQKLHKKFVLGNILQESEFWATRKNLLDDEANKRSKQKPGFKSALVDIRPTTDGRTNKVTFQITPEMIHQIFAEKPAVRRAYLDFVPKKMSETRFWEKYCRAEYLVRTKNTAAATAEAAGDEELAIFLKNDDILAKEAKLKIKRVDPTLDMEADTGDDYIHLPDHGIHRDGSKETVDADSELARRTLSQDLNRHAAVVLEGRSLDVESTDPKTLAEALARSKKEPPSTSNVDDDNHERLMKVARMTEIEDLQAPRSLLYAPLCIKDPREYFDSQQANALRSLGGSNGGRKAHSCSLSTEEVFHHLMDQMSSVKVNRLNCPIVQSDMALKVLNELNEGISRSRRLNLKNPQEGLLGQLPQHTRDELMDELLRHFWSSYPITSAVLYNKVQRVKEAMTQIYQKLQLIKELAQPDVRHEISRLVKPMTQALDAAFNHDLEQQQKSSKAGNRHNGF

SEQ ID NO: 178027 - protein, 882 aa, Zea Mays
MGVVARARSSQCARAWRRPCLSRRRVRSSALPRPAVREGAGVTASRSSAISLCPARGPAVKLLGRWDLETWAPTVSVHMYDFLSGMAGAFGRRERGRGACGCRGAQWPRLNIRCNPQDVLVCIQIMNERQRQAVVRKGFFNILDMTIDALGSRTHLCWLMEKLDPKDMTLRIGPGKELKITKETVHLILGLPNTGGGKPLNIDEVNAAVNLRSSLGISKDEFGVAKLQERLRLGGDDDLSIRCFFLILFNRLLFPTASWSISNNEVLLTEQLDRFPHIDWCHLIFNDLCEAAHKWHNRSTTNVSATIYGCSIVVLVYYLDHLHHAVAPNNKSDTPRIKYFDKKTIKALSMADKRKPRQGGEPFGHCDFRSSSETCYAPTPEFHGQFEFSSDAFDVAQNAPCGHHTISIQVPLIKDMISSKIQQLPAYHHPKFEAKLRAYDSEVGKSFATINQRLSKIVKKQYDLADTFGELIDEVLRAEINSPDNKDDMIEPSNPSASEHCTQSTDQFISDPLMTATQLESQMIVTQVEAIYKRQQEMCRAFESSRDESVTPQNIRGDTTEDDALQLDSGLVLDQILSGNETYMMHKTRHDSVPLTQMDCVRALRQFLCAKVMDLNRNVIDFGEYVGTCRDIQRSFADGECLDNVFMQCFIDCVRDDATNHIPPLTAHQLILDAIVGAILNFEEQEQHSNTHRPYDPAILENYLSKTLPSFKQLDEYKSIMVPMLRAGHWTLYVINFQNRCIHILDSNPYGPELGETTWESYHYVQMDIGKRKLPWARLIMVRLNMALQHVRPRSNLPRFDNFPIDMAPNCPTMKAGSNDCGFFAMRYIQYYDYMDGAINVVIDSDNSGDLRALALYYLIFHRLNKNRSLSPELERFKFPHY

SEQ ID NO: 178028 - protein, 867 aa, Zea Mays
MGVVARARSSQCARAWRRPCLSRRRVRSSALPRPAVREGAGVTASRSSAISLCPARGPAVKLLGRWDLETWAPTVSVHMYDFLSGMAGAFGRRERGRGACGCRGAQWPRLNIRCNPQDVLVCIQIMNERQRQAVVRKGFFNILDMTIDALGSRTHLCWLMEKLDPKDMTLRIGPGKELKITKETVHLILGLPNTGGGKPLNIDEVNAAVNLRSSLGISKDEFGVAKLQERLRLGGDDDLSIRCFFLILFNRLLFPTASWSISNNEVLLTEQLDRFPHIDWCHLIFNDLCEAAHKWHNRSTTNVSATIYGCSIVVLVYYLDHLHHAVAPNNKSDTPRIKYFDKKTIKALSMADKRKPRQGGEPFGHCDFRSSSETCYAPTPEFHGQFEFQFSSDAFDVAQNAPCGHHTISIQVPLIKDMISSKIQQLPAYHHPKFEAKLRAYDSEVGKSFATINQRLSKIVKKQYDLADTFGELIDEVLRAEINSPDNKDDMIEPSNPSASATQLESQMIVTQVEAIYKRQQEMCRAFESSRDESVTPQNIRGDTTEDDALQLDSGLVLDQILSGNETYMMHKTRHDSVPLTQMDCVRALRQFLCAKVMDLNRNVIDFGEYVGTCRDIQRSFADGECLDNVFMQCFIDCVRDDATNHIPPLTAHQLILDAIVGAILNFEEQEQHSNTHRPYDPAILENYLSKTLPSFKQLDEYKSIMVPMLRAGHWTLYVINFQNRCIHILDSNPYGPELGETTWESYHYVQMDIGKRKLPWARLIMVRLNMALQHVRPRSNLPRFDNFPIDMAPNCPTMKAGSNDCGFFAMRYIQYYDYMDGAINVVIDSDNSGDLRALALYYLIFHRLNKNRSLSPELERFKFPHY

SEQ ID NO: 178029 - protein, 545 aa, Zea Mays
MGVVARARSSQCARAWRRPCLSRRRVRSSALPRPAVREGAGVTASRSSAISLCPARGPAVKLLGRWDLETWAPTVSVHMYDFLSGMAGAFGRRERGRGACGCRGAQWPRLNIRCNPQDVLVCIQIMNERQRQAVVRKGFFNILDMTIDALGSRTHLCWLMEKLDPKDMTLRIGPGKELKITKETVHLILGLPNTGGGKPLNIDEVNAAVNLRSSLGISKDEFGVAKLQERLRLGGDDDLSIRCFFLILFNRLLFPTASWSISNNEVLLTEQLDRFPHIDWCHLIFNDLCEAAHKWHNRSTTNVSATIYGCSIVVLVYYLDHLHHAVAPNNKSDTPRIKYFDKKTIKALSMADKRKPRQGGEPFGHCDFRSSSETCYAPTPEFHGQFEFQFSSDAFDVAQNAPCGHHTISIQVPLIKDMISSKIQQLPAYHHPKFEAKLRAYDSEVGKSFATINQRLSKIVKKQYDLADTFGELIDEVLRAEINSPDNKDDMIEPSNPSASATQLESQMIVTQVEAIYKRQQEMCRAFESSRDESVTPQNIVCFYL

SEQ ID NO: 178030 - protein, 550 aa, Zea Mays
MGVVARARSSQCARAWRRPCLSRRRVRSSALPRPAVREGAGVTASRSSAISLCPARGPAVKLLGRWDLETWAPTVSVHMYDFLSGMAGAFGRRERGRGACGCRGAQWPRLNIRCNPQDVLVCIQIMNERQRQAVVRKGFFNILDMTIDALGSRTHLCWLMEKLDPKDMTLRIGPGKELKITKETVHLILGLPNTGGGKPLNIDEVNAAVNLRSSLGISKDEFGVAKLQERLRLGGDDDLSIRCFFLILFNRLLFPTASWSISNNEVLLTEQLDRFPHIDWCHLIFNDLCEAAHKWHNRSTTNVSATIYGCSIVVLVYYLDHLHHAVAPNNKSDTPRIKYFDKKTIKALSMADKRKPRQGGEPFGHCDFRSSSETCYAPTPEFHGQFEFQFSSDAFDVAQNAPCGHHTISIQVPLIKDMISSKIQQLPAYHHPKFEAKLRAYDSEVGKSFATINQRLSKIVKKQYDLADTFGELIDEVLRAEINSPDNKDDMIEPSNPSASDPLMTATQLESQMIVTQVEAIYKRQQEMCRAFESSRDESVTPQNIVCFYL

SEQ ID NO: 178031 - protein, 872 aa, Zea Mays
MGVVARARSSQCARAWRRPCLSRRRVRSSALPRPAVREGAGVTASRSSAISLCPARGPAVKLLGRWDLETWAPTVSVHMYDFLSGMAGAFGRRERGRGACGCRGAQWPRLNIRCNPQDVLVCIQIMNERQRQAVVRKGFFNILDMTIDALGSRTHLCWLMEKLDPKDMTLRIGPGKELKITKETVHLILGLPNTGGGKPLNIDEVNAAVNLRSSLGISKDEFGVAKLQERLRLGGDDDLSIRCFFLILFNRLLFPTASWSISNNEVLLTEQLDRFPHIDWCHLIFNDLCEAAHKWHNRSTTNVSATIYGCSIVVLVYYLDHLHHAVAPNNKSDTPRIKYFDKKTIKALSMADKRKPRQGGEPFGHCDFRSSSETCYAPTPEFHGQFEFQFSSDAFDVAQNAPCGHHTISIQVPLIKDMISSKIQQLPAYHHPKFEAKLRAYDSEVGKSFATINQRLSKIVKKQYDLADTFGELIDEVLRAEINSPDNKDDMIEPSNPSASDPLMTATQLESQMIVTQVEAIYKRQQEMCRAFESSRDESVTPQNIRGDTTEDDALQLDSGLVLDQILSGNETYMMHKTRHDSVPLTQMDCVRALRQFLCAKVMDLNRNVIDFGEYVGTCRDIQRSFADGECLDNVFMQCFIDCVRDDATNHIPPLTAHQLILDAIVGAILNFEEQEQHSNTHRPYDPAILENYLSKTLPSFKQLDEYKSIMVPMLRAGHWTLYVINFQNRCIHILDSNPYGPELGETTWESYHYVQMDIGKRKLPWARLIMVRLNMALQHVRPRSNLPRFDNFPIDMAPNCPTMKAGSNDCGFFAMRYIQYYDYMDGAINVVIDSDNSGDLRALALYYLIFHRLNKNRSLSPELERFKFPHY

SEQ ID NO: 178032 - protein, 870 aa, Zea Mays
MGVVARARSSQCARAWRRPCLSRRRVRSSALPRPAVREGAGVTASRSSAISLCPARGPAVKLLGRWDLETWAPTVSVHMYDFLSGMAGAFGRRERGRGACGCRGAQWPRLNIRCNPQDVLVCIQIMNERQRQAVVRKGFFNILDMTIDALGSRTHLCWLMEKLDPKDMTLRIGPGKELKITKETVHLILGLPNTGGGKPLNIDEVNAAVNLRSSLGISKDEFGVAKLQERLRLGGDDDLSIRCFFLILFNRLLFPTASWSISNNEVLLTEQLDRFPHIDWCHLIFNDLCEAAHKWHNRSTTNVSATIYGCSIVVLVYYLDHLHHAVAPNNKSDTPRIKYFDKKTIKALSMADKRKPRQGGEPFGHCDFRSSSETCYAPTPEFHGQFEFSSDAFDVAQNAPCGHHTISIQVPLIKDMISSKIQQLPAYHHPKFEAKLRAYDSEVGKSFATINQRLSKIVKKQYDLADTFGELIDEVLRAEINSPDNKDDMIEPSNPSASDPLMTATQLESQMIVTQVEAIYKRQQEMCRAFESSRDESVTPQNIRGDTTEDDALQLDSGLVLDQILSGNETYMMHKTRHDSVPLTQMDCVRALRQFLCAKVMDLNRNVIDFGEYVGTCRDIQRSFADGECLDNVFMQCFIDCVRDDATNHIPPLTAHQLILDAIVGAILNFEEQEQHSNTHRPYDPAILENYLSKTLPSFKQLDEYKSIMVPMLRAGHWTLYVINFQNRCIHILDSNPYGPELGETTWESYHYVQMDIGKRKLPWARLIMVRLNMALQHVRPRSNLPRFDNFPIDMAPNCPTMKAGSNDCGFFAMRYIQYYDYMDGAINVVIDSDNSGDLRALALYYLIFHRLNKNRSLSPELERFKFPHY

SEQ ID NO: 178033 - protein, 419 aa, Zea Mays
MPLPRKLKKSIQRNAYFLTQKRKLVPHCSSDLSTSCRGVPNYLSINVLQDQSNTKQGAIRKALVILNPNSGFRSSRDVFYQKVQSTLKLSGFKMEVIETAYAGHAKVLSSTVDLKKFPDGIICVGGDGIVNEVLNGLLSRDDFDVAIRFPIGIIPAGSDNSLVWTVLGIRDPVSAAIALAKGDFTPIDVFAVKWIQAGVTHFGLTASYYGFVADVLQLSEKFRVQLGPFRYVVAGLLKFLSLPQYRFEVDYLPSSLQGRSSESRPLAEKRHEQLSDDGKVRRGTQTNGRIKDDWVTRNGEFLGIFVCNHFCKPAQGLLSPVIAPKARHDDGSLDLILVHGSGRLRLFCFFVAYQLCWHLLLPYVEYVKIKEVKVRPVGSTHSGCGVDGELLDGERGAEWQCSLLPAQGRLLGQDPGAFN

SEQ ID NO: 178034 - protein, 268 aa, Zea Mays
MSSRGLVRLPVSCSAAVDGVNGCLTYSTCRSRNYYYQYSHTTNLQISPVDQMPLPRKLKKSIQRNAYFLTQKRKLVPHCSSDLSTSCRGVPNYLSINVLQDQSNTKQGAIRKALVILNPNSGFRSSRDVFYQKVQSTLKLSGFKMEVIETAYAGHAKVLSSTVDLKKFPDGIICVGGDGIVNEVLNGLLSRDDFDVAIRFPIGIIPAGSDNSLVWTVLGIRDPVSAAIALAKGDFTPIDVFAVKWIQAGVTHFGLTASYYGFVADVQI

SEQ ID NO: 178035 - protein, 182 aa, Zea Mays
MSSRGLVRLPVSCSAAVDGVNGCLTYSTCRSRNYYYQYSHTTNLQISPVDQMPLPRKLKKSIQRNAYFLTQKRKLVPHCSSDLSTSCRGVPNYLSINVLQDQSNTKQGAIRKALVILNPNSGFRSSRDVFYQKVQSTLKASRWKSLKQHMPGMQRFFLLLLTSKNSLMVLYVLVAMGSSMRF

SEQ ID NO: 178036 - protein, 234 aa, Zea Mays
MSSRGLVRLPVSCSAAVDGVNGCLTYSTCRSRNYYYQYSHTTNLQISPVDQMPLPRKLKKSIQRNAYFLTQKRKLVPHCSSDLSTSCRGVPNYLSINVLQDQSNTKQGAIRKALVILNPNSGFRSSRDVFYQKVQSTLKLSGFKMEVIETAYAGHAKVLSSTVDLKKFPDGIICVGGDGIVNEVLNGLLSRDDFDVAIRFPIGIIPAGSDNSLVWTVLGIRDPVSAAIALAKVP

SEQ ID NO: 178037 - protein, 422 aa, Zea Mays
MPHLQYMSFKKLLLSRNAYFLTQKRKLVPHCSSDLSTSCRGVPNYLSINVLQDQSNTKQGAIRKALVILNPNSGFRSSRDVFYQKVQSTLKLSGFKMEVIETAYAGHAKVLSSTVDLKKFPDGIICVGGDGIVNEVLNGLLSRDDFDVAIRFPIGIIPAGSDNSLVWTVLGIRDPVSAAIALAKGDFTPIDVFAVKWIQAGVTHFGLTASYYGFVADVLQLSEKFRVQLGPFRYVVAGLLKFLSLPQYRFEVDYLPSSLQGRSSESRPLAEKRHEQLSDDGKVRRGTQTNGRIKDDWVTRNGEFLGIFVCNHFCKPAQGLLSPVIAPKARHDDGSLDLILVHGSGRLRLFCFFVAYQLCWHLLLPYVEYVKIKEVKVRPVGSTHSGCGVDGELLDGERGAEWQCSLLPAQGRLLGQDPGAFN

SEQ ID NO: 178038 - protein, 540 aa, Zea Mays
MEFTLIPDLVPQNRHAVIKVYVSRKWIFRGAMDNGPIHHIDLVLIDKEGHGICAEIPRNLAEEKGSIIEENKIYEISRFRISSARLMFKPVHMDKMIHFTYHTIINASLDTPPAFSRYVYHLTPFDQLESYIQKNEYFLDVLGVITQVSALKPVGTHTQESSNVIKEIIIKDINDITMRVTLWAERARAFKLENVYDPLEQKPIVTLFVGCLAKNFQGIYLNGGTACRWYFNPDIREAAPYYQRFESQKIKLHISSEQEQLYVTKETNVEHKTLHELLELHPYAFPKQGYQCTATIIEVPTTSRWWFPACTKCGRACKPQNGGYYCPYCKSEAYILRYKLTFMGSDGTATAQMFCFDTVAQHVVGRSCETVLKQVTEAAPIPPDLAQIVSLKFTFRVTVSNQTFSQREQRPTVLQINSIVAVHGRQRSLPKGIQTIIDQGPSTPNKEATLKLLKESPSTSMERLSTKLLTDVGRKLTYSTQAEDITKSQILDAPQETNADKEVPADKDKEIEPNLRSPPKRHKQEPLIIKDSTEPEHRQE

SEQ ID NO: 178039 - protein, 78 aa, Zea Mays
MLLVWYIWNQTFPKAKNDGFKVTNVNASNIKCVLYLMEEGMMEDKLNILAPIATSRRSNVGCANLYHSVLFLEKSFTN

SEQ ID NO: 178040 - protein, 187 aa, Zea Mays
MSEWDGVGTRCWGQCDVGRRCRSREGVGKPLPGGKDELGGTRSPLQGPGGQGDIVLNGGAACHWYFNPTIEEAQPYYNRISTQEMVLQLPLLTNDDIVPFDVPKRQHKTIKELLEFDPYTIPKEGCECTVTIVRISEKNKWWYPPCTKCPKKPAMNRKTMQCRECGSIDYCFSYCLPQIYICCHLRQ

SEQ ID NO: 178041 - protein, 354 aa, Zea Mays
MSEWDGVGTRCWGQCDVGRRCRSREGVGKPLPGGKDELGGTRSPLQGPGGQGDIVLNGGAACHWYFNPTIEEAQPYYNRISTQEMVLQLPLLTNDDIVPFDVPKRQHKTIKELLEFDPYTIPKEGCECTVTIVRISEKNKWWYPPCTKCPKKPAMNRKTMQCRECGSIDYCFRLSFIASDGTAEANMFCFENVATKIVGKSSASLLASAADPEITPPDIAAIVSLKFTFVVTYDNESYGGHSKIFLIRSILATYGRDSLLPQIQGNVDITYPNTPMQLTAKEHKSPSTAMSNLTTNSPPHAKCVLTYLSSQTSALEKDDFSKQKAPQMPEKTLEDSNPTKATFESPQKGLLYQL

SEQ ID NO: 178042 - protein, 687 aa, Zea Mays
MDLQLAPPPHANLRLLPRRPKAASASASTSAVTAAPSTSCSSSAEPLKPRPRLPRQSPAPRPRPNPARLPALCAAIERHAAAGRHAEALDLFRLARAAAPFTPLPARTYHALLRAAAALREPGAAAAVAWHVESSGFELDLYTHNHVLRMYLECGMLAEARQAFDGMPDRNGVTWGIMMGGLVDRGRPRAALALFREMWAEAGGDAPPRSLVVAVRAAASSGSARAGRQLHCCVVKAGACGDVADRYLTCALLDMYSKCGRIDEARRVFDGLPRPHRTTVVAWNSMLAAYVLHGHSEEALELYQKMCSTHVAMDQFTFSTMLGVFSRLGLLEHAKQAHAGLIQRGLPLDIVGNTALVDLYCKWGRMEDARNVFERMPRRNLISWNALIAGYGYHGMGDKAIEMFERLIAEGAVPNHVTFLAVLNACRFSGLVDEGKRIFQLMTENLRIKPRAMHYACVIELFGREGLLDESYSMIRRAPFTPTANMWGALLTASRIHKSMHLAKFSAEQLLAMEPEKINSYVVLLNLYVSSGRQDSACKVVETLKRKGLYIGNACSWITVKKTDHRFFFKDTLHPQSAEIYRRLDTLMKEVREAGFVAEENELLPDIHPDEQKISRAYHSERLAIAFGLISTAPQTPLRISQSHRLCSDCHNLIKFVSRVTKREIIVRDGSRFHHFKLGVCSCGDYC

SEQ ID NO: 178043 - protein, 509 aa, Zea Mays
MATPSHGIPLRALLLLALSLLSIPIVFQLLHRPTPSPMPPPLLRITCADAASQSPRANPPPLASDVHVPPPAPKPEEASEPTSLRHVVFGIASSRRTLPLRLPLLRLWLRAPARAFLFLDAPAPDARDLPPGLALRVSADASRFPYTHRRGLPSAVRVARIAGELVSALNQQEEEDVRWLVLADDDTAFVLPNLLHTLRRYDHGEPWYLGARSESAAQNALHGFAMAYGGAGIAVSWPLARRLAPALDSCVLRYPHLYGSDGRIYACLAELGVELTHEPGFHQIDLHGDISGLLRSHPLSPLVSLHHLDHVHPLYPGTDRAGSAQRLFRAADADPARVLQQTVCYDRARSLTASVSWGYAVQVLSGNVPLPDLLAAQRTFAPWRRSGGRGRGRNATDVLYMFDTRRYPGDECRRGALFFLESVAVAPAGEEGGTATVTTYGRLAPRKCPPGLVPLKSLRLVKVTSEPLQLAPGKALRRHCCDIAPSSSDASMDINIRRCKDDELIAMHS

SEQ ID NO: 178044 - protein, 429 aa, Zea Mays
MPPSKARRKRSLRDITATVATGTVANSKPGSSSTNEGKQQDKKKEGPQEPDIPPLPPVVVNIVPRQGLGCEVVEGLLVPSRKREYKPNSKYTVGNHPIYAIGFNFIDMRYYDVFAIASCNSVIIYRCLENGGFGLLQNYVDEDKDESFYTLSWTIDQVDSSPLLVAAGSNRIIRVINCATEKLDKSLVGHGGSIHEIRTHASKPSLIISASKDESIRLWNVHTGICILVFAGAGGHRHDVLSVDFHPTEVGIFASCGMDNTVKIWSMKEFWIYVEKSYSWTGHPSKFPTRNIQFPVLTAAVHSDYVDCTRWLGDFILSKSVKNAVLLWEPKPDKRRPGEGSVDVLQKYPVPKCSLWFMKFSCDFYSNQMAIGNNKGEIYVWEVQSSPPVLIDRLCNQECKSPIRQTAVSFDGRLQGMPHQIFGDVEGRK

SEQ ID NO: 178045 - protein, 224 aa, Zea Mays
MPPSKARRKRSLRDITATVATGTVANSKPGSSSTNEGKQQDKKKEGPQEPDIPPLPPVVVNIVPRQGLGCEVVEGLLVPSRKREYKPNSKYTVGNHPIYAIGFNFIDMRYYDVFAIASCNSVIIYRCLENGGFGLLQNYVDEDKDESFYTLSWTIDQVDSSPLLVAAGSNRIIRVINCATEKLDKSLVGHGGSIHEIRTHASKPSLIISASKSLQGLEAIDMMC

SEQ ID NO: 178046 - protein, 430 aa, Zea Mays
MPPSKARRKRSLRDITATVATGTVANSKPGSSSTNEGKQQDKKKEGPQEPDIPPLPPVVVNIVPRQGLGCEVVEGLLVPSRKREYKPNSKYTVGNHPIYAIGFNFIDMRYYDVFAIASCNSVIIYRCLENGGFGLLQNYVDEDKDESFYTLSWTIDQVDSSPLLVAAGSNRIIRVINCATEKLDKSLVGHGGSIHEIRTHASKPSLIISASKDFHPTEVGIFASCGMDNTVKIWSMKEFWIYVEKSYSWTGHPSKFPTRNIQFPVLTAAVHSDYVDCTRWLGDFILSKSVKNAVLLWEPKPDKRRPGEGSVDVLQKYPVPKCSLWFMKFSCDFYSNQMAIGNNKGEIYVWEVQSSPPVLIDRLCNQECKSPIRQTAVSFDGSTILGAADDGAIWRWDEVDPAASSSKPDQAAAPAAGVGAGAGADADADA

SEQ ID NO: 178047 - protein, 259 aa, Zea Mays
MGAQDMERQALNVFRMKLLGAEVRAVHSGTATLKDATSEAIRDWVTNVETTHYILGSVAGPHPYPMMVREFHKVIGKETRRQAMHKWGGKPDVLVACVGGGSNAMGLFHEFVEDQDVRLIGVEAAGHGVDTDKHAATLTKGQVGVLHGSMSYLLQDDDGQVIEPHSISAGLDYPGVGPEHSFLKDIGRAEYDSVTDQEALDAFKRVSRLEGIIPALETSHALAYLEKLCPTLPDGVRVVLNCSGRGDKDVHTASKYLDV

SEQ ID NO: 178048 - protein, 153 aa, Zea Mays
MKCDDDTFVRVDVVLRRIKLNNGDKPLYMGNLNLLHRPLRTGKWAVTDEEWPEDIYPPYANGPGYVISGDIAKFIVSQHANQSLRLFKMEDVSMGLWVEKFNSTNPVQYSHSWKFCQYGCLENYYTAHYQSPRQMLCLWDKLVRGQASCCNYR

SEQ ID NO: 178049 - protein, 305 aa, Zea Mays
MPMAAAAGAGEPGPRSEASGFGSGCNHLRPRRGPPPPSPSPAVGKPLPSGAVPRHAFVFDGEGGFSEAPWGLAVSGSSRTGEFTWHHVELPRSAGAAAAKPLHHAQALIELLCPPLTLQEILAFVATGPHCASSGDGALLLRVSAPGPVGSAYALRLAARVTESSVVTVSVGGVPRLAFGTRQASLLSEVPLGVAASLSDEGHGGGRAVDGGVIIDERLLESLLAMNHADGAHTDNPVPRTVSNLLVHVLGTHVDHVHDIVTRLEMDLDAVELQLDKGGHFLRKLLLDGRRFPKMHLDLQRLLQV

SEQ ID NO: 178050 - protein, 164 aa, Zea Mays
MPKEMAHSHLGMASDGRYIYAVSGQYGPQCRASINRNFVFDTETREWHGLPPLPLPRYAPATQLWRGRLHVMGGGKEDRHEPGLEHWSLAVKDGKALENEWRAEVPIPRGGPHRACIVANDKLFVIGGQEGDFMAKPGSPIFKCVRRHENFTLAGCVWRCVYAR

SEQ ID NO: 178051 - protein, 154 aa, Zea Mays
MPSLKTVDGPSAKDWRGGRAASFNIIPSSTGAAKAVGKVLPDLNGKLTGMSFRVPTVDVSVVDLTVRIEKGASYEDIKKAIKAASEGPLKGIMGYAEEDLVSTDFLGDSRSSIFDAKAGIALNDHFVKLVSWYDNEWGYSNRVVDLIRHMFKTQ

SEQ ID NO: 178052 - protein, 102 aa, Zea Mays
MLYCASPTRLLACQAYGFYHDTLCSQHDADLLGIYLSVTLVNQFLSPQMNVTDVKSPTIPVASSMPTCFSVLMEPRGFDRQRALGVRHFAERLQLVQHARCT

SEQ ID NO: 178053 - protein, 137 aa, Zea Mays
MSAATSAAAAVSSSRPYPLLQPASRPALVSFPRRQLPSTSVALSASSQLSSRGSPLAPAANPKYHNAKVDAGDEDADGEELLRRFRWQVSRAGVMEEIRRRRRHEDARDKRKRKARSASLRYRRRCVPHCSMDRSPD

SEQ ID NO: 178054 - protein, 232 aa, Zea Mays
MGVHLALLGIKYCLCQFGLHAFGVAVAELQFCHPEVVPTSKNFWKPLCASLQNLLRCSVDIRINLSPISGNGAGSKDSSVSLVMESREEDREAQDPATSNCRTVVSSGRDCPSPPLGQAKERSSHILGCLHGGAGGDAVDTEPRILSYQKISVVPAASTPGNTPLKAAAAAAGDESKVDDGGVRPGCCSHILPCGACAPRQKPRTREKRRAKLFSCCFCKIGPDCKAKGEAG

SEQ ID NO: 178055 - protein, 477 aa, Zea Mays
MIDGRRHSVDIPVSRALLAIMRSRSLRDPDTNSLAKFSAKKTIWEGSSLDEDEMEGANNKNAYGRHSFSYNAYDHLQRRREEFGDGLRSGRLADSPINIIKANAMAKAALHNQSCCSAISGMSRSTKDRAFGLVGDGEEIGRREASTFQESSRSLLQKYRPRSFSELVGHGVIAQSLSGAVLKGKLAPIYLFHGPHGVGKTSTARTFAAALNCRSPGENQPCGRCDECMPIFSGSSSSVVEIDASKLDCKSRVAALLRNACEVLASSHFKVLIVDDCQHMDKEGWYSIYNSLEGIPESTIFVMITSDIEKLPSNSIGWCQSYRFCKIDDAEIARRLIKICTKEGMEFEAEALDLLARKANGSIRDAIQMLDQLTLLGKRISKSVTHELIGDVSDDELLDLLNLAMSSDAATIVRRARELLSSKVDPLQLLAQLANHIMDILAGKHPSDSSEVRRVTGKHTCMLSSFLILKIMHLHFK

SEQ ID NO: 178056 - protein, 134 aa, Zea Mays
MSPKLLFPFSTTSYCTLFSCKCAQGQLMGHGKTRITPKYKWVVRFGLDATCDLASLTRMSYARVSLSLLCYMIYGHHKLYQQQWMMMRSFHLLPCLFVSLLMGRVGMGPPDKNKKKWRVCFSSPVQPVELTNGD

SEQ ID NO: 178057 - protein, 174 aa, Zea Mays
MRNHAQIYAELSTSYSNGSKTDLETFIQSNSAAFQSDNNLGLVKQVLSSMYKRNIQRLTQTYLTLSLEDIARSVQLETPRDAEMHVLRMIEDGEIHASINQKDGMVSFHEDPEQYKSVEMVEHIDTSIHRLTALSKKLASIDQNMSCDTAYLMTGRDRGRFDYDDFDSVPHKYF

SEQ ID NO: 178058 - protein, 79 aa, Zea Mays
MDKNNFGLSKLTFFLYSHMYIKTVCMISRSSKRQMLIIGHTWMIYLQAKNVQKRNSALDQYKELSGGTCHHNFPRQEMQ

SEQ ID NO: 178059 - protein, 63 aa, Zea Mays
MNYSFWVYPNTTGKLGTNADLVYILKKGTPDSCTRPAAVHAVAVLQSRTHAADSVHGLPAPWW

SEQ ID NO: 178060 - protein, 167 aa, Zea Mays
MFSAVRSFSNGHQTTIMSFSKSEEQCRRLSSLTSAPHHRHSHLAQLCPWPNASPLSPHRRTTTAPPLPALLLASPAAMPSPRRRHCSPRPRCSAAPASPVVPAQATTVTAPLPLDLPAATLSPRRSRCSIISCPPAHATPPPPPPPPCDRAEPMFQSSRCGALYVCT

SEQ ID NO: 178061 - protein, 120 aa, Zea Mays
MGCFGCFAPEADEDLRPSKHDDSSGADARRKVAPDVASGYAHSFTFKDLLVATGYFNEANFIGEGGFGKVYKGKINGQLARDARDGVLGRGAHADGAQPSQPCQLGRVLRVDERLLPAGL

SEQ ID NO: 178062 - protein, 52 aa, Zea Mays
MGCFGCFAPEADEDLRPSKHDDSSGSFSVFRPWHVSWLGLLCLILAGKGNRG

SEQ ID NO: 178063 - protein, 159 aa, Zea Mays
MRGDHPLFLKRPPSRCWGTPRPRAHGRAPLATRDTSLSPCGLTVIWAWLAALLAGDPRLACKRRTDESSVGPSPPCHKIKIFMRLLKGIVNHLRKDNLDDKDEYNENRRSDGKWGDSRSRLNGSYSDHQSNNGTYLLTREKLRVFPQSVLESLIGYVAI

SEQ ID NO: 178064 - protein, 224 aa, Zea Mays
MYCEASSRCSTPPLSDKRCRPPFPHPSISSKRCRQGVVLGQEPYAPCTFLPWHARDPSPSHPREPMRGDHPLFLKRPPSRCWGTPRPRAHGRAPLATRDTSLSPCGLTVIWAWLAALLAGDPRLACKRRTDESSVGPSPPCHKIKIFMRLLKGIVNHLRKDNLDDKDEYNENRRSDGKWGDSRSRLNGSYSDHQSNNGTYLLTREKLRVFPQSVLESLIGYVAI

SEQ ID NO: 178065 - protein, 137 aa, Zea Mays
MYCEASSRCSTPPLSDKRCRPPFPHPSISSKRCRQGVVLGQEPYAPCTFLPWHARDPSPSHPREPMRGDHPLFLKRPPSRCWGTPRPRAHGRAPLATRDTSLSPCGLTVIWAWLAALLAGDPRLACKRRTDESSKSL

SEQ ID NO: 178066 - protein, 177 aa, Zea Mays
MKVECAQESGYLIVSSGKYSWRPYCLLVYSLVCGFEYGGSWTCIGSPHGSLAVDNADFIFFHNCYYLSTKAALPFSGIRFSFMQEMTLSDQLKRLSYHRLIDPGCIHGVPSWFKQLNSHKVSKKNMVFLSLHPGMLPVRLSKFSLLQYYYILDYKTFHFFKIHSICYAHRYTIRLHI

SEQ ID NO: 178067 - protein, 72 aa, Zea Mays
MSVLSIASLSISTCAAIPQICSYYPKDNGQKHSFLTLTVRCHHVDLFCNCSSTFFIWVPCCYQMDDNQKKNL

SEQ ID NO: 178068 - protein, 95 aa, Zea Mays
MPIGFRISIGYPSDMTKNHFQQLNNINNQTSSQFNIIHNLKFNKNLNKYTCPSTSNILNMTKIHVYMSQHENKYVTTNTCLLLTLSLLPCDSDPI

SEQ ID NO: 178069 - protein, 399 aa, Zea Mays
MYRHFQGIQTSLADMVHKVTALRVKVPLLSGDHVLRIMAMDTHLEVCLHLKTTTHPTAATRRSRDHQEVAWAGTRGRALHPILRTRVVLLITTSRDLSHMIASHRATLLGQGITTVMVNHRVLTMANLNTRNMRLSRTTAMGMVILDTMLPLRTSSTMVSRQWARSKAILNSQIPMLGLHTVDLVNGLPGVLRLQMALTRRQLHLMGRLLSTLLLMGKRTVQQLDLMDMLNRVTHSRVGRHQLHMVRVHQQLQAILSSKVAMHSTHRPNQHMVSKQLKPMRAMGTRELQQILTMEVPTHSQDMVLLVRLLVRLVMPPQQPASLRMARQDTPSRLQILQVMSSLRHQQQPRAAMLRPQQIHSSLLQQKGSRHSLVVVLLHMVLVGSGQHDPPRTSNMARW

SEQ ID NO: 178070 - protein, 344 aa, Zea Mays
MLFLFNCIVNSLFPIDGFLLQLALCFSAVSVIYFSFWFLTWFLVQTFSRHTNQSGGYGPQGYRPQGQGAASQWGPRSQNHGYGYPPRGMPPPQNYNTPYGSYPPQQGPPRGGMGWDQRQGPPPHPSYQGGASDYYKQGSQPYDSQPPSYPPGPGNYNSYGQSQGPNYGQPQYPQHAPQQNYSHGYGDPRYNAPPPNQQYYGQPPMGPQQGYPQQQGGYAQYPQTQPAYGEQAAQTNASYGYQGAPADPNYGSAYPQPGYGPPGQATGQAGYASSAASQPAYGQAGYTQPPTNPPGYEQSAAPATTQSGYAAPPANPQQPAAAKGVSPQPGGGAAAYGAGGQWTA

SEQ ID NO: 178071 - protein, 385 aa, Zea Mays
MVHKVTALRVKVPLLSGDHVLRIMAMDTHLEVCLHLKTTTHPTAATRRSRDHQEVAWAGTRGRALHPILRTRVVLLITTSRDLSHMIASHRATLLGQGITTVMVNHRVLTMANLNTRNMRLSRTTAMGMVILDTMLPLRTSSTMVSRQWARSKAILNSQIPMLGLHTVDLVNGLPGVLRLQMALTRRQLHLMGRLLSTLLLMGKRTVQQLDLMDMLNRVTHSRVGRHQLHMVRVHQQLQAILSSKVAMHSTHRPNQHMVSKQLKPMRAMGTRELQQILTMEVPTHSQDMVLLVRLLVRLVMPPQQPASLRMARQDTPSRLQILQVMSSLRHQQQPRAAMLRPQQIHSSLLQQKGSRHSLVVVLLHMVLVGSGQHDPPRTSNMARW

SEQ ID NO: 178072 - protein, 405 aa, Zea Mays
MALEDCNKCFIAMTRLLQHHTFSRHTNQSGGYGPQGYRPQGQGAASQWGPRSQNHGYGYPPRGMPPPQNYNTPYGSYPPQQGPPRGGMGWDQRQGPPPHPSYQGGASDYYKQGSQPYDSQPPSYPPGPGNYNSYGQSQGPNYGQPQYPQHAPQQNYSHGYGDPRYNAPPPNQQYYGQPPMGPQQGYPQQPDPYARPPYSGPGQWPPRGAPAADGSYQAPAASYGPPSQHPSAYGQTYSAATGSDGYAQQGYPQQGGQAPAPYGQSAPAAPGYPQQQGGYAQYPQTQPAYGEQAAQTNASYGYQGAPADPNYGSAYPQPGYGPPGQATGQAGYASSAASQPAYGQAGYTQPPTNPPGYEQSAAPATTQSGYAAPPANPQQPAAAKGVSPQPGGGAAAYGAGGQWTA

SEQ ID NO: 178073 - protein, 91 aa, Zea Mays
MPWGGSPVGTRSICGTIGRQGQSWRAGFLIGACVSPSFAAHRGWRSPRHDQREFSSHLKITLVTGISSGRQVVPLITFVYPIMFFIITIHA

SEQ ID NO: 178074 - protein, 815 aa, Zea Mays
MDNLSPATLLNSISCLGALTSDVSTARPKPIHKYCKNVYDISSIVTPLLEDLCKSPEEQLDEVLRDLDTAVNEASGLIGNWHQTTSKMYFGWRIESVISDIQGCSLQLCQLVNSLLPSLTARACMCIEEVAMELAATSAVSSVNLLKLSSLLSLSTNMELYTEAVSLENLKTRALRCESREELDLAEQMIPLVNYMHDHLLKEKQQLSINGVPIPADFCCPLSLELMSDPVIVASGQTYERVYIKLWLDEGFTICPKTLQRLGHSNLIPNYTVKALIANWCESHDIRLPDPMKSLKLNFPSAASFLEDLSAADGSPLHPIVVSRANIPGSPEVDVYLRNLNGASPPHSLVNQNSHAHANRHGHEVSTSQTSEKTNGSVPDVSRLSLASSEARESSLEGRRGGSIGQISEHSTEEAFQSSNLDRDLQDNLANSSLNGSLPNSGQLDGECDNGVTRVPSDRTNYSSDASGEVTNGGGAPVASSVPQREHLIPPRLGMGTKQFIRRQPSDRGFPRIISSSTMDARSDLSAIENQVRKLIDDLKSDSIDVQRSAASDLRLLSKHNMENRIAIANCGAVNLLVGRLHSPDAKTQEHAVTALLNLSINDNNKIAIANADAVDPLIHVLETGNPEAKENSAATLFSLSVIEENKVKIGRSGAIKPLVDLLGNGTPRGKRDAATALFNLSILHENKARIVQADAVNHLVELMDPAAGMVDKAVAVLANLATIPEGRNAIGQARGIPALVEVVELGSARGKENAAAALLQLCTNSNRFCSIVLQEGAVPPLVALSQSGTPRAREKAQALLSYFRSQRHGNSARR

SEQ ID NO: 178075 - protein, 827 aa, Zea Mays
MDNLSPATLLNSISCLGALTSDVSTARPKPIHKYCKNVYDISSIVTPLLEDLCKSPEEQLDEVLRDLDTAVNEASGLIGNWHQTTSKMYFGWRIESVISDIQGCSLQLCQLVNSLLPSLTARACMCIEDINHEHVFDLVKEVAMELAATSAVSSVNLLKLSSLLSLSTNMELYTEAVSLENLKTRALRCESREELDLAEQMIPLVNYMHDHLLKEKQQLSINGVPIPADFCCPLSLELMSDPVIVASGQTYERVYIKLWLDEGFTICPKTLQRLGHSNLIPNYTVKALIANWCESHDIRLPDPMKSLKLNFPSAASFLEDLSAADGSPLHPIVVSRANIPGSPEVDVYLRNLNGASPPHSLVNQNSHAHANRHGHEVSTSQTSEKTNGSVPDVSRLSLASSEARESSLEGRRGGSIGQISEHSTEEAFQSSNLDRDLQDNLANSSLNGSLPNSGQLDGECDNGVTRVPSDRTNYSSDASGEVTNGGGAPVASSVPQREHLIPPRLGMGTKQFIRRQPSDRGFPRIISSSTMDARSDLSAIENQVRKLIDDLKSDSIDVQRSAASDLRLLSKHNMENRIAIANCGAVNLLVGRLHSPDAKTQEHAVTALLNLSINDNNKIAIANADAVDPLIHVLETGNPEAKENSAATLFSLSVIEENKVKIGRSGAIKPLVDLLGNGTPRGKRDAATALFNLSILHENKARIVQADAVNHLVELMDPAAGMVDKAVAVLANLATIPEGRNAIGQARGIPALVEVVELGSARGKENAAAALLQLCTNSNRFCSIVLQEGAVPPLVALSQSGTPRAREKAQALLSYFRSQRHGNSARR

SEQ ID NO: 178076 - protein, 706 aa, Zea Mays
MCIEKLQDINHEHVFDLVKEVAMELAATSAVSSVNLLKLSSLLSLSTNMELYTEAVSLENLKTRALRCESREELDLAEQMIPLVNYMHDHLLKEKQQLSINGVPIPADFCCPLSLELMSDPVIVASGQTYERVYIKLWLDEGFTICPKTLQRLGHSNLIPNYTVKALIANWCESHDIRLPDPMKSLKLNFPSAASFLEDLSAADGSPLHPIVVSRANIPGSPEVDVYLRNLNGASPPHSLVNQNSHAHANRHGHEVSTSQTSEKTNGSVPDVSRLSLASSEARESSLEGRRGGSIGQISEHSTEEAFQSSNLDRDLQDNLANSSLNGSLPNSGQLDGECDNGVTRVPSDRTNYSSDASGEVTNGGGAPVASSVPQREHLIPPRLGMGTKQFIRRQPSDRGFPRIISSSTMDARSDLSAIENQVRKLIDDLKSDSIDVQRSAASDLRLLSKHNMENRIAIANCGAVNLLVGRLHSPDAKTQEHAVTALLNLSINDNNKIAIANADAVDPLIHVLETGNPEAKENSAATLFSLSVIEENKVKIGRSGAIKPLVDLLGNGTPRGKRDAATALFNLSILHENKARIVQADAVNHLVELMDPAAGMVDKAVAVLANLATIPEGRNAIGQARGIPALVEVVELGSARGKENAAAALLQLCTNSNRFCSIVLQEGAVPPLVALSQSGTPRAREKAQALLSYFRSQRHGNSARR

SEQ ID NO: 178077 - protein, 524 aa, Zea Mays
MKSLKLNFPSAASFLEDLSAADGSPLHPIVVSRANIPGSPEVDVYLRNLNGASPPHSLVNQNSHAHANRHGHEVSTSQTSEKTNGSVPDVSRLSLASSEARESSLEGRRGGSIGQISEHSTEEAFQSSNLDRDLQDNLANSSLNGSLPNSGQLDGECDNGVTRVPSDRTNYSSDASGEVTNGGGAPVASSVPQREHLIPPRLGMGTKQFIRRQPSDRGFPRIISSSTMDARSDLSAIENQVRKLIDDLKSDSIDVQRSAASDLRLLSKHNMENRIAIANCGAVNLLVGRLHSPDAKTQEHAVTALLNLSINDNNKIAIANADAVDPLIHVLETGNPEAKENSAATLFSLSVIEENKVKIGRSGAIKPLVDLLGNGTPRGKRDAATALFNLSILHENKARIVQADAVNHLVELMDPAAGMVDKAVAVLANLATIPEGRNAIGQARGIPALVEVVELGSARGKENAAAALLQLCTNSNRFCSIVLQEGAVPPLVALSQSGTPRAREKAQALLSYFRSQRHGNSARR

SEQ ID NO: 178078 - protein, 259 aa, Zea Mays
MQMRHMPSVGSRVEKWNPAISSKGALDLAWFRITGIPSERDLLLIGRFPNHAGNQWIGNEEDKANKNAVSVKGKQVRIKGHSTKMGIWKMKVRIKRQKMLYAVSRLNSSGIFQFETGNHKLFSKGLDDIVEEREQEVTTGRAISLSPQKGCQEAPVVELSGQEESVKVIQVTTSAAKGVENQQVFKCFIMIAETAKEKWAKVCGDIPSRKVDLQYKFNLEWNKANENQKISQVGMESQEAGIQVEQESNAETVDGLKDH

SEQ ID NO: 178079 - protein, 63 aa, Zea Mays
MMEVSHTLNCVAPSPIDHGRWLNGNGKFWQSPQPHRGHYTAKEAKRGRNGLDVYYCLPCPFCG

SEQ ID NO: 178080 - protein, 382 aa, Zea Mays
MKRKHGRKPADKKADPSESTSPESASSSSTEASDSPRNQAEEDNPPLVDAGAAVPEPPSPPPAQPSEPPRKPSATAPANPPADITYSRPKVGAVYGRVKLKFKSSKTVDSPLRPQQQDSLEAQVLPADAGASESAAVPEVVKGADAEKATVVMDGQQAEGQGLESSDADKEKVSRKVGGIKIKLAGLPSVESNTPDRKSDSTDERPPSKREALLGSKKMEDAVELRSSQESEEKQSTPEHQRNEKELAAALEAIKKVMKMDAADPFNVPVDPVALEIPDYFDVIETPMDFGTICQNLERGDKYMNSEDVYKDVQFIWDNCTKYNSKGDYIIELMKRVKKGFMKYWLAAGLYSDVLDSGTIAIKVTAYVLFVKLQGVRKKGMK

SEQ ID NO: 178081 - protein, 317 aa, Zea Mays
MDFGTICQNLERGDKYMNSEDVYKDVQFIWDNCTKYNSKGDYIIELMKRVKKGFMKYWLAAGLYSDVLDSGGNDNPGDEDAKGHSKSKVKNKRRRPGNDRHKSDCICAVCQVTRRKKERDEIVAVIDNETAAMDSNPSEQHDMEGNSGANNIGNHDTCSSQEQPSQTYVYKEASEANDSEIQMEDVGKLSVDQTSSLVLLDYEDEGSRQYLVEKGQTEYRDMNSNEEHTPTGIQPNEYSDVEHHQQKGQTETTSQEIEMEDYPIQQENPLFLQLRASLFPSNWSSTFRGRHSLFRPRRRAPVKASPLHVAMAAIMKR

SEQ ID NO: 178082 - protein, 159 aa, Zea Mays
MAGAPDGRTSTSPWPVAPALATAIKPHRVTLSTCSTEYRSKLRPGSAQPQHAADQRHRGHYSSLPSCALPHRTRRGRRRPHTATSSIRATMTHVVVLLFGQPRSRCHRTLPSVDVGPRASRARQKSQTCGQHTRDPSLILPGTIIDHVMWRTKDGLISR

SEQ ID NO: 178083 - protein, 106 aa, Zea Mays
MCIMYFVFLKNKEIQLYLFHRSPYSLFLVHAIFSSRKWSSPRVFESLVQPREASCFFTPFLHAELSISWTQPPPHSTRSSPRRPWLLVAVGRELSSAGDSLYGWRP

SEQ ID NO: 178084 - protein, 63 aa, Zea Mays
MAGAPDGRTSTSPWPVAPALDYPQARSRYSSNSHKTPSCHALDVFDGISQQAPPRICTAPTRR

SEQ ID NO: 178085 - protein, 201 aa, Zea Mays
MILVNKFVLSSYGFSAPVFLMLYQNIVSVTIVSTLSLSGAVPTEPLTWNLIKVWLPVNIIFVGMLITSMFSLKYINVAMLTILKNVANVLTASGETYFFKKQHGTQVWVALMLMIISAVAGGITDLSFHAVGYIWQTLNCVLTAAYSLTLRHVMDSAKQVTKSGNLNELSMVLLNNVLSLPLGIILVLGLNEMEYLLQNHS

SEQ ID NO: 178086 - protein, 295 aa, Zea Mays
MGSRVLHLDVPANSEAYLMRNVPGSVSSPPMNGEKGLFRNQNAGFTALASPVRREIGNRSSTRSFCVDDNDLEDGKASKERESSAQSLRLPKIQNQALLSGLAYCISSCSMILVNKFVLSSYGFSAPVFLMLYQNIVSVTIVSTLSLSGAVPTEPLTWNLIKVWLPVNIIFVGMLITSMFSLKYINVAMLTILKNVANVLTASGETYFFKKQHGTQVWVALMLMIISAVAGGITDLSFHAVGYIWQTLNCVLTAAYSITLKDARVLAGHHCQWSFGAWNQLYIDVVSPSDECNNI

SEQ ID NO: 178087 - protein, 345 aa, Zea Mays
MGSRSSTRSFCVDDNDLEDGKASKERESSAQSLRLPKIQNQALLSGLAYCISSCSMILVNKFVLSSYGFSAPVFLMLYQNIVSVTIVSTLSLSGAVPTEPLTWNLIKVWLPVNIIFVGMLITSMFSLKYINVAMLTILKNVANVLTASGETYFFKKQHGTQVWVALMLMIISAVAGGITDLSFHAVGYIWQTLNCVLTAAYSLTLRHVMDSAKQVTKSGNLNELSMVLLNNVLSLPLGIILVLGLNEMEYLLQTSLLRMPEFWLVITASGVLGLGISFTSMWFLHQTSATTYSLVGSLNKIPLSIAGIVLFNVRTSVQNSLSILFGLLAGVFFARAKLRDNSPTL

SEQ ID NO: 178088 - protein, 258 aa, Zea Mays
MGSRVLHLDVPANSEAYLMRNVPGSVSSPPMNGEKGLFRNQNAGFTALASPVRREIGNRSSTRSFCVDDNDLEDGKASKERESSAQSLRLPKIQNQALLSGLAYCISSCSMILVNKFVLSSYGFSAPVFLMLYQNIVSVTIVSTLSLSGAVPTEPLTWNLIKVWLPVNIIFVGMLITSMFSLKYINVAMLTILKNVANVLTASGETYFFKKQHGTQVWVALMLMIISAVAGGITDLSFHAVGYIWQTLNCVLTAAYSC

SEQ ID NO: 178089 - protein, 91 aa, Zea Mays
MRLLRHILYLRCSVYQHTAGLRLLSALGDRYKIWSIVTQLASSVRLHLRLFCLISHKIIKQAVPHFDVFEDLDHRYSREVWYLQIRHCNGS

SEQ ID NO: 178090 - protein, 99 aa, Zea Mays
MPIKVIDKSFGFHAAVEEAQRALNAAHVEAESVDNGIGVVKLMGHNCCFTASHPSTSKGRDDSSSSFRDDVRTRVMWFIVLAEGADQDLIVRSMNFMDT

SEQ ID NO: 178091 - protein, 232 aa, Zea Mays
MFRFQGQPLYKLRPSKFRAAIEEAFLAERGFFYLQTDEEEAASNNEQECQSESQVVGKGKDHSLLNPSIVPAMPVSRILIVVAGLWILSVHGSCCNFLTLSYIVLSSYGFLHAVFVVLYTVLVLYEHLLLSRNCRPPPHLEDRRAVRRGGPSQATTTTSVVASKTSRHRCDLKPSSMPIKVIDKSFGFHAAVEEAQRALNAAHVEAESVDNGIGVVKLMGHNCCFTAVCFSS

SEQ ID NO: 178092 - protein, 216 aa, Zea Mays
MFRFQGQPLYKLRPSKFRAAIEEAFLAERGFFYLQTDEVVGKGKDHSLLNPSIVPAMPVSRILIVVAGLWILSVHGSCCNFLTLSYIVLSSYGFLHAVFVVLYTVLVLYEHLLLSRNCRPPPHLEDRRAVRRGGPSQATTTTSVVASKTSRHRCDLKPSSMPIKVIDKSFGFHAAVEEAQRALNAAHVEAESVDNGIGVVKLMGHNCCFTAVCFSS

SEQ ID NO: 178093 - protein, 190 aa, Zea Mays
MFRFQGQPLYKLRPSKFRAAIEEAFLAERGFFYLQTDEVVAGLWILSVHGSCCNFLTLSYIVLSSYGFLHAVFVVLYTVLVLYEHLLLSRNCRPPPHLEDRRAVRRGGPSQATTTTSVVASKTSRHRCDLKPSSMPIKVIDKSFGFHAAVEEAQRALNAAHVEAESVDNGIGVVKLMGHNCCFTAVCFSS

SEQ ID NO: 178094 - protein, 116 aa, Zea Mays
MVAELTPFLLCLDRFQGQPLYKLRPSKFRAAIEEAFLAERGFFYLQTDEVCSPRKSVNKQSDPIGFQEEAASNNEQECQSESQVVGKGKDHSLLNPSIVPAMPVSRILIVCSPRNF

SEQ ID NO: 178095 - protein, 146 aa, Zea Mays
MIIPKKNRNEICKGRVVCQEGLQPGEASADRCAQPPGLQVIKLMQSFKSKEYVRETFSWQYYYWYLTNDGIEHLRNYLNLRSEIVPATLKKSAKPPGRPFGSGPPGDRPRYHWLFFRHNMYQLRQERDMKHETFAILSLGRGYNHS

SEQ ID NO: 178096 - protein, 141 aa, Zea Mays
MIIPKKNRNEICKGRVVCQEGLQPGEASADRCAQPPGLQVIKLMQSFKSKEYVRETFSWQYYYWYLTNDGIEHLRNYLNLRSEIVPATLKKSAKPPGRPFGSGPPGDRPRERRDLVWGRRERDEGLKFATWFCASSGVQDP

SEQ ID NO: 178097 - protein, 251 aa, Zea Mays
MIIPKKNRNEICKGRVVCQEGLQPGEASADRCAQPPGLQVIKLMQSFKSKEYVRETFSWQYYYWYLTNDGIEHLRNYLNLRSEIVPATLKKSAKPPGRPFGSGPPGDRPRYHWLFFRHNMYQLRQERDMKHETFAILSLGRFQGQPLYKLRPSKFRAAIEEAFLAERGFFYLQTDEEEAASNNEQECQSESQVVGKGKDHSLLNPSIVPAMPVSRILIVVAGLWILSVHGSCCNFLTLSYIVLVLYEVTLR

SEQ ID NO: 178098 - protein, 71 aa, Zea Mays
MFRFQGQPLYKLRPSKFRAAIEEAFLAERGFFYLQTDEVVAGLWILSVHGSCCNFLTLSYIVLVLYEVTLR

SEQ ID NO: 178099 - protein, 78 aa, Zea Mays
MFRFQGQPLYKLRPSKFRAAIEEAFLAERGFFYLQTDEVVAGLWILSVHGSCCNFLTLSYIVFVVLYTVLVLYEVTLR

SEQ ID NO: 178100 - protein, 166 aa, Zea Mays
MQSFKSKEYVRETFSWQYYYWYLTNDGIEHLRNYLNLRSEIVPATLKKSAKPPGRPFGSGPPGDRPRYHWLFFRHNMYQLRQERDMKHETFAILSLGRFQGQPLYKLRPSKFRAAIEEAFLAERGFFYLQTDEVVAGLWILSVHGSCCNFLTLSYIVLVLYEVTLR

SEQ ID NO: 178101 - protein, 82 aa, Zea Mays
MVAELTPFLLCLDRFQGQPLYKLRPSKFRAAIEEAFLAERGFFYLQTDEVVAGLWILSVHGSCCNFLTLSYIVLVLYEVTLR

SEQ ID NO: 178102 - protein, 97 aa, Zea Mays
MFRFQGQPLYKLRPSKFRAAIEEAFLAERGFFYLQTDEVVGKGKDHSLLNPSIVPAMPVSRILIVVAGLWILSVHGSCCNFLTLSYIVLVLYEVTLR

SEQ ID NO: 178103 - protein, 71 aa, Zea Mays
MSKTSRSTLPTCLTSSWHIESDAAVMIIYFIYVHVVLASYTQTPLHFCIWSTLVICILPSQYTESYMVVLQ

SEQ ID NO: 178104 - protein, 103 aa, Zea Mays
MQSFKSKEYVRETFSWQYYYWYLTNDGIEHLRNYLNLRSEIVPATLKKSAKPPGRPFGSGPPGDRPRYHWLFFRHNMYQLRQERDMKHETFAILSLGRGYNHS

SEQ ID NO: 178105 - protein, 430 aa, Zea Mays
MEQFAKDATEHANSASEHAQELSSKEIEEWQTSLELLETKKLEMEVETRLVLEARSGLEGSIEHLVEEDKLEKDMLSKKGEILTKELAELLELVRLKEAEIAENNARIHEVQERISAVVSRFHGSQSDIDLKLSSLKEDQSKVDLETEALLLKKNEIDKFITLTDQKDSELRDIIGACSSEAKACRQSVEIRRKLASSILKSREDRIGLLKMEEEILQVIQMQRQKITDARSTLQEVSSRRTSIQQETEALKQKLSFIDKRGPELEAEKKVAAASRNFKEAGRIAAEAKALNSEKDELYGKLEKAATDLETIEKDIVATTNKIQECEGLIELKGRESALTSYRRLRLDCAAARAELTAAAETDDNEEAEILRKEAEAAESKAMELKTCYDLQVVDDEFVFQPVVPIAFITNSTGQHLAEIASSLGLSPQK

SEQ ID NO: 178106 - protein, 58 aa, Zea Mays
MPSSNNMAEEETKGHCPTVAHAMTRIGLSGVAQSVQTHAQKTQPHTLGKVSQITSQSP

SEQ ID NO: 178107 - protein, 1001 aa, Zea Mays
MVDKVKVVGAPGKRKNAFCGDSFGRMTAGGGAGAWLPRVSGQPADLEAASVMATESAVRLIGGTGARDWSKGFGAFDSSVGALSGEDLGFVDNDAGVYGGWSKSVPNRSGSAPPSMEGSLAALGHLIGQQSGSFEASLATLDNITDSSKSEEQVLADPAYFEYYGSKVNLNPRLPPPLISRESRRLMNRVGKAKEWRVVSQDNSNKDSIYIPRSTLSTHKEEPEDDKSPRLDLSSVEDAQIISSASNFQSQDFMLESFRQSAASLPNSSSSNPSNINTGDSMPVYSDINLSVDAVKQSDLNSWTPKRPLKSTVSNDVSSLPLSSSSSYSGRKPGMQTSQQEKAAVDTKHGNVVLGSGAAVSELDNVDSSMNNLMISLDGHASSPVKQKWQDNVLWQYGSFLPAQGDPTQGIHLPHVPSIDNLSHAQLKLPAGDMHQFLPQPSMTTPFYTPNSFGNPYYPNLHPGNAFPTSIGTGGYAVSGSILPPFVAGFAPQGPLATPLDSPMTPSFSGRPSGFSPAGNLTGGTEFMQSYKVYGQPGAGMQPSIPDSNFIHFFQHPSLFQYTGGNQYNTMGPRFTVVNPTESFDPQKMIHQAAYPSDQRLPLPRTGFPNSPTSRRGGTVPNYQGISSYVGGPMTYPTSPVFQGQTLPGVLPPDRRNDPVGFQSPSRNITDSPGIQRQRDRQKFDESKTCSFLEELKSNRARRVELSDITGRIIEYSADQHGSRFIQQKLENCTAEEKAYVFAEVLPHASSLMTDVFGNYVIQKALEVMELDQKIDLVHELDGHVMRCVRDQNGNHVIQKCIECVPTEHIGFVVSAFQGQVASLSMHPYGCRVIQRVLEHCGGTSQSQCIVDEILQSACVLAQDQYGNYVTQHVLERGNAHERSQIIIKLAGQVVTMSQNKFASNVIEKCFQHGDMAERDLLIRQIVEQTEGNDNLLAMMKDQYANYVVQKILETCNENQRELLVSRVKGHMQALRKYTYGKHIVSRVEQLCGDGTAEPDS

SEQ ID NO: 178108 - protein, 950 aa, Zea Mays
MATESAVRLIGGTGARDWSKGFGAFDSSVGALSGEDLGFVDNDAGVYGGWSKSVPNRSGSAPPSMEGSLAALGHLIGQQSGSFEASLATLDNITDSSKSEEQVLADPAYFEYYGSKVNLNPRLPPPLISRESRRLMNRVGKAKEWRVVSQDNSNKDSIYIPRSTLSTHKEEPEDDKSPRLDLSSVEDAQIISSASNFQSQDFMLESFRQSAASLPNSSSSNPSNINTGDSMPVYSDINLSVDAVKQSDLNSWTPKRPLKSTVSNDVSSLPLSSSSSYSGRKPGMQTSQQEKAAVDTKHGNVVLGSGAAVSELDNVDSSMNNLMISLDGHASSPVKQKWQDNVLWQYGSFLPAQGDPTQGIHLPHVPSIDNLSHAQLKLPAGDMHQFLPQPSMTTPFYTPNSFGNPYYPNLHPGNAFPTSIGTGGYAVSGSILPPFVAGFAPQGPLATPLDSPMTPSFSGRPSGFSPAGNLTGGTEFMQSYKVYGQPGAGMQPSIPDSNFIHFFQHPSLFQYTGGNQYNTMGPRFTVVNPTESFDPQKMIHQAAYPSDQRLPLPRTGFPNSPTSRRGGTVPNYQGISSYVGGPMTYPTSPVFQGQTLPGVLPPDRRNDPVGFQSPSRNITDSPGIQRQRDRQKFDESKTCSFLEELKSNRARRVELSDITGRIIEYSADQHGSRFIQQKLENCTAEEKAYVFAEVLPHASSLMTDVFGNYVIQKALEVMELDQKIDLVHELDGHVMRCVRDQNGNHVIQKCIECVPTEHIGFVVSAFQGQVASLSMHPYGCRVIQRVLEHCGGTSQSQCIVDEILQSACVLAQDQYGNYVTQHVLERGNAHERSQIIIKLAGQVVTMSQNKFASNVIEKCFQHGDMAERDLLIRQIVEQTEGNDNLLAMMKDQYANYVVQKILETCNENQRELLVSRVKGHMQALRKYTYGKHIVSRVEQLCGDGTAEPDS

SEQ ID NO: 178109 - protein, 348 aa, Zea Mays
MLNPVALLRSVSSRSSSSRFLLAPSSSIDDLFDNETSSCYSEESCSTMSGSHHSTLDRLYTWEKKLYKEVKAGERLRIEYEKRLTHLRNQDVKGEEPSSVDKTCAALRSLHTRLKVSIQTVQSISTRIEILRDEELHHQLMELIQGLSRMWRAMAERHKAQKRTIEDAKLLFLQHHPSAATAISLGPLEAAGPPPAALELESEIQAWRGALEAWLFAQRAYARALAAWARRCLGISTAARPSSHALPPAFLACMEWGRAVDAATEARVMDGLDFFVAGVGSVCSGAAAGMEGMAGRVLCAGMAAVTGALAEFAAASGDSYDAAVAAVVAAARAPERGKEDGVGQVPER

SEQ ID NO: 178110 - protein, 775 aa, Zea Mays
MGCAASRLEDEEAIKMCRDRRDFIKQALEQRNRFASSHIAYIESLKRVSMALQRFVAGDDHHELIFDTFISPVKQQKPETLSLPYGSYEKRTIHVSRYLRSGPNPSVSVEEHPRPVETVRVESHYPMDNHSGMDRFLQSHSSPVVSSSYYPPPYTRPSYPSPSSQEPVMNTSTYYMPYDRPRYAPPSPQEAMRTSYYASYDRPSFPPPSPQEQESSPWDSFWNPFSSLDSFGYPRPRSSYDNVTNDDELARLQRVREEEGIPELEEEDDECQEHVQMHRKEEQEDHDNADDDDEDDEEDDDDECEHSDEYMVSDEGTCSVNFDANMKQETKGFESKGIQCTEAPEPRKTVELELKAHKKELMRNRVANAEETPGFTVYLNRRPASLVEAMKDIDCQFSGICDAAREISVMLEASRAQYSASNDLSAKMLNPVALLRSVSSRSSSSRFLLAPSSSIDDLFDNETSSCYSEESCSTMSGSHHSTLDRLYTWEKKLYKEVKAGERLRIEYEKRLTHLRNQDVKGEEPSSVDKTCAALRSLHTRLKVSIQTVQSISTRIEILRDEELHHQLMELIQGLSRMWRAMAERHKAQKRTIEDAKLLFLQHHPSAATAISLGPLEAAGPPPAALELESEIQAWRGALEAWLFAQRAYARALAAWARRCLGISTAARPSSHALPPAFLACMEWGRAVDAATEARVMDGLDFFVAGVGSVCSGAAAGMEGMAGRVLCAGMAAVTGALAEFAAASGDSYDAAVAAVVAAARAPERGKEDGVGQVPER

SEQ ID NO: 178111 - protein, 322 aa, Zea Mays
MDFFKIKKFRKGNKSARGGGEVIESDDDASAGNVTPRGLVEQKPGIGEGNNAEVAVDGGGAGNGVVEEEEDDDDDFITNEVKRRLKELRKNSFMVLIPEDECAEVEEDGDEEEGGSPTEWLESGVGDGFPLCGLDSLYDKYCESMLVFHKMIAQLMKDPESLNMSKKSPRSASKLASTLRNLSFKRKDELPEDCEQLQQQQSGYDPYQTLETAYVAHIALSWEALHCTYVHLSLIVAAQPDNPTTYNSAAQAFQQFQVLLQRFIENEPFEHGTRVEIYARSRSLLSKLLQVPTFQGQEKGWCPYECSWPHWKLDPTGAVFAR

SEQ ID NO: 178112 - protein, 323 aa, Zea Mays
MDFFKIKKFRKGNKSARGGGEVIESDDDASAGNVTPRGLVEQKPGIGEGNNAEVAVDGGGAGNGVVEEEEDDDDDFITNEVKRRLKELRKNSFMVLIPEDECAEVEEDGDEEEGGSPTEWLESGVGDGFPLCGLDSLYDKYCESMLVFHKMIAQLMKDPESLNMSKKSPRSASKLASTLRNLSFKRKDELPEDCEQLQQQQSGYDPYQTLETAYVAHIALSWEALHCTYVHLSLIVAAQPDNPTTYNSAAQAFQQFQVLLQRFIENEPFEHGTRVEIYARSRSLLSKLLQVPTFQEGQEKGWCPYECSWPHWKLDPTGAVFAR

SEQ ID NO: 178113 - protein, 416 aa, Zea Mays
MDFFKIKKFRKGNKSARGGGEVIESDDDASAGNVTPRGLVEQKPGIGEGNNAEVAVDGGGAGNGVVEEEEDDDDDFITNEVKRRLKELRKNSFMVLIPEDECAEVEEDGDEEEGGSPTEWLESGVGDGFPLCGLDSLYDKYCESMLVFHKMIAQLMKDPESLNMSKKSPRSASKLASTLRNLSFKRKDELPEDCEQLQQQQSGYDPYQTLETAYVAHIALSWEALHCTYVHLSLIVAAQPDNPTTYNSAAQAFQQFQVLLQRFIENEPFEHGTRVEIYARSRSLLSKLLQVPTFQVVDRKDNTDDQMEPAISAHDLIKLLEESILTFRLFLKKDKRKGGVLMSAHGHTGSSIQQVQSSLDKKEAKVKELLKKRKGWKSKTWPGTVEELLWCEEKLSKVGLTENRLRRDGSPILFPC

SEQ ID NO: 178114 - protein, 239 aa, Zea Mays
MNKKKRRRRRQQQGGRPVLVTFYVTQPRDRGGSTASSSSHHHHHNRQERHDDHHRRSHGGSGGRPGMQRRRRNDGKAQSGDRRADLLEYSRQLRALARQTASATTPVSSIPPPPPPRCRDTDTIMAAVGVHSEEQQGAPAVNHRLGRAMSQQQQVRPRCFGGDGWSWKKVLVLVLPSHSESRRPRRSNRDDSEKNVKINQTGRAAASSLLVGKLTVCKGRRDRSGLLKPLMSLFQKRPR

SEQ ID NO: 178115 - protein, 220 aa, Zea Mays
MNKKKRRRRRQQQGGRPVLVTFYVTQPRDRGGSTASSSSHHHHHNRQERHDDHHRRSHGGSGGRPGMQRRRRNDGKAQSGDRRADLLEYSRQLRALARQTASATTPAAVGVHSEEQQGAPAVNHRLGRAMSQQQQVRPRCFGGDGWSWKKVLVLVLPSHSESRRPRRSNRDDSEKNVKINQTGRAAASSLLVGKLTVCKGRRDRSGLLKPLMSLFQKRPR

SEQ ID NO: 178116 - protein, 99 aa, Zea Mays
MLLLISTRFARGRQNRLAPVEPSPLLLRVAATHERVYPSTFCQKRPLAVCRARRVQCRLWNGPLLVLLAHGVMVVGVGHFVCLLDFSLLHRLRKQIRQL

SEQ ID NO: 178117 - protein, 58 aa, Zea Mays
MLLLISTRFARGRQNRLAPVEPSPLLLRVAATHERVYPSTFCQKRPLAVCRARRVQIS

SEQ ID NO: 178118 - protein, 61 aa, Zea Mays
MLLLISTRFARGRQNRLAPVEPSPLLLRVAATHERVYPSTFCQKRPLAVCRARRVQVGMLH

SEQ ID NO: 178119 - protein, 61 aa, Zea Mays
MLLLISTRFARGRQNRLAPVEPSPLLLRVAATHERVYPSTFCQKRPLAVCRARRVQVGMIS

SEQ ID NO: 178120 - protein, 66 aa, Zea Mays
MLLLISTRFARGRQNRLAPVEPSPLLLRVAATHERVYPSTFCQKRPLAVCRARRVQVGMTTIVLLW

SEQ ID NO: 178121 - protein, 842 aa, Zea Mays
MPPKELAELKTQLQDLLNKGFIRPSSSPWGCPAIFVKKKDQTLQLCVDYRPLNEVTIKNKYPLPRIDLLFDQLSGAKVFSKIDLRSGYHQIRIRPEDIPKTAFTTRYGLYEYLVMSFGLTNAPAHFMYLMNSVFMPELDKFVVVFIDDILIHSKTKEEHAEHLRVILTRLREHQLYAKFNKCEFWLDIIPFLGHILSAEGVAVDPSKVKDILEWKPPTTVHQVRSFIGMAGYYRRFIPDFSKIAKPITELLKNHIKFVWSSECNKAFEELKKLLTTAPVLAQPDIEKSFDVYCDASGIGIGCVLMQEGRVIAYASRQLKRHEEHYPTHDLELAAVVHALKIWRHYLLGNTCHIYTDHKSLKYIFTQSELNMRQRRWLELIKDYDLEVHYHPGKANVVADALSRKPQCNCLSVRPLTVNLCQEMERLNLGVIQHGTLTNLVLESTIQSQIIDAQKVNKGIAHIKERVEAGKATCFRIDEDGVLWFQNRLVVPKVPELRQQILDEAHLSRYSIHPGSNKMYQDLKQRFWWTKMKIEIARYVAKCDICQRVKAVHLKSAGPLQPLPIPTWKWEDISMDFIVGLPKTSRGYDSIWVIVDRLTKLAHFLPVNKSNSVLAYAKLYIARILSLHGVPKTIVSDRGPQFIAKFWTELHKSLGTKLIHSSAYHPQTSGQTERVNQILEDMLRACVLAYSVKWDECLPLAEFSYNNSYQESIKMAPFEALYGRRCRTPLNWSEPGEKYFFGPDLVKEAEEKVQVIQRNLRVTQSRQKSYADKRRRSLIFHVGDHVYLRVSPMKGVTRFGVKGKLAPRYVGPFQVLERLDLWLIRCNCHRIFQKCIMCFTYPS

SEQ ID NO: 178122 - protein, 149 aa, Zea Mays
MAAAHGSRHCCVAPCRLLLVVVLLVVTTGDGAVVADAPTAGSPRTDEVVAALQAEQLLEFRSRSGSEEEAPMTTTAAAAGWPVLNTEQQQAIITGVGGGRRKLVGSRAPTTCTYNECRGCRHRCSVQEVPIDASDPINSAYHYRCVCHL

SEQ ID NO: 178123 - protein, 143 aa, Zea Mays
MKDGSSTRKQALLCSAVPSTPRGDGAVVADAPTAGSPRTDEVVAALQAEQLLEFRSRSGSEEEAPMTTTAAAAGWPVLNTEQQQAIITGVGGGRRKLVGSRAPTTCTYNECRGCRHRCSVQEVPIDASDPINSAYHYRCVCHL

SEQ ID NO: 178124 - protein, 84 aa, Zea Mays
MLGDGPGNSEKWGMKRNTGTRVSLSSLAMEPWREWTAAEEDGSGRSQCVPPSRESETPRVKETEEGSMVDTKETEVHQQIGILT

SEQ ID NO: 178125 - protein, 89 aa, Zea Mays
MSTSPCLEDESAAILYPLILLHGFFSSLVNKSGLSSCKEKVCLVNEITNMQINWNLEIVKVFQLLLQAITKENNRTGSKTSISQTTCHI

SEQ ID NO: 178126 - protein, 251 aa, Zea Mays
MLPALRPRRRLPVASLLRRLLSDSTPSSSGTGESDLMAAAAAKARAEAAARARVEAYKQVQNFDWSSGADWKTAANILFTVPPKRKEFGLDFHLVQLFFVCMPSLAVYLVAQYARREIKRMEGEAEEKRKKDEELEKQKQVEEESAKEDADSKLSKVLDRLDTLEGVVKEIVDDKRKLSSPDLPTKEEVAKKNEASPAKASDSRSYGQPVVAANSKDTNYASNAPANTAKPNNKGIGDKAFPDSDITHPIT

SEQ ID NO: 178127 - protein, 65 aa, Zea Mays
MPVELATWEFAQDLQQQFPHAAVWGQPADLAGGMSAKRRKQSSVRQMTKKVWLQQQEMGRVGPKG

SEQ ID NO: 178128 - protein, 511 aa, Zea Mays
MNPDTQLILDELSRRFSEHDSKWDRRVAEQESRWNATFSEFTTGQDRCVGALEQATGVLEDWRMNMEGMMDDLRLEVGKISKNWERAVVDNSSAMAGILAPSPPAVEQQPAGVPANRPHGHRVESSHREDGFGSVTTLLHTPVKGMCSSLPRSPAVHTSEFHQHVGDLSYPTMGGAMRGRLPKLNFPVFDGENPKLWIRRSHDYFDMYEVEPHLWIRVASMHFVGGAARWFSSLDEHSHLSSWPVFCRVLLERFGKDEHELFIRQLFRIRQHGTVTEYVDQFSSLVDKLVSYGRPVDPLYFVQRFVDGLRSDIRAAIILQRPSSLDSACALALLQEEVATSDRRLEHRRPEWASSGKGYGKSSVPPFLTARPDKTGAVIEETKPAEQHRARVLDDKLAALRAYRRAKGLCQRCAEKWSRDHKCPPTVQLHALQELWELYEGDEDTIPEDVVVEDQIIETECLAISIAAVKGLELNHTLKLRGLIQGIEVVMLIDSGSGWQSFEVFLPASWR

SEQ ID NO: 178129 - protein, 817 aa, Zea Mays
MADTRARPWEADESSRSRDSKVPRLDLLAASAAEEEEKVKHLLGQEECTEMTGHDPCCDHVPTDSYHNDILISSLLSDDAGNCQDCRGRRREEADGPGGRPMYRRIMVCLECGRHSCGDSTSYIPYGHAQDHANQEKHWVAAMFDDPQAGFCFKCEHEVPVYPEPDEMEMITGEIQAGGGGGGGGHAFGFDMSRDLATVLLNLGDAWCAAADLGSVNAQGYAIRGMPNRGNTCYMNAMVQCLLALDKLRARMLGPDTPPGHLGMALKELFVEASAAGSAGGMLNPDKLLRSVRLHAGKYEPYTMHDSYELLESLRSALHDEEEGIQAPYRERGAPTVIDAVFKGELCDTRSCKDCQSASAFHGEFWELSLSLPSKEDLCENFASSSQRASKNLNPQPEKAAPQLLSANESNLWKIDASKTDSGEEQRTLQIKNLIHVLCTEEPLNSVDFVPHSIYDAKVEQMIQITADSLPPLIVPQVEHDASTAPGSYVDQNGKGIGEDSNCVLTIEDCLSLFFREEVVERSCDCSKVPMEEPSTNQSRKGKQMEVGTNDEVAANGSHSKQSDRTTCSNGQSSKLNSLSVEYNSCYCRQQHGSDEESDITQMADTHTAGANSRMTCGLKETEYHGGIQETVRSSSLSTEKQTDLLSTQHSQSLIPQNQDLRLDLSAHQLGDKQNGQKERSGRAIQRTNITKLPPVLTLHLKRYFKNGNEYHKNEARVSYKEHLDVGRFMNSSSADKSSTVYRLAGVVEHRGGPFMNAGHYVAYVRARKIGKQSSRPSSWFCADDSNVREVALEEVLERKAYVLFYERVEDANTLIG

SEQ ID NO: 178130 - protein, 757 aa, Zea Mays
MADTRARPWEADESSRSRDSKVPRLDLLAASAAEEEEKVKHLLGQEECTEMTGHDPCCDHVPTDSYHNDILISSLLSDDAGNCQDCRGRRREEADGPGGRPMYRRIMVCLECGRHSCGDSTSYIPYGHAQDHANQEKHWVAAMFDDPQAGFCFKCEHEVPVYPEPDEMEMITGEIQAGGGGGGGGHAFGFDMSRDLATVLLNLGDAWCAAADLGSVNAQGYAIRGMPNRGNTCYMNAMVQCLLALDKLRARMLGPDTPPGHLGMALKELFVEASAAGSAGGMLNPDKLLRSVRLHAGKYEPYTMHDSYELLESLRSALHDEEEGIQAPYRERGAPTVIDAVFKGELCDTRSCKDCQSASAFHGEFWELSLSLPSKEDLCENFASSSQRASKNLNPQPEKAAPQLLSANESNLWKIDASKTDSGEEQRTLQIKNLIHVLCTEEPLNSVDFVPHSIYDAKVEQMIQITADSLPPLIVPQVEHDASTAPGSYVDQNGKGIGEDSNCVLTIEDCLSLFFREEVVERSCDCSKVPMEEPSTNQSRKGKQMEVGTNDEVAANGSHSKQSDRTTCSNGQSSKLNSLSVEYNSCYCRQQHGSDEESDITQMADTHTAGANSRMTCGLKETEYHGGIQETVRSSSLSTEKQTDLLSTQHSQSLIPQNQDLRLDLSAHQLGDKQNGQKERSGRAIQRTNITKLPPVLTLHLKRYFKNGNEYHKNEARVSYKEHLDVGRFMNSRTKNGFQLIVVQASEQTQTELKHLF

SEQ ID NO: 178131 - protein, 350 aa, Zea Mays
MHGNLAFMVCDPMKIAPSTPNGYASASSTAICTSKKDVPTQFGIPIPAVCEWLKQHWNGCLEDASKPMMTPARLTTCGERSGCSSLGRLRYIKTAEVEGGDVLSSSQMPPRPTWQHGACSSASAKISHGENDSIGSHSFHGQHEQSSKICKPHKEQATSLVDHSRSIRLPLPLKQMLPDDNKDEANSQAPHRTEPSNVQMNCGTLHNVAYHENCWSEVQSSSSPVVISEIGDGRDGFSSGEETMYSAETRESRNIPSPKEKKTGMVGRSQSLVNRSKWDSPKSVESSRGFPSKSQTFIPLRKPHLQAASISQKSQDYFSPTVSSNMKKRNLSQTPMKPRQRAQVTSKWIT

SEQ ID NO: 178132 - protein, 255 aa, Zea Mays
MGTTAAHRRRPGSIVVLSPSAVALALLFLSTTLRLAAAVQPYGGGGPCALAVAPLGYPCEEHQVTTADGYILSLQRIPSGGRGGHGGGAGAGASSSRAGQPVLLQHGVLVDGMSWLLASPEESLPFILADRGFDVWIANNRGTRWSRRHVSLDPSSRLYWNWSWDDLVVNDLPAMVDFVVKQTGQKPHYVGHSMGTLVALAAFSEGRVVSQLKSAALLTPVAYLAHITTPIGILLAKAFVGEVITNMTHPAALLV

SEQ ID NO: 178133 - protein, 423 aa, Zea Mays
MGTTAAHRRRPGSIVVLSPSAVALALLFLSTTLRLAAAVQPYGGGGPCALAVAPLGYPCEEHQVTTADGYILSLQRIPSGGRGGHGGGAGAGASSSRAGQPVLLQHGVLVQDGMSWLLASPEESLPFILADRGFDVWIANNRGTRWSRRHVSLDPSSRLYWNWSWDDLVVNDLPAMVDFVVKQTGQKPHYVGHSMGTLVALAAFSEGRVVSQLKSAALLTPVAYLAHITTPIGILLAKAFVGEVLSDFLGMAEFDPLAPPVTNLIRAFCRRPGMSCYDLVGSITGKNYCLNSSAVDVFLKYEPQPTSTKTMVHFAQTVRDGVLTKYDYVLPERNIASYGQAEPPVYRMSGIPPSFPLFLSYGGRDSLADPADVRLLLQDLRGHDQDKLTVQYLDKFAHLDFIIGVCAKDYVYKDMIDFLNRFN

SEQ ID NO: 178134 - protein, 510 aa, Zea Mays
MPEPQAILPLRALPPDAPLPFPVPAPFHPQAPGPGGTAPATPPNPTPPQPLTPAAPPSSSSTRPPHPWEISARAWLESFPDGRPPTEPEVDAYIDVHRPELPSLPRSQLHQRLLALRGDQVLDADQSAFPYRFQRTDLWKPVYQWLESLELDSLVATQQISDWLTSNPKIMDRMVEKHSKYHLIHYTQRMHLKMLKKKGKLPKTLQLSAARATVRPIAAPFTPEENIVPLQKTITPVTGRQQSGTTGRFSSASSGRQQSCTPGRFQGGNATLRDKKTSLSKKKEALLKYELLTDLQNQLTAVLLKQCRTVAIKETDSSYVESPNPETNMSIQGTTTANASAPSEAKNVFINEQSVPAGATESEPGHKRKRNPIIVTPAWCYSEASAGTLQNEINPSSNSDVSRNFNIWRGHANPLVSHRDTKKNILFCLEGRETGVSCSQAASYGGYAGRNCERWTPFLEGWNSPAFQFEGPAVHVVRKSYLSWCPTSCAYTSSAPSAQPHGRVSAKFLM

SEQ ID NO: 178135 - protein, 724 aa, Zea Mays
MPEPQAILPLRALPPDAPLPFPVPAPFHPQAPGPGGTAPATPPNPTPPQPLTPAAPPSSSSTRPPHPWEISARAWLESFPDGRPPTEPEVDAYIDVHRPELPSLPRSQLHQRLLALRGDQVLDADQSAFPYRFQRTDLWKPVYQWLESLELDSLVATQQISDWLTSNPKIMDRMVEKHSKYHLIHYTQRMHLKMLKKKGKLPKTLQLSAARATVRPIAAPFTPEENIVPLQKTITPVTGRQQSGTTGRFSSASSGRQQSCTPGRFQGGNATLRDKKTSLSKKKEALLKYELLTDLQNQLTAVLLKQCRTVAIKETDSSYVESPNPETNMSIQGTTTANASAPSEAKNVFINEQSVPAGATESEPGHKRKRNPIIVTPAWCYSEASAGTLQNEINPSSNSDVSRNFNIWRGHANPLVSHRDTKKNILFCLEGRETGVSCSQAASYGGYAGRNCERWTPFLEGWNSPAFQFEGPAVHVVRKSYLSWCPTSCAYTSSAPSAQPHGRAPNELLLFNLLSGRAIQLRGHNTKIQSIAFAVKGASVVSCASNLLKVWDCITGSCLYTLGGDDQNSVGHTQKINAMAVNKWQSCLVVTSGAKGDGKLLLWNALRGELASDLNSNLRSQDMIYPSVDTMEFYSENHLACGSDCDYGGSAVVQLWDIDSPESYLSFSASDSYITSLKVNPAGNTLITGSGDGTIGLFDIRTCSAISHLSVGSSCEVTSVSFSK

SEQ ID NO: 178136 - protein, 547 aa, Zea Mays
MPEPQAILPLRALPPDAPLPFPVPAPFHPQAPGPGGTAPATPPNPTPPQPLTPAAPPSSSSTRPPHPWEISARAWLESFPDGRPPTEPEVDAYIDVHRPELPSLPRSQLHQRLLALRGDQVLDADQSAFPYRFQRTDLWKPVYQWLESLELDSLVATQQISDWLTSNPKIMDRMVEKHSKYHLIHYTQRMHLKMLKKKGKLPKTLQLSAARATVRPIAAPFTPEENIVPLQKTITPVTGRLPSASSGRQQSGTTGRFSSASSGRQQSCTPGRFQGGNATLRDKKTSLSKKKEALLKYELLTDLQNQLTAVLLKQCRTVAIKETDSSYVESPNPETNMSIQGTTTANASAPSEAKNVFINEQSVPAGATESEPGHKRKRNPIIVTPAWCYSEASAGTLQNEINPSSNSDVSRNFNIWRGHANPLVSHRDTKKNILFCLEGRETGVSCSQAASYGGYAGRNCERWTPFLEGWNSPAFQFEGPAVHVVRKSYLSWCPTSCAYTSSAPSAQPHGRQGIRKVLDVKFHPEGLPQLVSSSNEFALSSDAWTLL

SEQ ID NO: 178137 - protein, 755 aa, Zea Mays
MPEPQAILPLRALPPDAPLPFPVPAPFHPQAPGPGGTAPATPPNPTPPQPLTPAAPPSSSSTRPPHPWEISARAWLESFPDGRPPTEPEVDAYIDVHRPELPSLPRSQLHQRLLALRGDQVLDADQSAFPYRFQRTDLWKPVYQWLESLELDSLVATQQISDWLTSNPKIMDRMVEKHSKYHLIHYTQRMHLKMLKKKGKLPKTLQLSAARATVRPIAAPFTPEENIVPLQKTITPVTGRLPSASSGRQQSGTTGRFSSASSGRQQSCTPGRFQGGNATLRDKKTSLSKKKEALLKYELLTDLQNQLTAVLLKQCRTVAIKETDSSYVESPNPETNMSIQGTTTANASAPSEAKNVFINEQSVPAGATESEPGHKRKRNPIIVTPAWCYSEASAGTLQNEINPSSNSDVSRNFNIWRGHANPLVSHRDTKKNILFCLEGRETGVSCSQAASYGGYAGRNCERWTPFLEGWNSPAFQFEGPAVHVVRKSYLSWCPTSCAYTSSAPSAQPHGRQGIRKVLDVKFHPEGLPQLVSSSNEAPNELLLFNLLSGRAIQLRGHNTKSIAFAVKGASVVSCASNLLKVWDCITGSCLYTLGGDDQNSVGHTQKINAMAVNKWQSCLVVTSGAKGDGKLLLWNALRGELASDLNSNLRSQDMIYPSVDTMEFYSENHLACGSDCDYGGSAVVQLWDIDSPESYLSFSASDSYITSLKVNPAGNTLITGSGDGTIGLFDIRTCSAISHLSVGSSCEVTSVSFSK

SEQ ID NO: 178138 - protein, 644 aa, Zea Mays
MPEPQAILPLRALPPDAPLPFPVPAPFHPQAPGPGGTAPATPPNPTPPQPLTPAAPPSSSSTRPPHPWEISARAWLESFPDGRPPTEPEVDAYIDVHRPELPSLPRSQLHQRLLALRGDQVLDADQSAFPYRFQRTDLWKPVYQWLESLELDSLVATQQISDWLTSNPKIMDRMVEKHSKYHLIHYTQRMHLKMLKKKGKLPKTLQLSAARATVRPIAAPFTPEENIVPLQKTITPVTGRLPSASSGRQQSGTTGRFSSASSGRQQSCTPGRFQGGNATLRDKKTSLSKKKEALLKYELLTDLQNQLTAVLLKQCRTVAIKETDSSYVESPNPETNMSIQGTTTANASAPSEAKNVFINEQSVPAGATESEPGHKRKRNPIIVTPAWCYSEASAGTLQNEINPSSNSDVSRNFNIWRGHANPLVSHRDTKKNILFCLEGRETGVSCSQAASYGGYAGRNCERWTPFLEGWNSPAFQFEGPAVHVVRKSYLSWCPTSCAYTSSAPSAQPHGRQGIRKVLDVKFHPEGLPQLVSSSNEAPNELLLFNLLSGRAIQLRGHNTKIQSIAFAVKGASVVSCASNLLKVWDCITGSCLYTLGGDDQNSVGHTQKINAMAVNKWQSCLVVTSGAKGDGKLLLWNALRGLRI

SEQ ID NO: 178139 - protein, 565 aa, Zea Mays
MPEPQAILPLRALPPDAPLPFPVPAPFHPQAPGPGGTAPATPPNPTPPQPLTPAAPPSSSSTRPPHPWEISARAWLESFPDGRPPTEPEVDAYIDVHRPELPSLPRSQLHQRLLALRGDQVLDADQSAFPYRFQRTDLWKPVYQWLESLELDSLVATQQISDWLTSNPKIMDRMVEKHSKYHLIHYTQRMHLKMLKKKGKLPKTLQLSAARATVRPIAAPFTPEENIVPLQKTITPVTGRLPSASSGRQQSGTTGRFSSASSGRQQSCTPGRFQGGNATLRDKKTSLSKKKEALLKYELLTDLQNQLTAVLLKQCRTVAIKETDSSYVESPNPETNMSIQGTTTANASAPSEAKNVFINEQSVPAGATESEPGHKRKRNPIIVTPAWCYSEASAGTLQNEINPSSNSDVSRNFNIWRGHANPLVSHRDTKKNILFCLEGRETGVSCSQAASYGGYAGRNCERWTPFLEGWNSPAFQFEGPAVHVVRKSYLSWCPTSCAYTSSAPSAQPHGRQGIRKVLDVKFHPEGLPQLVSSSNEAPNELLLFNLLSGRAIQLRGHNTKSKEQV

SEQ ID NO: 178140 - protein, 749 aa, Zea Mays
MPEPQAILPLRALPPDAPLPFPVPAPFHPQAPGPGGTAPATPPNPTPPQPLTPAAPPSSSSTRPPHPWEISARAWLESFPDGRPPTEPEVDAYIDVHRPELPSLPRSQLHQRLLALRGDQVLDADQSAFPYRFQRTDLWKPVYQWLESLELDSLVATQQISDWLTSNPKIMDRMVEKHSKYHLIHYTQRMHLKMLKKKGKLPKTLQLSAARATVRPIAAPFTPEENIVPLQKTITPVTGRQQSGTTGRFSSASSGRQQSCTPGRFQGGNATLRDKKTSLSKKKEALLKYELLTDLQNQLTAVLLKQCRTVAIKETDSSYVESPNPETNMSIQGTTTANASAPSEAKNVFINEQSVPAGATESEPGHKRKRNPIIVTPAWCYSEASAGTLQNEINPSSNSDVSRNFNIWRGHANPLVSHRDTKKNILFCLEGRETGVSCSQAASYGGYAGRNCERWTPFLEGWNSPAFQFEGPAVHVVRKSYLSWCPTSCAYTSSAPSAQPHGRQGIRKVLDVKFHPEGLPQLVSSSNEAPNELLLFNLLSGRAIQLRGHNTKIQSIAFAVKGASVVSCASNLLKVWDCITGSCLYTLGGDDQNSVGHTQKINAMAVNKWQSCLVVTSGAKGDGKLLLWNALRGELASDLNSNLRSQDMIYPSVDTMEFYSENHLACGSDCDYGGSAVVQLWDIDSPESYLSFSASDSYITSLKVNPAGNTLITGSGDGTIGLFDIRTCSAISHLSVGSSCEVTSVSFSK

SEQ ID NO: 178141 - protein, 579 aa, Zea Mays
MPEPQAILPLRALPPDAPLPFPVPAPFHPQAPGPGGTAPATPPNPTPPQPLTPAAPPSSSSTRPPHPWEISARAWLESFPDGRPPTEPEVDAYIDVHRPELPSLPRSQLHQRLLALRGDQVLDADQSAFPYRFQRTDLWKPVYQWLESLELDSLVATQQISDWLTSNPKIMDRMVEKHSKYHLIHYTQRMHLKMLKKKGKLPKTLQLSAARATVRPIAAPFTPEENIVPLQKTITPVTGRLPSASSGRQQSGTTGRFSSASSGRQQSCTPGRFQGGNATLRDKKTSLSKKKEALLKYELLTDLQNQLTAVLLKQCRTVAIKETDSSYVESPNPETNMSIQGTTTANASAPSEAKNVFINEQSVPAGATESEPGHKRKRNPIIVTPAWCYSEASAGTLQNEINPSSNSDVSRNFNIWRGHANPLVSHRDTKKNILFCLEGRETGVSCSQAASYGGYAGRNCERWTPFLEGWNSPAFQFEGPAVHVVRKSYLSWCPTSCAYTSSAPSAQPHGRQGIRKVLDVKFHPEGLPQLVSSSNEAPNELLLFNLLSGRAIQLRGHNTKPCSTSPAACNLGNLEPRNE

SEQ ID NO: 178142 - protein, 218 aa, Zea Mays
MKTEESPYRITHQIHLGSSSSSRQQHFVGAATSAYAKEGPRFPFLQEGEISFATGVVLEPPAAAPACQPLLKSGAPPPESSSAGGGKMFSDQGLTRVLDSDCALSLLSAPANYSGIDVSRMVRPTEHVPMAQQLVVSGLQFGSASWFPRPQASTGGSFVSSCPAVQVEGEQQLNAVLGPNDSEVSMNYGGMFHVGGGSGGGEGSSDGGTSSSMPFSWQ

SEQ ID NO: 178143 - protein, 519 aa, Zea Mays
MGECELGAGAATACREREAAAGATKRPRPAGQQQQQCPSCAVDGCRADLSKCRDYHRRHKVCEAHSKTPVVVVAGREMRFCQQCSSAVTLFRSLRSLLLQSPHSKLLSSVSFTLLSDALMRIKHLLPLPKSGLWRRGGSTDTLRSFLYPYGERNCCTVYHRVVQELSKFKESCGHNSLVHGHMTVRVAHYTYCHQMCKTLLRNNNHGLVHFDGFKSIPSQNLLNFSIPSNTREVGSPIRFHLLAEFDADKRSCRKRLDGHNRRRRKPQPDTMASASSITSQQGTRFSPFAPPRLEASWPGVMKTEESPYRITHQIHLGSSSSSRQQHFVGAATSAYAKEGPRFPFLQEGEISFATGVVLEPPAAAPACQPLLKSGAPPPESSSAGGGKMFSDQGLTRVLDSDCALSLLSAPANYSGIDVSRMVRPTEHVPMAQQLVVSGLQFGSASWFPRPQASTGGSFVSSCPAVQVEGEQQLNAVLGPNDSEVSMNYGGMFHVGGGSGGGEGSSDGGTSSSMPFSWQ

SEQ ID NO: 178144 - protein, 532 aa, Zea Mays
MDWDLKAVGAWDLAELEQDHAAATAAAGPSEGHATDTAAAGTGTGTGTESRPPGAGAPAECSVDLKLGGMGECELGAGAATACREREAAAGATKRPRPAGQQQQQCPSCAVDGCRADLSKCRDYHRRHKVCEAHSKTPVVVVAGREMRFCQQCSRLRSFLYPYGERNCCTVYHRVVQELSKFKESCGHNSLVHGHMTVRVAHYTYCHQMCKTLLRNNNHGLVHFDGFKSIPSQNLLNFSIPSNTREVGSPIRFHLLAEFDADKRSCRKRLDGHNRRRRKPQPDTMASASSITSQQGTRFSPFAPPRLEASWPGVMKTEESPYRITHQIHLGSSSSSRQQHFVGAATSAYAKEGPRFPFLQEGEISFATGVVLEPPAAAPACQPLLKSGAPPPESSSAGGGKMFSDQGLTRVLDSDCALSLLSAPANYSGIDVSRMVRPTEHVPMAQQLVVSGLQFGSASWFPRPQASTGGSFVSSCPAVQVEGEQQLNAVLGPNDSEVSMNYGGMFHVGGGSGGGEGSSDGGTSSSMPFSWQ

SEQ ID NO: 178145 - protein, 83 aa, Zea Mays
MDCFSSNFGPQAAHRPVRIVPGLPARSRVERCERTPFFYADGFLSSRSARFVTSLSSRSIASSTEAGESAAQIAVGKRRSLQL

SEQ ID NO: 178146 - protein, 240 aa, Zea Mays
MVPNLSLTAHWTTRGCSGLTSDCTKKYECLKLPQHVEETGPESGAGAWALARSAAGDERRGAGHPWQSEVDGARSWARWRSPAAWRLRTRRAEEGHGANAGSWTGSTASSRQSTARRGLRYGGARSGDSTSRLREGGAGDSRSRGHHGAVQGGRVEDGVAAMGMTVGRIGGTDVRAWSSRRRTHGGRAGGRRGAAWRLARVLGRSRTTASSMGRERRGRPPGRGAWGWRPSAWKGEAAGV

SEQ ID NO: 178147 - protein, 52 aa, Zea Mays
MNMTDKKVMVTFHRKSKHIYQCHNQSYMQPYARSIEVSRCKRNTYARCRSVG

SEQ ID NO: 178148 - protein, 388 aa, Zea Mays
MILIIAPVVVFCLFVARHLINDFPDSWGISVMVVVVVFTIYDLTLLLCTSGRDPGIIPRNSHPPEPESIDGINDTGVQTPQQFRLPRTKEVLVNGISVRVKYCDTCMLYRPPRCSHCSICNNCVERFDHHCPWVGQCIGLRNYRFFYMFVFSTTLLCLYVFAFCWVYVIKIRAAEQSSVWKALLKTPASVALIIYCFLCVWFVGGLSVFHLYLMSTNQTTYENFRYRYDRRDNPYNKGVLNNFLEIFCTAIPPSKNNFRARVTAGQGLQQTRSQSRGFMSPSMGKPIGDLEMDRKPVAPWDEPRTAADIRDLEAGLGVMFDEKEGRVAHASPDLSRDLPAEFVEGRSGMHSRQSSWVQRGDAIEASAVQMANARTTEASNNVAWSGTH

SEQ ID NO: 178149 - protein, 83 aa, Zea Mays
MRPTWFTQGHGDNIQQQRLRAPKIPTTGGSQEIMDPRSAHGDNRRRGLSPNYSVTEQTPNNPYGSLGGSGATSSRCTCMQLSV

SEQ ID NO: 178150 - protein, 70 aa, Zea Mays
MRCPLSHLLWPAPFAYITRASIIEHRGHRLPALGSCVTNRCLRFANRRIKAWEQSFSCQRGGSGRGQHIL

SEQ ID NO: 178151 - protein, 86 aa, Zea Mays
MSSYKKLSQIKKRRLTLHFNLLQKAAEERKIDLLAPAHSGRSRAANQSEMQAQSTLVRSLGVESWATNHTDILFSNWIAAYILAFL

SEQ ID NO: 178152 - protein, 54 aa, Zea Mays
MQAQSTLVRSLGVESWATNHTDILFSNWIAAYILAFLLYGNLDGLARGTSRCQR

SEQ ID NO: 178153 - protein, 99 aa, Zea Mays
MSSYKKLSQIKKRRLTLHFNLLQKAAEERKIDLLAPAHSGRSRAANQSEMQAQSTLVRSLGVESWATNHTVIVCTHAQVEEAPVSNCVQQVKESRLSLA

SEQ ID NO: 178154 - protein, 58 aa, Zea Mays
MEHLFIHVSRRENRIIFSFFLLLFQDILFSNWIAAYILAFLLYGNLDGLARGTSRCQR

SEQ ID NO: 178155 - protein, 66 aa, Zea Mays
MIDKTIFLFDGPFFVCLLLASIKRCCIWSIFESKLLLSACSRKKNTYVIIFVQLAFKLCNLLSKGK

SEQ ID NO: 178156 - protein, 216 aa, Zea Mays
MQSLVVLVHTTKHMYVNKEFLRNRSMDENQLAQQMWNSVAANDKKAAYSLIVRSRANVNLVHGEIHSSPFLTLGKALQQEQPASPPVGSPRFFDCNSHDKISREPLSPASTSSCRDGMEDGCEGLSLLHLACRVADVGMVELLLQYGASVNMNDSMGRTPLHHCILKGRHRHAKLLLSRGADSQAMDRDGRTALQYAINGGTSDEDILALLQDHSR

SEQ ID NO: 178157 - protein, 191 aa, Zea Mays
MDENQLAQQMWNSVAANDKKAAYSLIVRSRANVNLVHGEIHSSPFLTLGKALQQEQPASPPVGSPRFFDCNSHDKISREPLSPASTSSCRDGMEDGCEGLSLLHLACRVADVGMVELLLQYGASVNMNDSMGRTPLHHCILKGRHRHAKLLLSRGADSQAMDRDGRTALQYAINGGTSDEDILALLQDHSR

SEQ ID NO: 178158 - protein, 243 aa, Zea Mays
MRMFMPMLFLPLVWKTVLLLILSSSLQIRCGLLCMIVMSLLYVNKEFLRNRSMDENQLAQQMWNSVAANDKKAAYSLIVRSRANVNLVHGEIHSSPFLTLGKALQQEQPASPPVGSPRFFDCNSHDKISREPLSPASTSSCRDGMEDGCEGLSLLHLACRVADVGMVELLLQYGASVNMNDSMGRTPLHHCILKGRHRHAKLLLSRGADSQAMDRDGRTALQYAINGGTSDEDILALLQDHSR

SEQ ID NO: 178159 - protein, 90 aa, Zea Mays
MLYYYRKQITRPPAGCSMQRSVNPPEHGSGLLSRLFSSHYHGIVHDEKSVARHTVNLLTSTIKVDADQSDLRFCFRIISPTKIYTLQRVQ

SEQ ID NO: 178160 - protein, 114 aa, Zea Mays
MLYYYRKQITRPPAGCSMQRSVNPPEHGSGLLSRLFSSHYHGIVHDEKSVARHTVNLLTSTIKVDADQSDLRFCFRIISPTKIYTLQAESAVDQMDWIEKITGVIASLLNSQSP

SEQ ID NO: 178161 - protein, 82 aa, Zea Mays
MGEESDHVHIIALSDALGVPIRVMYLDRSSCDTGNLSVNHHDFIPSANDSEGDAATTPAPATEKPYITLLYRPGHYDILYPK

SEQ ID NO: 178162 - protein, 122 aa, Zea Mays
MFFRFVTSGEIQRRSDFFEPFISGLTNSTVVQFCKASVEPMGEESDHVHIIALSDALGVPIRVMYLDRSSCDTGNLSVNHHDFIPSANDSEGDAATTPAPATEKPYITLLYRPGHYDILYPK

SEQ ID NO: 178163 - protein, 184 aa, Zea Mays
MVKIEECKKTLLSLGYIEFTFEDFFSIFIELLESVLQGHETPIGPEELLERTRDPQVSDYVVMFFRFVTSGEIQRRSDFFEPFISGLTNSTVVQFCKASVEPMGEESDHVHIIALSDALGVPIRVMYLDRSSCDTGNLSVNHHDFIPSANDSEGDAATTPAPATEKPYITLLYRPGHYDILYPK

SEQ ID NO: 178164 - protein, 424 aa, Zea Mays
MSSNKERAKKALNAMKLLGFSKKQATPVLKELLNIFNNNWEPIEDECYRALADAILDRQDNKQTPPSQQGNQAAHAHSEHDRQQYVSAIHDDRGEDDNETPLVKRPRMGTANFRAELQPFESGPQQPTVSTQGALSVSPQNSRGVTRSLTVVLQDAGCEYPLAVDDSFIVKEPKPEPQIDIAEINIGDHLTEPQVDIAEISVGDHLTDRDFLTGPDAIQLSDGSSGSGARGSMVKQAQSLGRSKQKAPLCKNGVGSMIQNTQETSFVEVDVASSANGEVKMSLKCSLESSNFSISMEEVFKMVEEKCLHSYKVLPPDFSIGKLMSEVCQSVVQLGTMHSEVNRDSGSLHNEVVAPFVKPIACEAAVDINDNVAGGSSVLDSSEPCLQNSLVAWDPEFAHCKQKTTHDTTDISKGEERFHVAVQE

SEQ ID NO: 178165 - protein, 395 aa, Zea Mays
MLVLRRLRLRLPLPRPLLVSSFSSTSPSSSPSTSSSSSCWSSTGESRRAMASSPSPDSAAVVAEGSAARRFWIAASTREAAFAAYTPFLLSLAAGNLRLNVFRHYIAQDAHFLHAFARAYEMAEDCADDDDDMATIAALRKAILQELNLHSSVLKEWGVDPTKEIPPSAATTKYTDFLLATAAGKVDGTKGSDKMVTPFEKTKIAAYTVGAMTPCMRLYAYLGKELMVFLKQDENHPYKKWINTYASSDFEDTTLQIEELLDKLSVSLTGEELEIIGKLYQQAMKLEVEFFSSQLIDQPVVAPLSRYCDPKYKLLIFSDFDLTCTIVDSSAILAEIAILSFQKANQSGIDNNLDRAKSGDLRSSWNMLSKQYMEEYEKCMERLLPPEEWLSTLVC

SEQ ID NO: 178166 - protein, 392 aa, Zea Mays
MLVLRRLRLRLPLPRPLLVSSFSSTSPSSSPSTSSSSSCWSSTGESRRAMASSPSPDSAAVVAEGSAARRFWIAASTREAAFAAYTPFLLSLAAGNLRLNVFRHYIAQDAHFLHAFARAYEMAEDCADDDDDMATIAALRKAILQELNLHSSVLKEWGVDPTKEIPPSAATTKYTDFLLATAAGKVDGTKGSDKMVTPFEKTKIAAYTVGAMTPCMRLYAYLGKELMVFLKQDENHPYKKWINTYASSDFEDTTLQIEELLDKLSVSLTGEELEIIGKLYQQAMKLEVEFFSSQLIDQPVVAPLSRYCDPKYKLLIFSDFDLTCTIVDSSAILAEIAILSFQKANQSGIDNNLDRAKSGDLRSSWNMLSKQYMEEYEKCMERLLPPEEFTRL

SEQ ID NO: 178167 - protein, 480 aa, Zea Mays
MLVLRRLRLRLPLPRPLLVSSFSSTSPSSSPSTSSSSSCWSSTGESRRAMASSPSPDSAAVVAEGSAARRFWIAASTREAAFAAYTPFLLSLAAGNLRLNVFRHYIAQDAHFLHAFARAYEMAEDCADDDDDMATIAALRKAILQELNLHSSVLKEWGVDPTKEIPPSAATTKYTDFLLATAAGKVDGTKGSDKMVTPFEKTKIAAYTVGAMTPCMRLYAYLGKELMVFLKQDENHPYKKWINTYASSDFEDTTLQIEELLDKLSVSLTGEELEIIGKLYQQAMKLEVEFFSSQLIDQPVVAPLSRYCDPKYKLLIFSDFDLTCTIVDSSAILAEIAILSFQKANQSGIDNNLDRAKSGDLRSSWNMLSKQYMEEYEKCMERLLPPEESKSLDYDKLYKGLEVLAEFEKLANSRVVDSGVLRGMNLEDIRKAGERLILQGGCKNFFQKIVKTRENLNLDVHILSYCWCAELIRSAFSSDS

SEQ ID NO: 178168 - protein, 261 aa, Zea Mays
MVIRSYSSFHCGLLISRAAWRRHYPFFWAVRPSVPPPPSPLPLPQPRTRFSSSSSLRSTKRSAAKTSMDSSSVGEPFYVVRKGDVIGIYKTLSECQAQVSNSVRDPSVTVFKGYSLRKDTEEYLAARGLRNALYAIDATDARDELFDDLVPCPFQQPDGAASSTLKRSQEIEIGPSKKHPKVDEQVPLPDSHLSCILEFDGASKGNPGKAGAGAIIRQVDGSVPRKGSSIFVLKATLSLFVTRSKISGVLRMIIWLASARK

SEQ ID NO: 178169 - protein, 267 aa, Zea Mays
MVIRSYSSFHCGLLISRAAWRRHYPFFWAVRPSVPPPPSPLPLPQPRTRFSSSSSLRSTKRSAAKTSMDSSSVGEPFYVVRKGDVIGIYKTLSECQAQVSNSVRDPSVTVFKGYSLRKDTEEYLAARGLRNALYAIDATDARDELFDDLVPCPFQQPDGAASSTLKRSQEIEIGPSKKHPKVDEQVPLPDSHLSCILEFDGASKGNPGKAGAGAIIRQIAQLREGLGIATNNAAEYRALILGLTYAAKKGFKYIRAQGDSKLVCNQV

SEQ ID NO: 178170 - protein, 264 aa, Zea Mays
MDSSSVGEPFYVVRKGDVIGIYKTLSECQAQVSNSVRDPSVTVFKGYSLRKDTEEYLAARGLRNALYAIDATDARDELFDDLVPCPFQQPDGAASSTLKRSQEIEIGPSKKHPKVDEQVPLPDSHLSCILEFDGASKGNPGKAGAGAIIRQIAQLREGLGIATNNAAEYRALILGLTYAAKKGFKYIRAQGDSKLVCNQVQDIWRVKNDNMASFCKKVKELKGTFHLFQIRHVLREYNSAADAQANFAVELPVGEVQEQSNFPC

SEQ ID NO: 178171 - protein, 157 aa, Zea Mays
MDSSSVGEPFYVVRKGDVIGIYKTLSECQAQVSNSVRDPSVTVFKGYSLRKDTEEYLAARGLRNALYAIDATDARDELFDDLVPCPFQQPDGAASSTLKRSQEIEIGPSKKHPKVDEQVPLPDSHLSCILEFDGASKGNPGKAGAGAIIRQVDGSVG

SEQ ID NO: 178172 - protein, 170 aa, Zea Mays
MDSSSVGEPFYVVRKGDVIGIYKTLSECQAQVSNSVRDPSVTVFKGYSLRKDTEEYLAARGLRNALYAIDATDARDELFDDLVPCPFQQPDGAASSTLKRSQEIEIGPSKKHPKVDEQVPLPDSHLSCILEFDGASKGNPGKAGAGAIIRLLNYVRVWALQPTMLLNIVH

SEQ ID NO: 178173 - protein, 391 aa, Zea Mays
MQAKKTRDFSGGWRMRIALARALFMNPTILLLDEPTNHLDLEACVWLEETLKKFDRILVVISHSQDFLNGVCTNIIHMQNKKLKLYTGNYDQYIQTRSELEENQMKQFRWEQEQIASMKEYIARFGHGSAKLARQAQSKEKTLAKMERGGLTEKVVRDKILVFRFTNVGKLPPPVLQFVEVTFGYTPDNLLYKKLDFGVDLDSRIALVGPNGAGKSTLLKLMTGELVPLDGMVRRHNHLRIAQFHQHLAEKLDLDMSALQYMMKEYPGNEEERMRAAVGKFGLSGKAQVMPMRNLSDGQRSRVIFAWLAYRQPQLLLLDEPTNHLDIETIDSLAEALNEWDGGLVLVSHDFRLINQVAHEIWVCENQAVTRWEGDIMDFKEHLRSKACLSD

SEQ ID NO: 178174 - protein, 147 aa, Zea Mays
MPCHSHPPLAEQHVNTGTRILAACLWCFVLQTATHNIDTCMYTPNRKTRKFRARYYRFTFRLQKHATEDQIIQSQTQLVFLLHSSTNTCASGVALRARRSPWRSIIGSDPLPIAAYTLPHRTWAIRSLSQGRKGVQVTMLPVIQLQC

SEQ ID NO: 178175 - protein, 62 aa, Zea Mays
MTTWKRGSRLNCTTVGISQRTPGGRTVDGRGWHLTGPAFIAKSSRALRILMSKLQRIQGLSW

SEQ ID NO: 178176 - protein, 263 aa, Zea Mays
MASSRGPLAALLLLAACAAFFPAAGAAGTPDGSEEWGYVEVRPKAHMFWWLYHSPQRVDNGKTPWPTVLWLQGGPGASGVGYGNFMEIGPLDEKLKPRATTWLAKADLLFVDNPVGTGFSYVDGGDKSLMASTSPASPSGIAGSRRSTSCCRGGRCCTRCPGWTRRACSSATAWRPRSRSSWRRGSSRTPRPRGRSWRASSSPAPTPSTSTTFSRTRRRGTPPPLPQRRCRHWRPSGAGAATRATSAPWRRLRRRQQAASTGS

SEQ ID NO: 178177 - protein, 333 aa, Zea Mays
MQKICECLRASVSDLSKFSKGEIAAPKLKALLFKPLNQVNPVIKPHQKTIKRKRTNPNKTRTNPIQKNAKKKKALEQDKLAISPGQKDGKKTLDQEKSVSSPIQKGAKKTKPLNQDKLVISPGQEDDKKPLVQDEPIVVSPIQKNNNKYVDQEKSLQQEKQIISPGQKDDKKSSKVGPDSACNHVQQKKVKATVSTGRAANTHVSSSRPRSVFIPQAHWPSQPIVDRFAHIPEHLISPSAFSYGLPQPLMHPAYPHPHSHQGLVGQGQGNFLHFNPGIELQHQGQAFFGPPAVYHPMVNGFHPFGINGAQQVQYIDNRMVQRPPYGFGPGFWG

SEQ ID NO: 178178 - protein, 495 aa, Zea Mays
MQMISILARTRFLLLGSLHMFYFLISMKFWAKVHDVNCPKDRTMSSMAIISLVSFHLQTRCPPILPAFSAVLKDGTDFASIEKNVSLFQGFGHSNKESIAELFVSLMSKLVSVEGLWEQGLCASNFEGTWISKTWAKGVGNLNVEDFLDRSQNFARSVGVKEMQKICECLRASVSDLSKFSKGEIAAPKLKALLFKPLNQVNPVIKPHQKTIKRKRTNPNKTRTNPIQKNAKKKKALEQDKLAISPGQKDGKKTLDQEKSVSSPIQKGAKKTKPLNQDKLVISPGQEDDKKPLVQDEPIVVSPIQKNNNKYVDQEKSLQQEKQIISPGQKDDKKSSKVGPDSACNHVQQKKVKATVSTGRAANTHVSSSRPRSVFIPQAHWPSQPIVDRFAHIPEHLISPSAFSYGLPQPLMHPAYPHPHSHQGLVGQGQGNFLHFNPGIELQHQGQAFFGPPAVYHPMVNGFHPFGINGAQQVQYIDNRMVQRPPYGFGPGFWG

SEQ ID NO: 178179 - protein, 377 aa, Zea Mays
MVNVFNKIVGEIFGKNNELPIVEPFGSFTMDLFTPQSDLDLSVNFNTDANDQYPRKNKISAIRKLAHVLFSHQRHGRCYGVSPIVTARVPVLKVIDKGTGVECDISVENKDGMSRSAIFKFISSIDKRFRILCYLMKFWAKVHDVNCPKDRTMSSMAIISLVSFHLQTRCPPILPAFSAVLKDGTDFASIEKNVSLFQGFGHSNKESIAELFVSLMSKLVSVEGLWEQGLCASNFEGTWISKTWAKGVGNLNVEDFLDRSQNFARSVGVKEMQKICECLRASVSDLSKFSKGEIAAPKLKALLFKPLNQVNPVIKPHQKTIKRKRTNPNKTRTNPIQKNAKKKKALEQDKLAISPGQKDGKKTLDQEKSVSSPIQKG

SEQ ID NO: 178180 - protein, 53 aa, Zea Mays
MMYQICCCCVFSSFPVSDRVCVSIAHRFARHQHRPRALNNTSSIFFGCAAWHG

SEQ ID NO: 178181 - protein, 56 aa, Zea Mays
MQLWKVLHVLLKHHCPNFFPSQIPCTSVGSQLVFGVSVKSCHMRHLFLKRWGGHCA

SEQ ID NO: 178182 - protein, 395 aa, Zea Mays
MPGTIMAMGRLNRPSIMIYGGTIKPGHFQGNSYDIVSAFQCYGEYVSGSITDEQRKNVLRNSCPGAGACGGMYTANTMASAIETLGMSLPYSSSTPAEDPLKLEECRLAGKYLLELLKMDLKPKDIITEKSLRNAMVIVMALDLKPSGKYVMEDLHKIGGTPAVIHYLLEQGLLDGDCMTVTAKTLAENAKIFPPLSEGQQIIRPLDNPIKPTGHIQILYGNLAPEGSVAKITGKEGLYFSGPALVFEGEESMITAISENPANFKGKVVVIRGEGPKGGPGMPEMLTPTSAIMGAGLGKECALLTDGRFSGGSHGFVVGHICPEAQEGGPIGLVQSGDIITIDVSKRVIDVDLTEQQLEERRRKWTPPPYKSTSGALWKYIKLVAPASRGCVTDE

SEQ ID NO: 178183 - protein, 304 aa, Zea Mays
MQSMAPTSPSLPVAGPVPRRRLQRVRAAAVSDEPKLNKYSARITEPKSQGASQAVLYGVGLTDADLRKPQVGVSSVWYEGNTCNMHLLRLAEAVRDGVREAGMVGFRFNTVGVSDAISMGTRGMCYSLQSRDLIADSIETVMGAQHYDANISIPGCDKNMPGTIMAMGRLNRPSIMIYGGTIKPGHFQGNSYDIVSAFQCYGEYVSGSITDEQRKNVLRNSCPGAGACGGMYTANTMASAIETLGMSLPYSSSTPAEDPLKLEECRLAGKYLLELLKMDLKPKDIITEKSLRNAMVIVMALGGP

SEQ ID NO: 178184 - protein, 598 aa, Zea Mays
MQSMAPTSPSLPVAGPVPRRRLQRVRAAAVSDEPKLNKYSARITEPKSQGASQAVLYGVGLTDADLRKPQVGVSSVWYEGNTCNMHLLRLAEAVRDGVREAGMVGFRFNTVGVSDAISMGTRGMCYSLQSRDLIADSIETVMGAQHYDANISIPGCDKNMPGTIMAMGRLNRPSIMIYGGTIKPGHFQGNSYDIVSAFQCYGEYVSGSITDEQRKNVLRNSCPGAGACGGMYTANTMASAIETLGMSLPYSSSTPAEDPLKLEECRLAGKYLLELLKMDLKPKDIITEKSLRNAMVIVMALGGSTNAVLHLIAIARSVGLHLTLDDFQKVSDQVPFLADLKPSGKYVMEDLHKIGGTPAVIHYLLEQGLLDGDCMTVTAKTLAENAKIFPPLSEGQQIIRPLDNPIKPTGHIQILYGNLAPEGSVAKITGKEGLYFSGPALVFEGEESMITAISENPANFKGKVVVIRGEGPKGGPGMPEMLTPTSAIMGAGLGKECALLTDGRFSGGSHGFVVGHICPEAQEGGPIGLVQSGDIITIDVSKRVIDVDLTEQQLEERRRKWTPPPYKSTSGALWKYIKLVAPASRGCVTDEDDQLDSS

SEQ ID NO: 178185 - protein, 329 aa, Zea Mays
MQSMAPTSPSLPVAGPVPRRRLQRVRAAAVSDEPKLNKYSARITEPKSQGASQAVLYGVGLTDADLRKPQVGVSSVWYEGNTCNMHLLRLAEAVRDGVREAGMVGFRFNTVGVSDAISMGTRGMCYSLQSRDLIADSIETVMGAQHYDANISIPGCDKNMPGTIMAMGRLNRPSIMIYGGTIKPGHFQGNSYDIVSAFQCYGEYVSGSITDEQRKNVLRNSCPGAGACGGMYTANTMASAIETLGMSLPYSSSTPAEDPLKLEECRLAGKYLLELLKMDLKPKDIITEKSLRNAMVIVMALGGSTNAVLHLIAIARPQAQWQICHGRST

SEQ ID NO: 178186 - protein, 533 aa, Zea Mays
MQSMAPTSPSLPVAGPVPRRRLQRVRAAAVSDEPKLNKYSARITEPKSQGASQAVLYGVGLTDADLRKPQVGVSSVWYEGNTCNMHLLRLAEAVRDGVREAGMVGFRFNTVGVSDAISMGTRGMCYSLQSRDLIADSIETVMGAQHYDANISIPGCDKNMPGTIMAMGRLNRPSIMIYGGTIKPGHFQGNSYDIVSAFQCYGEYVSGSITDEQRKNVLRNSCPGAGACGGMYTANTMASAIETLGMSLPYSSSTPAEDPLKLEECRLAGKYLLELLKMDLKPKDIITEKSLRNAMVIVMALGGSTNAVLHLIAIARSVGLHLTLDDFQKVSDQVPFLADLKPSGKYVMEDLHKIGGTPAVIHYLLEQGLLDGDCMTVTAKTLAENAKIFPPLSEGQQIIRPLDNPIKPTGHIQILYGNLAPEGSVAKITGKEGLYFSGPALVFEGEESMITAISENPANFKGKVVVIRGEGPKGGPGMPEMLTPTSAIMGAGLGKECALLTDGRFSGGSHGFVVGHICPEAQVVQLALSRVVI

SEQ ID NO: 178187 - protein, 545 aa, Zea Mays
MQSMAPTSPSLPVAGPVPRRRLQRVRAAAVSDEPKLNKYSARITEPKSQGASQAVLYGVGLTDADLRKPQVGVSSVWYEGNTCNMHLLRLAEAVRDGVREAGMVGFRFNTVGVSDAISMGTRGMCYSLQSRDLIADSIETVMGAQHYDANISIPGCDKNMPGTIMAMGRLNRPSIMIYGGTIKPGHFQGNSYDIVSAFQCYGEYVSGSITDEQRKNVLRNSCPGAGACGGMYTANTMASAIETLGMSLPYSSSTPAEDPLKLEECRLAGKYLLELLKMDLKPKDIITEKSLRNAMVIVMALGGSTNAVLHLIAIARSVGLHLTLDDFQKVSDQVPFLADLKPSGKYVMEDLHKIGGTPAVIHYLLEQGLLDGDCMTVTAKTLAENAKIFPPLSEGQQIIRPLDNPIKPTGHIQILYGNLAPEGSVAKITGKEGLYFSGPALVFEGEESMITAISENPANFKGKVVVIRGEGPKGGPGMPEMLTPTSAIMGAGLGKNSEDAQFWFLLLSEIVEFSKRREICTFLNTIQRIRFSLPTPFIFALSGAS

SEQ ID NO: 178188 - protein, 190 aa, Zea Mays
MAGCRYPFNRPGPWPSTPLVHLHLRQCSQSLRLRVSRAPPHRRQSSTEIPTPPRRTARVAVPVESIPWLHPPPPPHRTTALLSFSPAAPPPPRALPGPLPSPSGPSRTPPPPPPPPPSRRRSSSRLQGSRCPSPRGSRSSPASRAVSSALCSPSPSASAPASSSSGTRHHLFLHQRYHRTNMRLNSELGR

SEQ ID NO: 178189 - protein, 234 aa, Zea Mays
MAPPAAPTAPHHRTPLFLPRRAAATARAARAASLAVRAQPNTAAASTSAPEPPEKFKPPPGFKVPEPKRFEIKSGQQSSVLGALLAIPLRLGTGVFVLGYSPSLVSPSEIPSDQYALEFGAWKVKEESKIGQCKRPEKPIEIYEFEGCPFCRKVREMVSVLDLDVLFYPCPRKGPTFRPKVLEMGGKKQFPYMVDPNTGVAMYESDDIIKYLADTYGDGSVPIMLSLGLLTVSK

SEQ ID NO: 178190 - protein, 118 aa, Zea Mays
MGHSCLPHTALAWTLGLAVSGPVASDLSHHQNAVGAAGESAESVRYRPGFLSVWRATCFSNAVRDSWGLGLNIRADRGNRLTVADLLLATRLHKRNATSLIAPSAPSPSFTMHLRERG

SEQ ID NO: 178191 - protein, 381 aa, Zea Mays
MQMHSDAARLPGFHTCVGSGGERLLPEWYSEKGIELILSTEIVKADLASKTLTSAAAETFTYETLLIATGSSVIKLTDFGVQGAESNNILYLRDIADADKLVAAMQAKKGGKAVIVGGGYIGLELSAALKINNFDVTMVYPEPWCMPRLFTAGIAHFYEGYYANKGIKVVKGTVAVGFDADANGDVTTVKLKNGSVLEADIVIVGVGGRPLTRLFIGQAADEKGGLKTDAFFETSVAGVYAIGDVATFPLKLYNEQRRVEHVDHARKSAEQAVRAIKAKESGESVAEYDYLPYFYSRSFDLAWQFYGDNVGDDVLFGDNDPASAKPKFGSYWVKDGKVVGVFLEGGSAEENQAIARVARAQPPVADVQALKQEGIDFASKI

SEQ ID NO: 178192 - protein, 414 aa, Zea Mays
MARHFKYVILGGGLAIISKEPVAPYERPALSKGYLFPQNAARLPGFHTCVGSGGERLLPEWYSEKGIELILSTEIVKADLASKTLTSAAAETFTYETLLIATGSSVIKLTDFGVQGAESNNILYLRDIADADKLVAAMQAKKGGKAVIVGGGYIGLELSAALKINNFDVTMVYPEPWCMPRLFTAGIAHFYEGYYANKGIKVVKGTVAVGFDADANGDVTTVKLKNGSVLEADIVIVGVGGRPLTRLFIGQAADEKGGLKTDAFFETSVAGVYAIGDVATFPLKLYNEQRRVEHVDHARKSAEQAVRAIKAKESGESVAEYDYLPYFYSRSFDLAWQFYGDNVGDDVLFGDNDPASAKPKFGSYWVKDGKVVGVFLEGGSAEENQAIARVARAQPPVADVQALKQEGIDFASKI

SEQ ID NO: 178193 - protein, 292 aa, Zea Mays
MEKFKIESDQSVFYSLLHALCKIKNIEDAEELLFLRKKFFPLTAEGFNIILDGWCNVITDVAEAKRVWREMSNHCITPDGMSYTLMISCFSKVGNLFDTLRVYDEMKKRGWIPGIVVYNSLVYVLTRENCVKDAHNIFSKLTDEGLQPDVETYNNMIVPLCESCKLDEARKKMKEDGCGPKSDTFVMLIDKFFLLNESGNALRVWNEMRKYEISPVRAHYMTLVQGLVKHGCIPRALEYYDEMKEKGFASDTQLDKEFKTFLLKNRDHWRGAGKYNIIPQRGKYFTKQSRMQ

SEQ ID NO: 178194 - protein, 487 aa, Zea Mays
MAPPLAAALRPHLSRLGQTLSSRLLRLSTSHCPSDQSDFEPDPDHPILSAPDNDDGELASFLHHLSSAASNTSSPKEALSFLLSMSTGPLPASHALLVRALWDLRRDPDAAALALRYGDECSAVDGTDGAGLPPPPEAWHLAVWAAGKARRFDLAWEIVRRMRNRGVLTCRVMVILMERYAAASEVNKAIKTFDVMEKFKIESDQSVFYSLLHALCKIKNIEDAEELLFLRKKFFPLTAEGFNIILDGWCNVITDVAEAKRVWREMSNHCITPDGMSYTLMISCFSKVGNLFDTLRVYDEMKKRGWIPGIVVYNSLVYVLTRENCVKDAHNIFSKLTDEGLQPDVETYNNMIVPLCESCKLDEARKKMKEDGCGPKSDTFVMLIDKFFLLNESGNALRVWNEMRKYEISPVRAHYMTLVQGLVKHGCIPRALEYYDEMKEKGFASDTQLDKEFKTFLLKNRDHWRGAGKYNIIPQRGKYFTKQSRMQ

SEQ ID NO: 178195 - protein, 429 aa, Zea Mays
MALLAVDDEAAAAGVLHVAKRALDVDVGADGKRVEVLGHEAAVGELGVLVLEVDLDEEVEVADLVHHARGRVRPHTQLPFNTGADEDVLADGEAEHLVGRRQREAEEADVAGQLLLADEAAVDLFARVGERGSPDGLADGREVRQDGAAVDGVVGAVAGARGDELADAVGVEERLGLVGVDGVELLGAVGTGVDEDAVGAARVVLEELGAVVDVAVHDDPRRLLRRVLAHLGHGELLADVGGVHERRGRAALEARRGRLRRLQVLLPRHPPAGLVAGLRRVLEHQPDLALVRTAHVHLHLEPAVVHHPLCHHQIYISSGAETETYSVLILCASIYMYHEVPYELLGLGVERLVPCAHGDLLGAEQVEDLHLDGPEAPAPVLAVLVGLLRVVEVAHQPCLAAVQRHLHPRHLLAAAYVYHKTTRKVVRLA

SEQ ID NO: 178196 - protein, 89 aa, Zea Mays
MEIVVPTRRHRRSSPLRVSNNIAYPSLVLVVDPSPCLDAGSYMTSPTCVHAKNPRRLGVEGNKSVRNRKILDVDGEGSEVRVVLTTCLK

SEQ ID NO: 178197 - protein, 160 aa, Zea Mays
MTCRGRVELRQIEDRVGWQVRFSKRCSGIFKKAFEFSLLCDVEVALIVFSPTGKLCERHHASLVLASLPRSLMYPSIVSSSLWPWAPSSPSFSLSSAHATLPEPRCRLPTACRCPLHVLVAPVNPALVIVIDNALAGGLAQPSPSCRAASTLLASSLHHA

SEQ ID NO: 178198 - protein, 159 aa, Zea Mays
MNGGLLVSSSSLRANNIIKTRRAYDMELHLVHESSANKAAVIGMLYEIGAEDPFLQALEPSIHRIADRQDREEAIGVVDPRRARGRASVYYRYVGSLTTPPCTEGVIWTVVKRVRTVSRHQLELLREAVHDGMEKNARPVQDVNDRDISIFRPKPHKHY

SEQ ID NO: 178199 - protein, 129 aa, Zea Mays
MSVVWTNEMHLCLRLIFYAHNFIYSICLYTSARQCKRHGHNFADHAGEQRGRKGEEETARATHHMAPLTSSTPTTTSRRSPSWGCCGMVTTSTYSSKYCCRLAKRSWFWKLVRRFYNALALNLVSWVKQ

SEQ ID NO: 178200 - protein, 108 aa, Zea Mays
MSVVWTNEMHLCLRLIFYAHNFIYSICLYTSARQCKRHGHNFADHAGEQRGRKGEEETARATHHMAPLTSSTPTTTSRRSPSWGCCGMVTTSTYSSKVGKEKLVLEIG

SEQ ID NO: 178201 - protein, 120 aa, Zea Mays
MSVVWTNEMHLCLRLIFYAHNFIYSICLYTSARQCKRHGHNFADHAGEQRGRKGEEETARATHHMAPLTSSTPTTTSRRSPSWGCCGMVTTSTYSSKFQDWYCLRRLTFPTQPPIAYSNQ

SEQ ID NO: 178202 - protein, 242 aa, Zea Mays
MSFGLSDGGGTVEGGLSGGGGGGRCGGEYWQLETQPAGSAPPNEPANSLGGRFPQMQVNDSGELDLDGGGTLRGGGVAFCPCVPGSARVVTDPLASSLFGGREEFCASFDLGAKVPGDGYFSNMILDENVEGDFDINSNTCPDNQSQSRQVGPTAPTSRPNHKRSKNFSDQEDEVLVSAWLNISMDHVVGKDQKVGRYWSRIYEYFNEHKPCQSQRTVNSLMHRWETIQKCVNKFCGCLSRI

SEQ ID NO: 178203 - protein, 119 aa, Zea Mays
MPLFSNLHYSPDYFEDPHKFDPSRFKVAPRPGTFLPFGSGVHACPGNDLAKLEMLVLIHRLVTTYRWEVVGSSDDVTYSPFPVPKRGLLARLSRATTGSAVVGRAPPLDIGGPAGASYS

SEQ ID NO: 178204 - protein, 406 aa, Zea Mays
MVLVSQAHLFKPTYPPSKERMIGAQALFFHQGDYHLRLRRLVKGWLGPDALRGLVPDVEAAVASTLDGWEGRVTSTFHTMKRLTFDVGVIAIFGHRLAGHVKEELRRNYFTMEKGYNSFPIPVACTSYSQAIKARQRLGAVLSGILAERRARRSDDDDDHGLLNALMRSRDDSGAAPPLSDDQIADNVIGVLFAAQDTTASVLTWILKFLHDNPKLLEAVKVEQMAAYEENDGGRLPLTWAQTRKMSITHLVILESLRLASIIAFTFREAVEDVHYQGFLIPKGWKVMPLFSNLHYSPDYFEDPHKFDPSRFKVAPRPGTFLPFGSGVHACPGNDLAKLEMLVLIHRLVTTYRWEVVGSSDDVTYSPFPVPKRGLLARLSRATTGSAVVGRAPPLDIGGPAGASYS

SEQ ID NO: 178205 - protein, 344 aa, Zea Mays
MAKLVGTANVLCESLNTFVSNTLFLLFFVFLDLLPFFGAQSAILALDDTVLDADQVENLIKFTPTKDEIELLKGYKGDKQVLGECEQFFMELMKLPRVESKLRVFSFKIQFRSQVSDLKRNLNIVNSSAEEIRGSVKLKRIMQTILSLGNALNQGTARGSAVGFRLDSLLKLSDTRARNNKMTLMHYLSKTLKDFLIGAEAEVRSLTSLYSNVGRNADALALYFGEDPARCPFEQVVTTLQNFVRLFTRSHEENCKQLDLEKKKALKEAEDNSKQLDLEKKKTQKEAETEKIKKKSDSEKACKKELENDKSSKKDSANEKGKLNNPIKELDISLQSPAQTASAK

SEQ ID NO: 178206 - protein, 1032 aa, Zea Mays
MMFRVMFNTAFIRSNILMLNRDEIDILWDAKDRFPKEFRAEVLLSEMDTANQLGPMEVAGIGEKGGLPVEAFAKVQEMFSNVDWLDPTGDAAVQLFQRLTSSENIQLRQGFLSPSKKEAESLELGSISPIDKHFDNVQQEPSKVEHPTVYVNKLENVGQERLVLLEQTTNSEVKTGISVVQENPGSLVHKVDSNAKQSISLEKAVPSTMKSIDPVLKDQNAKLDEQHGSGQHSFPTIIMSQRFPISSSCPALSGYSSPRLLSACPRFNSAPSALGITALLEDHAGSAENRCGSTTLTFDTTGTPVVTKGMPLLRPPPSPLDLLVSDSTMMSEAKGSSQPTLNNSGLPSHPERQLTFQSLGTTTPATNHQKSSTTVTIELLPTSAPPPPPLPPPSSVFSSRIYHLPPSPTSFRSPAPAAPQPPPVPPPPPPMPRPFPVRSHAPQPLTPQPPALSSSLILSGTPQSPPSPPPSRCSLSKPPAPPPPPPPPPLLASTSSTIRPAASHLPLFASTSSPVRPAAPPPPPAPTSSPIRASALPPPPPPGTSSSPRPPPPPCYSSKQSSSPMGKSMPSPPVPPPPSHGGRNGASGNIVPPPAPPGSNAKLFGPQGRGPAPPSGPMSKSFQSGQAVLRRSNLKPLHWVKVTRAMHGSLWAESQKPDETLKAPVFDMSELENLFSAALPSSDSRRSDKSGSRASGSKPEKIHLIDLRRANNCGIMLTKVKMPLPDLMSAILALDDTVLDADQVENLIKFTPTKDEIELLKGYKGDKQVLGECEQFFMELMKLPRVESKLRVFSFKIQFRSQVSDLKRNLNIVNSSAEEIRGSVKLKRIMQTILSLGNALNQGTARGSAVGFRLDSLLKLSDTRARNNKMTLMHYLSKTLKDFLIGAEAEVRSLTSLYSNVGRNADALALYFGEDPARCPFEQVVTTLQNFVRLFTRSHEENCKQLDLEKKKALKEAEDNSKQLDLEKKKTQKEAETEKIKKKSDSEKACKKELENDKSSKKDSANEKGKLNNPIKELDISLQSPAQTASAK

SEQ ID NO: 178207 - protein, 1197 aa, Zea Mays
MALFRKFFYRKPPDGLLEITERVYVFDSCFTTDVFDDDKYRDYIGDIVAQLQSHFADASFMVFNFRDGDSQSLLANILSSYDMVVMDYPRQYEGCPLLTIEMIHHYLRSGESWLSLGQQNVLIMHCERGGWAVLAFMLAGLLLYRKQFIGEQRTLEMIYRQAPHELVQLWSPLNPMPSQIRYLHYISRRNVSSEWPPQDRALTLDCVILRNIPGFNEEGGCRPIFRIYGQDPLPATNNTPKVLFATPKRSKYVRLYKKADCELIKIDIHCHIQGDVVLECISIDVDQEREEMMFRVMFNTAFIRSNILMLNRDEIDILWDAKDRFPKEFRAEVLLSEMDTANQLGPMEVAGIGEKGGLPVEAFAKVQEMFSNVDWLDPTGDAAVQLFQRLTSSENIQLRQGFLSPSKKEAESLELGSISPIDKHFDNVQQEPSKVEHPTVYVNKLENVGQERLVLLEQTTNSEVKTGISVVQENPGSLVHKVDSNAKQSISLEKAVPSTMKSIDPVLKDQNAKLDEQHGSGQHSFPTIIMSQRFPISSSCPALSGYSSPRLLSACPRFNSAPSALGITALLEDHAGSAENRCGSTTLTFDTTGTPVVTKGMPLLRPPPSPLDLLVSDSTMMSEAKGSSQPTLNNSGLPSHPERQLTFQSLGTTTPATNHQKSSTTVTIELLPTSAPPPPPLPPPSSVFSSRIYHLPPSPTSFRSPAPAAPQPPPVPPPPPPMPRPFPVRSHAPQPLTPQPPALSSSLILSGTPQSPPSPPPSRCSLSKPPAPPPPPPPPPLLASTSSTIRPAASHLPLFASTSSPVRPAAPPPPPAPTSSPIRASALPPPPPPGTSSSPRPPPPPCYSSKQSSSPMGKSMPSPPVPPPPSHGGRNGASGNIVPPPAPPGSNAKLFGPQGRGPAPPSGPMSKSFQSGQAVLRRSNLKPLHWVKVTRAMHGSLWAESQKPDETLKAPVFDMSELENLFSAALPSSDSRRSDKSGSRASGSKPEKIHLIDLRRANNCGIMLTKVKMPLPDLMSAILALDDTVLDADQVENLIKFTPTKDEIELLKGYKGDKQVLGECEQFFMELMKLPRVESKLRVFSFKIQFRSQVSDLKRNLNIVNSSAEEIRGSVKLKRIMQTILSLGNALNQGTARGSAVGFRLDSLLKLSDTRARNNKMTLMHYLSKVLSEKLPELLDFPKDLSSLELAAKFLEN

SEQ ID NO: 178208 - protein, 1179 aa, Zea Mays
MALFRKFFYRKPPDGLLEITERVYVFDSCFTTDVFDDDKYRDYIGDIVAQLQSHFADASFMVFNFRDGDSQSLLANILSSYDMVVMDYPRQYEGCPLLTIEMIHHYLRSGESWLSLGQQNVLIMHCERGGWAVLAFMLAGLLLYRKQFIGEQRTLEMIYRQAPHELVQLWSPLNPMPSQIRYLHYISRRNVSSEWPPQDRALTLDCVILRNIPGFNEEGGCRPIFRIYGQDPLPATNNTPKVLFATPKRSKYVRLYKKADCELIKIDIHCHIQGDVVLECISIDVDQEREEMMFRVMFNTAFIRSNILMLNRDEIDILWDAKDRFPKEFRAEVLLSEMDTANQLGPMEVAGIGEKGGLPVEAFAKVQEMFSNVDWLDPTGDAAVQLFQRLTSSENIQLRQGFLSPSKKEAESLELGSISPIDKHFDNVQQEPSKVEHPTVYVNKLENVGQERLVLLEQTTNSEVKTGISVVQENPGSLVHKVDSNAKQSISLEKAVPSTMKSIDPVLKDQNAKLDEQHGSGQHSFPTIIMSQRFPISSSCPALSGYSSPRLLSACPRFNSAPSALGITALLEDHAGSAENRCGSTTLTFDTTGTPVVTKGMPLLRPPPSPLDLLVSDSTMMSEAKGSSQPTLNNSGLPSHPERQLTFQSLGTTTPATNHQKSSTTVTIELLPTSAPPPPPLPPPSSVFSSRIYHLPPSPTSFRSPAPAAPQPPPVPPPPPPMPRPFPVRSHAPQPLTPQPPALSSSLILSGTPQSPPSPPPSRCSLSKPPAPPPPPPPPPLLASTSSTIRPAASHLPLFASTSSPVRPAAPPPPPAPTSSPIRASALPPPPPPGTSSSPRPPPPPCYSSKQSSSPMGKSMPSPPVPPPPSHGGRNGASGNIVPPPAPPGSNAKLFGPQGRGPAPPSGPMSKSFQSGQAVLRRSNLKPLHWVKVTRAMHGSLWAESQKPDETLKAPVFDMSELENLFSAALPSSDSRRSDKSGSRASGSKPEKIHLIDLRRANNCGIMLTKVKMPLPDLMSAILALDDTVLDADQVENLIKFTPTKDEIELLKGYKGDKQVLGECEQFFMELMKLPRVESKLRVFSFKIQFRSQVSDLKRNLNIVNSSAEEIRGSVKLKRIMQTILSLGNALNQGTARGSAVGFRLDSLLKLSDTRARNNKMTLMHYLSKVCFLRNFQNF

SEQ ID NO: 178209 - protein, 1140 aa, Zea Mays
MALFRKFFYRKPPDGLLEITERVYVFDSCFTTDVFDDDKYRDYIGDIVAQLQSHFADASFMVFNFRDGDSQSLLANILSSYDMVVMDYPRQYEGCPLLTIEMIHHYLRSGESWLSLGQQNVLIMHCERGGWAVLAFMLAGLLLYRKQFIGEQRTLEMIYRQAPHELVQLWSPLNPMPSQIRYLHYISRRNVSSEWPPQDRALTLDCVILRNIPGFNEEGGCRPIFRIYGQDPLPATNNTPKVLFATPKRSKYVRLYKKADCELIKIDIHCHIQGDVVLECISIDVDQEREEMMFRVMFNTAFIRSNILMLNRDEIDILWDAKDRFPKEFRAEVLLSEMDTANQLGPMEVAGIGEKGGLPVEAFAKVQEMFSNVDWLDPTGDAAVQLFQRLTSSENIQLRQGFLSPSKKEAESLELGSISPIDKHFDNVQQEPSKVEHPTVYVNKLENVGQERLVLLEQTTNSEVKTGISVVQENPGSLVHKVDSNAKQSISLEKAVPSTMKSIDPVLKDQNAKLDEQHGSGQHSFPTIIMSQRFPISSSCPALSGYSSPRLLSACPRFNSAPSALGITALLEDHAGSAENRCGSTTLTFDTTGTPVVTKGMPLLRPPPSPLDLLVSDSTMMSEAKGSSQPTLNNSGLPSHPERQLTFQSLGTTTPATNHQKSSTTVTIELLPTSAPPPPPLPPPSSVFSSRIYHLPPSPTSFRSPAPAAPQPPPVPPPPPPMPRPFPVRSHAPQPLTPQPPALSSSLILSGTPQSPPSPPPSRCSLSKPPAPPPPPPPPPLLASTSSTIRPAASHLPLFASTSSPVRPAAPPPPPAPTSSPIRASALPPPPPPGTSSSPRPPPPPCYSSKQSSSPMGKSMPSPPVPPPPSHGGRNGASGNIVPPPAPPGSNAKLFGPQGRGPAPPSGPMSKSFQSGQAVLRRSNLKPLHWVKVTRAMHGSLWAESQKPDETLKAPVFDMSELENLFSAALPSSDSRRSDKSGSRASGSKPEKIHLIDLRRANNCGIMLTKVKMPLPDLMSAILALDDTVLDADQVENLIKFTPTKDEIELLKGYKGDKQVLGECEQFFMELMKLPRVESKLRVFSFKIQFRSQVSDLKRNLNIVNSSAEEIRGSVKLKRIMQTILSLGNALNQGTARGVP

SEQ ID NO: 178210 - protein, 399 aa, Zea Mays
MFGIQTRDVAEDFNSWRRTLRNTPTVSMPMNNHNIMYNTGKSLFNVHLMSVKFEDLYGFMVEGNVDDVNVLNEVRERIREQGRVWWALEASKGANWYLQPKISSNEGVISVTSLKLSVLTNTITLRRLIRKGVPPVLRPKIWLSVSGAAKKRSTVPETYYDELIRATEGKTTPATRQIDHDLPRTFPCHPWLNSDKGQASLRRVLVGYSFRDSEVGYCQTEEDAFWMLAVLLENVLVSDCYTDTLSGCHVEQRVFKDLLAKKCPRIAAHLEAMGFDVSLVATEWFLCLFSKSLPSETTLRVWDILFNEGANVLFRVALAIFKMREDDLLRIQHIGDVIDILQTTTHHLYDPDELLTFAFDKIGSMPTNTITKERKKQETVVLAELDQRTRRLSSLKMDG

SEQ ID NO: 178211 - protein, 461 aa, Zea Mays
MDMALASKASPPPWNATAAEQPIPKRDKAAANDSTYLNPQAHDSVLGIILGGGAGTRLYPLTKKRAKPAVPLGANYRLIDIPVSNCLNSNISKIYVLTQFNSASLNRHLSRAYGSNIGGYKNEGFVEVLAAQQSPDNPNWFQGTADAVRQYLWLFEEHNVMEFLILAGDHLYRMDYEKFIQAHRETNADITVAALPMDEKRATAFGLMKIDEEGRIIEFAEKPKGEQLKAMMVDTTILGLDDVRAKEMPYIASMGIYVFSKDVMLQLLREQFPEANDFGSEVIPGATSIGKRVQAYLYDGYWEDIGTIAAFYNANLGITKKPIPDFSFYDRFAPIYTQPRHLPPSKVLDADVTDSVIGEGCVIKNCKINHSVVGLRSCISEGAIIEDSLLMGADYYEKLIKNSLPKKVAFLLVLGKIHASGEQSLTRMLELETMLRYSMLTMFKKLQWRQTGTSSKVELSQ

SEQ ID NO: 178212 - protein, 281 aa, Zea Mays
MASSATYLMLASAHAPLAPLIRPPPMALVARTAATSITRRERASVPLLVNPAACRPGLRRRGWAHICRDSSLQGPSGADSPAQEQEDLKKSEAVSEAAARIAGGTGGTLSDWSTSVLIFGIWAGLMYYVFLLAPNQTPYRDTYFLQKLLNLKGDDGFRMNDVLVSLWYIMGLWPLVYSMLLLPTGRSSKSKIPVWPFLVLSCIGGAYALIPYFVLWKPPPPPIDEDEIGQWPLKFLESKLTAGLVFALGIGLIIYAGKAGGDDWKEFIRYFRESKFVSYAT

SEQ ID NO: 178213 - protein, 379 aa, Zea Mays
MKLKTDSCGIGSGQESFFFSFSDFSVTIGHTMIIFSATLSGYYRDRYFYWLHFCHVVRLMAMEGPVLCRPAMQAKSPAAALVNNSLTRFGQLGTISKYRNVSRFISPISQPSTKNIGPCCSFSSSSDGNGYMAGNFSDSDEDYVNSTVLEAVEVRSGSEGYVIKMRDGKNLRCVHNNSQGRNIPESAPQPAIVLRIEDGSETLLPIIVLEMPSVLLMAAIRNVHIARPTIYQVVKEMIDKMGYEVKLVRVNKRIQEAYCAELCLTKIDDSTDSITFDLRPSDAINIAVRCKVPVQVHRSLAYSDGIRPVEPARMAVAAGLSDGLLFTELDRPDGQASVEAQEFGLVKNMLIAAVEERYKDAASWKDKLMRLRSKRKNWA

SEQ ID NO: 178214 - protein, 151 aa, Zea Mays
MAMEGPVLCRPAMQAKSPAAALVNNSLTRFGQLGTISKYRNVSRFISPISQPSTKNIGPCCSFSSSSDGNGYMAGNFSDSDEDYVNSTVLEAVEVRSGSEGYVIKMRDGKNLRCVHNNSQGRNIPESAPQPAIVLRIEDGSETLLPIIVCT

SEQ ID NO: 178215 - protein, 189 aa, Zea Mays
MWRLSLAAGEGAAGEGAGAGMGVGVEEGVDQTDEESSLSSPSEGVGPIEVVRGVGAISRTGSSTSSSCCCCSSSDGGTPETRLGFGGASAVAGVAMGRAKVENALLPPRHRPTPRPLASLPDPHRHRRVLLFLLRGSDRRLHLRLRRRGSGGRGGYKQRRSGGGGLRGVRHLPRQDSAPGDSPRQGLRE

SEQ ID NO: 178216 - protein, 587 aa, Zea Mays
MESIMKAERSKAAAAAQRRPLAPSEKNNAAAPAGRRTESPSRFKPVSVSPAAPAARRCGSPSPGPASADGGSATCNGARSAAAPSPAPSSRLKPSAAARSASAVSPRDAAADGHGTPPRARKGKDSDRPWASARSSCSSPLLRPEAEHGQSPATASKVDRLVRGLPSEPVVRLRPGAVAERKTSTSPRPRGRSTSKNNTGDQSQHENARPPESPANSVALADKHWWPGMMAGLSSTTAASAEKASRSDASSSSDASAGRSPPRRTRPCEGAATGKSVKRGPSNETAQIVHRRRKDKAADSSSDASSQMSESSKPTCRPIKQAVSLPVPALRRSSSTTSRSCQTPSRMRPSAAACQSKCASSAARTVVEQPAFSYIIADARKGKKNACQIENVHQLRLLSSRYLQWRFVNAHSEETLSHRNSVESVLYNVWESISTLRDAMAITRDSVRHLQQQVKLYHILTEQICYLEQWPALEEECNGTLVEATEALKASTLRLPVTSGAQADGIAVRNAISSAVDVMQALSSSIYYVQSKVEDRTCLVSGLSATAREENVALDQCRELLATAAKLQVQETSLRTLLMQLRQRSAG

SEQ ID NO: 178217 - protein, 83 aa, Zea Mays
MGKWLINLDQALSRQSRPSVLIKDRTVDWPVVVETLQLATYPGMGQGKLEPGYSIREETIAHWEWRDGGSSMYPPGIVARLVG

SEQ ID NO: 178218 - protein, 72 aa, Zea Mays
MERLHPSNYFNQLCTLGTIKTCNNYNSSYVVKLELWKCKIYFVKPSALSLKCVCIKCDYCNVHVMWEILGMM

SEQ ID NO: 178219 - protein, 54 aa, Zea Mays
MRRHRNDYTQALAIRTLSAFIINTINKTTIFYLFTQHKYDITGTRIYLIATTLH

SEQ ID NO: 178220 - protein, 52 aa, Zea Mays
MSKKHFFYPKVGNVSWVWSPEVLVIISLSTEACFMNLRRLVFRKRQKNANCT

SEQ ID NO: 178221 - protein, 199 aa, Zea Mays
MVGASLYGSRRSKSTAIVDQMYNDRNIFNDPEARGNLLGYQLEVANLVKSDIQYIGENRLQAQHPSVPLPCSVVQLRYYYILCGMGRSQWKDFVAVRFSKTTTINWEYFGLSIEPNGHCDNFFIAGFCQKHFEDVHPRMSKKHFFYPKVGNVSWVWSPGMVLGHGSFFLYVSPGLQNVSWVWSPGMVLGHGSFFVRLYH

SEQ ID NO: 178222 - protein, 184 aa, Zea Mays
MVGASLYGSRRSKSTAIVDQMYNDRNIFNDPEARGNLLGYQLEVANLVKSDIQYIGENRLQAQHPSVPLPCSVVQLRYYYILCGMGRSQWKDFVAVRFSKTTTINWEYFGLSIEPNGHCDNFFIAGFCQKHFEDVHPRMSKKHFFYPKVGNVSWVWSPGMVLGHGSFFLYVSPGLLRVHCHWFL

SEQ ID NO: 178223 - protein, 91 aa, Zea Mays
MKRQSRTGSGEMTRVTRTLLAKDRLKGVVCSRVARTCSCDGGSVGMVDMCKRVKGSICRVVGDPQLGINRFGSPNFSDMKTRSLTFSVDNK

SEQ ID NO: 178224 - protein, 54 aa, Zea Mays
MAGAGSLRAWARSASIRARARSAGTTRVGHDGVWEPAGVSEIHVPTWCWRRGRV

SEQ ID NO: 178225 - protein, 104 aa, Zea Mays
MATTSSRGDISTAKNTASHPRSRADEQSDLLELTTEAAQGIGTMRVHQSGRQRQQEAEEPGVKNQDRGEVGKRNGVTRTRMESVGCKPVEAKRTRVVPTKANIS

SEQ ID NO: 178226 - protein, 62 aa, Zea Mays
MMMATVLQSSILFPFLQNRELITETMFKHIKFCVPELRSLWVLIYIFIFFITMISTELCLFI

SEQ ID NO: 178227 - protein, 624 aa, Zea Mays
MDLSHNSLSGNIPSSFSRCVKIAEINWSENNIFGAIPPEIGKLVNLKRLDLSHNLLHGSIPVQISSCSKLYSLDLGFNSLNGSALSTVSSLKFLTQLRLQENRFSGGLPDPFSQLEMLIELQLGGNILGGSIPSSLGQLVKLGTTLNLSSNGLVGDIPSQFGNLVELQNLDLSFNNLTGGLATLRSLRFLQALNVSYNQFSGPVPDNLVKFLSSTTNSFDGNPGLCISCSTSDSSCMGANVLKPCGGSKKRAVHGRFKIVLIVLGSLFVGAVLVLILWCILLKSRDQKKNSEEAVSHMFEGSSSKLNEVIEATECFDDKYIIGKGGHGTVYKATLRSGDVYAIKKLVISAHKGSYKSMVGELKTLGKIKHRNLIKLKESWLRNDNGFILYDFMEKGSLHDVLHVVQPAPALDWCVRYDIALGTAHGLAYLHDDCRPAIIHRDIKPSNILLDKDMVPHISDFGIAKLLEQPSTAPQTTGVVGTIGYMAPELAFSTKSSMESDVYSYGVVLLELLTRRAAVDPSFPDGTDIVSWASSALNGTDKIEAVCDPALMEEVFGTVEMEEVSKVLSVALRCAAREASQRPSMTAVVKELTDARPATGGGRSLSKSKQGKPGSQSNSSAYRQ

SEQ ID NO: 178228 - protein, 127 aa, Zea Mays
MESDVYSYGVVLLELLTRRAAVDPSFPDGTDIVSWASSALNGTDKIEAVCDPALMEEVFGTVEMEEVSKVLSVALRCAAREASQRPSMTAVVKELTDARPATGGGRSLSKSKQGKPGSQSNSSAYRQ

SEQ ID NO: 178229 - protein, 65 aa, Zea Mays
MFCAENTQCTLNTAIMFIMFCAENTQCALKIHTTKKCSCNTVLSKLASMLLFFFLIYHHNSVLDC

SEQ ID NO: 178230 - protein, 90 aa, Zea Mays
MKAGQEKLEFQIVVRVNQLNRINLIKSSNKKRFSPDLLFWAEPRGVIPLKFSDYINQVLRTHFGLSPSMLFNLPVHAHMYNWDSIFSFKL

SEQ ID NO: 178231 - protein, 60 aa, Zea Mays
MRLQSRLTPPPKSHLPPRAPAAFGHRYAAPALQSSRPGEAGIPNRSPCEPVEPHQSYQVI

SEQ ID NO: 178232 - protein, 418 aa, Zea Mays
MEEPLRGDSSEKDVIDPWPVGNKESPNNVIEDSNQWQAFASMSGQARDFVISVERSSGHRLNLVRPDVVEETMSSISHQHSSEINPVDLWPVGNVEALNAAEMFKETNDYFGDWQDFTTTGQVQDTSLNQTGDMIEVRKATHKETDMDSWFIGNIREPANTGTMNENNMLDNRQGFTCSDQAHQTSSSPGAEMISVPLELHDVSVSVQSWANGSSKDAATPSSTNIESNTFNVRQDFAKSGHLQENISSLGRELSSVSPEPVEENDSLDLWLTSNFKESKCSDVVGRTNASSDGWQDFASFDHAQSSTKIPVEGHLIKILQGLKLWTYGPQLAASENLKDKKEASNEAKTSPSDDHLKSTNGMQQMDDVDSLSSLWPTNKPDPANTNVEQLLAQMHDLSFMLKDELSAPDKLIDRSKS

SEQ ID NO: 178233 - protein, 119 aa, Zea Mays
MCSAVAAAHARVPSRSCARLLLDRDDVDRLRRLVCEETTLACSLQWWRAPRLCLSTHLWSAVVVLVHACALAFKAAVQWRLRRWRCCCGAAFQVHNGGWQGAKASRWRYDERWSRLARS

SEQ ID NO: 178234 - protein, 162 aa, Zea Mays
MSAIRVRSASRPSVRRSTNVPHRLKPAIRGTCLSTNHAHLSRPIISASPQATIPNYGNSSARISSQSIPPPNPNSKSPRIDGAQGREEARGEEAGGGGARCREGAGREEAQGGEACPSRQVRRQGGRRGKEGPEEGQEERGDLQDLHLQGAEAGAPGHRHLL

SEQ ID NO: 178235 - protein, 900 aa, Zea Mays
MPRPSSRAKAASPPEAVAGASQRTPAPSPSTSLRLGIGPVASDDNRGAGSLDLKQPAAGPRRHSLRLMGAALGLGLGPVSHHDDCGAGCPNLSPPAAVPPRRSLRLAGPALGTPNTLSARDGSSSGFGSGGSEKRSGRARARVPASSLATSISPRTGNSNSDGGGSGADRVSASGDSSGGSDPFTTLRSGFRIAKRRMEAGGEAETGSSRRGQVHNEMLHQHVDTPTKRCKTILVGGVETEHVSDTKGDSDEDCMMLGPSGTELNYVATKTEKGDVDDPANASNGESLQTHNLLPAANGGVVEQLVYASGSPASFEAQVSADMCLKEGSSQCSSRKEGKVKEKLVLGNNKSCAYANVGSAVDTCSHKFNPDSKGKEKMVAEDSLSSLTSSEDEPDFDPVDSKETQLNSGSVSASMESYRRQTVKERAIKLAPKFAFFKADKDEHSEDDDEELEPGPDTEDWPGPFATAARIYEEREAKLRARELNSLKLDESANRVIRWSPSKDRKNLVQAQVAPSLTSVCLNTLAEHSEWIQSLEGVPEELKHKLLKILCDSRKMNTHLLNKLLCDSPTELHLSECSWLSEDDFEKTFGKCSTESLQLDISGRCIPDYILPTTLAKVPNCMPLLRKISLKGNYRLSDNGLVTIISAAPSLCSLNLCECSLLTSSGIDILANKLCSVLRELYIDDCTNVDAMTILPSLQKIKHLEVLSMSRIQSVCDKFVKGLIPVHGLNLKELAFAGCLKLTSSSIKTIGEYCQKITSLDLCNLNRLRDSAMMHLRGCRLIRKLKLQRNAFSDEAVSQYLEASGGCLTELMLNNVEVGDLTALAISRKCYVSLEALDLSFCRELTDEALGLIVDSCPSLRILKLFGCTQVTDLFLKGHSNTSVKIVGIGGSILVQMDSR

SEQ ID NO: 178236 - protein, 92 aa, Zea Mays
MAMFARPLLATLLLLPAFLLSAASAADSKSNPADELVALINSNRTAGKASSVSDNQGLGCIALQYIKAYEGHNPLQDHRKAGGLPVPVLGSS

SEQ ID NO: 178237 - protein, 352 aa, Zea Mays
MASTDRSAPAEDQQQPQRPSLFSPYQMPHFRLAHRFPRVPGIYNQEQTDAWKKVVDAVHAKGAIFFCQLWHVGRASHQVYQPGGSAPISSTDKPISSRWRILMPDGSYGKYPTPRRLATSEIPEIVEQYRQAAINAIKAGFDGIEIHGAHGYLIDQFLKDGINDRADEYGGSLSNRCRFLLEVTRAVVSAIGADRVAVRVSPAIDHLDAYDSNPLQLGLAVVDRLNALQEETGRLAYLHVTQPRYTAYGQTESGQHGSAEEESRLMRALRGAYRGTFMCSGGYTRELGVEAVESWDADLVSYGRLFIANPDLVERFRRDAPLNRYVRKTFYTPDPVVGYTDYPFLGQPKARM

SEQ ID NO: 178238 - protein, 60 aa, Zea Mays
MEEQRQESTKSDDENKANDGDPSSNETEPSNGKTDINDTPMDESQMRMVEILVKTAVEQT

SEQ ID NO: 178239 - protein, 297 aa, Zea Mays
MASAARLLAPISRRGVVSVALAGVERRRPEAASLLGAPVLATVEACASIKVIPLSNQLARYSTTAFQRFGFSTSAPQQDDKETNKHTDDGVNRSVGASTGASSEANNVPGTEKAQEAGSLDSISKSNRKRTAKRTAFSDSDSEDLDLSKEDLVKLLLEKDESLKSKDEEFKDMKDKVLRSYAEMENVLARTKRESENTKKYAIQSFSKSLLDVADNLSRASSVVKVFKKFGVEKFDPLNEKFDPNRHYAIFQIPDPSKPSGTVAAVVKVGYMLHDRVLRPAEVGVTEGGPTEEEPEE

SEQ ID NO: 178240 - protein, 1201 aa, Zea Mays
MGAARTAAPVFMLLLLLHLSPRAVAAGTGDEAAALLAFKRASVAADQAGRLASWAEPNSTSGSASPCEWAGVSCVGGHVRALDLSGMSLVGRLHLDELLALPALRSVLLGGNAFHGDLTHRAPPRCALVDVDLSSNALNGTLPRAFLASCSSLRLLNLSGNTFTGGGGFPFASSLRTLDVSRNELSDAGLLNYSLSACHGIRHLNLSANQLTGELPPRFAQCSQVSVLDLSGNLMSGALPGRLLATAPASLTRLSIAGNNFSGDISRYQFGGCANLSVLDLSYNRLSATIGLPPSLANCHHLRELDMSGNKILSGRVPEFLGGFRALRRLGLAGNNFTEEIPDELSLLCGTLVQLDLSSNQLVGGLPASFSGCRSLEVLDLGSNQLSGDFVITVISKISSLRVLRLPFNNITGTNPLPTLAAGCPLLEVIDLGSNMLEGEIMPELCSSLPSLRKLLLPNNYINGTVPPSLGNCSNLESLDLSFNLMVGPITPEVLLLPKLVDLVMWANSLSGEIPDTLCSNSTALKTLVISYNNITGVIPVSITRCVNLIWLSLAGNSMTGSVPAGFGNLQKLAILQLHRNSLSGPVPAELGRCSNLIWLDLNSNNFSGAIPPQLAAQAGLITGGMVSGKQFAFLRNEAGNICPGAGVLFEFFDIRPERLAQFPAVHSCASTRIYTGMTVYTFNQSGSMIFLDLSYNSLTGTIPASLGNMTYLDVLNLGHNDLTGAIPDAFTGLKAIGVLDLSHNHLTGVIPAGLGCLNFLADFDVSNNNLTGEIPTSGQLSTFPASRFENNSGICGIPLDPCTHNASTGGVPQNPSNVRRKFLEEFVLLAVSLTVLMVATLVVTAYKLRRPRGSKTEEIQTAGYSDSPASSTSTSWKLSGSKEPLSINLAIFENPLRKLTYAHLHEATNGFSSEALVGTGGFGEVYKARLMDGSVVAVKKLMHFTGQGDREFTAEMETIGKIKHRNLVPLLGYCKVGDERLLVYEYMNNGSLDVLLHERDKTDVGLDWATRKKIAVGSARGLAFLHHSCIPHIIHRDMKSSNVLLDDNLDAYVSDFGMARLVNAVDSHLTVSKLLGTPGYVAPEYFQSVICTTKGDVYSYGVVLLELLSGKKPINPTEFGDNNLIDWAKQMVKEDRCSEIFDPILTDTKSCESELYQYLAIACQCLDDQPSRRPTMIQVVLGWWDEAGWAVDSEWKLLAK

SEQ ID NO: 178241 - protein, 83 aa, Zea Mays
MEAAGEVSSGRTNILCILHAITYLNLFLTASSKARGVWQIKSLAEDLIYPRSYLADRQQVLPYFPQKRQGDETSLSDHHACLR

SEQ ID NO: 178242 - protein, 315 aa, Zea Mays
MSLLGQRRHLLLGRPRLMGSRNRSATIAMLAVDFVLPLDDVPAEVEGFFGSLMGHEGAPVGGVVAVPLEVVKRKRVPPWMIGWKEGSLAFARMCSWREYLPGTRRNSLCQHVIVASKAKNSRDQRLNVLYANNLRVEVDGCGFMEKHDILDGLVETVMNAWGLGLGCCVHGRWWFMLLCCCGGFMLGVLGAGEQLLPAALVACVSFSLNLQLATVRRSRSSASTFYLVAAAAAVVENGTTLSLADARWCVHGKRAAVLKENMNIDLRVMGIAGSRTMLLSDIGVDLTQWKEKLQTEAEPANLEQIQVLHLTIMIG

SEQ ID NO: 178243 - protein, 252 aa, Zea Mays
MTVSFHKYGDFFPGTGHITDVGAAEGKHYALNVPLSDGIDDTTFRGLFQCIIKKVMEVYQPDVVVLQCGADSLAGDRLGCFNLSVKGHADCLRFLRSYNVPMMVLGGGGYTIRNVARCWCYETAVAVGVEPDNKLPYNDYYEYFGPDYTLHIQPKSVENLNTTKDLENIKNMILENLSKIEHVPSTQFHDRPSDPEAPEEKEEDMDKRPPQRSRLWSGGAYDSDTEDPDSLKSEGKDVTANFQMKDEPKDDL

SEQ ID NO: 178244 - protein, 235 aa, Zea Mays
MTVSFHKYGDFFPGTGHITDVGAAEGKHYALNVPLSDGIDDTTFRGLFQCIIKKVMEVYQPDVVVLQCGADSLAGDRLGCFNLSVKGHADCLRFLRSYNVPMMVLGGGGYTIRNVARCWCYETAVAVGVEPDNKLPYNDYYEYFGPDYTLHIQPKSVENLNTTKDLENIKNMILENLSKIEHVPSTQFHDRPSDPEAPEEKEEDMDKRPPQRSRLWSGGAYDSDTEDPDSLKSEG

SEQ ID NO: 178245 - protein, 306 aa, Zea Mays
MAASGEGASLPSPAGGEDAHRRRVSYFYEPSIGDYYYGQGHPMKPHRIRMAHSLVVHYGLHRLLELSRPYPASEADIRRFHSDDYVAFLASATGNPGVLDPRAIKRFNVGEDCPVFDGLFPFCQASAGGSIGAAVKLNRGDADITVNWAGGLHHAKKSEASGFCYVNDIVLAILELLKFHRRVLYVDIDVHHGDGVEEAFFTTNRVMTVSFHKYGDFFPGTGHITDVGAAEGKHYALNVPLSDGIDDTTFRGLFQCIIKKVMEVYQPDVVVLQCGADSLAGDRWWRLHHQKCCTLLVLRDRSCCWS

SEQ ID NO: 178246 - protein, 79 aa, Zea Mays
MDVYRIGTLMELVRELSLSFADDGKRVKVCVQGSMGQGAFAGIPLQLAGTRKILEFMDWGDYGAKGTFINIGAVGVYVL

SEQ ID NO: 178247 - protein, 345 aa, Zea Mays
MPHDRREVHISTGDLLRAEVSSGTEIGKKAKEYMDNGKLVPDQVVTDMVVSRLSQPDIQERGWLLDGYPRSFSQAQHLENLKIRPNIFIVLEVPDDVLIDRCVGRRLDPVTGKIYHLKNYPPENEEISARLITRSDDTFEKVKSRLDTYKQNSEAILPTYSDLLNKIDGNCPAEVVFQAIDFLLQKICENTSASKLTKTNGKRPDSADTGSKNEWRGIPTRLNNIPHSREIREYFYNDVLKATKLAIEDKKTRLQIDINIPELNPEMDVYRIGTLMELVRELSLSFADDGKRVKVCVQGSMGQGAFAGIPLQLAGTRKILEFMDWGDYGAKGTFINIGAVGVYVL

SEQ ID NO: 178248 - protein, 328 aa, Zea Mays
MPHDRREEIGKKAKEYMDNGKLVPDQVVTDMVVSRLSQPDIQERGWLLDGYPRSFSQAQHLENLKIRPNIFIVLEVPDDVLIDRCVGRRLDPVTGKIYHLKNYPPENEEISARLITRSDDTFEKVKSRLDTYKQNSEAILPTYSDLLNKIDGNCPAEVVFQAIDFLLQKICENTSASKLTKTNGKRPDSADTGSKNEWRGIPTRLNNIPHSREIREYFYNDVLKATKLAIEDKKTRLQIDINIPELNPEMDVYRIGTLMELVRELSLSFADDGKRVKVCVQGSMGQGAFAGIPLQLAGTRKILEFMDWGDYGAKGTFINIGAVGVYVL

SEQ ID NO: 178249 - protein, 161 aa, Zea Mays
MLDICVCLVYFSLYKSLCIIVCWLLPAVLLQFIDVGFSCSSSSSKADALSRACRSHHTHAPHYSAPHALLREFTPANLLRTRSRTRLRERLGYGSPRAYAPTPITLWPLPRTWSFFLFLFLQWRGAEQGVHKERVLFWSLFCSSVFCFLVVYGDCYVLSFS

SEQ ID NO: 178250 - protein, 67 aa, Zea Mays
MLPWLLVVLGVGLCSALRLVACAWRLLVQVLPCGGAAGCTRPFRNSFPALPSAALKLGVGARVVSGL

SEQ ID NO: 178251 - protein, 121 aa, Zea Mays
MMKTPKNTAMQTQPEQRQEKVSGCRTSCCTFRLFICTCKVAEAAGPSIFPTVKAKFNSSWKAKDLLHQKLFPWHIFWFHVEMKKQKRLPWGNGITERERRKRLRDGDACIITYPVWPASRG

SEQ ID NO: 178252 - protein, 80 aa, Zea Mays
MGSLVIACRSQEQDRNRSKPHAASKCNPNRHRGWMPPRALSLSRANSPETGARLCRGGAPNSCRGDDDSSWALCFGGGGG

SEQ ID NO: 178253 - protein, 61 aa, Zea Mays
MAVSDSLAHPGLAIVVMGVSGCGKSTVAAMLAEALGCSFIEADDYHSEANKGIRSQLVRKP

SEQ ID NO: 178254 - protein, 174 aa, Zea Mays
MGQRSSPPLPFTRPPTAGERKRGRATAGQGRQAQETSPTSTSSSPSAFISSRLLPRSYLLSCSAFSSSVPPPLSSAPHPLRSVSSGFEASDLGHGGHQENQDRLGPAGGWGSDVAAAVLFSRARPGPRRRGRGGAQGEPQVPVPPPGLPGAHQGNPSKEGEAVHGEAQEEEAFG

SEQ ID NO: 178255 - protein, 223 aa, Zea Mays
MAATKKTKIVLAQPAVGAPTSRLPFFSRAPGPVRGAGDEAAHRASLRYRSLLQDYQELIKETQAKKERLYMERLRKKRLLAEVKVKNPALSSASWRAASVSDAQHQLVRAVGSSSRNQLVQPRRGGSPRVYPAIDLNEACEPGYEMEIVEERHGNRAPLGINKSKRYPMESDAAAGNNSKRYPMEMGSDVVAGPTQGRMPVFWDVQNPAGRSGKRKISCQDQR

SEQ ID NO: 178256 - protein, 109 aa, Zea Mays
MQEKLNQFENWDKAPLRPSTTLNTQAAARFIGHSLSHLTSDQKRSMHEISRGERRSWSGQKRKPEPSVEKKSVRAAAEEFLAKASQELIGHSDSRVKGPVILISDEDED

SEQ ID NO: 178257 - protein, 138 aa, Zea Mays
MASDTASAVPSSVVSAAEETLGYTESVGDHLSHLLAAAAADPDAVAELPPLLRARAFLALAQAATSLLGVRLRCSGVDPDEHPIRKEFERLSLMQEKLNQFENWDKAPLRPSTTLNTQAAARFIGHSLSHLTSEEEHA

SEQ ID NO: 178258 - protein, 152 aa, Zea Mays
MSSCECMSQVSATAASHPAALVRQSRPSILPSPLLVHQHEPALPSPQPSTTDPVLHTCTPQADRHGCTSIISHSSQSTVYLRVLPVDDHSSLTRTTRDKSTLCLQLHSSCLRDAESLHIVLGNRLNYFLMYHILQWNNLRPFTQVINNNQEK

SEQ ID NO: 178259 - protein, 126 aa, Zea Mays
MGVFGTSRPASVTLCAFLTFLNLFAFLLAVGAERRRSTGKVVPDEYDERSYCLYDTDASTVYGVSAFFVLLLQQAIVTAATRCLCFGPVLSSRGCAVTAFVLSCLLCVQMVNGSKAIMDGWISNIA

SEQ ID NO: 178260 - protein, 126 aa, Zea Mays
MVMMHCSLLLTTACYCLLLLPRQQRLLLAAGHVCKAWSCINNCACHELFKRRAFQCIGWITCPVMKPIIMVLLCDCCKTLLVCSFLCKLRTIICYSTCLQFYLSAIFVVFHLSAISVHCMLPDGRK

SEQ ID NO: 178261 - protein, 63 aa, Zea Mays
MVPWSRCTMRRLPVIVWSPYIQIIKTATINFKLCKRDNAKQFHNSKFKFPLVYCNKSGHQIGS

SEQ ID NO: 178262 - protein, 90 aa, Zea Mays
MHSHKHYMAFILIYIPIWLYLENEEESEVTEEKTPPPLDSQAGTWLYFDICGSEPDSPVNEGKPRCMQPLSLCFKYFSHTLSLVKCALGS

SEQ ID NO: 178263 - protein, 59 aa, Zea Mays
MHGWESVGCFFRYYFLVRQICLTQMKVFLKCGKNNCLINCQRACFQQSFREGGYALDHA

SEQ ID NO: 178264 - protein, 69 aa, Zea Mays
MESIFIMSKHTFSRAASLVRSSVVLRRRASISRFFPDRGLRSFLQGKQSVAGPWTIVHFSNTTAIVSDR

SEQ ID NO: 178265 - protein, 75 aa, Zea Mays
MHGWESVGCFFRYYFLVRQICLTQMKVFLKCGKNNCLINCQRACFQQSFREGKLFLIDPKSSIILSFYTHLYDLL

SEQ ID NO: 178266 - protein, 50 aa, Zea Mays
MGEPAPAGARIGEIISCFEKKGFNLKILKTECCWSMDHSPFLQHNSHCLR

SEQ ID NO: 178267 - protein, 51 aa, Zea Mays
MKQTYVECGAVAENGRRARAESGGRACRRESDDGEPPPPHSLTGCSAAGRL

SEQ ID NO: 178268 - protein, 280 aa, Zea Mays
MLYQFRMQSDISRLEAKIERMDAQLAAKDRELATLTRTEAKNTAALKSQIDKLQQERDEFQKMVIGNQQVRTQQIHEMKKKEKEYIKLQEKLNQVLMEKKKESSRSGMEIMNLLQKEGRQRGTWNGKKNDNDYYKMIVDAYEVKKQELMQENADLRALLRSMQMDMRDFLNAPNGSSQSTVTDNGRQESGSPQSPLGGKTDVFDLPFHMARDQIEESLRTKMTSIKARMTQLQDAQKGAEVTSEATDRELELEAQLVEARSIIQEQACIMSKHFKSDKPR

SEQ ID NO: 178269 - protein, 289 aa, Zea Mays
MQSDISRLEAKIERMDAQLAAKDRELATLTRTEAKNTAALKSQIDKLQQERDEFQKMVIGNQQVRTQQIHEMKKKEKEYIKLQEKLNQVLMEKKKESSRSGMEIMNLLQKEGRQRGTWNGKKNDNDYYKMIVDAYEVKKQELMQENADLRALLRSMQMDMRDFLNAPNGSSQSTVTDNGRQESGSPQSPLGGKTDVFDLPFHMARDQIEESLRTKMTSIKARMTQLQDAQKGAEVTSEATDRELELEAQLVEARSIIQEQACIMSKHFKSDKPRRHSGLDGEREASAEV

SEQ ID NO: 178270 - protein, 388 aa, Zea Mays
MSSSARFDLRASSHQLQPPPSHASMSDGGAFANAENLEHCARYLNQTLVTFGFPASLDLFATDPVSIARTCNCIYALLQQRQRDIEFRESTNDQRQRMQSDISRLEAKIERMDAQLAAKDRELATLTRTEAKNTAALKSQIDKLQQERDEFQKMVIGNQQVRTQQIHEMKKKEKEYIKLQEKLNQVLMEKKKESSRSGMEIMNLLQKEGRQRGTWNGKKNDNDYYKMIVDAYEVKKQELMQENADLRALLRSMQMDMRDFLNAPNGSSQSTVTDNGRQESGSPQSPLGGKTDVFDLPFHMARDQIEESLRTKMTSIKARMTQLQDAQKGAEVTSEATDRELELEAQLVEARSIIQEQACIMSKHFKSDKPSGRRHSGLDGEREASAEV

SEQ ID NO: 178271 - protein, 347 aa, Zea Mays
MRRALRFLHVLFLKLTTPFLGSVMQVSIARTCNCIYALLQQRQRDIEFRESTNDQRQRMQSDISRLEAKIERMDAQLAAKDRELATLTRTEAKNTAALKSQIDKLQQERDEFQKMVIGNQQVRTQQIHEMKKKEKEYIKLQEKLNQVLMEKKKESSRSGMEIMNLLQKEGRQRGTWNGKKNDNDYYKMIVDAYEVKKQELMQENADLRALLRSMQMDMRDFLNAPNGSSQSTVTDNGRQESGSPQSPLGGKTDVFDLPFHMARDQIEESLRTKMTSIKARMTQLQDAQKGAEVTSEATDRELELEAQLVEARSIIQEQACIMSKHFKSDKPRRHSGLDGEREASAEV

SEQ ID NO: 178272 - protein, 218 aa, Zea Mays
MKKKEKEYIKLQEKLNQVLMEKKKESSRSGMEIMNLLQKEGRQRGTWNGKKNDNDYYKMIVDAYEVKKQELMQENADLRALLRSMQMDMRDFLNAPNGSSQSTVTDNGRQESGSPQSPLGGKTDVFDLPFHMARDQIEESLRTKMTSIKARMTQLQDAQKGAEVTSEATDRELELEAQLVEARSIIQEQACIMSKHFKSDKPRRHSGLDGEREASAEV

SEQ ID NO: 178273 - protein, 293 aa, Zea Mays
MQSDISRLEAKIERMDAQLAAKDRELATLTRTEAKNTAALKSQIDKLQQERDEFQKMVIGNQQVRTQQIHEMKKKEKEYIKLQEKLNQVLMEKKKESSRSGMEIMNLLQKEGRQRGTWNGKKNDNDYYKMIVDAYEVKKQELMQENADLRALLRSMQMDMRDFLNAPNGSSQSTVTDNGRQESGSPQSPLGGKTDVFDLPFHMARDQIEESLRTKMTSIKARMTQLQDAQKGAEVTSEATDRELELEAQLVEARSIIQEQSFYRQCMKGGPSAAVEPTVCNRKVPDSSPILCG

SEQ ID NO: 178274 - protein, 390 aa, Zea Mays
MSSSARFDLRASSHQLQPPPSHASMSDGGAFANAENLEHCARYLNQTLVTFGFPASLDLFATDPVSIARTCNCIYALLQQRQRDIEFRESTNDQRQRMQSDISRLEAKIERMDAQLAAKDRELATLTRTEAKNTAALKSQIDKLQQERDEFQKMVIGNQQVRTQQIHEMKKKEKEYIKLQEKLNQVLMEKKKESSRSGMEIMNLLQKEGRQRGTWNGKKNDNDYYKMIVDAYEVKKQELMQENADLRALLRSMQMDMRDFLNAPNGSSQSTVTDNGRQESGSPQSPLGGKTDVFDLPFHMARDQIEESLRTKMTSIKARMTQLQDAQKGAEVTSEATDRELELEAQLVEARSIIQEQSFYRQCMKGGPSAAVEPTVCNRKVPDSSPILCG

SEQ ID NO: 178275 - protein, 313 aa, Zea Mays
MPSPPQPWSSRASPSVHPLRASLLPRHQVHARSFLRAGMALQPQLAPALSYGALPPPPLLSMAALPASWWSAPSPTSLLVVVSIPSMASSPLHSCSPKIPFHVPATSHGRQPSPHSRPSSPNPLSAGGRPPLLLPWCSTYDVHLDCESKIAKFLGTPDSILYSYGISTIFSVIPAFYKKGDIIVADEGVHWAVQNGLHLSRSTVVYFKHNDMASLASTLEKLTRGNKRAEKIRRYIVVESIYQNSGQIAPLDEIVRLKEKYRFHVILEESHSFGVLGKSGCGLAEHYGVPQEWSHGTSAGGLRQRQPMYPMDS

SEQ ID NO: 178276 - protein, 50 aa, Zea Mays
MGTQHRHVLVAMPTGNISIARICVLLGPGSKSGCGLSCCTVLRRCRVDHI

SEQ ID NO: 178277 - protein, 328 aa, Zea Mays
MLIYSFFLPGRPPCVDSSSLHLVLPFAASFLTKMSQAKEVRYTARSITPPADRNGTSRSPPPKRRSPSRSPPPKSASRSPRPRSPKRRSTSRSPPRRRGRSRSRDRSRSRSPDDRNPGNNLYVTGLSTRVTEDDLEKFFSKEGKVKNCHVVLDPRTKESRGFAFVTMDTLEGARRSIKYLHRTVLEGRLVTVEKAKRTRERTPTPGKYCGRRGGSQRSPSPYRPRRRERSRSRERRRERSRSRDRRERSRSRDRRERSRSRERRRERSRSRDRRERSRSRDRRRERSRSRDRRRERSRSRDRRGSSPHGRRHRDRSRSPTSNGNHKAD

SEQ ID NO: 178278 - protein, 290 aa, Zea Mays
MSQAKEVRYTARSITPPADRNGTSRSPPPKRRSPSRSPPPKSASRSPRPRSPKRRSTSRSPPRRRGRSRSRDRSRSRNPGNNLYVTGLSTRVTEDDLEKFFSKEGKVKNCHVVLDPRTKESRGFAFVTMDTLEGARRSIKYLHRTVLEGRLVTVEKAKRTRERTPTPGKYCGRRGGSQRSPSPYRPRRRERSRSRERRRERSRSRDRRERSRSRDRRERSRSRERRRERSRSRDRRERSRSRDRRRERSRSRDRRRERSRSRDRRGSSPHGRRHRDRSRSPTSNGNHKAD

SEQ ID NO: 178279 - protein, 109 aa, Zea Mays
MEIIIIISLVILLALGALFAIPKSQNKGKSKGTDLGAGMTSRSFTKEEISKHNTRKDCWIVIKDKVYDVTPYVEEHPGGDAILNNAGGDSTEGFFGQKWSVFLVPVLPI

SEQ ID NO: 178280 - protein, 176 aa, Zea Mays
MPSRAPAVTKHVHGLLGAVGALFTFPCHLSLPQLLSLLSHDAHHHFFLSLMLATANAPIASSLPIPAPRRPDLPSPPLASRDAQLGSLSSMSNAYRRGGAVARRGNLRGSPVATQIVLPAARFPPSLRAIQQHPAQCARPSPVPGWVLRSPSATAVSPFSCLASSSSGRPPSLRGT

SEQ ID NO: 178281 - protein, 197 aa, Zea Mays
MPSRAPAVTKHVHGLLGAVGALFTFPCHLSLPQLLSLLSHDAHHHFFLSLMLATANAPIASSLPIPAPRRPDLPSPPLASRDAQLGSLSSMSNAYRRGGAVARRGNLRGSPVATQIVLPAARFPPSLRAIQQHPAQCARPSPVPGWVLRSPSATAVSPFSCLASSSSGRPPSLRECDPSPSFKESTVKLRRPSDQAL

SEQ ID NO: 178282 - protein, 308 aa, Zea Mays
MQIREGPARRQAPSAAGALRSPLSAMMLAMFATMASFYVAGRQQGKRLASLEMELAAAKHEGFVGKYTPETNGTHSGKKPLVVIGIMTSFGRKNYRDAVRKSWLPTGSMLKKLEEEKGIVVRFVVGRSANRGDTFDREIDDENRSTKDFLILDDHIESDEELPKKTKSFFANAANTFDAAFYAKVNDDIYINVDTLSAMLETHWDKPRVYIGCMKSGEVFSDSTHKWYEPDWWKFGDGKSYFRHASSEMFVISRAIAQFISINKSVLRTYAHDDVSVGSWMIGLAVKHVNEAKLCCSSWPSGAMCSAL

SEQ ID NO: 178283 - protein, 261 aa, Zea Mays
MQIREGPARRQAPSAAGALRSPLSAMMLAMFATMASFYVAGRLWQDAQNRVYLIKELDRRTGQGQSAISVDDTLKVVACRQQGKRLASLEMELAAAKHEGFVGKYTPETNGTHSGKKPLVVIGIMTSFGRKNYRDAVRKSWLPTGSMLKKLEEEKGIVVRFVVGRSANRGDTFDREIDDENRSTKDFLILDDHIESDEELPKKTKSFFANAANTFDAAFYAKVNDDIYINVDTLSAMLETHWDKPRVYIGCMKSGEVFSDS

SEQ ID NO: 178284 - protein, 176 aa, Zea Mays
MQAYKEFRPGVKPPGMWKTLVGVLPPLPSSSQNVQNYRVLWTGVGAQLARDVPFSAICWSTLEPMRRKLLGFVGEEGNAGSVLGVNFAAGFVAGSLAAGATCPLDVAKTRRQIEKDTEKAMRMTTRQTLAEIWRSGGMKGLFAGVGPRVARAGPSVGIVISFYEVVKYALHQRHTS

SEQ ID NO: 178285 - protein, 382 aa, Zea Mays
MVGCSRGSLPTWMTAAAARVDLSGGVTPSHQGPSSSSPSSGPSPAAGADQELGMYERAFSAAGAAFVSAIIVNPLDVAKTRLQAQAAGVLYNQPAQMAALGPDAHFQILSEFRCSPSCTRGLVLGSEPVCPPDCFQYKGTLDVFLKVVRQEGFVRLWRGTNAGLALAVPTVGIYLPCYDIFRNWIEDFTRSNAPGLTPYAPLVAGSVARSLACIACSPIELARTRMQAYKEFRPGVKPPGMWKTLVGVLPPLPSSSQNVQNYRVLWTGVGAQLARDVPFSAICWSTLEPMRRKLLGFVGEEGNAGSVLGVNFAAGFVAGSLAAGATCPLDVAKTRRQIEKDTEKAMRMTTRQTLAEIWRFEPYIWLSQLSNMLLPCCPAVPQ

SEQ ID NO: 178286 - protein, 170 aa, Zea Mays
MVGCSRGSLPTWMTAAAARVDLSGGVTPSHQGPSSSSPSSGPSPAAGADQELGMYERAFSAAGAAFVSAIIVNPLDVAKTRLQAQAAGVLYNQPAQMAALGPDAILSEFRCSPSCTRGLVLGSEPVCPPDCFQYKGTLDVFLKVVRQEGFVRLWRGTNAGLALAVPTAFR

SEQ ID NO: 178287 - protein, 116 aa, Zea Mays
MGTRDVDIDVILGMNWLTKYQTCLSYDKRTVKLVSLSGEEVLVELVLSGPRRGICHQITARACYSINRLYLHRILKKTSYKLLTGKKPMFHILESLGVNALFLLREVENLNLLLRL

SEQ ID NO: 178288 - protein, 150 aa, Zea Mays
MDEWIRQTEVWVHQTDSWIRQQPPEQIYVAAAVVAVTILLLIVASCLKSSRPNTIVLSGLSGSGKTTIYYQLRDGSSHQGTVTSMEENSDTFVLHSEQERKDKVKPVHIIDVPGHARLKPKLDEVLPKAAAVVFVVDAQDFLSSMQAAAE

SEQ ID NO: 178289 - protein, 172 aa, Zea Mays
MEENSDTFVLHSEQERKDKVKPVHIIDVPGHARLKPKLDEVLPKAAAVVFVVDAQDFLSSMQAAAEYLYDILTKATVVKKKVPVLIFCNKTDKVTAHSKEFIKKQLEKELNKLRESRNAVSSADISDEVQLGVPGEAFNFSQCQNKVAVAEGAGLTGDVSAVEQFIREHVKA

SEQ ID NO: 178290 - protein, 366 aa, Zea Mays
MLAEKELQGHQHRPRATFGASSTSRTHTPALSHTPSTTPASTRPPSTPAAHVGKLPLQVPAKKQNSPAPATPSSGRCSGIVCHRCHGIGHVKKDCPSQRTYIATDDGYISASDGEGDDDDSSDVSANDDAMLGANATVNLRSIMVQRVLSSQPESSQKQQRHNFFQAFFAIENRHARVIIDGGSCNNLVSSDLVKKLGQTTRPRPYPYHIQWINDSGKVKVTHMVRVHFSIGMYSDYADCDVVPMEACSLLLGRPWEYDTDARHHGRSNTYTFRHKDKNITLLPLTLVEIVQADKDRAASTHKEPNNETEIQQQIKLKAPVMLATKSDLLKTHATDACCYALVCKYAFFSIDDIASTLPAFVTNLL

SEQ ID NO: 178291 - protein, 85 aa, Zea Mays
MTSTPPGKTTLWSHCLRPSSKRQITSIPRKTSLSRKLIYTMRGASHVPSAQLRTPSLISLPPKAKSSQMTLPITIITLKFHLSLS

SEQ ID NO: 178292 - protein, 345 aa, Zea Mays
MFSEEEIAVAEDSGEIVSVMEPVSVVGTSGEMETEVSAERDVRAMKDHIDLEASQSQQPRKLPSKDLKEIVGSFWLATSTFSKKWQKWRGKQKLKAGGKENRGSDPPLPRGVQGRRVRRRRPRVLGAMAGPARPRQLDDGSNAPVTYVLKGSQAEQMLCPQWQPQTMENTPVTTNSTLEKQIQEDFCQRAMSQDGTQQPFSSDWRLSNCTATSIDPALPKPAAGGFEQVTGNIHYLRQIKWLLLLFHAKTCTYPVGSCKFHGCVQNWGFLLFAKCVHKRQGIPCNGQLGVLPLPPRRRPFRSPLQHQLTRRGLLRQPGRCLPWPREEAAAVAQGVEPLGPDPPPV

SEQ ID NO: 178293 - protein, 241 aa, Zea Mays
MSKIAGQRRAPRCSSAGCRGRPQKACSDRYFSSCGEIIDAYVMKGQSGHSKGYGFVRFAKRDYANTAKRQKNGIELQGKRLVFELSMDQDTVFFGNLCKEWTLEEFEELIHKAFKDVVSVDLAMASNLDSSNKKNINRGFGFVRFSSHAVFAKYYCLFLCPRPPRPRLPLPPPPPPTALLAWPPLSPPAATNPAPAIKTYPLHPLLFSSSSPLLPPPVAASPDFPRYCLLLVLDDEMCLIM

SEQ ID NO: 178294 - protein, 227 aa, Zea Mays
MASPRGGFDEQDRRTEKGTEVFVGGLPWSATESMLRQGYGFVRFAKRDYANTAKRQKNGIELQGKRLVFELSMDQDTVFFGNLCKEWTLEEFEELIHKAFKDVVSVDLAMASNLDSSNKKNINRGFGFVRFSSHAVFAKYYCLFLCPRPPRPRLPLPPPPPPTALLAWPPLSPPAATNPAPAIKTYPLHPLLFSSSSPLLPPPVAASPDFPRYCLLLVLDDEMCLIM

SEQ ID NO: 178295 - protein, 118 aa, Zea Mays
MASVLDVLETIKTSSSTPGKIAKASKAQVETETKLTEAKATMSRADAETGPSEPIKEKSSEIGEKAAEEEAIEQILPEKSAAPNPEALKENTEYIIRHASGKISLKKKSEKLNTMLRN

SEQ ID NO: 178296 - protein, 80 aa, Zea Mays
MPWKRDRVSLNPAIPYMKRQSRTGSGEMTRVARTLLAKDRLKGVVCSRVARTCSCSGGSVGMVDMQGLRETYVVWLEILS

SEQ ID NO: 178297 - protein, 120 aa, Zea Mays
MGQGKLEPGYSIHEKTIAHWEWRDGESGTYPPGKGSPKRGGVLSGGADLFMQWRIRGNGRHARFTRNICCRCFGSDRTPGVAPQGVFRSRTVSTTVAKWFVRIARGTMDKIYRFGPLRSA

SEQ ID NO: 178298 - protein, 207 aa, Zea Mays
MLSDPLSLARFLASWARTHARMKAQNDAAAHPLMQYASYFRRPDARAARALVKSVPLDAFASADAAETVLFRARPTMLPAGAGAPPAPDHRALAVACVAQARERLGDGKVVPPQFPLVVFDCEGGVSVETCAAAAYGQPPSPSGGGRYKIDVALWEELGLEELVLRDSKPLHVSYSILGAGCDGLAVAMPAGAAGELLVAATVPKPK

SEQ ID NO: 178299 - protein, 417 aa, Zea Mays
MAAAQEKRLAIIGAGSSGLTACKHALAKGFRPVVFEAADAVGGVWARTLACTRLQSPAEAYRFSDFPWPPEVRPEEFPRSDQVAAYMAAYARQFGVVDCVRFGSKVLGAEYVGASEAEVAAWEQWSGNGEAFGDGTGVWHLTVQHGETEETQKYEFDFLIICLGRYGIAKVPTFPQGRGPEVFQGQVLHSMDYSRMPHADAHELIRGKRVVVVGSGKSGMDTVAQCARANGSKYPCTMVYRSANWMVDPNLAWGAFFKKMIGSRLAELMVHKPGEGFALSLLATVLTPMRWLMAKLAETYYRELMPMRKHGMAPGYNLSESMLLGWRIGLLPDRFYDMVEQGGIVLRRCDSFGFCADGLELDDGTGERVGADVVILATGFDDERLLTSVFVSPWFREIIVPKPSHTMLPLYRALRAP

SEQ ID NO: 178300 - protein, 91 aa, Zea Mays
MASVLEKIDEMLLLAVYNKVCTSLGASRRRWAPKPFVARSFKPPTTYSKPTPPRAMIGPVSSLSEPSPGPSGISKESMRTPLRYQVFVSHD

SEQ ID NO: 178301 - protein, 476 aa, Zea Mays
MRSDDAGGGGFHELFDSVRRSISFRTGAAALDEPAASLSSSSASAGGAGGFRERISNRLRRSRGMGLLGMAAKGPSPTRRLLPQPPPPLAGVLASDGCGRVGGQGTGGGEENPPIRWRKGDLIGSGAFGQVYLGMDLDSGELLAVKQVLIGSSNATREKAQAHVTELEDEVKMLKNLSHPNIVRYIGTAREENTLNILLEFVPGGSIQSLLGRLGSFPEAVIRKYTKQLLHGLEYLHRNGIIHRDIKGANILVDNKGCIKLADFGASKQVEKLATATAAKTMKGTPYWMAPEVIVGSGHNCSADIWSVGCTVIEMAIGKPPWSHEYQEVSLLYYVGTTKSHPPIPEHLSTEAKDFLLKCLQKEPEMRSVASDLLQHPFVTRVLEDFCQLNHAGPKETSKNELPSYVVPTVDSDLSRPGKLRNLNSYKLSDTRPLWDQRCNDDDICEFADEDNVPMVGSLELFGNTEEVEGRVGPGT

SEQ ID NO: 178302 - protein, 646 aa, Zea Mays
MRSDDAGGGGFHELFDSVRRSISFRTGAAALDEPAASLSSSSASAGGAGGFRERISNRLRRSRGMGLLGMAAKGPSPTRRLLPQPPPPLAGVLASDGCGRVGGQGTGGGEENPPIRWRKGDLIGSGAFGQVYLGMDLDSGELLAVKQVLIGSSNATREKAQAHVTELEDEVKMLKNLSHPNIVRYIGTAREENTLNILLEFVPGGSIQSLLGRLGSFPEAVIRKYTKQLLHGLEYLHRNGIIHRDIKGANILVDNKGCIKLADFGASKQVEKLATATAAKTMKGTPYWMAPEVIVGSGHNCSADIWSVGCTVIEMAIGKPPWSHEYQEVSLLYYVGTTKSHPPIPEHLSTEAKDFLLKCLQKEPEMRSVASDLLQHPFVTRVLEDFCQLNHAGPKETSKNELPSYVVPTVDSDLSRPGKLRNLNSYKLSDTRPLWDQRCNDDDICEFADEDNVPMVGSSFNPMSEPSDEWENKLDISPEQQFSQSREFGGLAKLAESQMSENDFTFPCEGSCEEDDEFTESKIKEFLDEKATDLKKLQTPLYEFYNTVNAGVSQGVSDVCRANNVTNPQLPPRATKMVGGAALEPICVNLKNVNPKSCTRRFSRGSVESNHVLREIASPELNILEDKVHDDSEDSPRFEQSTLFVV

SEQ ID NO: 178303 - protein, 173 aa, Zea Mays
MVWANQNYYLHRLIDDAKVGSKSEASGIAKAGAKMVMAVSCAKVPKITIIVGGSFGAGNYGMCGRAYSPNFLFLWPTARISVMGGIQAAGVLAQIEKNNKRRQGVEWSKDEEEAFKAKVVEAYDREGSPYYSTARLWDDGVIDPADTRRVLSLCLSASAKPVPEDTRYGVFRM

SEQ ID NO: 178304 - protein, 358 aa, Zea Mays
MADESVIVKGNGTIFLAGPPLVKAATGEEISAEDLGGASVHCKVSGVSDHFAQDEIHGLELGRNIVKNLHLAAKGTNIQSSACGYQEPLYDVEELRSIAPADVKQSFDIRSIIARIVDGSEFDEFKKLYGTTLVTGFARICGQPVGIIGNNGILFTESALKGSHFIELCAQRHIPLIFLQNITGFMVWANQNYYLHRLIDDAKVGSKSEASGIAKAGAKMVMAVSCAKVPKITIIVGGSFGAGNYGMCGRAYSPNFLFLWPTARISVMGGIQAAGVLAQIEKNNKRRQGVEWSKDEEEAFKAKVVEAYDREGSPYYSTARLWDDGVIDPADTRRVLSLCLSASAKPVPEDTRYGVFRM

SEQ ID NO: 178305 - protein, 167 aa, Zea Mays
MLSRLAAARRQLLLSPAVAYRSSSAAATASAVHERAAPASASVLPDTLERGSDAYQRNTAAVGGLLSDLRARVSQVLRGGGAEAVRRNAARGKLLPRDRIDRLLDPGASFLELSQVSLAAPARTLVFLALIWPHCEVNSIACSDVYDEALPSAGNSFGVQTALHISR

SEQ ID NO: 178306 - protein, 366 aa, Zea Mays
MLSRLAAARRQLLLSPAVAYRSSSAAATASAVHERAAPASASVLPDTLERGSDAYQRNTAAVGGLLSDLRARVSQVLRGGGAEAVRRNAARGKLLPRDRIDRLLDPGASFLELSQLAGSDVYDEALPSAGIITGIGPVHGRLCMFVANDPTTKGGTYYPLTVKKHLRAQEIASECKLPCIYLVDSGGANLPRQADVFPDRDNFGRIFYNQAKMSSDGIPQIAVVLGSCTAGGAYIPAMADESVIVKGNGTIFLAGPPLVKAATGEEISAEDLGGASVHCKVSGVSDHFAQDEIHGLELGRNIVKNLHLAAKGTNIQSSACGYQEPLYDVEELRSIAPADVKQSFDIRSIIARIVDGSEFDEFKKLH

SEQ ID NO: 178307 - protein, 142 aa, Zea Mays
MERGAVVLPLQGAGVGRVLLPVQVRVRSFLRSRRATERRRRLASSAAPARCSKMYVPGFGEGSPERKAAINLQHFFNYIAVSIVLAQLESYNREAYLELKEFISRTSLNDAEIFCEKLMRESPRLKGLALRILEGFSLCQMN

SEQ ID NO: 178308 - protein, 153 aa, Zea Mays
MERGAVVLPLQGAGVGRVLLPVQVRVRSFLRSRRATERRRRLASSAAPARCSKMYVPGFGEGSPERKAAINLQHFFNYIAVSIVLAQLEGSVLGAEGVHQPHLPERRRDFLRKAHARVSKAQGTSLEDSGGPICICEERVRVGQFEGIILQDG

SEQ ID NO: 178309 - protein, 249 aa, Zea Mays
MMDEICNWASYRGQILTRTVRGMMYYRKALEIQCLQDMTDPAKVDQDRPIGSYQGLQSDIEMAQAIVDIKFTYVVSCQVYGMQKKSKDLNEKRRYQNILSLMIMNPSLRVAFINEVEAPTRNGATEKTYYSVLVKGGEKYDEILERENLKTKIMDFIKFDVGNVVMVTGGRNTGRVGVIKNREKHKGSFETIHVEDSVGHQFATQMGNVFTIGKGNKPWVSLPKGRGIKLSIIEEQRRRDFIAQAAANA

SEQ ID NO: 178310 - protein, 69 aa, Zea Mays
MFFLPVAIANTIISFLMSLAAARGFFTCIVEIYIGAVSVAIFAICATVISTVVGVMFATCKSSLFPCKR

SEQ ID NO: 178311 - protein, 81 aa, Zea Mays
MFVMVKLNLYLLEGIHDDIDFCCKLAKEESVILCPGEMDLICWKKSYLTKTHFGSSSCLFWVTGIPGLNCMFALRNALRKQ

SEQ ID NO: 178312 - protein, 58 aa, Zea Mays
MLQRNKGHQVHHLPSQAKRFHVCHGNQFTKLYVVIVVEQEKNSNTNETVEHYVRTISI

SEQ ID NO: 178313 - protein, 59 aa, Zea Mays
MRRDVYIYAKKKAMLRAPYRALCQVNSPWIRASSSLSVRPRIHLNPLQNPDTWLEVGTT

SEQ ID NO: 178314 - protein, 77 aa, Zea Mays
MASLTQVEDPIMLCTNRTTKCLRVTNGRQNSMRDHWSMLWAKPIPWRVHGLGTYSLMHANPIHLGVVCEPFALMLHS

SEQ ID NO: 178315 - protein, 223 aa, Zea Mays
MSREENVYMAKLAEQAERNVIGARRASWRIVSSIEQKEESRKNEEHVNLIKEYRGKIEAELSNICDGILKLLDSHLVPSSTAAESKVFYLKMKGDYHRYLAEFKTGAERKESAESTMVAYKAAQDIALAELAPTHPIRLGLALNFSVFYYEILNSPDKACNLAKQAFDEAISELDSLGEESYKDSTLIMQLLRDNLTLWTSDLTEDGADEGKDAPKGDAGEGQ

SEQ ID NO: 178316 - protein, 215 aa, Zea Mays
MSREENVYMAKLAEQAERYEEMVEYMEKVAKTVDVEELTVEERNLLSVAYKNVIGARRASWRIVSSIEQKEESRKNEEHVNLIKEYRGKIEAELSNICDGILKLLDSHLVPSSTAAESKVFYLKMKGDYHRYLAEFKTGAERKESAESTMVAYKAAQAFDEAISELDSLGEESYKDSTLIMQLLRDNLTLWTSDLTEDGADEGKDAPKGDAGEGQ

SEQ ID NO: 178317 - protein, 292 aa, Zea Mays
MATPLRATAVLAWGSGEDGQLGMGGNEEKDWPHFVEALGPYAVTAVVAGSRNSLAICDDGRLFTWGWNQRGTLGHPPETKTESSPGPVDALAGFKIVQAAIGGWHCLAVDDKGRAYAWGGNEYGQCGEEPERKEDGTRALRRDIPIPQRCALKLKVRQVAAGGTHSVVLTQEGHVWTWGQPWPPGDIKQISTPVRVQGLEKVRVIAVGAFHNLALTEDVILWAWGNNEYGQLGTGDTQPRSQPIRVEGLSDLSLVHFYFNLFYFLIHFQISLSSVSFSSHCPVSLCKDGKPR

SEQ ID NO: 178318 - protein, 165 aa, Zea Mays
MATPLRATAVLAWGSGEDGQLGMGGNEEKDWPHFVEALGPYAVTAVVAGSRNSLAICDDGRLFTWGWNQRGTLGHPPETKTESSPGPVDALAGFKIVQAAIGGWHCLAVDDKGRAYAWGGNEYGQCGEEPERKEDGTRALRRDIPIPQRCALKLKVRQPLEGHIQ

SEQ ID NO: 178319 - protein, 293 aa, Zea Mays
MATPLRATAVLAWGSGEDGQLGMGGNEEKDWPHFVEALGPYAVTAVVAGSRNSLAICDDGRLFTWGWNQRGTLGHPPETKTESSPGPVDALAGFKIVQAAIGGWHCLAVDDKGRAYAWGGNEYGQCGEEPERKEDGTRALRRDIPIPQRCALKLKVRQVDIAAGGWHSTALTIDGEVYAWGRGEHGRLGFGDDKSSHMVPLKVELLAGEDIVQVSCGGTHSVALARDGRMFSYGRGDHGRLGYGRKVTTGHPMELPINLPPLSSSRDGRWQAKYVACGGRHTLAIAEWTEATD

SEQ ID NO: 178320 - protein, 316 aa, Zea Mays
MATPLRATAVLAWGSGEDGQLGMGGNEEKDWPHFVEALGPYAVTAVVAGSRNSLAICDDGRLFTWGWNQRGTLGHPPETKTESSPGPVDALAGFKIVQAAIGGWHCLAVDDKGRAYAWGGNEYGQCGEEPERKEDGTRALRRDIPIPQRCALKLKVRQVAAGGTHSVVLTQEGHVWTWGQPWPPGDIKQISTPVRVQGLEKVRVIAVGAFHNLALTEDVILWAWGNNEYGQLGTGDTQPRSQPIRVEGLSDLSLVDIAAGGWHSTALTIDGEVYAWGRGEHGRLGFGDDKSSHMVPLKVELLAGEDIVQLSSRAHF

SEQ ID NO: 178321 - protein, 214 aa, Zea Mays
MQAAVSKNMVESLAVPAFRVGYPIVTDKLDELYEKVKPKGVTMTVLLAKAAAMALAQHPVVNSTCRDGKSFTYNSNINIAVAVAIDGGLITPVLQDADKLDIYLLSQNWKDLVKKARAKQLQPNDYNSGTFTLSNLGMFGVDRFDAILPPGQGAIMAVGASKPTVVADKDGFFSVKSKMLVNVTADHRIVYGADLAAFLQTFAKIIEDPESLTL

SEQ ID NO: 178322 - protein, 97 aa, Zea Mays
MRVTGQPYDLYFRVGTTTTTKRTKPFASKEAGLATVEGEEDHDLDVSLMKNRSCLEGVSRGLATNAHRGLPPVCSRSRISFDLVMPVLERRSYSSLV

SEQ ID NO: 178323 - protein, 153 aa, Zea Mays
MALSPDTSNIFFRCNTCTVLSQLSNLTSNYNLVQVGAQVVYSKYAGTELKFNDADHLILKDDIIGILDSDDVKDMKPLNDRILIKNRIGKPHIGQKPKSFIMSLADVLFIHDMSKCLLSSLDTRAKHVQEAPICAFLSRCELFDLAQLTTDPF

SEQ ID NO: 178324 - protein, 118 aa, Zea Mays
MVACRYMRTAGEGKTVPSSTVSISKGEEDGDRWRGCEHFEFVRRETMVLTSRAGLAERERARGVSEMGQGEDAGTRRGHRCGPPGRILFPFFYFLSSLSLSCVYFPRCKINPYHLLVT

SEQ ID NO: 178325 - protein, 79 aa, Zea Mays
MKPLNDRILIKNRIGKPHIGQKPKSFIMSLADVLFIHDMSKCLLSSLDTRAKHVQEAPICAFLSRCELFDLAQLTTDPF

SEQ ID NO: 178326 - protein, 66 aa, Zea Mays
MLELFVLNVIFRKLGCSMLWWLGVFIAPNHLGSSWGGCWRWAHRTVRCATGQALCTVRFPAMSPNR

SEQ ID NO: 178327 - protein, 147 aa, Zea Mays
MLVWKLKSSRETQILHLISEVLWIVLLLSSANSLWTSFLTTTLAARTDAGCTAPCRPPVTGVHSCSPMSPTTTRLAMGHSRLVLASLSGATTSCYATSRSRTWSGVCGKRTTRSPPMSFGLPTPGAYRKLPRSESAISLVFLVSRLS

SEQ ID NO: 178328 - protein, 79 aa, Zea Mays
MKPLNDRILIKNRIGKPHIGQESKSFIMSLADVLFIHDMSKCLLSSLDTRAKHVQEAPICAFLSRCELFDLAQLTTDPF

SEQ ID NO: 178329 - protein, 176 aa, Zea Mays
MKCVIERYSEAREEHRQTMSASAEAKLWQSEAESLRQQLHNLEEHHRQLLGQQLSGLNVGDLQNLENKLETSLRNIRLKKDQLIFYQIQELNRKGSLMHQESMELYNKVNLLHQHNTELRRKVYGQGVNNEQTSTTVRHSTRNTENLPINLELSVQRDKSETPSVGWCCNRFRTCC

SEQ ID NO: 178330 - protein, 168 aa, Zea Mays
MKCVIERYSEAREEHRQTMSASAEAKLWQSEAESLRQQLHNLEEHHRQLLGQQLSGLNVGDLQNLENKLETSLRNIRLKKDQLIFYQIQELNRKGSLMHQESMELYNKVNLLHQHNTELRRKVYGQGVNNEQTSTTVRHSTRNTENLPINLELSVQRDKSETPSVGSN

SEQ ID NO: 178331 - protein, 197 aa, Zea Mays
MKCVIERYSEAREEHRQTMSASAEAKLWQSEAESLRQQLHNLEEHHRQLLGQQLSGLNVGDLQNLENKLETSLRNIRLKKDQLIFYQIQELNRKGSLMHQESMELYNKVNLLHQHNTELRRKVYGQGVNNEQTSTTVRHSTRNTENLPINLELSVQRDKSETPSVGWSVQNEIIVQRIREGDPTMDDQPPSSLRRVN

SEQ ID NO: 178332 - protein, 175 aa, Zea Mays
MKCVIERYSEAREEHRQTMSASAEAKLWQSEAESLRQQLHNLEEHHRQLLGQQLSGLNVGDLQNLENKLETSLRNIRLKKDQLIFYQIQELNRKGSLMHQESMELYNKVNLLHQHNTELRRKVYGQGVNNEQTSTTVRHSTRNTENLPINLELSVQRDKSETPSVGYLQDIRRSY

SEQ ID NO: 178333 - protein, 69 aa, Zea Mays
MHQESMELYNKVNLLHQHNTELRRKVYGQGVNNEQTSTTVRHSTRNTENLPINLELSVQRDKSETPSVG

SEQ ID NO: 178334 - protein, 90 aa, Zea Mays
MMMKCKMHLVICSGVYPLMFTHRKFEVSKSKLNLIQYESKTFRNSNKQRSASLLFYLIKSVSLLHTQRKLCYSLINSTVHLMATKNGTLF

SEQ ID NO: 178335 - protein, 119 aa, Zea Mays
MALSAAAPGKGGGVLDRPVEKITPGRQSEFDVKKSRKMTPPFRVILHNDNHNRREYVVQVLMKVIPGMTVDNALNIMQEAHVNGLSVVIVCSQSEAEEHCTSLRGNGLRSSIEPASGGC

SEQ ID NO: 178336 - protein, 198 aa, Zea Mays
MRHPRKLVLAGCLTALIVMTALSASLGWVAPNLISRKWTHHVTTLLFFVFGIWSLWEGFKEDGDSEELAEVEAELDAVFKSNKGESKTKTKANDDTKKQQRPFLMQFFSPIFIKAFSITFFGEWGDKSQIATIGLAADENPFGVVLGGIIAQALCTTAAVLGGKSLASQISEKMVELSSGVLFLLFGIMSLLSGPGEL

SEQ ID NO: 178337 - protein, 151 aa, Zea Mays
MIHGFTCSHFLLMVCAFVVFSDILKRVPDKLHVTKKAVLHVFPAALPQSLRLSCLCPRRQLSGLDVPFHAAPTSTHTPTVVTPCSSTRRSMVSQPVKTFFAITMYGTANSHFTSVVWKASTNSNALFLIAAAHNLLCLKLGKEIGVSIGNP

SEQ ID NO: 178338 - protein, 166 aa, Zea Mays
MSGQVSSILTGYKLKMIHGFTCSHFLLMVCAFVVFSDILKRVPDKLHVTKKAVLHVFPAALPQSLRLSCLCPRRQLSGLDVPFHAAPTSTHTPTVVTPCSSTRRSMVSQPVKTFFAITMYGTANSHFTSVVWKASTNSNALFLIAAAHNLLCLKLGKEIGVSIGNP

SEQ ID NO: 178339 - protein, 226 aa, Zea Mays
MQEVKPGIYVTYNDDFFDWPFLEKRAAHHGIKMNEEIGFQCDNNQGECRAKFSCHLDCFAWVKRDSYLPQGSQGLKAVTKAKLRYDPLEVNPEDMVRFAMEQPQTMASYSVSDDVATYYLYMTYVHPFIFSLATIIPMLPDEVLWKGSGTLCEILLMVQLALLTKSASSSACPIVIQILIWDVEVQPNRHAVLGASESRPDLHDYWGSRNICNIVSKLDSHMSVLS

SEQ ID NO: 178340 - protein, 168 aa, Zea Mays
MQEVKPGIYVTYNDDFFDWPFLEKRAAHHGIKMNEEIGFQCDNNQGECRAKFSCHLDCFAWVKRDSYLPQGSQGLKAVTKAKLRYDPLEVNPEDMVRFAMEQPQTMASYSVSDDVATYYLYMTYVHPFIFSLATIIPMLPDEVLWKGSGTLCEILLMVQAFKAGGTQL

SEQ ID NO: 178341 - protein, 211 aa, Zea Mays
MSTNHVYVFKKRQPNKFAYVAEVRSMAENQNRPASGMFVRMLSRAGAKGCVGEDIDDLQYTPKPEFEGYFRVKNVQTEEIGFQCDNNQGECRAKFSCHLDCFAWVKRDSYLPQGSQGLKAVTKAKLRYDPLEVNPEDMVRFAMEQPQTMASYSVSDDVATYYLYMTYVHPFIFSLATIIPMLPDEVLWKGSGTLCEILLMVQAFKAGGTQL

SEQ ID NO: 178342 - protein, 256 aa, Zea Mays
MSTNHVYVFKKRQPNKFAYVAEVRSMAENQNRPASGMFVRMLSRAGAKGCVGEDIDDLQYTPKPEFEGYFRVKNVQTELDLLKAWFSHMQEVKPGIYVTYNDDFFDWPFLEKRAAHHGIKMNEEIGFQCDNNQGECRAKFSCHLDCFAWVKRDSYLPQGSQGLKAVTKAKLRYDPLEVNPEDMVRFAMEQPQTMASYSVSDDVATYYLYMTYVHPFIFSLATIIPMLPDEVLWKGSGTLCEILLMVQAFKAGGTQL

SEQ ID NO: 178343 - protein, 98 aa, Zea Mays
MNERTGGSADFYCDGTAGVRRGGIEECKDKAGHRSIWAGSRPYLVRLRLDGQPLAARGAVVQSDPFFGARPCVVSIGFPRSRERGGHASGEGRRCPRA

SEQ ID NO: 178344 - protein, 82 aa, Zea Mays
MDKLMVFFSFRAHCSYIVGTTIYEPTDLLLHFRGSALRLQMIQLYCGEFLLGIKDKGTKAAVSDSTDEEAAQAPLLAKWTRP

SEQ ID NO: 178345 - protein, 234 aa, Zea Mays
MDIQKLEDEQNFKFRGFREVIDLLSSSQKPIISYSCLNDLTMLHTKFIAPLPPNMHEFMCSLKMVFPNVVDISHLWRQIGPLRKAKNIQAALSYLQRQYFVPIEIEIPQQDGTSSITKNEQNVLRITKLFAKLSNLLKISPECQLQSREQCTAVEEYCNIFYPSCVVGGSDDANFAFESDTTETVSTDNIIFLWGFREKSVKELKSYLIGLHQAFSEDFEVKLLDKTCSAFDIP

SEQ ID NO: 178346 - protein, 272 aa, Zea Mays
MNEMQNKIEQKTFLEMKLVDPFDDMSKRFECTMIVTRIADNKPWFYQGCTKCNTSTRYEGKTYICKQGHISSQMVHRYKISLYATDGTYELEFVLFDERATSLIGKTVEKLLRQSNKSELPEEIKAIVGEKLTVVTKLFPGKSIKKRGPNKDNKDPTFDILSIKKRHGKDLLLSVFKKEEPVVLHSASSSQLPKLPPLVPIEPKTQDIQTSGSEAASPHELQLMEIDQTSCFDNLSVSYKRNFNAIDDSDKEETHGADQLSVFAKRPKMKNN

SEQ ID NO: 178347 - protein, 336 aa, Zea Mays
MFHTIHLVRDGHDDMALGDLLRRKSQEGVQVLLLVWDDPTSRRLLGIKMEGYMGTRDEETRRFFKHSSVQILLCPRSAGKRHSWVKQQETGTILTHHQKTVILDADAGNHRRKIVAFMGGLDLCGGRYDTPKHTLFRTLQTFHKEDYYNPNFAVEDARGPREPWHDLHSKIDGPEAYDVLKNFEERWLKASKRSAAKKLSKLSRSHNDSLLWINKIPDIIAIDDEIYSNDDDPERWDVQIFRSIDSNSVKGFPKDPRKATSKNLVCGKNVLIDMSVHTAYVNAIRGAQHFIYIENQYFLGSSFNWDSHRDVDFRVQDVSMGRANKGDGALPPSCVF

SEQ ID NO: 178348 - protein, 381 aa, Zea Mays
MYASSDLRQGPRLICSAEKRRTVCVLKLSEVRLGNGDGYQHGQCWRDVYDAICQARRLIYIIGWSMFHTIHLVRDGHDDMALGDLLRRKSQEGVQVLLLVWDDPTSRRLLGIKMEGYMGTRDEETRRFFKHSSVQILLCPRSAGKRHSWVKQQETGTILTHHQKTVILDADAGNHRRKIVAFMGGLDLCGGRYDTPKHTLFRTLQTFHKEDYYNPNFAVEDARGPREPWHDLHSKIDGPEAYDVLKNFEERWLKASKRSAAKKLSKLSRSHNDSLLWINKIPDIIAIDDEIYSNDDDPERWDVQIFRSIDSNSVKGFPKDPRKATSKNLVCGKNVLIDMSVHTAYVNAIRGAQHFIYIENQYFLGSSFNWDSHRDVGANNL

SEQ ID NO: 178349 - protein, 284 aa, Zea Mays
MLAFSGCYYGGGEKERRELGAIRKRWKGLHPNPEKGRRQGRCPLTPEEVGLMLRALGYRKDVHIYVASGEIYGGARTLAPLKALFPNLHTKETISSKEELAPFSKYSSRMAALDFIVCDESDAFVANNNGNMAKILAGRRRYFGHKRTIRPNAKRLYPLFLNRGNMSWDAFSSKVHMVQKGFMGEPKELRPGRGEFHENPSTCICERTDGKAVARAKSQDDQVLNSVADQGKGIGEPAVPNHTDEEAGEPDDDEDVPADKEVVDAEMVDDVLAGDPELEQILSD

SEQ ID NO: 178350 - protein, 319 aa, Zea Mays
MEEFERREISRAPTNGSAVRDDLWGSKLASKFYGCSNSSSRFLDSNITTQPERYLMIVTSGGLNQQRTGIIDAVVAARILNATLVVPKLDQASFWKDSSNFSDIFYADWFISSLSKDVKIVKELPHIGGKLRAPHRMRVPRKCTERCYLNRVLPALLKKHVIRLTKFDYRLANRLQTDLQKLRCRVNYHALRFTAPIQEMGEKLIQRMRERSMYFIALHLRFEPDMLAFSGCYYGGGEKERRELGAIRKRWKGLHPNPEKGRRQGRCPLTPEEVGLMLRALGYRKDVHIYVASGEIYGGDTLGTRERSDQMPKGSIPYF

SEQ ID NO: 178351 - protein, 310 aa, Zea Mays
MGEKLIQRMRERSMYFIALHLRFEPDMLAFSGCYYGGGEKERRELGAIRKRWKGLHPNPEKGRRQGRCPLTPEEVGLMLRALGYRKDVHIYVASGEIYGGARTLAPLKALFPNLHTKETISSKEELAPFSKYSSRMAALDFIVCDESDAFVANNNGNMAKILAGRRRYFGHKRTIRPNAKRLYPLFLNRGNMSWDAFSSKVHMVQKGFMGEPKELRPGRGEFHENPSTCICERTDGKAVARAKSQDDQVLNSVADQGKGIGEPAVPNHTDEEAGEPDDDEDVPADKEVVDAEMVDDVLAGDPELEQILSD

SEQ ID NO: 178352 - protein, 509 aa, Zea Mays
MEEFERREISRAPTNGSAVRDDLWGSKLASKFYGCSNSSSRFLDSNITTQPERYLMIVTSGGLNQQRTGIIDAVVAARILNATLVVPKLDQASFWKDSSNFSDIFYADWFISSLSKDVKIVKELPHIGGKLRAPHRMRVPRKCTERCYLNRVLPALLKKHVIRLTKFDYRLANRLQTDLQKLRCRVNYHALRFTAPIQEMGEKLIQRMRERSMYFIALHLRFEPDMLAFSGCYYGGGEKERRELGAIRKRWKGLHPNPEKGRRQGRCPLTPEEVGLMLRALGYRKDVHIYVASGEIYGGARTLAPLKALFPNLHTKETISSKEELAPFSKYSSRMAALDFIVCDESDAFVANNNGNMAKILAGRRRYFGHKRTIRPNAKRLYPLFLNRGNMSWDAFSSKVHMVQKGFMGEPKELRPGRGEFHENPSTCICERTDGKAVARAKSQDDQVLNSVADQGKGIGEPAVPNHTDEEAGEPDDDEDVPADKEVVDAEMVDDVLAGDPELEQILSD

SEQ ID NO: 178353 - protein, 72 aa, Zea Mays
MLNLPIALLIILTKNYFNFISHHSYLFNLSNDSANRNNESAHHTKIRLEPTKSTMLLSFKHSEQQLTFIQDI

SEQ ID NO: 178354 - protein, 76 aa, Zea Mays
MQAILDETKARINITMQQHQHAAEVEIGWQTVMSHGLNVYSSSQRQGKLTPYEADSSVLSLYNSSLNHSGHKWFTS

SEQ ID NO: 178355 - protein, 142 aa, Zea Mays
MYTYLIIHGIKHLAINNFCQVITFPLVTQCSSMDQAFSLAARSRRFKSSFYPCKVNINTRHGEALRPHTHQPSPSIPWQQIRAHHLGVQCLTDPDCRRAVTAHVPTITGMGDHVSGRVRGYVCWQVQSGTRLTDLPYFSARA

SEQ ID NO: 178356 - protein, 143 aa, Zea Mays
MALAASSPLHAVPPAPALHTPPEKRGGTPSTGCTAGRHSVAHPSRWSGPPPSQHDSTSGDQVLGSQRPAVPAVQHDSDSTSGPRLRAFCCAGSSVLLSTAPRVQEDVYSKFWEGKSFLEDLPLNQKETLCNQQLWKLHVLHQL

SEQ ID NO: 178357 - protein, 144 aa, Zea Mays
MGGKILFGGSAIESEGNFVQPTIVEITRSAPVVKEELFGPVLYVMKFQTLKEAIEINNSVPQGLSSFIFTKWPDIIFKWLGPHGSDCGIVNVNIPTNGAEIGGAFGGEKAAGGGREAGSDSWKQYMRRATWREVLEVVSHLFTP

SEQ ID NO: 178358 - protein, 69 aa, Zea Mays
MRSTRGSGCGQGRLVAKVALQSDDDELVAMNDPLISTNYMVYPWSLYRLIWYFNGLTGPEIVGQHGSVP

SEQ ID NO: 178359 - protein, 225 aa, Zea Mays
MQGGSSGIVYGGLKYQARCIADVRADASSTTFLAGTLSLKEENEVHLIRLSPAESELVCDGVFYHPNEIWDLKSCPFDHRVFSTVYTSGEGFGASVWKIPELNGQSNSPQLEQLFELSGHTGKIRRVIWWPLGKHDKLISIDDRNIFLWNVDMSNKSAKVISQGSADMLPNLSGGAWDPHNHNSIASISDSSLHLWDLRSMEKSSAIEHAHIRDVDYNPKKQHII

SEQ ID NO: 178360 - protein, 61 aa, Zea Mays
MEHGAKQRGGVETYLRRRAGRSMIGGSRQRSVSSFGESRRRRLPSCLWADGMWPAQKPDAT

SEQ ID NO: 178361 - protein, 57 aa, Zea Mays
MGRPEGAKCLCDCIPMRGRPSLLPSFVCSLLKHGMQEVSIKLVSFLTGMFGQSGMER

SEQ ID NO: 178362 - protein, 443 aa, Zea Mays
MMSELLNQKSSVQGKVPSGYFNALFELSGAWLTDAKETKHLAFDGYFISLYNLHLKASPLVLRDEVKKAVPSKWDPIALSWFIKNYGTHIIVEMGIGGQDVICVKQSHSSTISTVDLKLHLEDLGDFLFSDGKNHSPIHRKTKDGKSKVPDVFVRIVQQPNNLHLSSYSETSTKDGLTVTCSKRGGEAYLPNHSKWLQTVAKKPDAIMFKFVPITSLLTGIPGSGYLSHAINLYLRYKPDLQDLQYFLEFQVPLQWAPMFNELVLGPQKRKSSYPSMQFRFLGPRLQVSTSQFSETGGWPTAIPGGQEVQPVGHPCPAPVQCSKHDWRLRGIFNVRMARVPRQRPGVRRGHPVEEVLVRLHLRRQVQPGVAQESSRRSLYRHWRAARHEGGLVQEGPPSAPPLHPHPQLHHPEDRMDERSGGVSEGELPDDDQHDTELPVHAA

SEQ ID NO: 178363 - protein, 106 aa, Zea Mays
MSRRQLDLAIHGLPAPAPTPPWSPLSECPPLGQVATASRSPVRHARPGRASTGITGEWDTPLEPARLPLCSSQPHTPMSERMRASRRGDARGQRIGGGAVAVSPHR

SEQ ID NO: 178364 - protein, 66 aa, Zea Mays
MRLRMSKHPLSSRDYTRSNTSAAISVWRQAWTSQGNRDETGRNTSAAYMCRTKSGLGCEHQICEVC

SEQ ID NO: 178365 - protein, 81 aa, Zea Mays
MCSKAGSSYAGTQVTVPGCLPLIGLKDTKRRIPKNSGVPSTHHESSMEGSLCSLFIDRPPNTKKKGSTRAKHSRSLFSQTI

SEQ ID NO: 178366 - protein, 125 aa, Zea Mays
MGTQRGAWKRGRRRGFLTCARRTTDQARKEDGDFGRMLRGVRTQAPTARTSMARRGCCLTRQTASRSLGGYRREIWGAMCFASWPWVESWGRRIGGGAVGRWRAGGRGMAREWLACAARRASSQP

SEQ ID NO: 178367 - protein, 249 aa, Zea Mays
MLFLTSSNFFCRSGETIISNSSKNAGTYWRTMLPFSYAVVSGAIGSCSVLFAKSLSNMMRLTMNSRYEFHSWFTYSIVLLFLCTAGFWMGRLNEGLSLFDAILIVPMFQIAWTFFSICTGFVYFQEYQVFDTLRIIMVVLGMTFVFVGISLLAPDDTKADTKDGSSTAEESIIDMDRNGKMQMEETDTDDSNSFVTSVKAKAKRVLLKAKVIGFLSGSDSTIDLSQICLSPDLVCSLHAPCPLALGRTQ

SEQ ID NO: 178368 - protein, 309 aa, Zea Mays
MVATTFIVFGNIFLVSFGNHQSPVYTPEQLIAKYSNLVFVLYCMSLVFVVAFNHYLYRSGETIISNSSKNAGTYWRTMLPFSYAVVSGAIGSCSVLFAKSLSNMMRLTMNSRYEFHSWFTYSIVLLFLCTAGFWMGRLNEGLSLFDAILIVPMFQIAWTFFSICTGFVYFQEYQVFDTLRIIMVVLGMTFVFVGISLLAPDDTKADTKDGSSTAEESIIDMDRNGKMQMEETDTDDSNSFVTSVKAKAKRVLLKAKSACSMSLGLGEDTISASSVLAMPMVSSRTTGFRGIEDDRSKYVPLRTTDWSNL

SEQ ID NO: 178369 - protein, 206 aa, Zea Mays
MVATTFIVFGNIFLVSFGNHQSPVYTPEQLIAKYSNLVFVLYCMSLVFVVAFNHYLYRSGETIISNSSKNAGTYWRTMLPFSYAVVSGAIGSCSVLFAKSLSNMMRLTMNSRYEFHSWFTYSIVLLFLCTAGFWMGRLNEGLSLFDAILIVPMFQIAWTFFSICTGFVYFQEYQVFDTLRIIMVVLGMTFVFVGISLLAPDDTKGL

SEQ ID NO: 178370 - protein, 70 aa, Zea Mays
MGLMADKNIGFVKIKWGEEPFPMGTNIRARSGRSRTSSGEENHHDIQTVLTNGDTSSNGADTSGPTKDTE

SEQ ID NO: 178371 - protein, 927 aa, Zea Mays
MGRVDPQPYKPRGQKSAFSLEHKTFGQERHVNMPPSLWRADQDPYVQSDSSLFPDGRSTNPYEAYNENGLFSSSLSEIFDRKLGLRSNDVLLHQPLEKVEPTHVDDEPFELTEEIEAQIIGNILPDDDDLLSGVDVGYTAHASNGDDVDDDIFYTGGGMELETVENKKSTEPNSGANDGLGSLNGTMNGQHPYGEHPSRTLFVQNINSNVEDSELKVLFEHYGEISNLYTACKHRGFVMISYYDIRSSWNAMRALQNKPLRHRKLDIHYSIPKDNPSGKDINQGMLVVFNVDPSVTNNDIHKIFSDYGEIKEIRDAPQKGHHKVIEFYDVRAAEGAVRALNRSDLAGKKINLGTVGLSGVRRLTQHMSKESGQEEFGVCKLGSLSTNSPPLPSLGSSYMVAMTSSGRENGSIHGLHSGLLTSMSPFREASFPGLSSTIPQSLSSPIGIASATTHSNQAPLGELSHSLSRMNGHMNYGFQGLGALHPHSLPEVHDGANNGTPYNLNTMVPIGVNSNSRTAEAVDCRHLHKVGSSNLNGHSFDRVGEGAMGFSRSGSGPVHGHQLMWNNSNNLQRHPNSPVLWQNPGSFVNNVPSRSPAQMHGVPRAPSHMIENVLPMHHHHVGSAPAINPSLWDRRHGYAGELTEASSFHLGSVGSLGFPGSPQLHGLELNNIFSHTGGNRMDPTVSSAQISAPSPQQRGPMFHGRNPMVPLPSFDSPGERIRSMRNDSGANQSDNKRQYELDVDRIMRGVDSRTTLMIKNIPNKYTSKMLLAAIDESHKGTYDFIYLPIDFKNKCNVGYAFINMTNAQHIIPFYQTFNGKKWEKFNSEKVASLAYARIQGKTALIAHFQNSSLMNEDKRCRPILFHSDGPNAGDQEPFPMGTNIRARSGRSRTSSGEENHHDIQTVLTNGDTSSNGADTSGPTKDTE

SEQ ID NO: 178372 - protein, 529 aa, Zea Mays
MVAMTSSGRENGSIHGLHSGLLTSMSPFREASFPGLSSTIPQSLSSPIGIASATTHSNQAPLGELSHSLSRMNGHMNYGFQGLGALHPHSLPEVHDGANNGTPYNLNTMVPIGVNSNSRTAEAVDCRHLHKVGSSNLNGHSFDRVGEGAMGFSRSGSGPVHGHQLMWNNSNNLQRHPNSPVLWQNPGSFVNNVPSRSPAQMHGVPRAPSHMIENVLPMHHHHVGSAPAINPSLWDRRHGYAGELTEASSFHLGSVGSLGFPGSPQLHGLELNNIFSHTGGNRMDPTVSSAQISAPSPQQRGPMFHGRNPMVPLPSFDSPGERIRSMRNDSGANQSDNKRQYELDVDRIMRGVDSRTTLMIKNIPNKYTSKMLLAAIDESHKGTYDFIYLPIDFKNKCNVGYAFINMTNAQHIIPFYQTFNGKKWEKFNSEKVASLAYARIQGKTALIAHFQNSSLMNEDKRCRPILFHSDGPNAGDQEPFPMGTNIRARSGRSRTSSGEENHHDIQTVLTNGDTSSNGADTSGPTKDTE

SEQ ID NO: 178373 - protein, 986 aa, Zea Mays
MPFQVMDPRHHLSQFTNTTVAASSFSEEQLRLPTERLVGFWKQESLHHIGSKSVASSPIEKPQPIGTKTMGRVDPQPYKPRGQKSAFSLEHKTFGQERHVNMPPSLWRADQDPYVQSDSSLFPDGRSTNPYEAYNENGLFSSSLSEIFDRKLGLRSNDVLLHQPLEKVEPTHVDDEPFELTEEIEAQIIGNILPDDDDLLSGVDVGYTAHASNGDDVDDDIFYTGGGMELETVENKKSTEPNSGANDGLGSLNGTMNGQHPYGEHPSRTLFVQNINSNVEDSELKVLFEHYGEISNLYTACKHRGFVMISYYDIRSSWNAMRALQNKPLRHRKLDIHYSIPKDNPSGKDINQGMLVVFNVDPSVTNNDIHKIFSDYGEIKEIRDAPQKGHHKVIEFYDVRAAEGAVRALNRSDLAGKKINLGTVGLSGVRRLTQHMSKESGQEEFGVCKLGSLSTNSPPLPSLGSSYMVAMTSSGRENGSIHGLHSGLLTSMSPFREASFPGLSSTIPQSLSSPIGIASATTHSNQAPLGELSHSLSRMNGHMNYGFQGLGALHPHSLPEVHDGANNGTPYNLNTMVPIGVNSNSRTAEAVDCRHLHKVGSSNLNGHSFDRVGEGAMGFSRSGSGPVHGHQLMWNNSNNLQRHPNSPVLWQNPGSFVNNVPSRSPAQMHGVPRAPSHMIENVLPMHHHHVGSAPAINPSLWDRRHGYAGELTEASSFHLGSVGSLGFPGSPQLHGLELNNIFSHTGGNRMDPTVSSAQISAPSPQQRGPMFHGRNPMVPLPSFDSPGERIRSMRNDSGANQSDNKRQYELDVDRIMRGVDSRTTLMIKNIPNKYTSKMLLAAIDESHKGTYDFIYLPIDFKNKCNVGYAFINMTNAQHIIPFYQTFNGKKWEKFNSEKVASLAYARIQGKTALIAHFQNSSLMNEDKRCRPILFHSDGPNAGDQSYYNKFTNYNIEKGVPNATVGSTAALGLPFTNYNIEMSTNLI

SEQ ID NO: 178374 - protein, 239 aa, Zea Mays
MSTAGDPAVAAAAAAAAATPSGRAPRLPRWTRQEILVLIEGKRMVEGRGGRGARGRAAAAAASGEASAVAALEPKWAAVAEYCRRHGLERGPVQCRKRWSNLAGDYKKVKEWERAAAASREPSFWAMRNDARRERRLPGFFDREVYDILEGRGRAIVDGRSARNAAAEQPAPVRVDEDKEAEVPEAVFDSGRPATEEALFSEDEEEEEEDAPPVAPPPPPPPVIAVPVSARGIKATTEC

SEQ ID NO: 178375 - protein, 55 aa, Zea Mays
MNNTRLVFVRRSPLDDHPLSWYSFNYPSSDSSISIIMRSSPRLGSTWLWFSVSRN

SEQ ID NO: 178376 - protein, 356 aa, Zea Mays
MLSLLHHQNLVNLIGYCADGDQRLLVYEYMPSGSLEDHLHDLPLDKEALDWNTRMKIAAGAAKGLEYLHDKANPPVIYRDFKSSNILLDESFHPKLSDFGLAKLGPVGDKSHVSTRVMGTYGYCAPEYAMTGQLTVKSDVYSFGVVLLELITGRRAIDSTRPHGEQNLVSWARPLFNDRRKLPKMADPRLEGRYPMRGLYQALAVASMCIQSEAASRPLIADVVTALSYLASQPYDPNAALASRKPGGDQRSKPGENGRAVSRNDETGSSGHKTPAKDREDSPRDLPAILNKDLDRERMVAEAKMWGDRERMVAEAKMWGDRERMVAEAKMWGENWRDKRRAEIGQGSLDSVTGNS

SEQ ID NO: 178377 - protein, 338 aa, Zea Mays
MGLGNFPSDDPLSLRMLGMHGTVYANYAVDKADLLLAFGVRFDDRVTGKIEAFAGRAKIVHIDIDPAEIGKNKQPHVSICADVKLALQGMNTLLEGSTSKKSFDFGSWHDELDQQKREFPLGYKIFNEEIQPQYAIQVLDELTKGKAIIATGVGQHQMWAAQYYTYKRPRQWLSSAGLGAMGFGLPAAAGAAVANPGVTVVDIDGDGSFLMNIQELAMIRIENLPVKVFVLNNQHLGMVVQWEDRFYKANRAHTFLGNPENESEIYPDFVAIAKGFNIPAVRVTKKSEVHAAIKKMLEAPGPYLLDIIVPHQEHVLPMIPSGGAFKDMILDGDGRTVY

SEQ ID NO: 178378 - protein, 64 aa, Zea Mays
MQTPLQHGAVILTGQTNLLLVGIRHHSETMTSRTMFFTGLIRSMLKLVLMVLISTLVHSLFIPY

SEQ ID NO: 178379 - protein, 334 aa, Zea Mays
MGHFAVYKTYEVLAAHFFWPQMRRDVERLVARCTTCQKAKSRLSNHGLYMPLPIPTFPWLDISMDFVLGLPRTKKGRDSIFVVVDRFSKMAHFIPCHKTDDASKVAELFFREIIRLHGIPNTIVSDRDAKFLSHFWRSLWNKLGTKLLFSTTCHPQTDRQTDVVNRTLSTMLRAVLDKNLRRGEDCLLHIEFAYNRATHSSTKMCPFQIVYGYIPRTPIDLFSIDAEDAPHIEAVAHVEQMSDLHEQTHQNIAAANAKYQVAGSKGRKHVTLCWSEGRNATLRSKSPLLSRCSDRDKAGRDTLRLIGTRRRPATKASHSAASSSSEAHVRSGPL

SEQ ID NO: 178380 - protein, 412 aa, Zea Mays
MAAPPEGNVRLGEGWDEDDVLEPQPLEVIAPDVKSKKRNPAPGVRVVGRRIYDPENGKTCHQCRQKTTDFAAACKQVKKKGPCPVKYCLKCLLNRYGESAEEAAGKEDWICPKCRGICNCSFCRKKKGEMPTGIMAHIAKASGCTSVHDLLKKGSDVVSAAQAILKVNGSDKGTKRSRGTDAAAEVATEKDVNIGIDINTVIADEGDENIGVDLNSLPSVDTKKRQKRQKLKHRTKKDPADATSHGVNTEPLQMDGNLDFLNSKTVRPRGTPVTKIAGAELDDEDTGAAIQFIEFCRAFTEIFQIKKGQPEKILQDLVGGRELRFVSSVVAGFHINLLSVIQEGKGKKPLAYTRDGDAWVIDIGKYISESASISKGFPLNHINQGISGYKNLSPSCKLRVLNFLCDETLSTE

SEQ ID NO: 178381 - protein, 397 aa, Zea Mays
MAAPPEGNVRLGEGWDEDDVLEPQPLEVIAPDVKSKKRNPAPGVRVVGRRIYDPENGKTCHQCRQKTTDFAAACKQVKKKGPCPVKYCLKCLLNRYGESAEEAAGKEDWICPKCRGICNCSFCRKKKGEMPTGIMAHIAKASGCTSVHDLLKKGSDVVSAAQAILKVNGSDKGTKRSRGTDAAAEVATEKDVNIGIDINTVIADEGDENIGVDLNSLPSVDTKKRQKRQKLKHRTKKDPADATSHGVNTEPLQMDGNLDFLNSKTVRPRGTPVTKIAGAELDDEDTGAAIQFIEFCRAFTEIFQIKKGQPEKILQDLVGGRELRFVSSVVAGFHINLLSVIQEGKGKKPLAYTRDGDAWVIDIGKYISESASISKGFPLNHINQGISGYKNLSPSSS

SEQ ID NO: 178382 - protein, 400 aa, Zea Mays
MAAPPEGNVRLGEGWDEDDVLEPQPLEVIAPDVKSKKRNPAPGVRVVGRRIYDPENGKTCHQCRQKTTDFAAACKQVKKKGPCPVKYCLKCLLNRYGESAEEAAGKEDWICPKCRGICNCSFCRKKKGEMPTGIMAHIAKASGCTSVHDLLKKGSDVVSAAQAILKVNGSDKGTKRSRGTDAAAEVATEKDVNIGIDINTVIADEGDENIGVDLNSLPSVDTKKRQKRQKLKHRTKKDPADATSHGVNTEPLQMDGNLDFLNSKTVRPRGTPVTKIAGAELDDEDTGAAIQFIEFCRAFTEIFQIKKGQPEKILQDLVGGRELRFVSSVVAGFHINLLSVIQEGKGKKPLAYTRDGDAWVIDIGKYISESASISKGFPLNHINQGISGYKNLSPSSEELD

SEQ ID NO: 178383 - protein, 1308 aa, Zea Mays
MSTVDKMLIKGIRSFDPDNKNVITFFKPLTLIVGPNGAGKTTIIECLKLSCTGELPPNSRSGHTFVHDPKVAGETETKGQIKLRFKTAAGKDVVCIRSFQLTQKASKMEFKAIESVLQTINPHTGEKVCLSYRCADMDREIPALMGVSKAVLENVIFVHQDESNWPLQDPSTLKKKFDDIFSATRYTKALEVIKKLHKDQMQEIKTFRLKLENLQTVKDQAHKLRENIAQDQEKSDASKSQMEQLKEKICGTEREILQMETSLDELRRLQGQIDIKATERSTLLTQQHEKLAALSEENEDTDEELMEWQTKFEERIALLETKISKLVRDMDDEASYSSVLSKQNSELTHEIGKLQAEADAHLTMKHERDSDIKNICTKHNLGPVPEHPFTNDVAMNLTNRIKARLSSLENDLLDKKKSNEDQLDVLWKHYLKINARYSEVDGQIQSKIESMSGILRRRKDKEKERDAAEVELSKFNLSRIDERERHMQIEVERKTLALGERDYDSIISQKRTEVYSLEQKIKVLLREKDIINRNADERVKLGLKKDALESSKDKLNEIVNEHKDKIKKVLRGRNPFEKDMKKEINQAFWPVDKEYNELRSKSQEAEQELKFTHSKVTDAREQLTKLRRDMDAKRRFLDSKLQSILQISANVDMFPKVLQDAMNKRDEQKRLENFANGMREMLAPFEHLARKNHVCPCCERAFTPDEEDEFVKKQRMQNSSTAERSKALAMESSNAEALFQQLDKLRTIYDAYVKLVEETIPLAEKNLNQHLADESQKAQAFDDLLGVLAHVQMDRDAVEALLQPTDTIDRHVHEIQQLVKEVEDLEYALDSSGRGVKSLEEIQLELNFLQRTRDTLIVEVDDLRDQHRMLNEDMSSAQVRWHNAREEKVKASSILERFQKSEEELVLLAEEKEQLIVEKKLLEESLDPLSKEKESLLQEYNALKQKLDEEYHQLAERKREFQQELDALGRLSMKIKGYLDSKKNEKLKELQGRHVLCHSQLQSCMAKQQRISAELNKSKELLQGQGQLKRNIDDNLKYRKTKADVEQLTRDIESLEERLLSIGSLSAIEADLKRHSQEKERLNSEFNRWQGTLSVYQSNISKHKQELKLSQYKDIEKRYTNQFLQLKTTEMANKDLDRYYTALDKALMRFHSMKMEEINKIIKELWQQTYRGQDIDYISINSDSEGAGTRSYSYRVVMQTGDAELEMRGRCSAGQKVLASLIIRLALAETFCLNCGILALDEPTTNLDGPNAESLAAALLRIMEARKGQENFQLIVITHDERFAHLIGQRQLAEKYYRVSKDEKKLWL

SEQ ID NO: 178384 - protein, 1063 aa, Zea Mays
MSTVDKMLIKGIRSFDPDNKNVITFFKPLTLIVGPNGAGKTTIIECLKLSCTGELPPNSRSGHTFVHDPKVAGETETKGQIKLRFKTAAGKDVVCIRSFQLTQKASKMEFKAIESVLQTINPHTGEKVCLSYRCADMDREIPALMGVSKAVLENVIFVHQDESNWPLQDPSTLKKKFDDIFSATRYTKALEVIKKLHKDQMQEIKTFRLKLENLQTVKDQAHKLRENIAQDQEKSDASKSQMEQLKEKICGTEREILQMETSLDELRRLQGQIDIKATERSTLLTQQHEKLAALSEENEDTDEELMEWQTKFEERIALLETKISKLVRDMDDEASYSSVLSKQNSELTHEIGKLQAEADAHLTMKHERDSDIKNICTKHNLGPVPEHPFTNDVAMNLTNRIKARLSSLENDLLDKKKSNEDQLDVLWKHYLKINARYSEVDGQIQSKIESMSGILRRRKDKEKERDAAEVELSKFNLSRIDERERHMQIEVERKTLALGERDYDSIISQKRTEVYSLEQKIKVLLREKDIINRNADERVKLGLKKDALESSKDKLNEIVNEHKDKIKKVLRGRNPFEKDMKKEINQAFWPVDKEYNELRSKSQEAEQELKFTHSKVTDAREQLTKLRRDMDAKRRFLDSKLQSILQISANVDMFPKVLQDAMNKRDEQKRLENFANGMREMLAPFEHLARKNHVCPCCERAFTPDEEDEFVKKQRMQNSSTAERSKALAMESSNAEALFQQLDKLRTIYDAYVKLVEETIPLAEKNLNQHLADESQKAQAFDDLLGVLAHVQMDRDAVEALLQPTDTIDRHVHEIQQLVKEVEDLEYALDSSGRGVKSLEEIQLELNFLQRTRDTLIVEVDDLRDQHRMLNEDMSSAQVRWHNAREEKVKASSILERFQKSEEELVLLAEEKEQLIVEKKLLEESLDPLSKEKESLLQEYNALKQKLDEEYHQLAERKREFQQELDALGRLSMKIKGYLDSKKNEKLKELQGRHVLCHSQLQSCMAKQQRISAELNKSKELLQGQGQLKRNIDDNLKYRKTKADVEQLTRDIESLEERLLSIV

SEQ ID NO: 178385 - protein, 723 aa, Zea Mays
MSTVDKMLIKGIRSFDPDNKNVITFFKPLTLIVGPNGAGKTTIIECLKLSCTGELPPNSRSGHTFVHDPKVAGETETKGQIKLRFKTAAGKDVVCIRSFQLTQKASKMEFKAIESVLQTINPHTGEKVCLSYRCADMDREIPALMGVSKAVLENVIFVHQDESNWPLQDPSTLKKKFDDIFSATRYTKALEVIKKLHKDQMQEIKTFRLKLENLQTVKDQAHKLRENIAQDQEKSDASKSQMEQLKEKICGTEREILQMETSLDELRRLQGQIDIKATERSTLLTQQHEKLAALSEENEDTDEELMEWQTKFEERIALLETKISKLVRDMDDEASYSSVLSKQNSELTHEIGKLQAEADAHLTMKHERDSDIKNICTKHNLGPVPEHPFTNDVAMNLTNRIKARLSSLENDLLDKKKSNEDQLDVLWKHYLKINARYSEVDGQIQSKIESMSGILRRRKDKEKERDAAEVELSKFNLSRIDERERHMQIEVERKTLALGERDYDSIISQKRTEVYSLEQKIKVLLREKDIINRNADERVKLGLKKDALESSKDKLNEIVNEHKDKIKKVLRGRNPFEKDMKKEINQAFWPVDKEYNELRSKSQEAEQELKFTHSKVTDAREQLTKLRRDMDAKRRFLDSKLQSILQISANVDMFPKVLQDAMNKRDEQKRLENFANGMREMLAPFEHLARKNHVCPCCERAFTPDEEDEFVKKDAKLKYCREI

SEQ ID NO: 178386 - protein, 1191 aa, Zea Mays
MSTVDKMLIKGIRSFDPDNKNVITFFKPLTLIVGPNGAGKTTIIECLKLSCTGELPPNSRSGHTFVHDPKVAGETETKGQIKLRFKTAAGKDVVCIRSFQLTQKASKMEFKAIESVLQTINPHTGEKVCLSYRCADMDREIPALMGVSKAVLENVIFVHQDESNWPLQDPSTLKKKFDDIFSATRYTKALEVIKKLHKDQMQEIKTFRLKLENLQTVKDQAHKLRENIAQDQEKSDASKSQMEQLKEKICGTEREILQMETSLDELRRLQGQIDIKATERSTLLTQQHEKLAALSEENEDTDEELMEWQTKFEERIALLETKISKLVRDMDDEASYSSVLSKQNSELTHEIGKLQAEADAHLTMKHERDSDIKNICTKHNLGPVPEHPFTNDVAMNLTNRIKARLSSLENDLLDKKKSNEDQLDVLWKHYLKINARYSEVDGQIQSKIESMSGILRRRKDKEKERDAAEVELSKFNLSRIDERERHMQIEVERKTLALGERDYDSIISQKRTEVYSLEQKIKVLLREKDIINRNADERVKLGLKKDALESSKDKLNEIVNEHKDKIKKVLRGRNPFEKDMKKEINQAFWPVDKEYNELRSKSQEAEQELKFTHSKVTDAREQLTKLRRDMDAKRRFLDSKLQSILQISANVDMFPKVLQDAMNKRDEQKRLENFANGMREMLAPFEHLARKNHVCPCCERAFTPDEEDEFVKKQRMQNSSTAERSKALAMESSNAEALFQQLDKLRTIYDAYVKLVEETIPLAEKNLNQHLADESQKAQAFDDLLGVLAHVQMDRDAVEALLQPTDTIDRHVHEIQQLVKEVEDLEYALDSSGRGVKSLEEIQLELNFLQRTRDTLIVEVDDLRDQHRMLNEDMSSAQVRWHNAREEKVKASSILERFQKSEEELVLLAEEKEQLIVEKKLLEESLDPLSKEKESLLQEYNALKQKLDEEYHQLAERKREFQQELDALGRLSMKIKGYLDSKKNEKLKELQGRHVLCHSQLQSCMAKQQRISAELNKSKELLQGQGQLKRNIDDNLKYRKTKADVEQLTRDIESLEERLLSIGSLSAIEADLKRHSQEKERLNSEFNRWQGTLSVYQSNISKHKQELKLSQYKDIEKRYTNQFLQLKTTEMANKDLDRYYTALDKALMRFHSMKMEEINKIIKELWQQTYRGQDIDYISINSDSEGCYANW

SEQ ID NO: 178387 - protein, 1274 aa, Zea Mays
MSTVDKMLIKGIRSFDPDNKNVITFFKPLTLIVGPNGAGKTTIIECLKLSCTGELPPNSRSGHTFVHDPKVAGETETKGQIKLRFKTAAGKDVVCIRSFQLTQKASKMEFKAIESVLQTINPHTGEDPSTLKKKFDDIFSATRYTKALEVIKKLHKDQMQEIKTFRLKLENLQTVKDQAHKLRENIAQDQEKSDASKSQMEQLKEKICGTEREILQMETSLDELRRLQGQIDIKATERSTLLTQQHEKLAALSEENEDTDEELMEWQTKFEERIALLETKISKLVRDMDDEASYSSVLSKQNSELTHEIGKLQAEADAHLTMKHERDSDIKNICTKHNLGPVPEHPFTNDVAMNLTNRIKARLSSLENDLLDKKKSNEDQLDVLWKHYLKINARYSEVDGQIQSKIESMSGILRRRKDKEKERDAAEVELSKFNLSRIDERERHMQIEVERKTLALGERDYDSIISQKRTEVYSLEQKIKVLLREKDIINRNADERVKLGLKKDALESSKDKLNEIVNEHKDKIKKVLRGRNPFEKDMKKEINQAFWPVDKEYNELRSKSQEAEQELKFTHSKVTDAREQLTKLRRDMDAKRRFLDSKLQSILQISANVDMFPKVLQDAMNKRDEQKRLENFANGMREMLAPFEHLARKNHVCPCCERAFTPDEEDEFVKKQRMQNSSTAERSKALAMESSNAEALFQQLDKLRTIYDAYVKLVEETIPLAEKNLNQHLADESQKAQAFDDLLGVLAHVQMDRDAVEALLQPTDTIDRHVHEIQQLVKEVEDLEYALDSSGRGVKSLEEIQLELNFLQRTRDTLIVEVDDLRDQHRMLNEDMSSAQVRWHNAREEKVKASSILERFQKSEEELVLLAEEKEQLIVEKKLLEESLDPLSKEKESLLQEYNALKQKLDEEYHQLAERKREFQQELDALGRLSMKIKGYLDSKKNEKLKELQGRHVLCHSQLQSCMAKQQRISAELNKSKELLQGQGQLKRNIDDNLKYRKTKADVEQLTRDIESLEERLLSIGSLSAIEADLKRHSQEKERLNSEFNRWQGTLSVYQSNISKHKQELKLSQYKDIEKRYTNQFLQLKTTEMANKDLDRYYTALDKALMRFHSMKMEEINKIIKELWQQTYRGQDIDYISINSDSEGAGTRSYSYRVVMQTGDAELEMRGRCSAGQKVLASLIIRLALAETFCLNCGILALDEPTTNLDGPNAESLAAALLRIMEARKGQENFQLIVITHDERFAHLIGQRQLAEKYYRVSKDENQHSIIESQEIFD

SEQ ID NO: 178388 - protein, 931 aa, Zea Mays
MSTVDKMLIKGIRSFDPDNKNVITFFKPLTLIVGPNGAGKTTIIECLKLSCTGELPPNSRSGHTFVHDPKVAGETETKGQIKLRFKTAAGKDVVCIRSFQLTQKASKMEFKAIESVLQTINPHTGEKVCLSYRCADMDREIPALMGVSKAVLENVIFVHQDESNWPLQDPSTLKKKFDDIFSATRYTKALEVIKKLHKDQMQEIKTFRLKLENLQTVKDQAHKLRENIAQDQEKSDASKSQMEQLKEKICGTEREILQMETSLDELRRLQGQIDIKATERSTLLTQQHEKLAALSEENEDTDEELMEWQTKFEERIALLETKISKLVRDMDDEASYSSVLSKQNSELTHEIGKLQAEADAHLTMKHERDSDIKNICTKHNLGPVPEHPFTNDVAMNLTNRIKARLSSLENDLLDKKKSNEDQLDVLWKHYLKINARYSEVDGQIQSKIESMSGILRRRKDKEKERDAAEVELSKFNLSRIDERERHMQIEVERKTLALGERDYDSIISQKRTEVYSLEQKIKVLLREKDIINRNADERVKLGLKKDALESSKDKLNEIVNEHKDKIKKVLRGRNPFEKDMKKEINQAFWPVDKEYNELRSKSQEAEQELKFTHSKVTDAREQLTKLRRDMDAKRRFLDSKLQSILQISANVDMFPKVLQDAMNKRDEQKRLENFANGMREMLAPFEHLARKNHVCPCCERAFTPDEEDEFVKKQRMQNSSTAERSKALAMESSNAEALFQQLDKLRTIYDAYVKLVEETIPLAEKNLNQHLADESQKAQAFDDLLGVLAHVQMDRDAVEALLQPTDTIDRHVHEIQQLVKEVEDLEYALDSSGRGVKSLEEIQLELNFLQRTRDTLIVEVDDLRDQHRMLNEDMSSAQVRWHNAREEKVKASSILERFQKSEEELVLLAEEKEQLIVEKKRKRACCKSIML

SEQ ID NO: 178389 - protein, 1209 aa, Zea Mays
MEFKAIESVLQTINPHTGEKVCLSYRCADMDREIPALMGVSKAVLENVIFVHQDESNWPLQDPSTLKKKFDDIFSATRYTKALEVIKKLHKDQMQEIKTFRLKLENLQTVKDQAHKLRENIAQDQEKSDASKSQMEQLKEKICGTEREILQMETSLDELRRLQGQIDIKATERSTLLTQQHEKLAALSEENEDTDEELMEWQTKFEERIALLETKISKLVRDMDDEASYSSVLSKQNSELTHEIGKLQAEADAHLTMKHERDSDIKNICTKHNLGPVPEHPFTNDVAMNLTNRIKARLSSLENDLLDKKKSNEDQLDVLWKHYLKINARYSEVDGQIQSKIESMSGILRRRKDKEKERDAAEVELSKFNLSRIDERERHMQIEVERKTLALGERDYDSIISQKRTEVYSLEQKIKVLLREKDIINRNADERVKLGLKKDALESSKDKLNEIVNEHKDKIKKVLRGRNPFEKDMKKEINQAFWPVDKEYNELRSKSQEAEQELKFTHSKVTDAREQLTKLRRDMDAKRRFLDSKLQSILQISANVDMFPKVLQDAMNKRDEQKRLENFANGMREMLAPFEHLARKNHVCPCCERAFTPDEEDEFVKKQRMQNSSTAERSKALAMESSNAEALFQQLDKLRTIYDAYVKLVEETIPLAEKNLNQHLADESQKAQAFDDLLGVLAHVQMDRDAVEALLQPTDTIDRHVHEIQQLVKEVEDLEYALDSSGRGVKSLEEIQLELNFLQRTRDTLIVEVDDLRDQHRMLNEDMSSAQVRWHNAREEKVKASSILERFQKSEEELVLLAEEKEQLIVEKKLLEESLDPLSKEKESLLQEYNALKQKLDEEYHQLAERKREFQQELDALGRLSMKIKGYLDSKKNEKLKELQGRHVLCHSQLQSCMAKQQRISAELNKSKELLQGQGQLKRNIDDNLKYRKTKADVEQLTRDIESLEERLLSIGSLSAIEADLKRHSQEKERLNSEFNRWQGTLSVYQSNISKHKQELKLSQYKDIEKRYTNQFLQLKTTEMANKDLDRYYTALDKALMRFHSMKMEEINKIIKELWQQTYRGQDIDYISINSDSEGAGTRSYSYRVVMQTGDAELEMRGRCSAGQKVLASLIIRLALAETFCLNCGILALDEPTTNLDGPNAESLAAALLRIMEARKGQENFQLIVITHDERFAHLIGQRQLAEKYYRVSKDENQHSIIESQEIFD

SEQ ID NO: 178390 - protein, 1016 aa, Zea Mays
MSTVDKMLIKGIRSFDPDNKNVITFFKPLTLIVGPNGAGKTTIIECLKLSCTGELPPNSRSGHTFVHDPKVAGETETKGQIKLRFKTAAGKDVVCIRSFQLTQKASKMEFKAIESVLQTINPHTGEKVCLSYRCADMDREIPALMGVSKAVLENVIFVHQDESNWPLQDPSTLKKKFDDIFSATRYTKALEVIKKLHKDQMQEIKTFRLKLENLQTVKDQAHKLRENIAQDQEKSDASKSQMEQLKEKICGTEREILQMETSLDELRRLQGQIDIKATERSTLLTQQHEKLAALSEENEDTDEELMEWQTKFEERIALLETKISKLVRDMDDEASYSSVLSKQNSELTHEIGKLQAEADAHLTMKHERDSDIKNICTKHNLGPVPEHPFTNDVAMNLTNRIKARLSSLENDLLDKKKSNEDQLDVLWKHYLKINARYSEVDGQIQSKIESMSGILRRRKDKEKERDAAEVELSKFNLSRIDERERHMQIEVERKTLALGERDYDSIISQKRTEVYSLEQKIKVLLREKDIINRNADERVKLGLKKDALESSKDKLNEIVNEHKDKIKKVLRGRNPFEKDMKKEINQAFWPVDKEYNELRSKSQEAEQELKFTHSKVTDAREQLTKLRRDMDAKRRFLDSKLQSILQISANVDMFPKVLQDAMNKRDEQKRLENFANGMREMLAPFEHLARKNHVCPCCERAFTPDEEDEFVKKQRMQNSSTAERSKALAMESSNAEALFQQLDKLRTIYDAYVKLVEETIPLAEKNLNQHLADESQKAQAFDDLLGVLAHVQMDRDAVEALLQPTDTIDRHVHEIQQLVKEVEDLEYALDSSGRGVKSLEEIQLELNFLQRTRDTLIVEVDDLRDQHRMLNEDMSSAQVRWHNAREEKVKASSILERFQKSEEELVLLAEEKEQLIVEKKLLEESLDPLSKEKESLLQEYNALKQKLDEEYHQLAERKREFQQELDALGRLSMKIKGLGTWIPRKTKSLRNCREGMFFAILSYRVAWQNSKEYQLS

SEQ ID NO: 178391 - protein, 1170 aa, Zea Mays
MSTVDKMLIKGIRSFDPDNKNVITFFKPLTLIVGPNGAGKTTIIECLKLSCTGELPPNSRSGHTFVHDPKVAGETETKGQIKLRFKTAAGKDVVCIRSFQLTQKASKMEFKAIESVLQTINPHTGEKVCLSYRCADMDREIPALMGVSKAVLENVIFVHQDESNWPLQDPSTLKKKFDDIFSATRYTKALEVIKKLHKDQMQEIKTFRLKLENLQTVKDQAHKLRENIAQDQEKSDASKSQMEQLKEKICGTEREILQMETSLDELRRLQGQIDIKATERSTLLTQQHEKLAALSEENEDTDEELMEWQTKFEERIALLETKISKLVRDMDDEASYSSVLSKQNSELTHEIGKLQAEADAHLTMKHERDSDIKNICTKHNLGPVPEHPFTNDVAMNLTNRIKARLSSLENDLLDKKKSNEDQLDVLWKHYLKINARYSEVDGQIQSKIESMSGILRRRKDKEKERDAAEVELSKFNLSRIDERERHMQIEVERKTLALGERDYDSIISQKRTEVYSLEQKIKVLLREKDIINRNADERVKLGLKKDALESSKDKLNEIVNEHKDKIKKVLRGRNPFEKDMKKEINQAFWPVDKEYNELRSKSQEAEQELKFTHSKVTDAREQLTKLRRDMDAKRRFLDSKLQSILQISANVDMFPKVLQDAMNKRDEQKRLENFANGMREMLAPFEHLARKNHVCPCCERAFTPDEEDEFVKKQRMQNSSTAERSKALAMESSNAEALFQQLDKLRTIYDAYVKLVEETIPLAEKNLNQHLADESQKAQAFDDLLGVLAHVQMDRDAVEALLQPTDTIDRHVHEIQQLVKEVEDLEYALDSSGRGVKSLEEIQLELNFLQRTRDTLIVEVDDLRDQHRMLNEDMSSAQVRWHNAREEKVKASSILERFQKSEEELVLLAEEKEQLIVEKKLLEESLDPLSKEKESLLQEYNALKQKLDEEYHQLAERKREFQQELDALGRLSMKIKGYLDSKKNEKLKELQGRHVLCHSQLQSCMAKQQRISAELNKSKELLQGQGQLKRNIDDNLKYRKTKADVEQLTRDIESLEERLLSIGSLSAIEADLKRHSQEKERLNSEFNRWQGTLSVYQSNISKHKQELKLSQYKDIEKRYTNQFLQLKTTEMANKDLDRYYTALDKIWLQRRQLLVKVRNSASRLYVPDID

SEQ ID NO: 178392 - protein, 88 aa, Zea Mays
MPSHCHGNSPRSTTMLVVCRALEPRGRPPCLLRLCYSLERKSKVCLMEKEAKPRDTRQMFDNKPEPRFINILPSVESRLILTMSSMWF

SEQ ID NO: 178393 - protein, 102 aa, Zea Mays
MPRPQQPPSCSSASAASTSCRSSGRGCRHSALVPCRAHLPLFLLAPTASLNRSFYLRCGRPFAAAGPGREAVLLDLVRPRHRLLTPVAVQAARSSDAALSSP

SEQ ID NO: 178394 - protein, 64 aa, Zea Mays
MSGVVVFSLGNLPPKNPKPDLLLCCVPSARLGDHHSRFPPSSWLERFKERACDVAVRRREQPLY

SEQ ID NO: 178395 - protein, 76 aa, Zea Mays
MPRIWDRVSLNPAIPYMKIQSRTGSGEMARVARTLLAKDRLKGVVCSRVVRTCSCSGRSMGMVDICKVYEKHMLCG

SEQ ID NO: 178396 - protein, 88 aa, Zea Mays
MEGSLVETNSILEAGSVLPPGRRIPTGELWAGSPARFVRKLTNEEIMDIPKLATAINDLMQSHFSEFLPYSNAYLEVEKLKKSFSIPL

SEQ ID NO: 178397 - protein, 84 aa, Zea Mays
MAALPPACSSCGGLTELLNAMDAQWVAGPSSSVDAIDSVLFQPTAFVATGAHMQPGLLVHGPVKASHHVDSCEEFNTPKNIQSV

SEQ ID NO: 178398 - protein, 195 aa, Zea Mays
MSMSKQDLITAPTDNRFQIDVEKNWVESSKISALLQELEALRSSGAKSIVFSQWTAFLDLLQIPLSRNNFSFARLDGTLNLQQREKVIKEFSEDKGILVLLMSLKAGGVGINLTAASNAFVMDPWWNPAVEEQAVMRIHRIGQTKTVSIRRFIVKGTVEERMEAVQARKQRMISGALTDQEVRTARIEELKMLFS

SEQ ID NO: 178399 - protein, 562 aa, Zea Mays
MVKEREEQVAIVRMVLGEGTPEMDIIRALHMAGDDPTKAINILLDLNKAAPPLPPSPSPFPCPSPSPSPGKPAKALVDSTPPCKAPTRPMPTAEKPKSTTSNGGSEEHWWLVGSAEMVGLSTCKGRRITSGDVVTFSFPNATTAVGKSRPSRPALASCSSEIMRFSTPSHGEVGRIPNEWARCLLPLLKENKLKVKGSCKSAPEVLTIMDTVLLSVSIYINSSMFHDQKQSSPKAARFAPYDSTFHPLPALFKLIGLAPFIKAAFTPEDLYSRKRPTETKSSIGSPAAKLTSGRLRLSSDGNEDDHGEETVSDSDLDDIIGISDSCALEERAPPDSLMCDLRSYQKQALHWMLQLEKGSSSQDAATTLHPCWEAYKLEDKRELVLYLNVFSGDATTEFPSTLQLSRGGILADAMGLGKTIMTIALLLSDSSKGCITTQNAAQTPREASGLGESHDAVKKLANPFSFSKHKKPKAPLIGGSNLIICPMTLISQWKAEIEAHTKPGTANIYVHYGQNRPKDASIIGQSDIVLTTYGVVSSEFSIDKMGLCTLYIGSELCLTKHT

SEQ ID NO: 178400 - protein, 603 aa, Zea Mays
MGLGKTIMTIALLLSDSSKGCITTQNAAQTPREASGLGESHDAVKKLANPFSFSKHKKPKAPLIGGSNLIICPMTLISQWKAEIEAHTKPGTANIYVHYGQNRPKDASIIGQSDIVLTTYGVVSSEFSIDGSTENGALYSVHWFRVVLDEAHMIKSSKSLISLAAAALTADRRWCLTGTPIQNNLEDLYSLFRFLKVEPWRNWALWNKLVQKPYEEGDERGLKLLQSILKPIMLRRTKNCTDKEGRPILNLPPANIEVKYCVLSEAEKDFYEALFRRSKVKFDQFVEQGRVLHNYASILELLLRLRQCCDHPFLIMSRGDTKEYADLNKLAKRFLRGGNGAVNGDSCIPSRAYIKQVVQELQKDEGECPICLEAFEDAVLTPCAHRLCRECLLSSWRSATAGLCPVCRMSMSKQDLITAPTDNRFQIDVEKNWVESSKISALLQELEALRSSGAKSIVFSQWTAFLDLLQIPLSRNNFSFARLDGTLNLQQREKVIKEFSEDKGILVLLMSLKAGGVGINLTAASNAFVMDPWWNPAVEEQAVMRIHRIGQTKTVSIRRFIVKGTVEERMEAVQARKQRMISGALTDQEVRTARIEELKMLFS

SEQ ID NO: 178401 - protein, 624 aa, Zea Mays
MVKEREEQVAIVRMVLGEGTPEMDIIRALHMAGDDPTKAINILLDLNKAAPPLPPSPSPFPCPSPSPSPGKPAKALVDSTPPCKAPTRPMPTAEKPKSTTSNGGSEEHWWLVGSAEMVGLSTCKGRRITSGDVVTFSFPNATTAVGKSRPSRPALASCSSEIMRFSTPSHGEVGRIPNEWARCLLPLLKENKLKVKGSCKSAPEVLTIMDTVLLSVSIYINSSMFHDQKQSSPKAARFAPYDSTFHPLPALFKLIGLAPFIKAAFTPEDLYSRKRPTETKSSIGSPAAKLTSGRLRLSSDGNEDDHGEETVSDSDLDDIIGISDSCALEERAPPDSLMCDLRSYQKQALHWMLQLEKGSSSQDAATTLHPCWEAYKLEDKRELVLYLNVFSGDATTEFPSTLQLSRGGILADAMGLGKTIMTIALLLSDSSKGCITTQNAAQTPREASGLGESHDAVKKLANPFSFSKHKKPKAPLIGGSNLIICPMTLISQWKAEIEAHTKPGTANIYVHYGQNRPKDASIIGQSDIVLTTYGVVSSEFSIDGSTENGALYSVHWFRVVLDEAHMIKSSKSLISLAAAALTADRRWCLTGTPIQNNLEDLYSLFRFLKVEPWRNWALWGSWCC

SEQ ID NO: 178402 - protein, 532 aa, Zea Mays
MVKEREEQVAIVRMVLGEGTPEMDIIRALHMAGDDPTKAINILLDLNKAAPPLPPSPSPFPCPSPSPSPGKPAKALVDSTPPCKAPTRPMPTAEKPKSTTSNGGSEEHWWLVGSAEMVGLSTCKGRRITSGDVVTFSFPNATTAVGKSRPSRPALASCSSEIMRFSTPSHGEVGRIPNEWARCLLPLLKENKLKVKGSCKSAPEVLTIMDTVLLSVSIYINSSMFHDQKQSSPKAARFAPYDSTFHPLPALFKLIGLAPFIKAAFTPEDLYSRKRPTETKSSIGSPAAKLTSGRLRLSSDGNEDDHGEETVSDSDLDDIIGISDSCALEERAPPDSLMCDLRSYQKQALHWMLQLEKGSSSQDAATTLHPCWEAYKLEDKRELVLYLNVFSGDATTEFPSTLQLSRGGAEIEAHTKPGTANIYVHYGQNRPKDASIIGQSDIVLTTYGVVSSEFSIDGSTENGALYSVHWFRVVLDEAHMIKSSKSLISLAAAALTADRRWCLTGTPIQNNLEDLYSLFRFLKVEPWRNWAL

SEQ ID NO: 178403 - protein, 612 aa, Zea Mays
MVKEREEQVAIVRMVLGEGTPEMDIIRALHMAGDDPTKAINILLDLNKAAPPLPPSPSPFPCPSPSPSPGKPAKALVDSTPPCKAPTRPMPTAEKPKSTTSNGGSEEHWWLVGSAEMVGLSTCKGRRITSGDVVTFSFPNATTAVGKSRPSRPALASCSSEIMRFSTPSHGEVGRIPNEWARCLLPLLKENKLKVKGSCKSAPEVLTIMDTVLLSVSIYINSSMFHDQKQSSPKAARFAPYDSTFHPLPALFKLIGLAPFIKAAFTPEDLYSRKRPTETKSSIGSPAAKLTSGRLRLSSDGNEDDHGEETVSDSDLDDIIGISDSCALEERAPPDSLMCDLRSYQKQALHWMLQLEKGSSSQDAATTLHPCWEAYKLEDKRELVLYLNVFSGDATTEFPSTLQLSRGGILADAMGLGKTIMTIALLLSDSSKGCITTQNAAQTPREASGLGESHDAVKKLANPFSFSKHKKPKAPLIGGSNLIICPMTLISQWKAEIEAHTKPGTANIYVHYGQNRPKDASIIGQSDIVLTTYGVVSSEFSIDGSTENGALYSVHWFRVVLDEAHMIKSSKSLISLAAAALTADRRWCLTGTPIQDYGADILLLFFTHVFAY

SEQ ID NO: 178404 - protein, 399 aa, Zea Mays
MAARPSPKLLAMAAISHGSCVQPSSQRCSLPPIPLCSRSSLCLLPMALVPTCSASGSGSPALLPVPSRVCADLCSFIPRACFSVPTRARSSLRTAARSLHPARALALRQHVAPCRFSARPWKSRFPAPSARDARPAMEFSRCSCSPSMAPSFFIFASQVWLSSAPSCSLIQVSARRRPARPSRPCLCTVFLSMLCCCPCCRARLAPRVVVRRFRMLGSLAACPSLVLAAGQSAPLSLPGHDLALLLTSLLAESLLSLRSLTARRCVVRRRVCSNIADSSMVPIDELCFIGLSPSVRHMCGRRIRSLLNPVVLELVISLSSEFSLDSCPRQLAPDSILSSFVHPTSMSVPTCCLRLMLAPTKESQEDVEKQAPGRCPKCSTESSNKSSIVILVHAKIRED

SEQ ID NO: 178405 - protein, 142 aa, Zea Mays
MSFLVSYHCTQITVISASLMSSFLSGTVLMLLAWHVVGQGHHHDSASLCSVAPPQSSCVHLSPNRTARPTVDPAISSQRSDIDIVTRQHVCLSPHYLLHHGSVGLRVLIDTKLSISARSCPSSSASSSLFFCYVTSVRGLVR

SEQ ID NO: 178406 - protein, 73 aa, Zea Mays
MVASYFHLMKLGSLGNPSPTPLPGGFSLVLAPAGIPVGAPSVSFRLQQHRRAALSTVFSPEPSTTDPNSAALP

SEQ ID NO: 178407 - protein, 181 aa, Zea Mays
MVSAAAAPAPCTLAAPARPHGVPRLPVAPARADAVVSQLHRLASGRASTACLPSPLGLGCRIPCLSLSSFITLRWPSGRPPQHRRSTLASSSRLWSASVVLLDLTVVLGLAVLLDHSAIGSLSGFNLAVDLLLITPNCSPASSSCPRRHAPYVSLSARPGMGSRRQPSAWMLVLEHLQQFA

SEQ ID NO: 178408 - protein, 59 aa, Zea Mays
MFYDHSNSLLNITGVSQSYIIGCLGRGDHAEPFHPFIVVSCFKGKFLLRYLCSIAIKYS

SEQ ID NO: 178409 - protein, 118 aa, Zea Mays
MFYDHSNSLLNITGVSQSYIIGCLGRGDHAEPFHPFIVVSCFKEHLEEEFEVEVEGELVPSSEPSPTEVVTEGAPEGAPFGFAANYNILVEEPDSPPHQGKPQCICHPPCIYKILSLI

SEQ ID NO: 178410 - protein, 60 aa, Zea Mays
MAGQRARYQGDPTGAVGEEAEELELGERLGVRREQRELGTAARELSCVAGGVPGKNDAMD

SEQ ID NO: 178411 - protein, 194 aa, Zea Mays
MKVVLWSRLAVSMVRIRQDRRVGLQLQRVPCDVNGNVANVTADACDAFGHPDQDKSFKRRSGQRSRVRKLQYIAELERTVESLQNIGADLAVRMSSLFHLHNALSMENKQLRIHISSLQQAKLIKDGQTQALKNEAERLKQMSARHRRSRSVTSCYDLSSFGADATAVNWQMPDMARLSLNGSSSVSPRSGYGI

SEQ ID NO: 178412 - protein, 54 aa, Zea Mays
MVLGHQAYIDTVLNRLRRRHYTETPFSCKSPVRSQLNHFKPKVWYLAKVHLFRC

SEQ ID NO: 178413 - protein, 96 aa, Zea Mays
MTIDDIDVVARQFYLTEIMVWRHVWAFCQAQAQGVRMERTSRWPKLAQAARRVQDYNRRQPDEHATRHTTATTVESAIKLGELDKHDHGRVLTRIG

SEQ ID NO: 178414 - protein, 72 aa, Zea Mays
MHDSGWVFARMEEKHTAWMKLEDLTRDGAQLGVGLGEVAGERKKSTARPARWRIGTQGSCHVHQAEDWAAVG

SEQ ID NO: 178415 - protein, 62 aa, Zea Mays
MHLYFPRLIVAIMLRKMFLGWCYFTNNKDGFCLCYVSHFLFCIICFCLFSIFFWLINVMGIH

SEQ ID NO: 178416 - protein, 213 aa, Zea Mays
MSPRLVYAMDIAQYLCIIGFKKLCQILKMADVWSCGVTLYVMLVGAYPFEDPDDPKNFRKTIGRIVSIQYQIPEYVHISQDCRQLLARIFVANPAKRITIREIRNHPWFLKNLPRELTEAAQAKYYKKDNGAPTFSDQTVEEIMKIVEEARTPPQSPAPVAGFGWAEEEEQEDGKKPEDDEQDGEDEQYDGEDEYDKQVKQVHASGDFRHLIK

SEQ ID NO: 178417 - protein, 288 aa, Zea Mays
MEYAAGGELFDRICSAGRFSEDEARYFFQQLICGVSYCHFMQICHRDLKLENTLLDGSPAPRLKICDFGYSKSSLLHSKPKSTVGTPAYIAPEVLSRREYDGKMADVWSCGVTLYVMLVGAYPFEDPDDPKNFRKTIGRIVSIQYQIPEYVHISQDCRQLLARIFVANPAKRITIREIRNHPWFLKNLPRELTEAAQAKYYKKDNGAPTFSDQTVEEIMKIVEEARTPPQSPAPVAGFGWAEEEEQEDGKKPEDDEQDGEDEQYDGEDEYDKQVKQVHASGDFRHLIK

SEQ ID NO: 178418 - protein, 357 aa, Zea Mays
MERYELLKDIGSGNFGVARLMRNKDTKELVAMKYIPRGLKIDENVAREIINHRSLRHPNIIRFKEVVLTPTHLAIVMEYAAGGELFDRICSAGRFSEDELICGVSYCHFMQICHRDLKLENTLLDGSPAPRLKICDFGYSKSSLLHSKPKSTVGTPAYIAPEVLSRREYDGKMADVWSCGVTLYVMLVGAYPFEDPDDPKNFRKTIGRIVSIQYQIPEYVHISQDCRQLLARIFVANPAKRITIREIRNHPWFLKNLPRELTEAAQAKYYKKDNGAPTFSDQTVEEIMKIVEEARTPPQSPAPVAGFGWAEEEEQEDGKKPEDDEQDGEDEQYDGEDEYDKQVKQVHASGDFRHLIK

SEQ ID NO: 178419 - protein, 527 aa, Zea Mays
MRGSSALRSGAYPQSIQHKSTVFAPKMPELRSAVTPSPAPAVPVPVAMPLRVAAQVQAPPHQGHQAPAHAAPPKLLNASNKTRKKQAAQPNPTISPSSIQAAAIAAGGRLATASTAANFLKVAQSKNAVHIRSLGATSLKPSASFKASIVVEHGTQPGGSQHLEPLNASAVHDVSGVAAVNQSGPLAGACSETKKALSTALAPVPCDSEEKEDDSEFCVITIDDLFPEDAKQPETVDTKAKQPQTTGLKANQPENADPKVMQQETMDPKSKQSDTVEVEIVDPKDKDMLEFDQYVASQGGHLNTDDLNKSKCTNSVSQAQGLVGSQQKLIPADGKGSPVTVVGKGKPVTAGVAATGRKTKFPVSHLAAGTPRGIVDTVNANAPNKTLVRRAAIPAPVPAGCQVRKDAMNSKGNQMTPGNAGSGVPASSQTSVAAQAASKANLPSSSSQAKPNNMVVNGGNRLVVNPPSSSQASAAVNDANRAATPQSSNPVNGANNREVNPPPSSQASTAVNGAANKGNVPAAARPP

SEQ ID NO: 178420 - protein, 844 aa, Zea Mays
MAAAAPAACKGKRKRHLSEDDVWLLLHRYHPGTILTALQEVAQHADGRRIDWRAVVAKSATGITSAREYQMLWRHFAYHHDVDESVDADDQPLDDDSDLELELEPDPNLTKEALCEASALAKEREAPACVAFALPFFNTLFYHDQVSRRVLAAYTCSALISGSSQASGHRINLDTHVLNTRNEKIVRVPSEKQLAQSHRVTNVAGPVSNSKQLAHIGPSAGLLDPNGPSKKRKKPKAWSKEEDADLAAGVQKYGEGNWEDILHKCNFDNTRTPDQLSQRWALKRPGGSTKPASTKHASVGLEERSAALKALSLAVGPMRGSSALRSGAYPQSIQHKSTVFAPKMPELRSAVTPSPAPAVPVPVAMPLRVAAQVQAPPHQGHQAPAHAAPPKLLNASNKTRKKQAAQPNPTISPSSIQAAAIAAGGRLATASTAANFLKVAQSKNAVHIRSLGATSLKPSASFKASIVVEHGTQPGGSQHLEPLNASAVHDVSGVAAVNQSGPLAGACSETKKALSTALAPVPCDSEEKEDDSEFCVITIDDLFPEDAKQPETVDTKAKQPQTTGLKANQPENADPKVMQQETMDPKSKQSDTVEVEIVDPKDKDMLEFDQYVASQGGHLNTDDLNKSKCTNSVSQAQGLVGSQQKLIPADGKGSPVTVVGKGKPVTAGVAATGRKTKFPVSHLAAGTPRGIVDTVNANAPNKTLVRRAAIPAPVPAGCQVRKDAMNSKGNQMTPGNAGSGVPASSQTSVAAQAASKANLPSSSSQAKPNNMVVNGGNRLVVNPPSSSQASAAVNDANRAATPQSSNPVNGANNREVNPPPSSQASTAVNGAANKGNVPAAARPP

SEQ ID NO: 178421 - protein, 187 aa, Zea Mays
MIGGKILESQLQRIGVLSAGDTISKHPAFDTNYKILWANHGDAISIQYSGTPALKGDFVRYGKRTTQGILNDLRNALARYYLNNFVDGTKQDAMDLLQGHNMTSVSRDMAVPSKSGLLESYASFRLAFALVMGALVFMMMSLRQARNDARHLMLSFLWAGLCIGISHFVRANGRTFTNRPRFHKSRH

SEQ ID NO: 178422 - protein, 236 aa, Zea Mays
MKQQSVSDKLNLETDISHWIVRSYLLHYGYQDTLNAFDMANATDPPTNRQNGHAEPPETYGLSHRKLLRQLIMSGDIDSTFKRLGEWYPQVIKDEKSVICLLLHSQRFIEYIRAEQLEDAVHYGRANLASFLTHEAFEWLLKDSVALLAYEKPAESCLGYLMGSPQREFVADAVNAAVLSTNPTMKDPESCLYSCLERLLRQLTVCSLERRAFNNDQGDAFLLHKEMQNYERSRRS

SEQ ID NO: 178423 - protein, 131 aa, Zea Mays
MACPAQSMLSASGCILLRSKPRASSSHVRGGIIGGGCSSRPFQLTCNASSSPSPPSPAPAQEDPDCNDEECAPEKEVGSLRAEWLAEERTQVVGTFPPRKRGWTGLVEKDTAGQTNIYSVEPGALPQEAAL

SEQ ID NO: 178424 - protein, 132 aa, Zea Mays
MACPAQSMLSASGCILLRSKPRASSSHVRGGIIGGGCSSRPFQLTCNASSSPSPPSPAPAQEDPDCNDEECAPEKEVGSLRAEWLAEERTQVVGTFPPRKRGWTGLVEKDTAGQTNIYSVERKSTGQLKGEK

SEQ ID NO: 178425 - protein, 122 aa, Zea Mays
MACPAQSMLSASGCILLRSKPRASSSHVRGGIIGGGCSSRPFQLTCNASSSPSPPSPAPAQEDPDCNDEECAPEKEVGSLRAEWLAEERTQVVGTFPPRKRGWTGLVEKDTAGQTNIYSVEN

SEQ ID NO: 178426 - protein, 50 aa, Zea Mays
MIQHLAKSNCANTAALSRFGQIQACNFKNSQLKIQTSKQSDFRLSGKLIK

SEQ ID NO: 178427 - protein, 74 aa, Zea Mays
MSFIFSINLRTIRRGLNSLFLLKSVPFSAIEPKLPCPQLRHWFNLHADPAFHIVYSFIPCPKDSAHILYFGKHC

SEQ ID NO: 178428 - protein, 424 aa, Zea Mays
MLDQRLSTVPQHQWISKLFGFDFKVEYRAGRLNTVADALSRRDTTNESVYALTAPTFQLYKDLEEECAHSEEGQQLSAQIKEGSLGDPWHTQEGLVMHGNRVFVPGSSTLIPAILEAAHSAGHGGVQKTLHKLRSDFFMHKDRALVKDWVRSCVICQKNKTEALQPAGLLQPLEVPRQVWADIAMDFIEGLPKVHEKSVILTVVDRFSKYAHFIAMNHPYTAATVARAFFEGIVRLHGFPSSIVSDRDPVFTGNVWKDLFKLAGVKLKMSTAFHPQTDGQSEVVNKTIAMYLRCITGDRPRAWVDWLAWAEYCYNTSYHSALKTTPFRVVYGRDPPPLVPYQPRTTETQIVDQMLQERGLFLGEVRDRLLQAQEQARRFNDGRHRELEFSIDDWVWLRLLHRNAQSLVDHPKGKLGPRMQDHSV

SEQ ID NO: 178429 - protein, 148 aa, Zea Mays
MDTMRGALERAKMLVGMEVDEESALPPPEEQSFFDDINRHCTLNTTQRLYGFAICLAAGLTCTFLSMLVFFNPVKFGVAFTLGNLMALGSTAFLIGPKRQFDMMLDSVRIYATAIYIASIIIALFCAIYVRSKLLTLVAIILEFGALI

SEQ ID NO: 178430 - protein, 238 aa, Zea Mays
MKHPLWRQAMNDEFHALLKNKTWHLIPPRPGLNVIDCKWVFKLKQKADGSIDRYKARLVAKGFKQQYGIDYDETFSPVVKPTTIRLLLSLAVSRDWAIRQIDIQNAFLHGFLNEDVYIKQPPGFADSTHPDYLCKLDKSLYGLKQAPRAWFSRLSKKLIDLGFSPSKADVSLFILNKGGVQIYMLIYVDDIIIISSSSATVDRLLSQLRNDFAVKDFGPLAYFLGIECQHTTHGLILS

SEQ ID NO: 178431 - protein, 140 aa, Zea Mays
MSTQVPQITSPAILTDWRCVNAITVVSKSRSAMVQDRRTRRRLLEGRCKGGLYPIPFSDQQILKHALISRPISRDDWYARLGHPSSQVVHSILHLNKITCTKQLESVICNACQLAKSHQLPYNSSIHRSTCPLELLFSDV

SEQ ID NO: 178432 - protein, 175 aa, Zea Mays
MSGVGGGARKKLRLSKEQSAFLEDSFKAHSTLTPKQKSDLAKRLKLRPRQVEVWFQNRRARSKLKQTEVDCEYLKRWCEKLAQENRRLQREVAELRRLCSAAYPFYGAAAGFGVATARVCPSSCDNDVSEAAISGAPSAAAPPPSTLFASWPPHFGPFTVVVPPLLRRQPSATTS

SEQ ID NO: 178433 - protein, 126 aa, Zea Mays
MVPRSLDCHQFRRWTVEAWAIARRTWELSLCRAASGTELISIKSPVSGQAATVSVMTDWCAFYGCRFLDWQFALIFGPTVILPPKESTYIFYSLRFVATSFLLKYASFPPKYINFYRFSHFLSFAW

SEQ ID NO: 178434 - protein, 89 aa, Zea Mays
MHPSHPFKSPLNVSSYINFGLALPLLSLRPRLRIHYTLMSLEVSVGHIQTILTVVGQTFLQLVLPYPITYIIVPDLISSCMTTDPSFGT

SEQ ID NO: 178435 - protein, 166 aa, Zea Mays
MKGKGGAMDRRSSARWRVLLLCAFSFGLGMLFTDRFWTAPDSSNHIMSQSRRQEQELQLVSEDCSTKRKHGEDKDIMGEVTKTHEAIQSLDKSISTLQMELAAKRSTLELLRSSGSPVTFETSQPRKKAFVVIGVNTAFSSRKRRDSVRETWMPQVLHLTVYWTKL

SEQ ID NO: 178436 - protein, 352 aa, Zea Mays
MSQSRRQEQELQLVSEDCSTKRKHGEDKDIMGEVTKTHEAIQSLDKSISTLQMELAAKRSTLELLRSSGSPVTFETSQPRKKAFVVIGVNTAFSSRKRRDSVRETWMPQGEKLQQLEEQKGIVIRFTIGHSATSDSILDKAIDSEDAQHHDFLRLDHVEGYHELSAKTKIFFSTALGIWDADFYVKVDDDVHVNLGMLATTLARHKLKPRTYIGCMKSGPVLADKNVKYHEPEYWKFGEEGNKYFRHATGQIYAISKDLATYISINQPILHKYANEDVSLGSWFIGLEVNHIDERNMCCGTPPDCEWKGQAGNVCVASFDWSCSGICKSVERIKDVHARCGEGDSAVWSALF

SEQ ID NO: 178437 - protein, 290 aa, Zea Mays
MKGKGGAMDRRSSARWRVLLLCAFSFGLGMLFTDRFWTAPDSSNHIMSQSRRQEQELQLVSEDCSTKRKHGEDKDIMGEVTKTHEAIQSLDKSISTLQMELAAKRSTLELLRSSGSPVTFETSQPRKKAFVVIGVNTAFSSRKRRDSVRETWMPQGEKLQQLEEQKGIVIRFTIGHSATSDSILDKAIDSEDAQHHDFLRLDHVEGYHELSAKTKIFFSTALGIWDADFYVKVDDDVHVNLGLSCTNMQMKTCRLDHGSLVWKLITLMKGTCAVELHQIVSGKGKLVMSV

SEQ ID NO: 178438 - protein, 407 aa, Zea Mays
MSSRSGSTSGGSTGGGSSAGGGAAVPLALLLRREVASERTASERPELHSGLFSQAKKGEDFTFLKLECERVPGVPSSSFSAFGLFDGHNGNGAAIYTKENLLNNILNAVPADLNREDWLAALPRALVAAFVKTDKDFQTKARSSGTTVTFVIIDGLFITVASVGDSRCVLQAEGSIYHLSSDHRFDASKEEVDRVTKCGGDVGRLNVVGGAEIGPLRCWPGGLCLSRSIGDQDVGEFIVPVPLVKQVKTAVQSKGLRDDTTCIVVDIIAEKTNPSMPLPRRQPGIGVFKNMFGKKKSSDSSSHSHADREYMDPDILEEIFEDGCALLSRRLDSEYPVRNMFKLFICAVCQIELKPNQGISVHEDSSEPGSLRRWDGPFLCQSCQEKKEAMEGKRRSRGSSRNSGSSE

SEQ ID NO: 178439 - protein, 86 aa, Zea Mays
MPDDWHETSTLLSTLEKIESWIFSRIVETIWWQIGNWSRWLTDKLGIDHDDFEDIGDVEDERRAAAETKSFQLLNELSDHLFFSFS

SEQ ID NO: 178440 - protein, 93 aa, Zea Mays
MVAASEIPTDPISDPIVDPKVLPIPAGDLSFGSRAQLNNSIGNWSRWLTDKLGIDHDDFEDIGDVEDERRAAAETKSFQLLNELSDHLFFSFS

SEQ ID NO: 178441 - protein, 110 aa, Zea Mays
MEQCVARLDVAMFNAILHESASEIPTDPISDPIVDPKVLPIPAGDLSFGSRAQLNNSIGNWSRWLTDKLGIDHDDFEDIGDVEDERRAAAETKSFQLLNELSDHLFFSFS

SEQ ID NO: 178442 - protein, 279 aa, Zea Mays
MVPQIPDPCDDDGQDHRCPPAAALPPPWPYPPLPPPASHGRSTFVTALIIATSVLVFLALCLSILVFVRRRRLRRRREALLEAALAPAAAATFPDEGEGDGGPGGEVVHHVWHIRTVGLDNAAIESIALTRYCAGGVLGASDCTVCLGEFQDGELLRLLPKCAHAFHVECIDTWLRAHVSCPLCRADVMDPGAAAADADAEQPPGTDAADASAERSASNTPTTELERLDQQANEHHQELRVQIDQPDHSSSLELERRAGRPRGAGDMRCCLLRGVTRAC

SEQ ID NO: 178443 - protein, 384 aa, Zea Mays
MAFIVRHGTGIVCVSMKEDDLERLSLPLMVTTKENEEKLCTAFTVTVDAKEGTTTGVSAKDRAKTVMTLASPDSRPEDFNRPGHIFPLKYREGGVLKRAGHTEASVDLAMLAGLPPVAVLCEIVDDADGSMARLPKLRVFAERENLKIISIADLIRYRRKRDRLVERASVARLPSQWGNGHGYCYRSAIDGIEHLAMVKGDIGDGQDILVRVHSECLTGDIFRSARCDCGDQLAMAIEMIEKAGRGVIVYLRGHEGRGIGLGHKLRAYNLQDDGRDTVEANEELGLPVDSREYGIGAQILRDLGVRSMKLMTNSPAKYSGLKGYGLSIAGRVPLVTPITSENPQILCPIREHGRATEDGEELVKQGYIPDLGILVFSCGRCTSC

SEQ ID NO: 178444 - protein, 464 aa, Zea Mays
MDSMMTPEILSANLALVMDKFSDDDTDTELDLDSPTEGFASIPDAIEDVRQGKLVIVVDDESRENEGDLIMAASLVTPEAMAFIVRHGTGIVCVSMKEDDLERLSLPLMVTTKENEEKLCTAFTVTVDAKEGTTTGVSAKDRAKTVMTLASPDSRPEDFNRPGHIFPLKYREGGVLKRAGHTEASVDLAMLAGLPPVAVLCEIVDDADGSMARLPKLRVFAERENLKIISIADLIRYRRKRDRLVERASVARLPSQWGNGHGYCYRSAIDGIEHLAMVKGDIGDGQDILVRVHSECLTGDIFRSARCDCGDQLAMAIEMIEKAGRGVIVYLRGHEGRGIGLGHKLRAYNLQDDGRDTVEANEELGLPVDSREYGIGAQILRDLGVRSMKLMTNSPAKYSGLKGYGLSIAGRVPLVTPITSENPQILCPIREHGRATEDGEELVKQGYIPDLGILVFSCGRCTSC

SEQ ID NO: 178445 - protein, 457 aa, Zea Mays
MDSMMTPEILSANLALVMDKFSDDDTDTELDLDSPTEGFASIPDAIEDVRQGKLVIVVDDESRENEGDLIMAASLVTPEAMAFIVRHGTGIVCVSMKEDDLERLSLPLMVTTKENEEKLCTAFTVTVDAKEGTTTGVSAKDRAKTVMTLASPDSRPEDFNRPGHIFPLKYREGGVLKRAGHTEASVDLAMLAGLPPVAVLCEIVDDADGSMARLPKLRVFAERENLKIISIADLIRYRRKRDRLVERASVARLPSQWGNGHGYCYRSAIDGIEHLAMVKGDIGDGQDILVRVHSECLTGDIFRSARCDCGDQLAMAIEMIEKAGRGVIVYLRGHEGRGIGLGHKLRAYNLQDDGRDTVEANEELGLPVDSREYGIGAQILRDLGVRSMKLMTNSPAKYSGLKGYGLSIAGRVPLVTPITSENRKYLETKRTKMGHVYGLANAQVNQPSGSQSTEEKH

SEQ ID NO: 178446 - protein, 309 aa, Zea Mays
MGAPCSSQIKTKLTGFFCFASSACSINERKISETEAARRASAPEPAWVPRPLRRPRPRPRRAGASQDTIVTSLVLATEAAKVICAIILLIADGSLKKQFSNWTLIGSLTASGLPAAIYALQNSLLQVSFKNLDSLTFSILNQTKLLWTSFFTFLILGQKQSSKQILALALLISAAVLLSVGESTSKGSNGGGSDYILLYGIIPVTVASMLSGLASSLCQWASQVKKHTSYMMTIEMSFIGSVCLLASTYRSPDGEAIRKYGVFHEWTFWTMVPVLMNAVGGILVGLVTTYAGFCYSLSSPCNCTATIRV

SEQ ID NO: 178447 - protein, 106 aa, Zea Mays
MLSGLASSLCQWASQVKKHTSYMMTIEMSFIGSVCLLASTYRSPDGEAIRKYGVFHEWTFWTMVPVLMNAVGGILVGLVTTYAGGIRKGFCYSLSSPCNCTATIRV

SEQ ID NO: 178448 - protein, 102 aa, Zea Mays
MKRQSRTGSGEMVRVARTLLAKDCLKGVVCSRVARTCSCDGGSVGMVDMCKRVKRSICRVIGDPQLGINRFGSPNFSDMKTRSSTCSVVNKYNKVLIKSNLV

SEQ ID NO: 178449 - protein, 364 aa, Zea Mays
MWRRRKPEEHFFDVPAEEDPEVHLGQLKKFSLRELQVATDTFSNKHILGRGGFGKVYKGRLADGSLVAVKRLKEERTPGGELQFQTEVEMISMAVHRNLLRLRGFCMTPTERLLVYPYMANGSVASRLRERQASEPPLKWETRRRIALGSARGLSYLHDHCDPKIIHRDVKAANILLDEEFEAVVGDFGLAKLMDYKDTHVTTAVRGTIGHIAPEYLSTGKSSEKTDVFGYGIMLLELITGQRAFDLARLANDDDVMLLDWVKGLLKEKKVEMLVDPDLQNAYEEIEVENLIQVALLCTQGSPLERPKMSEVVRMLEGDGLAERWDEWQKVEVVRQEAESAPLRNDWIVDSTYNLRAVELSGPR

SEQ ID NO: 178450 - protein, 195 aa, Zea Mays
MEVEQKYSEIRRPVYLKRGDIIKTIPDFWLTAFMSHPLLSELLTEEDQKIFKYLDSIDVDDSDVKAGYSIHLNFSENPYFEDTKLAKTYIFADDGTTTIKASEIKWKEGMGPANGNGINKKGSKRPLVEESWFGDTELKSLADGVQDEVAEIIKEDLWPNPLKYFNNEVDDEFEGDEDDDDLDGDDDDEGDDLEN

SEQ ID NO: 178451 - protein, 192 aa, Zea Mays
MEVEQKYSEIRRPVYLKRGDIIKTIPDFWLTAFMSHPLLSELLTEEDQKIFKYLDSIDVDDSDVKAGYSIHLNFSENPYFEDTKLAKTYIFADDGTTTIKASEIKWKEGMGPANGNGINKKGSKRPLVEESFFSWFGDTELKSLADGVQDEEDLWPNPLKYFNNEVDDEFEGDEDDDDLDGDDDDEGDDLEN

SEQ ID NO: 178452 - protein, 188 aa, Zea Mays
MTAPADKGKKAKTDADGGEENEQIDGVLVLSIEKLQEIQDELEKVNEEASDKVMEVEQKYSEIRRPVYLKRGDIIKTIPDFWLTAFMSHPLLSELLTEEDQKIFKYLDSIDVDDSDVKAGYSIHLNFSENPYFEDTKLAKTYIFADDGTTTIKASEIKWKEGMGPANGNGINKKGSKRPLVEERWRRS

SEQ ID NO: 178453 - protein, 110 aa, Zea Mays
MAGARPALGPATPMAAPPPCFSLSALAALSLLLRPWLFASARGVPARPAELSTAQLHLTALYLLGSMAAVLQLVVPCSLCFHGRLSARRARLDALPGGRLFSLCTARVLW

SEQ ID NO: 178454 - protein, 167 aa, Zea Mays
MGCACLPVLVQDKNPSQDTVQKGGHTAVLENVSYDKDVVEIEPADAIDSAHYGGSFVKDVYVDEGALLRRTRTASEENPLDRRSSPNFSRQVIGADSDIGYEKKGCSRVSVHGLKPEVVSPVGFAPHCNGKECGLEDGIDVAAGESSEKKVSLQELLLLQSAEPGRS

SEQ ID NO: 178455 - protein, 141 aa, Zea Mays
MVYIYGQLSSDSVDISMNTHLKTVKLTLKGKNPVTLDHLSVRGNNIRYYILPDSLNLETLLVEETPRVKPKKPTSALGPWAWPWSWARSGSGTLSMLAAFGNCIACICSVIYIPINCTKYAFDYATMYQLFFFARNKKQIL

SEQ ID NO: 178456 - protein, 192 aa, Zea Mays
MVKSPGGPSVKFLVNAVHTMEELKLTGNHLKGSRPLLTFSTNFDEQPHWKLVKEMITQIFATPKDHRKAKPFHDHVFVFSIVDGHVWFRNYQISVPHNEIDKVDKGGLDKMTLIEVGPRFCLNPIKIFGGSFGGPTWYENPYYISPNQIRALEKRQKAGKYAKKVKAKVRRKMHEMENTLEPDEFAELWKGE

SEQ ID NO: 178457 - protein, 230 aa, Zea Mays
MAKKRKRTDAPAEAAGAEKPDDSAPARPERTLFGFKDLVPDAEPASAGAEAAVAPFRNREKVLITCSRRITYRYRHLMQDVLSLLPHAKKDSKVESKQSKGNALNELLELRSCSSCLFFECRKQKDLYLWMVKSPGGPSVKFLVNAVHTMEELKLTGNHLKGSRPLLTFSTNFDEQPHWKLVKEMITQIFATPKDHRKAKPFHDHVFVFSIVDGHVWFRNYQLIKVVWIK

SEQ ID NO: 178458 - protein, 519 aa, Zea Mays
MAGGGGGRGESSPAIKPISKAVVHRICSGQVIFDLSSAVKELVENSLDAGATSVEVSLKAYGEEWFKVADNGCGISPSNFRALALKHHTSKISDFSDLGSLVTFGFRGEALSSLCALGKLTVETRSKDELVGTHLEFEHSGVVVSERKTARQVGTTVTVEKLFSTLPVRSKEFSRNIRKEYGKVISLLNDQQCGRCHSASGAPNKYSESRHQNALADSPLPDAQDYGDGAAVCYASVQYPIIQFTVAELRRRRKNCFMISHINKSYCLEKTTRCYKAATLDITVPLADEAKSNSLAAATNELDRLFSKHDFREMEVVGQFNLGFIIGKLGQDLFIVDQHASDEKYNFECLSQSTILNVQPLLEPLRLDLSPEEEVIVSMNMSTIRKNGFVLAEDLHASPGNHYLLKAVPFSKNITFGVQDVKELISMLADSQGDCSIISSYKLDTADSVCPSRVRAMLASRACRMSTMIGDPLTKAEMKKILKNMAGLRSPWNCPHGRPTMRHLADLRTMKAKDIAFKR

SEQ ID NO: 178459 - protein, 926 aa, Zea Mays
MAGGGGGRGESSPAIKPISKAVVHRICSGQVIFDLSSAVKELVENSLDAGATSVEVSLKAYGEEWFKVADNGCGISPSNFRALALKHHTSKISDFSDLGSLVTFGFRGEALSSLCALGKLTVETRSKDELVGTHLEFEHSGVVVSERKTARQVGTTVTVEKLFSTLPVRSKEFSRNIRKEYGKVISLLNAYALIAKGVRLLCTNTVGKNSKMVVLRTQGSSSMKDTIITVFGPNTFKCLEPFSVTTSDGCQIEGFLSKPGPGTGRSSGDRQFFYVNGRPIDMPKVTKLVNELYRSSNAKQYPVVILDFHIPTTSYDVNIAPDKRKVFFSSESMILQSLRETVENLYSPQQCSFSVNHIKDPEKEGDAVTDRHNEDTNAIVMVNVPSYYNNDDNEETDNEDQVSPENQKLPSVARDASPLSGGTTTQADRSAWLPSFAYDQPKRSPKEGRSLVLGRNCFRTGLAAKPTHSSTVQSSLLNFVSLNKRKHEDDCTLISEAAVLRRETCSEHMRRSSLEANFVTPNKQNHEDDCIISESPVLRSGTCSELYKRTSLEVNFPSPNKQKHDDNCTLISEIPVLRRRTNSEQARGTSLEANSAPEFNLPLETNSLKQHSSQYFGSVRTDVSPQHSKQPNIVTIGAGVTGPCDVDTTESDMDQQCGRCHSASGAPNKYSESRHQNALADSPLPDAQDYGDGAAVCYASVQYPIIQFTVAELRRRRKNCFMVVGQFNLGFIIGKLGQDLFIVDQHASDEKYNFECLSQSTILNVQPLLEPLRLDLSPEEEVIVSMNMSTIRKNGFVLAEDLHASPGNHYLLKAVPFSKNITFGVQDVKELISMLADSQGDCSIISSYKLDTADSVCPSRVRAMLASRACRMSTMIGDPLTKAEMKKILKNMAGLRSPWNCPHGRPTMRHLADLRTMKAKDIAFKR

SEQ ID NO: 178460 - protein, 255 aa, Zea Mays
MISHINKSYCLEKTTRCYKAATLDITVPLADEAKSNSLAAATNELDRLFSKHDFREMEVVGQFNLGFIIGKLGQDLFIVDQHASDEKYNFECLSQSTILNVQPLLEPLRLDLSPEEEVIVSMNMSTIRKNGFVLAEDLHASPGNHYLLKAVPFSKNITFGVQDVKELISMLADSQGDCSIISSYKLDTADSVCPSRVRAMLASRACRMSTMIGDPLTKAEMKKMLVKDSVHRLPLPWIAQKASVQNADPSSLYRE

SEQ ID NO: 178461 - protein, 157 aa, Zea Mays
MGSPTRVRRTTGFTLLLVLLFLSPPVSAGQPKGVCVSPGGRFPAFSSEGKPPGRAPKGRRDLALCRIFRQKTCCDVMQTFPALVSVRNLALAGEGSQECIHLWELLECSICDPRVGIRPGPPVVCASFCDMVFKACSESYFSIDTKTQVNPLINGHN

SEQ ID NO: 178462 - protein, 106 aa, Zea Mays
MQGYLNLTSGWPERGPAKLQQFFSCQPTITKKKQRTPLHHDPVLLMMVIDMLGPRDPSRRATFLCAASTISTQLNLGRIPSIHSILLCKEETENRGCRHSTCKLHL

SEQ ID NO: 178463 - protein, 505 aa, Zea Mays
MTVRVVMRYLVNKLGLEDDSQVNDTIEMLERMAHRGACGCEKNTGDGAGIMVALPHDFFKEVAKDAGIELPPLGEYAVAMFFMPTDEKRRKKGKAEFKKVAESLGHVILGWRLVPTDNSDLGESALETEPVIEQRRRLTCSISFIVLFYKGFNTIRATVGMLLGRRGHAQVPGALPVDGPRRPHPQSRRATDRVQLLQDVRIPYQQKRMFGFVTFVYAETVKVILSKGNPHFVCDARVLVKPYKEKGKVPGRFRKLQHTHHGGAEFVGCASPTGLLDSRDPYALLLLSGAQNLFTAGTDTTSSTVEWALAELIRHPDVLRKAQQELDAVVGRDRLVSESDLPRLTYLTAVIKETFRLHPSTPLSLPRVAAEECEVDGFRIPAGTTLLVNVWAIARDPEAWPEPLQFRPARFLPGGSHAGVDVKGSDFELIPFGAGRRICAGLSWGLRMVTLMTATLVHALEWDLADGVTAEKLDMEEAYGLTLQRAVPLMVRPAPRLLPSAYAAQ

SEQ ID NO: 178464 - protein, 246 aa, Zea Mays
MPAGSEAVGEPGGCGHVEEEYEIRNDEGFVYKVHRGLYPDAAPSTTQTAAGPDPKAAGLRRRRRALLRLRAKRLRDLSRWEALASELLAPLPAPPPPAPTSQSPPVAASSSSLVSVLDELLAQADIQVELMKKVCQWCDEANSICDAGEAAIVDSIVALPMWGANSSELVAALCSPDKNTPGKLDEPNGCQEASGVSSAAAEMIKNSVEKQTMGHDLPPILTESRTRKRVANLSGTKRRHQALHDQ

SEQ ID NO: 178465 - protein, 492 aa, Zea Mays
MKAVLEQLAPHLLTVACYDREVNCRRAASAAFQENVGRQGTFPHGIDIVNTTDYFALASRSNSYLNVAVSVAQCKEYLYPFADELLCNKITHWEKSLRELAAQALALLVQYDMNYFGGHALEKLVPCTLSTDLCTRHGATLAAGEVALKLYQLGFTFTTDMQKTLSGIVPAIEKARLYRGKGGEIMRSAVSRFISCISIAGISLNDRTKKCLLETLNENLRHPNSQIQCAAVEALKHFIPTYLVSSGEKIASDIISKYVALLDDPNVAARRGAALALGILPFKFLMLKWMPVMSKLCSSCTIEDKPDDPDAEARVNSVRGLISVCETLTASFDQLSNGDSLYAYIKDYVMRALFRALDDYAVDNRGDVGSWVREAAMDALVRCMFILCKRDIVALRAVSATGHDSELGDMEVNASSTAYRLFDSGIAQDLVAGIAKQAVEKIDKIREIAIKTLQRILYHQEHLIPFIPHRELLEEIIPNSRDLEWAVVCRSL

SEQ ID NO: 178466 - protein, 586 aa, Zea Mays
MTQALHYDVRRGPHSIGSHVRDAAAYVCWAFGRAYTNYDMKAVLEQLAPHLLTVACYDREVNCRRAASAAFQENVGRQGTFPHGIDIVNTTDYFALASRSNSYLNVAVSVAQCKEYLYPFADELLCNKITHWEKSLRELAAQALALLVQYDMNYFGGHALEKLVPCTLSTDLCTRHGATLAAGEVALKLYQLGFTFTTDMQKTLSGIVPAIEKARLYRGKGGEIMRSAVSRFISCISIAGISLNDRTKKCLLETLNENLRHPNSQIQCAAVEALKHFIPTYLVSSGEKIASDIISKYVALLDDPNVAARRGAALALGILPFKFLMLKWMPVMSKLCSSCTIEDKPDDPDAEARVNSVRGLISVCETLTASFDQLSNGDSLYAYIKDYVMRALFRALDDYAVDNRGDVGSWVREAAMDALVRCMFILCKRDIVALRAVSATGHDSELGDMEVNASSTAYRLFDSGIAQDLVAGIAKQAVEKIDKIREIAIKTLQRILYHQEHLIPFIPHRELLEEIIPNSRDLEWAVPTVSYPRLVKLLQVSYYSKSVLSGLVISTGGLQESLKKASMSALVGYLQDSDVFLLRREK

SEQ ID NO: 178467 - protein, 247 aa, Zea Mays
MLVSDPIATTLSPRHKGRGPLGLAHRNQSCFSPPRRDQSSHRQLFASPLRFEGTMECVTDMPLATLDSRPRKRQRLGWDVVPAEMYQVTRPRLGWDVGPAEMNQFALCGQEVVNAFSAAVLGLSSGCVSSQVNQEQPHDGSPPLREDDKNGHYVFAVGDNLTSRYKINAKMGEGTFGQVLECWDKETKEMVAIKIIRGIKKYRDAAMIEIGMLEKLGKYGESRSRSHPNPQRRGPITSSCPSLVLSR

SEQ ID NO: 178468 - protein, 548 aa, Zea Mays
MTTRALVAMALRFLREYVRASDLAVAAAVLFACSAARSRLSSRPGEPMLWPVVGIIPTLFAHLAAGDVYDWGAAVLLGRSRGTFAYRGTWGGGSSGVVTSVPANVEHVLKANFDNYPKGPYYRERFAELLGGGIFNADGDSWRAQRKAASAEMHSARFVQFSAGTVERLVRRELLPLLEALSGRGGPESAAAAVDLQDVLLRFAFDNICAAAFGVEAGCLADGLRDVPFARAFERATELSLTRFYTPPFVWKSKRLLGVGSERALVEAARAVRKFAERTVADRRAELRKVGDLAGRFDLLSRLMSSPPPAGYSDEFLRDFCISFILAGRDTSSVALTWFFWLLASHPHVEARVLDDVARGGGDVSAMDYLHAALTESMRLYPPVPVDFKEALEDDVLPDGTLVRARQRVIYYTYAMGRDKATWGPDCLEFRPERWLSKSGAFAGGAESPYKYVVFNAGPRLCVGKRFAYTQMKMAAAAVLARFRVEVLPGQEGAAARARPPSACCSCRCRGRLKKISWRPLFHGMKRNITIHPGKNQTPGGRRPMRKY

SEQ ID NO: 178469 - protein, 196 aa, Zea Mays
MLEKVIEAEKEAARQLVQQKKRDRALIALKKKKAQEELLKQVDTWQMNVEQQLADIELASKQKAVFESLKAGNAALKSIQNEINIDDVQKLMDDTAEAKAYQDEINAVLGEQLSAEDEEAVMAEFENLEAQLAVESLPDAPATEVRPEEKTKAPADTEAAPEDIDDVIELPDVPTKVPERPEAPEKNKVLEEPLPA

SEQ ID NO: 178470 - protein, 180 aa, Zea Mays
MLPVTYPQSHNYQQDDFHKIVARTLSQGSTPMSMDFHPLQQTLLLVGTNVGDIGLWDVGTKDRLVVRNFKVWDLSKCIMILQASLVKDPAVSVNHIIWSLDGTLFGVAYSRHIVQIYSYNGGDDIRQHSEIDAHIGGVNDIAFGFYLAWATQHFHSSCFLNFFLHRHPKEFCYYHWFTGY

SEQ ID NO: 178471 - protein, 250 aa, Zea Mays
MAEAAADSSNAAVDGGGGSVQNDYPTIDPTSFDVVLCGTGLPESVLAAACTTAEKTPSSLASFLSPEATPATSTVAATASDSHIVVDLHRQIVYSEVETSGAAPEPARRFPVDLVGPRVLYCADDLVGPRVLYYADEAVDLLLRSGGSHHVEFKSVEGGSLLYWEGCLYPVPDSRQAITTLKLKEKNILFRFFKLVQAHIAAALASGDETGQGDASARILEEDLDLPFVEFLRKQGASSQDESVRATPRD

SEQ ID NO: 178472 - protein, 318 aa, Zea Mays
MNSSLQLMLWKLLTLMDLECDVVAIVERLATVKHKLLVLSGKGGVGKSTFSAQLSFALAEMDHQVGLLDIDICGPSIPKMLGLEGQDIHQSNLGWSPVYVESNLGVMSIGFMLPNPDDAVIWRGPRKNGLIKQFLKDVDWGEIDYLVVDAPPGTSDEHISIVQYLQATGIDGAIIVTTPQQVSLIDVRKEINFCKKVGVPVLGVVENMSGLRQPLSDLSFVKPGEAGETDATEWALNYIKEKAPELLSVMACSEVFDSSKGGAEKMCREMGVPFLGKVPMDPQLCKAAEEGRSCFSDQKCGASAPALQSIVKKLIKTG

SEQ ID NO: 178473 - protein, 436 aa, Zea Mays
MERPHHADRSSREILGAADRGRGSKSRIRTETPWKASTRCRDWERQIGHRTQSSWRLGAPTAPYTESETTTPRDDTNPSLGTVGKEGEMENGGGKGDVPNDANEHCPGTQSEEAGKADACAGCPNQQICATAPKGPDPDVVAIVERLATVKHKLLVLSGKGGVGKSTFSAQLSFALAEMDHQVGLLDIDICGPSIPKMLGLEGQDIHQSNLGWSPVYVESNLGVMSIGFMLPNPDDAVIWRGPRKNGLIKQFLKDVDWGEIDYLVVDAPPGTSDEHISIVQYLQATGIDGAIIVTTPQQVSLIDVRKEINFCKKVGVPVLGVVENMSGLRQPLSDLSFVKPGEAGETDATEWALNYIKEKAPELLSVMACSEVFDSSKGGAEKMCREMGVPFLGKVPMDPQLCKAAEEGRSCFSDQKCGASAPALQSIVKKLIKTG

SEQ ID NO: 178474 - protein, 111 aa, Zea Mays
MSSRRYASGSEKRKRKKRTEEFIESQRGAMDRFLTSNPRTSTNTYELAIVVVEEQPNINLEDGLPSDENVDINMDDNNVSGHEPIFNSSPTENANVDEQSDFIEDICDPRN

SEQ ID NO: 178475 - protein, 183 aa, Zea Mays
MVEEAARLSKLFCDRNLPIFAFLDTHYPDKPEPPYPPHCIIGTGEEDFVPDLEWLEKEPNVTIKRKSCIDGYISCIEKDGSSVFADWIGKYQIKTVLVLGICTDICVLDFASSTLAARNIDRVPPLQDVVIYSGGCATYDLPVEIATNIKGALAHPQDLMHHIGLYMAKGRGAKIVDRVVIEP

SEQ ID NO: 178476 - protein, 196 aa, Zea Mays
MRAPVAPNKQISKMVEEAARLSKLFCDRNLPIFAFLDTHYPDKPEPPYPPHCIIGTGEEDFVPDLEWLEKEPNVTIKRKSCIDGYISCIEKDGSSVFADWIGKYQIKTVLVLGICTDICVLDFASSTLAARNIDRVPPLQDVVIYSGGCATYDLPVEIATNIKGALAHPQDLMHHIGLYMAKGRGAKIVDRVVIEP

SEQ ID NO: 178477 - protein, 228 aa, Zea Mays
MAFPTPASVFVDENQQINRGKRAAGSRTKGLKPSENPGNLERRALQDLSNFAKGTGLKGTSTLKERSQRKAFSNVTNTIKGTALKDRPITKEKSTQKQRSQNPVKILSDEDIKLCHEWAKDGVEGFHSTQNDSQKVDKDLLAKRVKKKVASVNSALRGWSDTVFDSLMFPAREVLYEPKVLELEPEILRDISWDLPSSMVKQSWMKTVLPMISLTSTHLWRTIQLHLS

SEQ ID NO: 178478 - protein, 143 aa, Zea Mays
MAFPTPASVFVDENQQINRGKRAAGSRTKGLKPSENPGNLERRALQDLSNFAKGTGLKGTSTLKERSQRKAFSNVTNTIKGTALKDRPITKEKSTQKQRSQNPVKILSDEDIKLCHEWAKDGVEGFHSTQNDSQKVSRRKWRQ

SEQ ID NO: 178479 - protein, 188 aa, Zea Mays
MAFPTPASVFVDENQQINRGKRAAGSRTKGLKPSENPGNLERRALQDLSNFAKGTGLKGTSTLKERSQRKAFSNVTNTIKGTALKDRPITKEKSTQKQRSQNPVKILSDEDIKLCHEWAKDGVEGFHSTQNDSQKVDKDLLAKRVKKKVASVNSALRGWSDTVFDSLMFPARAISGYWKFLYAQSTEG

SEQ ID NO: 178480 - protein, 122 aa, Zea Mays
MQCVSHLPSYLLEYKTTPSANTTSMNAYECNAYVLCLHTSKGMKPHRTPPRATYDAKLYRYGRTIGHDKTSDASESCNVYGMLHLSIYFTSFTYNTTSNNTSFTFRYNTTSDNTSFTFRGVN

SEQ ID NO: 178481 - protein, 64 aa, Zea Mays
MLSKNFSFSLAYVSDYPDYSFTFRRIRNYSISQKANLEPVKNFYSRRMQTRESFSIYKSCLKLV

SEQ ID NO: 178482 - protein, 185 aa, Zea Mays
MDTVRRASMGDVHGFEAATAKAGAQGEQHRYPDEREVEGRAGGGRWRESARHRRPHQGTAMANRETHARGNSAAGRARQPWRAGAGAGRAGGWQREREAREGAMAGARRIQRNGGEQGKHPGIRTLSASHRSRELGELDHGVESGHGWGARAGSRAPRNARRKQDAMEKLQQGKNAGDGQEAERQ

SEQ ID NO: 178483 - protein, 79 aa, Zea Mays
MLLANAVEETSTRRAALEASINEVLFQIIKFANEKKDHIPAIPDRIFNHEIMIPSSDSVFGWNTDVIRRVLNSGHPYSL

SEQ ID NO: 178484 - protein, 144 aa, Zea Mays
MNCETCQLKELELELTEIRDVLRCILHTIFFHRTLSLVRPKDVDCDFLDITYVQCGLPELEKEVDEKIDQFSAWVEKHPNRRSQTPWLVCQQNRAHLLGAMVHQFASHVPQKIQQVKQLQRADKHPSKCRGGDQHKACCIGGVD

SEQ ID NO: 178485 - protein, 75 aa, Zea Mays
MINLCFVSQQVPSLEHNQVKGESLDLIKYIDSNFEGPLLPQVKKRLRRNIQVIGNEEIEMHPISAWKEAKILWWV

SEQ ID NO: 178486 - protein, 157 aa, Zea Mays
MATGLRSHTLSILVNDCPGVLNIVTGVFARRGYNIQSLAVGPAEKEGISRITTVVPGTVESIEKLVQQLYKLIDVHEVHDITHSPFAERELMLIKVSVNTAARKEILDIAEIFRAKPVDVSDHTVTLQVGILTVCVFLPDFHRFLCTLHSHKLYHIA

SEQ ID NO: 178487 - protein, 177 aa, Zea Mays
MATGLRSHTLSILVNDCPGVLNIVTGVFARRGYNIQSLAVGPAEKEGISRITTVVPGTVESIEKLVQQLYKLIDVHEVHDITHSPFAERELMLIKVSVNTAARKEILDIAEIFRAKPVDVSDHTVTLQLTGDLDKMVALQRLLEPYGICEVARTGRVALVRESKVDSKYLRGYSLPL

SEQ ID NO: 178488 - protein, 446 aa, Zea Mays
MSVASSHRLRPSPSGPARRPGSAAPRVAFWPAGASPPYRGRCTVVAAAAAAGAGGEASSAPVAVSAVAPAGAARDKVRRHTISVFVGDESGMINRIAGVFARRGYNIESLAVGLNKDKALFTIVVSGTDRVLNQVIEQLNKLVNVLSVEDLSKEPQVERELMLIKLNVEPDQRPEVMVLVDIFRAKVVDISEKTLTMEVAGDPGKIAAVQRNLWKFGIKEICRTGKIALRRERIGATARFWRFSAASYPDLIDALPKNPLTSVNRTVNGSFGQPSNAGGDVYPVESYESLSVNHVLDAHWGVLDDDDATGLRSHTLSILVNDCPGVLNIVTGVFARRGYNIQSLAVGPAEKEGISRITTVVPGTVESIEKLVQQLYKLIDVHEVHDITHSPFAERELMLIKVSVNTAARKEILDIAEIFRAKPVDVSDHTVTLQYPFVVTVTTSYP

SEQ ID NO: 178489 - protein, 66 aa, Zea Mays
MTHLKVVCSPRAGVALNFKSIPGYIIGLKTMTRAILRKTKTREKQVVKAQTKRQQKAWDEENKNLD

SEQ ID NO: 178490 - protein, 193 aa, Zea Mays
MKCYECGEVGHFARECRLRIGSGGLGSGRRRSRSPRYRSRSRSRSRSPRHRRSPSYGRRSYSPRDRSPRRRSYSRSPPLPPPPPRNNSMSPRGAREMSRSSPPPPKNNSSSPREAREMSRSPPPPAKNNRSSPREAREMSRSPPPPPPRNNSRSPPGARDVSRSPPPPPDARRSYSRSPEQQPQHESPYANDA

SEQ ID NO: 178491 - protein, 102 aa, Zea Mays
MVDGRTKLVVYTLCFREAVEAPEPAVSGDSAAHQVLHSCGTRDIQADHCLDRGAARAGVARDCHRVRLDPRLRWSMDLRRAASDEDGQVATSSTSWVRKVSW

SEQ ID NO: 178492 - protein, 81 aa, Zea Mays
MPKGMMLVFAKNLPSTTGPFALENGGSMGRFQDLSECTARDLQLDQSTSWPGSPTVPFCIPTSRIVNAFCPLLFNQSPQNC

SEQ ID NO: 178493 - protein, 69 aa, Zea Mays
MNGRQSRAMNSIHGVATGLEVEVTDLHLWDDVRDTRELGHLLGAQRVTISSGLEEDRSFLLVQPSHAHL

SEQ ID NO: 178494 - protein, 175 aa, Zea Mays
MCEISKDFTIDATFKGNVSRFLNHSCEPNCKLEKWQVDGETRVGVFASRSIEVGEPLTYDYRFVHFGEKVKCHCEAVNCQGYLGSQIKNPIQSILATVAPQVQLREYSPMHHEAPRLKPINHLLPWTNCIEVSFNLRSKRKIDRLCWARKKKRTSLVPSSTSMPASPSEVPAADF

SEQ ID NO: 178495 - protein, 124 aa, Zea Mays
MSCSKNCRCSDLCTNRPFRKDKKIKIVKTKRCGWGAVALEPLERGDFVIEYVGEVIDDATCEQRLWDIRRRGDKNFYMCEISKDFTIDATFKGNVSRFLNHSCRLMVRQELVSLPLVPSKLESP

SEQ ID NO: 178496 - protein, 465 aa, Zea Mays
MPDLSTSYLPPFPELSLDAGALAVDHAGNAAAAASADAASAYASSSASVGSGVDDLVIPAECRWKGHVRTFDMAGAGAVTTCPAARRGGGKKLSLIPSLEPARTQASASAPTLEERVSEWAAKKAAAGVPTHHCVLPFLTGAPMAVECRLCSKIIYVGEEIKCSVKKCPQMFHLKCVAEDTSNFTVESFRCPQHGCMVCKQKMFFWRCGRCTVAAHTKCAPWPVVHLKNDQGSAICWRHPSDWLLQNKNADFTNSVEEVFCRLPLPYVNEDLNIDSIIRDYAEAVYKPPPYTSIRRNVYLIKKKRTGVRVDIGCTNCRADSTCKEDCECRGLSMSCSKNCRCSDLCTNRPFRKDKKIKIVKTKRCGWGAVALEPLERGDFVIEYVGEVIDDATCEQRLWDIRRRGDKNFYMCEISKDFTIDATFKGNVSRFLNHSCEPNCKLEKWLMVRQELVSLPLVPSKLESP

SEQ ID NO: 178497 - protein, 109 aa, Zea Mays
MLHGLEKAGRHTIILMQPSQNRASRTFMDYNSINHALDGICGLYERKIRDINPMIPNITYDISDLYNFIDGLADISALVYDHSIQAFLPYDRQWIKQKLFQHLKKLAQR

SEQ ID NO: 178498 - protein, 138 aa, Zea Mays
MRRRCLRRQRCTSVICPSTPRRSRPTSSSPAPARSRRSSWGSTRTPRPHAVSALYLVWYMHIYGKAMGTDRATPQQNAMGDGACLCCMLHFIIVYMYLSLILPPTPKQLSSTAPMVTVDFCTLVRVWYSLSILMRVEI

SEQ ID NO: 178499 - protein, 93 aa, Zea Mays
MFIVWKSPDSGCRRRHGRKEFQRLQEHAASLSTLPSQFSDLLIIIIVIIHSFLLCQILFIQSVPVWYRWSAAAIIFVMSRFCSSLYRMAGSRD

SEQ ID NO: 178500 - protein, 216 aa, Zea Mays
MFYNGIVESFDAVSKRHKVAYDDGDVEVLLLREEKWEFISEEKEASMASETPRGRKRKADALKEENTETPKSDAVDPPKKRGRPKGVGSSNGTPSTSATPSTKGKTAGKVTKETPKTGPNLKKELEKNSKDKANVSTGTKDDKSVSKPKEAIIKGKDSKDEGKSTEGKAKPGRKPKNAGTPAGDSDKEKQEVEVKAAEIEEASGNASTGKKRRRKA

SEQ ID NO: 178501 - protein, 614 aa, Zea Mays
METIMRLVIEESEDVQPQIASCLLQNVRKEEKESSPSFELAEKVIGTCREKLKPVFLQSLKGTSLSEYSQIVASVCEEVSDDREDNNANPSGKDMVDDGKLSERTISDELPQESSKMEQDVSRPEQDGTSMNGDTVTAISSGATPPDTSESDQGPPSTNEKIEQPCYAQNIADAMQLKSDHNEGAESNAAKPNKKATLGSVKNTKLKPSDKCEPTVHSDADTKKQDLVASAEGSNGAADDTSRPADSTPKPKRGRPPGPKSLQKAPGKDQSPGLDLKKVNDDSAGKLAKRSAKDEKPSAKNTGEGEPSKKTQKNNLKQHKGETLSEDDPAKDLSLKEMISLKSSTKGPGRTKGQTTENSTPKLKQEQETDEPPRSRKNKGLDRSLVGARIKVWWPDDKMFYNGIVESFDAVSKRHKVAYDDGDVEVLLLREEKWEFISEEKEASMASETPRGRKRKADALKEENTETPKSDAVDPPKKRGRPKGVGSSNGTPSTSATPSTKGKTAGKVTKETPKTGPNLKKELEKNSKDKANVSTGTKDDKSVSKPKEAIIKGKDSKDEGKSTEGKAKPGRKPKNAGTPAGDSDKEKQEVEVKAAEIEEASGNASTGKKRRRKA

SEQ ID NO: 178502 - protein, 755 aa, Zea Mays
MQEVEECLIKVEQSPRESISNALRPATEALVKKELLGHADSNVRLAVASCISEITRITAPDAPYDDDAMKDVFSLIVGAFEHLDDIESPFFGRRTSILDTVAKVRSCVVMLDLECDDLINDMFHHFLRTANSGHSEAIISCMETIMRLVIEESEDVQPQIASCLLQNVRKEEKESSPSFELAEKVIGTCREKLKPVFLQSLKGTSLSEYSQIVASVCEEVSDDREDNNANPSGKDMVDDGKLSERTISDELPQESSKMEQDVSRPEQDGTSMNGDTVTAISSGATPPDTSESDQGPPSTNEKIEQPCYAQNIADAMQLKSDHNEGAESNAAKPNKKATLGSVKNTKLKPSDKCEPTVHSDADTKKQDLVASAEGSNGAADDTSRPADSTPKPKRGRPPGPKSLQKAPGKDQSPGLDLKKVNDDSAGKLAKRSAKDEKPSAKNTGEGEPSKKTQKNNLKQHKGETLSEDDPAKDLSLKEMISLKSSTKGPGRTKGQTTENSTPKLKQEQETDEPPRSRKNKGLDRSLVGARIKVWWPDDKMFYNGIVESFDAVSKRHKVAYDDGDVEVLLLREEKWEFISEEKEASMASETPRGRKRKADALKEENTETPKSDAVDPPKKRGRPKGVGSSNGTPSTSATPSTKGKTAGKVTKETPKTGPNLKKELEKNSKDKANVSTGTKDDKSVSKPKEAIIKGKDSKDEGKSTEGKAKPGRKPKNAGTPAGDSDKEKQEVEVKAAEIEEASGNASTGKKRRRKA

SEQ ID NO: 178503 - protein, 520 aa, Zea Mays
MYSWQEQAVHGRSHLSDVFALIEMLSMPGLFVEVAQVIERALLRGSFGLQLVAMVLERRHSYRSSSKSGSVVNDSQNKEVLLDGQFEPLSVQENDFTSVLALGEVLSLSTETKVQDFVRMLYAIIFKIYAEDHHRYRILKGLVERATNTSDNCRAVDIDMDVLVFLVKEEYGIARPVLNMMCEVAEVAQADRANLWHQICATEDENIRLREDMEMEQTNFTNEKIALNQRLTELEATIGSLRSELKAERDRFTREKKALSDQMREIENQLEWVRSEKDDQIAKLSSEKRNLHDRLNDAESQLALVKARKREELKKVTKEKNTLAEQLKNAEASRKRFDDELKRYAAETQTREEIRKSLENEVRRLTQTVGQTEGEKREKEEQITRCEAYIDGMESKLQVCQQYIRTLETSLQEEVARHAPLYGVGVESLSFNELEALANIHEQSLRQIKAIQQRKGSSHLLGGTALSHIPALFSPPPPSAAVGSPASRIPASPMAPNGAGMHGNGHHMNSTTGGRWFNPS

SEQ ID NO: 178504 - protein, 598 aa, Zea Mays
MFLRRHHSVRAVRWRLKDLGTEVPHCVLDFLSKTIQTQLDVAEAILKDIDSDCEPENNCLASTSPSSTCSTDGLSAEGMYSWQEQAVHGRSHLSDVFALIEMLSMPGLFVEVAQVIERALLRGSFGLQLVAMVLERRHSYRSSSKSGSVVNDSQNKEVLLDGQFEPLSVQENDFTSVLALGEVLSLSTETKVQDFVRMLYAIIFKIYAEDHHRYRILKGLVERATNTSDNCRAVDIDMDVLVFLVKEEYGIARPVLNMMCEVAEVAQADRANLWHQICATEDENIRLREDMEMEQTNFTNEKIALNQRLTELEATIGSLRSELKAERDRFTREKKALSDQMREIENQLEWVRSEKDDQIAKLSSEKRNLHDRLNDAESQLALVKARKREELKKVTKEKNTLAEQLKNAEASRKRFDDELKRYAAETQTREEIRKSLENEVRRLTQTVGQTEGEKREKEEQITRCEAYIDGMESKLQVCQQYIRTLETSLQEEVARHAPLYGVGVESLSFNELEALANIHEQSLRQIKAIQQRKGSSHLLGGTALSHIPALFSPPPPSAAVGSPASRIPASPMAPNGAGMHGNGHHMNSTTGGRWFNPS

SEQ ID NO: 178505 - protein, 820 aa, Zea Mays
MLLPTKVSTKSGGTKDTSKCDSSSSSTSLITLLMGISALKQAIIDLLLDIMVECCQPSEESGSSASTKAFPDSNGASSPPELSVEGDLTEYACSDVYARVESNSDDIRDSPVICNAGLAATEIAVNNIEHSCFPPETSAADLPADEGSEQASWSKCPEQSEELLGLIVNSLRALDSTVPHGCCEPRRRPQAVRKIALVLEKAPKQLQQDLISLVPKLVDGSEHSLAACALLDHLQRPDAEPSLRLPVFGALSELELESDIWKQASVHALELLSDSNDEPLVAAITYVLKAASQYGLSAEGMYSWQEQAVHGRSHLSDVFALIEMLSMPGLFVEVAQVIERALLRGSFGLQLVAMVLERRHSYRSSSKSGSVVNDSQNKEVLLDGQFEPLSVQENDFTSVLALGEVLSLSTETKVQDFVRMLYAIIFKIYAEDHHRYRILKGLVERATNTSDNCRAVDIDMDVLVFLVKEEYGIARPVLNMMCEVAEVAQADRANLWHQICATEDENIRLREDMEMEQTNFTNEKIALNQRLTELEATIGSLRSELKAERDRFTREKKALSDQMREIENQLEWVRSEKDDQIAKLSSEKRNLHDRLNDAESQLALVKARKREELKKVTKEKNTLAEQLKNAEASRKRFDDELKRYAAETQTREEIRKSLENEVRRLTQTVGQTEGEKREKEEQITRCEAYIDGMESKLQVCQQYIRTLETSLQEEVARHAPLYGVGVESLSFNELEALANIHEQSLRQIKAIQQRKGSSHLLGGTALSHIPALFSPPPPSAAVGSPASRIPASPMAPNGAGMHGNGHHMNSTTGGRWFNPS

SEQ ID NO: 178506 - protein, 474 aa, Zea Mays
MSQRPRKKNREKTHPEKQTKNPQSMKPTTSAAAAAVAAVTVTTDDPSPSPSDSTSATFTVDRRGDASASCRWTLPDFPRTRARTFYSRYFEVGGFDCRLLLYPRGDSQALPGYLSLYLQVLDPKAPVSSSSSTTTTTSSKWDCFLSYRLSVVHPTDPAKSLGRDSWHRFSSKKRSHGWCDFAPSSSAPFLFQPHDALVISADISVLSEAASFSDADGRFNWKVLNFGLFREMIRTQKIMSPAFFPASASAGGTDCGLRISVYQSNVSGAEHLSVCLESKEPVVQVASGSSALASGGTGSGVPDGDRGCWCLFRISILNQRSGGSHIHKDSYGRFGADSASLGWGEYIKMDEFLAADGGYLVDGAVVFSASVHVIKESNSFSRSLPMVPGICGAGGGRAGARKSDGHFGKFVWRIESFTRLKELLKKRKIAGLCIKSRRFQVGNRDCRLIVYPRVSTAMPPVSVSGSYRSPKYNY

SEQ ID NO: 178507 - protein, 77 aa, Zea Mays
MVYLLLKLILLLPMATTSVERAFSTMSLVKTKLRNKMCDSLLDDCLVTYIERDIFFEVNEEDIIETFMALRKRRPDK

SEQ ID NO: 178508 - protein, 63 aa, Zea Mays
MVASRCTSHCSTAEVGVVGPTVHDSFWIIGDIVLEIEQRVKILVVFMNRRAMNFLHSVTIQKK

SEQ ID NO: 178509 - protein, 235 aa, Zea Mays
MTRPKTQTNKDKGPKPNDGECVSHLELKEMMHTLTKAFESYTIDVDSSLSGSIYPYFSSFNENIANEYTEWEVSMDKIFSRCHICDRRKIKIVASTLMNHALVWWNNLHNYDKQKMWADMKTRIREQFVSSHDVMYSNKSELPLLHDDCTTNFCDNKELSDGSSITYMPQLENELDIVASNPISCAKIRILNPITSVHDELKLLSSSNSLGYIEFDVLCNQDNLEEKLSFSTDFL

SEQ ID NO: 178510 - protein, 228 aa, Zea Mays
MISGTIQKELANCCAETVTRAIKEEMEDCLFSILVDESRDISVKEQMTIVVRFVNKQGEVIGRFLGIKHVKDTTSESLKKALVEMVSDHGLVVAKLRGQGYDGASNMRGEFNGLQKLIRDENPFTFYVHCFAHQLQLIIVAVSKCCSSLVDFFEYVTSIVNSTCASCKRKDILQHKHRLNLLSKLESGEISSGRGKQQETSLSRLGDTRWGSHYKTLLRIESMWESVI

SEQ ID NO: 178511 - protein, 96 aa, Zea Mays
MTKGAFKNIGLDNIVGWNIVWRRIRLIASIVTFLSTIEWMINFSMMHLQKLASHNGEMFIRHFQNVLVGLIAYTILQQQHSMIFVTKGQVLVIRLQ

SEQ ID NO: 178512 - protein, 203 aa, Zea Mays
MLHKMTDLKSYFSQASSGSRPSTRASGVCNEPGIQVEVQENNSEDANGENIYGQVEGINQFNPDHIISDPGLCIPIDYFAPNNRDDVRRAFIAKGPTQPIGHNFPQSHDKRSFQKHWFRQHSWLEYSVEKNKAYCFYCYLFKHDRMDDKFFHDAFTKVGFSQWRNVYTAFPKRVGGPNSIHNTAATAFHDFCNQRSSVSHKVA

SEQ ID NO: 178513 - protein, 393 aa, Zea Mays
MRNSKPPSKLAMLMVLLFLLCYGVEKVHCSTVHENNQDFHSLLDFKKGITHDPNGAMNDWINNTHFCRWKVLEKKTSRRAHQSQLSFGEHFEKVTYNDLAQATRDFSESNLIGKGSYGTVYSGKLKESKTEVAVKVFDLEMQGAERSFLAECEALRSIQHRNLLPIITACSTVDTAGNVFKALIYELMPNGNLDKWIHHKGDEAVPKRRLSLTQRIAVVVSVADALDYLHHDCGRPTVHCDLKKLNSKNCSCRSISSIGIKGTIGYIPPEYGGGGHVSTSGDVYSFGIVLLEILTGKRPTDPMFTGGLDIISFVENSFPDQIFQVIDPHLVEDRQKINQPNEVANNEMYQCLVALLQVALSCTRSLPSERSNMKQVASKLQAIKAAQLGGKSK

SEQ ID NO: 178514 - protein, 86 aa, Zea Mays
MPITLGTFVVGILMVMQANIDKDLKKSSSRINNVTKECKVRCHMHIKLSSCYIHMLHSHVVDCSNCTRDTCLVMQDQSNNIKLSMK

SEQ ID NO: 178515 - protein, 646 aa, Zea Mays
MRSPSTLPRRRTHRRPTRRRRRRPARCGGPSPERMCAICFDSMKPGRGQALFTAECSHMFHFHCISSSVKHGNHVCPVCRAKWKEIPFNRSLSSIVPCGRGGQAWLPQQSGYMALLRQVPNHQQQGPDLVTSEPADFNDDKPLQKMESANIGSSRTVEIKTYSEFSAIQQSSQDDFAVLIHLKAPYANPEQVTSRSVNATSIATSRAPVDLVSVLDVSGSMAGTKLALLKRAMGFVIHHLGPSDRLSVIAFSSTARRLFHLRRMSHSGRQQALQAVNSLGASGGTNIADALKKAAKVIEDRSHQNPVCSIILLSDGQDTYNILSDIRGVRPDYSSLVPPSILNHTFRLVPVHGFGFGIDHDSDALHSIAEASGGTFSFIEDEGVIQDAFAQCIGGLLSVVVQNVQVNVECVHPGVQLRCIKSGSYLSKVSADRQNGSVDVGHLYADEERDFLLSVSLPHCCEQTTLLKVACAYRDSLTNEEIKIQGDEVTILRPKSPVPEPVCMEVDRERNRVRAADAIEAARDAAERGDLSDAVSILEDCRRILSESFSSRSGDRLCNALDAELREMQERMANRQRYEASGRAYLLSGLSSHSWQRATARGDSTDSDTLVYSYQTPSMVHMLQRSQNQGPSQVQQPRILVEPHPR

SEQ ID NO: 178516 - protein, 109 aa, Zea Mays
MTRSCPQVQLTGEAFDWLMDGCCCWWSGLGGYCDLGRWDLQNLGCLTEEPSLMCFHSEMMNAFFYLNQQPGIRCEKCYAMSSLVNHRGIVNKFFGNHHALNMTKDGGTK

SEQ ID NO: 178517 - protein, 135 aa, Zea Mays
MSTQSISPASASAQFTYPAAAAPSYFPVPFHLQNAQYTAWTAAAPAVPVYNAIYPMPQVQQAQQLFQKDSKIITPEALATVKAAIANSEKDKKVDATKKAVPRKAAGQSWEDPTLADWPESAQGCDEPNRLPHVI

SEQ ID NO: 178518 - protein, 149 aa, Zea Mays
MSTQSISPASASAQFTYPAAAAPSYFPVPFHLQNAQYTAWTAAAPAVPVYNAIYPMPQVQQAQQLFQKDSKIITPEALATVKAAIANSEKDKKVDATKKAVPRKAAGQSWEDPTLADWPETLIARCLADNNHEKMSVLQARSNALSIML

SEQ ID NO: 178519 - protein, 144 aa, Zea Mays
MSTQSISPASASAQFTYPAAAAPSYFPVPFHLQNAQYTAWTAAAPAVPVYNAIYPMPQVQQAQQLFQKDSKIITPEALATVKAAIANSEKDKKVDATKKAVPRKAAGQSWEDPTLADWPENNNHEKMSVLQMISVCSAVILEMK

SEQ ID NO: 178520 - protein, 246 aa, Zea Mays
MAAAPALLAVTPLPPPIVVVVPFSPTLHALLQETERRDQPSSRIDRSEMMMDSAEHQKDVGQVGGRDPRAQQAHPATRLWLGSFATAEEAALAYDEDARRLYGPDAFLNLPHLRASDVSSSATHQRLRWLAASARGAAAVPAYGLLNLNAQHNVYNLLAHVPLMDFQKESTFDMWSTVGPCFNSSKCHSFNVKPFHLMDKQLKSHPPKNVESEILSEHIKKEKGGSKGWKMTILSEERNMGWNGGR

SEQ ID NO: 178521 - protein, 421 aa, Zea Mays
MPAHAHPLGPSPRRPSLPPALTPLAPSSPSRSLHLDRGRMAAAPALLAVTPLPPPIVVVVPFSPTLHALLQETERRDQPSSRIDRSEMMMDSAEHQKDVGQVGGRDPRAQQAHPATRLWLGSFATAEEAALAYDEDARRLYGPDAFLNLPHLRASDVSSSATHQRLRWLAASARGAAAVPAYGLLNLNAQHNVYNLLAHVPLMDFQKESTFDMWSTVGLSSKGENDSSMFTKAWLSFLMLPLPLDVYKEVLASIHQNVIPSMSNPSILCDFLTRSYGIGCVISVMALSGLFILMTQHSLEYRKFYEKLYALLTLVVFMAKHRSVFLQEHGVEWRKMINGGGGQKRCNPNIIRFQHHIESDPKFFDKSWRKLHDTIREIYNHNCTGLSFEELYRCLHFYYFNLGARGSLQIQAYLRWERKGR

SEQ ID NO: 178522 - protein, 66 aa, Zea Mays
MSERDQACIHISASIIDGASLLRCGLIILPPVLKTDSDATVDTGIARTSRAIFRKVGYLSPACCHH

SEQ ID NO: 178523 - protein, 127 aa, Zea Mays
MQKLRAVLVEHALANGDAERDVDTSIFAKVAEFEQQVRAALPKEVEAARAAVENGSPLVPNRIKECRSYPLYRFVREEVGTKYLTGEKTRSPGEELNKVLVAINQRKHIDPLLECLKEWNGEPLPLC

SEQ ID NO: 178524 - protein, 248 aa, Zea Mays
MELAQFARRARPLQLCFSCVAPAPGAEVPPWLRLVFTCTRLCPLLQLAPLFVLAVGPGLLGRRARAKLPVRVALPLCSPWPVPCSRRGSLLAPCRVLARSYARSARPCRLLRVRLLRPVGGLPLRTASCTLGWLVSAGRTSISYLPWTTHRRPITVARRKTLVLVIDIRSSPTFVLLSFSHPVSMSVPTRCLRIVIARTKESPREDVKRLDGGVREVRVAPSKRSTNCLNRKIITDIVDSSQLLERCS

SEQ ID NO: 178525 - protein, 91 aa, Zea Mays
MGGCDWQACTEMVMPMSYSEQRSMYPPYKFDCASYAEDCIKSYGVRPHVSYCHVQGFQYYDIIEQTSSFDFLPSLFRITIRVFTNQRILSY

SEQ ID NO: 178526 - protein, 186 aa, Zea Mays
MKYIKIAATLPDKTVRDVAMRCQWMAARKEATRRRKPEEHYLGKKIKDRKDKMAEPSSWGTNPPVQTEMRCSSSMPANAKHNGFLSADSQIDHGMLNILEENAKLLNQIEVNILTSQAHNNIELFHHARRNINGLLQSMSQIPGIMSKMPPLPISVDERLASCILPRAPMAQVLGSSHLKEERRVW

SEQ ID NO: 178527 - protein, 1182 aa, Zea Mays
MDNAQSDNRTDTKQDDDARQSKQDDEEARLEEYKKIIDQKISLRRSNQNPERPDANYLRTLDSSIKRNTTVIKKLKTINDEQKDVIMDELKSVNLSKFVSEAVSYICEAKLRSADIQAAVQVCSLLHQRYKDFSPCLIEGLLKIFFPGKSGDDLDADKNSRAMKKRSTLKLLIELYFVGIVEDASIFVNIIKDLTSAEHLKDREGTQTNLSLLSTFARQGKFFVGLQPHGQEAYDEKKFFKKALNSYYDAVAELLQSEHASLRLMEAENAKVLSAKGELSDENTSSYEKLRKSFDQLLRGVSSLAESLDMQPPVMPDDGNTTRVTTGTDALPSSGKESSALEPIWDDEDTKAFYESLPDLRAFVPAVLLGEVEPKSNEQHVKGRELSGESTSEQETELHDNVPTSATERQLEVKVDDLVKESEDRDKEKGKDGEKEKSKEKDLDKKNEREKEKGRVLDGASLDNLLQRLPGCVSRDLIDQLTVEFCYLNSKANRKKLVRALFNVNRTSLELLPYYSRLVATLSTCMKDVPSMLLSMLEEEFNFLINKKDQINIETKIKNIRFIGELCKFKMAPPALVFSCLKACLDDFSHHNIDVACNLLETCGRFLYRSPETTIRMANMLEILMRLKNVKNLDSRHSTLVENAYYLCKPPERSARISKVRPPLHQYIRKLLFSDLDKSSVEHVLRQLRKLPWAECQQYLLKCFLKVHKGKYSQVHLIALLTASLSRYHDDFAVSVVDEVLEEIRVGLELNDYGMQQRRLAHMRFLGELYSYKHIDSSVVFDTLYLIIVFGHGTPEQDVLDPPEDCFRIRLIITLLQTCGHYFSKGSSKRKLDKFLLHFQRYIISKGPLPLDIEFDIQDLFGELRPTMSRYSSIEELVAALVEFEENERSAPVEKVENERHSDNESQKRHSRDAGPSVNGESAANGTEENGKAHEVADSESYSDTGSIDGREEEEDILSEDKSNDGSDNEGDDEDDGIPVVSDEDENVEVRQKVMNVDPKEQEDFDRELKALLQESLESRKSEARSRLPLNMMVPMNVLEGSKDSRATESESGEETVDEEGGNAGGSSKVRVKVLMKKGHKQQTRQMLIPADSSIVQSTKQQEAAELEEKQSIKRRILEYNEREEELNGASQMGNWGQGATSTSSIRSGGRGSWDGSARGGGRQRHHITGSGGFYHSYGRRR

SEQ ID NO: 178528 - protein, 159 aa, Zea Mays
MLQSLTVYYYLYQISTGLWMGIEFYAINTDSQALINSQAQYPLQIGEQLTHDLGTGGNPNLGEQAAEESRETIATALRDSDLVFITAGMGGGAAPIVAQISKEAGYLTVGVVTYPFNFEGRQLFALFTSISIACPTNDQPGSGKPYCVTITITLQSFSK

SEQ ID NO: 178529 - protein, 229 aa, Zea Mays
MASLVVVAAALLVAALVAFCGTDPLWTGFESHLVDLPGVRVPPRRPPRSRRDVDARGRTGVAPRSRGATPPNRRSRTAPLTSCICLERSRRGLGDGSVGMLQSLTVYYYLYQISTGLWMGIEFYAINTDSQALINSQAQYPLQIGEQLTHDLGTGGNPNLGEQAAEESRETIATALRDSDLVFITAGMGGGAAPIVAQISKEAGYLTVGVVTYPFNFEGRKRSLQRHIG

SEQ ID NO: 178530 - protein, 274 aa, Zea Mays
MASLVVVAAALLVAALVAFCGTDPLWTGFESHLVDLPGVRVPPRRPPRSRRDVDARGRTGVAPRSRGATPPNRRSRTAPLTSCICLERSRRGLGDGSVGMLQSLTVYYYLYQISTGLWMGIEFYAINTDSQALINSQAQYPLQIGEQLTHDLGTGGNPNLGEQAAEESRETIATALRDSDLVFITAGMGGGAAPIVAQISKEAGYLTVGVVTYPFNFEGRKRSLQDLPCDRWLGKIILETCISQIHIWLRYDSCVNATYIFPNYCRYFHLALRQ

SEQ ID NO: 178531 - protein, 228 aa, Zea Mays
MASLVVVAAALLVAALVAFCGTDPLWTGFESHLVDLPGVRVPPRRPPRSRRDVDARGRTGVAPRSRGATPPNRRSRTAPLTSCICLERSRRGLGDGSVGMLQSLTVYYYLYQISTGLWMGIEFYAINTDSQALINSQAQYPLQIGEQLTHDLGTGGNPNLGEQAAEESRETIATALRDSDLVFITAGMGGGAAPIVAQISKEAGYLTVGVVTYPFNFEGRKRSLQASI

SEQ ID NO: 178532 - protein, 199 aa, Zea Mays
MAGLCLLSSAPLPPRRGLGDGSVGMLQSLTVYYYLYQISTGLWMGIEFYAINTDSQALINSQAQYPLQIGEQLTHDLGTGGNPNLGEQAAEESRETIATALRDSDLVFITAGMGGGAAPIVAQISKEAGYLTVGVVTYPFNFEGRKRSLQDLPCDRWLGKIILETCISQIHIWLRYDSCVNATYIFPNYCRYFHLALRQ

SEQ ID NO: 178533 - protein, 194 aa, Zea Mays
MAGLCLLSSAPLPPSLERSRRGLGDGSVGMLQSLTVYYYLYQISTGLWMGIEFYAINTDSQALINSQAQYPLQIGEQLTHDLGTGGNPNLGEQAAEESRETIATALRDSDLVFITAGMGGGAAPIVAQISKEAGYLTVGVVTYPFNFEGRKRSLQVAYCEGGPRRSHVQDLPCDRWLGKIILETCISQIHIWLS

SEQ ID NO: 178534 - protein, 192 aa, Zea Mays
MAGLCLLSSAPLPPSLERSRRGLGDGSVGMLQSLTVYYYLYQISTGLWMGIEFYAINTDSQALINSQAQYPLQIGEQLTHDLGTGGNPNLGEQAAEESRETIATALRDSDLVFITAGMGGGAAPIVAQISKEAGYLTVGVVTYPFNFEGRKRSLQVLPFSLATINILCETHHLFTVQYDHRLYILADHRQEH

SEQ ID NO: 178535 - protein, 288 aa, Zea Mays
MASLVVVAAALLVAALVAFCGTDPLWTGFESHLVDLPGVRVPPRRPPRSRRDVDARGRTGVAPRSRGATPPNRRSRTAPLTSCICLERSRRGLGDGSVGMLQSLTVYYYLYQISTGLWMGIEFYAINTDSQALINSQAQYPLQIGEQLTHDLGTGGNPNLGEQAAEESRETIATALRDSDLVFITAGMGGGAAPIVAQISKEAGYLTVGVVTYPFNFEGRKRSLQVAYCEGGPRRSHVQDLPCDRWLGKIILETCISQIHIWLRYDSCVNATYIFPNYCRYFHLALRQ

SEQ ID NO: 178536 - protein, 257 aa, Zea Mays
MSVPPPAGGGAIINEVLTDDELRAVLRRLGPEAERDAFGLVCRRWLRIQSSERRRLRARAGPDMLRRLAARFPGVLDLDLSQSPSRSFYPGVIDDDLNVIASSFRNLRVLALQNCKGISDVGVAKLGDGLPSLQSLDVSRCIKLSDKGLKAVALGCKKLSQLQIMGCKLVTDNLLTALSKSCLQLVELGAAGCNSITDAGISALADGCHHIKSLDISKCNKVSDPGVCKIAEVSSSCLVSIKLLDCSKPLMSDVVTR

SEQ ID NO: 178537 - protein, 253 aa, Zea Mays
MGCKLVTDNLLTALSKSCLQLVELGAAGCNSITDAGISALADGCHHIKSLDISKCNKVSDPGVCKIAEVSSSCLVSIKLLDCSKVGDKSIYSLAKFCSNLETLVIGGCRNISDGSIQALALACSSSLRSLRMDWCLKITDTSLQSLLSNCKLLVAIDVGCCDQITDNAFMDGEGYGFQSELRVLKISSCVRLTVAGVGRVIESFKALEYLDVRSCPQVTRDSCEQAGVQFPAGCKVNFDGSLLESDPSAEMFF

SEQ ID NO: 178538 - protein, 330 aa, Zea Mays
MHLRCLRPPSPAEAQLDLFPRVFGHEASGVVESVGEGVTEFQVGDHVLTVFIGECKSCKHCVSGKSNMCQKLGLERKGVMHSDQKTRFSVKGKPVYHYCAVSSFSEYTVVHSGCAVKVGLTVPMDRVCLLSCGVSSVWNVANVSKGSSVAIFGLGTVGLSVAQGAKLRGASKIIGVDTNPEKQEKGKSFGVTDFINPDELSEPVQQVIKRITDGGVDYSFECVGDSGVVSTALQSCSDGWGVTVTLGLPKGKLEVSTHYAFLLSGRTLKGSMFGGWKPKSDLPSLVDKYAAKEIQVDGLVTHDIPFNEINKALELMLENKCLRCVIHMPR

SEQ ID NO: 178539 - protein, 345 aa, Zea Mays
MGIVEAWMREKPIRTFLARLAQRRAAAAAAFLASPSATTVIDGEGGSDGSIPQLSSVANSVVSRCSRILALSIENLQRSFETDFPHSCNEANTYARDLLEYCCHKALHEVTTRPDYLADKNLRRLMFDMMLAWETPGAQDVSVDNGSIVRDSLEIEDEDEGSIFYANSTRLAAQVDDKKTVGLSAFARIAPSCPIIADLVTVRNLFDALTSSSGGRLHFLVYDKYLKSLDRELRSVKGIMQSSLASSFHLDAGECILAIDGDKPIQPVLQHIGISAWPGRLVLTTHALYFQSIRVGYGDKIVKYDLSTDSNQVIKRDLTGPLGVRLFDKAVMYKSSTLTNLFRFL

SEQ ID NO: 178540 - protein, 377 aa, Zea Mays
MGIVEAWMREKPIRTFLARLAQRRAAAAAAFLASPSATTVIDGEGGSDGSIPQLSSVANSVVSRCSRILALSIENLQRSFETDFPHSCNEANTYARDLLEYCCHKALHEVTTRPDYLADKNLRRLMFDMMLAWETPGAQDVSVDNGSIVRDSLEIEDEDEGSIFYANSTRLAAQVDDKKTVGLSAFARIAPSCPIIADLVTVRNLFDALTSSSGGRLHFLVYDKYLKSLDRELRSVKGIMQSSLASSFHLDAGECILAIDGDKPIQPVLQHIGISAWPGRLVLTTHALYFQSIRVGYGDKIVKYDLSTDSNQVIKRDLTGPLGVRLFDKAVMYKSSTLTEPIYFDFFELGGPSRRDYWLAITREVLQQKSFRKEIWS

SEQ ID NO: 178541 - protein, 308 aa, Zea Mays
METSPFNRYCNILEYQHGQSIRVGYGDKIVKYDLSTDSNQVIKRDLTGPLGVRLFDKAVMYKSSTLTEPIYFDFFELGGPSRRDYWLAITREVLQVNRFIRKFNLGDVQKAEALSKAILGILRYSAVKEAFHIAPSHFKTTLTFSLAEKLPKGDMVLEALYNNYFQLLDSSLRHLAIDSAVDRMSENHSIPFSLYALSRMGFLLLKTNDKSEKEMSFCAVCFGVTKSLEAALEESICYSERIESARATVDQVKVEGVDANLALMQELLFPLIQAGKIVYSLSQWEDPLKSLLFLAFMLYAIQRRLYPS

SEQ ID NO: 178542 - protein, 383 aa, Zea Mays
MGIVEAWMREKPIRTFLARLAQRRAAAAAAFLASPSATTVIDGEGGSDGSIPQLSSVANSVVSRCSRILALSIENLQRSFETDFPHSCNEANTYARDLLEYCCHKALHEVTTRPDYLADKNLRRLMFDMMLAWETPGAQDVSVDNGSIVRDSLEIEDEDEGSIFYANSTRLAAQVDDKKTVGLSAFARIAPSCPIIADLVTVRNLFDALTSSSGGRLHFLVYDKYLKSLDRELRSVKGIMQSSLASSFHLDAGECILAIDGDKPIQPVLQHIGISAWPGRLVLTTHALYFQSIRVGYGDKIVKYDLSTDSNQVIKRDLTGPLGVRLFDKAVMYKSSTLTEPIYFDFFELGGPSRRDYWLAITREVLQLSRKASERRYGLRSTV

SEQ ID NO: 178543 - protein, 218 aa, Zea Mays
MKYNHAKLPLGNAKAAPLQTTVEVTEHPMPKDEARVVESQGILEVSEHSMAKDDAEVAQPQGTAEVFEHFLSKDEGKVAQCQGTFHFPEHSRPKDDSGKTARHDMDTSETCKTADAPALSDLTENEGILSDQTESEDKPDPGNQQREIEANKFDLKNFEKNLNANDSNASDQSGSDTVNEAKTHARGDNPKLEESANTGLLGSLRSFAYGIRNFWKNM

SEQ ID NO: 178544 - protein, 277 aa, Zea Mays
MQASARLSYSVASRKVIAGVSIAPPRSCYRTSRGKAHAAPLPAQEPPPKGLKRITKQERRVRIVEFVENYRASNEVEVTEHPMPKDEARVVESQGILEVSEHSMAKDDAEVAQPQGTAEVFEHFLSKDEGKVAQCQGTFHFPEHSRPKDDSGKTARHDMDTSETCKTADAPALSDLTENEGILSDQTESEDKPDPGNQQREIEANKFDLKNFEKNLNANDSNASDQSGSDTVNEAKTHASSFVMINYLDLARGLLLPLSVYNWLIQAVEDEFSLRLR

SEQ ID NO: 178545 - protein, 383 aa, Zea Mays
MQSPYSWLGHGLNTQPPPPGSSVSLLRLLSQAKTSLASSSQTWHETLGRPPPLRNLPLRSAMQASARLSYSVASRKVIAGVSIAPPRSCYRTSRGKAHAAPLPAQEPPPKGLKRITKQERRVRIVEFVEKASNEGKFPTVKNICQQIGGGYYAVRELLQEMKYNHAKLPLGNAKAAPLQTTVEVTEHPMPKDEARVVESQGILEVSEHSMAKDDAEVAQPQGTAEVFEHFLSKDEGKVAQCQGTFHFPEHSRPKDDSGKTARHDMDTSETCKTADAPALSDLTENEGILSDQTESEDKPDPGNQQREIEANKFDLKNFEKNLNANDSNASDQSGSDTVNEAKTHASSFVMINYLDLARGLLLPLSVYNWLIQAVEDEFSLRLR

SEQ ID NO: 178546 - protein, 493 aa, Zea Mays
MGLCFSKKKPPAKPGKVAAAVSDDKAKKSPAQQPKRAAAAAANKAAVSAKDAAVPGEEKRRRSGSQGPAAEKQLPVVLVPSAPVRTSSCTKEEVDAILIQCGRLSRSSSGAGRAASTGDTAACGGGHRRRSSSPARMAAGTGNENAGACGPAAGPAPVLSRSSSRKNEQSPYRRCPMAELDDNALRNSSNHGARPHKKSAETAVAATPRKATGRGKEPTAVKEKLEITEASETRAHSSKTSSKTTTTPTLSVVAESLTQMPGAAQPGCRSRRASRDFDQNPGSYATQLLEDIHNYHQQSTSATPATPSISLPACVAKACSIVEAVADLNSSSSENRAYEHEPGHSADDKGSVNAPVGSGSDGFVEPSAAARKHLLPARDAHAETEPQESAGSNSVSGHPWTPSWEPTSAESTDRTWSTGDEVVEQSGSHGGRCSPMNRHQLSKQRQCQPELSGRSRAGSGNANGQYRGRSSAHRASGSVASGRSGVRVVSANS

SEQ ID NO: 178547 - protein, 76 aa, Zea Mays
MFHMSFPTNSTAYKLWLSSQRPSTMCLLNILLAPLTSFGHTIGWFLYWSSWILNSPLLITKMCSSPAFFRERKNGS

SEQ ID NO: 178548 - protein, 220 aa, Zea Mays
MIWGKTKSKHNPRQSLDEKSKPKPSAFSWVPEGFYVGKDDMASRPKLSGIQKQVLALYRGFLRTARLKAPEERRRIESVILAEFRDNARSVDRLYWGCDLYIVKDHLDVVNAILDTDDSCIRIVRKNGKTSLHTAARIGYHRIVKALIERDPGIVPIKDRKGQTALHMAVKGKNTDVVEELLMADVSILNVRDKKGNTALHIATRKWRPQVWFFSGVFYK

SEQ ID NO: 178549 - protein, 170 aa, Zea Mays
MGSGGILCWGFLRTARLKAPEERRRIESVILAEFRDNARSVDRLYWGCDLYIVKDHLDVVNAILDTDDSCIRIVRKNGKTSLHTAARIGYHRIVKALIERDPGIVPIKDRKGQTALHMAVKGKNTDVVEELLMADVSILNVRDKKGNTALHIATRKWRPQVWFFSGVFYK

SEQ ID NO: 178550 - protein, 96 aa, Zea Mays
MLLLAVDLVKVITREASRSIREVQSWKNRLYSEEGPSHVQSSGLHSPSAKVRASPICAAFDSKGKISDNILLHKIEELNRSVKNLESLLVRSHRRE

SEQ ID NO: 178551 - protein, 156 aa, Zea Mays
MLSGHAVTLSERSASGTRLIEDVACEAGDEEEADAAARVVYRASFQELMPNYLQYDTIIWALISLLLVLAWGIGLLLLLYLPYKRYVLKKDILSRQLFVTESKIVYKATRPSYMPFMGIVKKEIKVPLHLIVDVIIEQGDCVVPISVSTFGNYLFM

SEQ ID NO: 178552 - protein, 119 aa, Zea Mays
MDPYAILKCRSQEQKSSIATGKGTTPEWNENFIFTVSDRTTDLVIKLMDSDTGTADDFVGEATIPLEAVYTERSIPPTLYNVVKGEKYCGEIKVGLTFTPEDTRQRGLPEDFGGWKQSS

SEQ ID NO: 178553 - protein, 141 aa, Zea Mays
MVHGTLEVLLVGAKGLENTDYLCNMDPYAILKCRSQEQKSSIATGTTPEWNENFIFTVSDRTTDLVIKLMDSDTGTADDFVGEATIPLEAVYTERSIPPTLYNVVKGEKYCGEIKVGLTFTPEDTRQRGLPEDFGGWKQSS

SEQ ID NO: 178554 - protein, 91 aa, Zea Mays
MAPGPSARWSRLRPRPRGQSDSAAATAAVAAAAGDSGAAAVAAGGCGCGGAVAAASARTAGGDAPPMSASAAAAAGGADAAVAAMGRGRSS

SEQ ID NO: 178555 - protein, 55 aa, Zea Mays
MDVYMSDLSWVHFFSCCLCLVMQFVYWAKAHNAWFSSLALDYPNKYPKSHYLITR

SEQ ID NO: 178556 - protein, 251 aa, Zea Mays
MSTESGELLGIDPVELRFPFELNKQISCTLQLTNKTDKQVAFKVKTTSPKKYCVRPNNGMVAPRSKADVVVTMQAQRDVPPDMQCKDKFLVQSATVAKEVVPKEVTGDMFTKDSGNVVEEVKLKVVYVAPSSSQSERFEDGNLGSLSYQEETKEPKESEKIITEPFALISKLMEEKNSAIELNNKVRQELARHQQAAWWFLISFSTGGCYSGNTARVPHEEMSVCNDLSCLAFSELNKIVCALCACCCTTQ

SEQ ID NO: 178557 - protein, 78 aa, Zea Mays
MNTTSAATPAEIPIAIASVLPASSSGLSDTKRRRIYNQKKTGLAQGCIQRHYIYRALIRSGLVINKLKGFYERKPLNH

SEQ ID NO: 178558 - protein, 394 aa, Zea Mays
MASLSDSAGAGGGRAGAELMVPQFLLKALHAILAVRSPRPHAPPAPAASASAFRRRDRWFHLPIHAPPPPPAAEHLPDPSPGEPLVVDVYLAPSGGGPEEVLERWTVACEPWPSPAAAAAVGEGLAVNRAYKRCITLLRSLYAALRFLPAYRAFRRLCASGQVYNYCMGHRVGSFAAPFSRAEEAAMRTKRLAPVETQLGRLVVSVQYLPSLAAFNFEVTSLASAAIITDYVGSPAAEPMRAFPPSLTEATGSPFPQPSRRPNSWASPAPWPHTLGQPAKFSPPPAHYASPTPSPPTFGYLHSRFSGETAPMTIPQAGGGRGTVHHRNMSEPSRAFMFPPPSPKNVRGEAGMQESPTEINRSFKRADGIRMGDLYSNLPSGSKSCFTTCPCACV

SEQ ID NO: 178559 - protein, 384 aa, Zea Mays
MASLSDSAGAGGGRAGAELMVPQFLLKALHAILAVRSPRPHAPPAPAASASAFRRRDRWFHLPIHAPPPPPAAEHLPDPSPGEPLVVDVYLAPSGGGPEEVLERWTVACEPWPSPAAAAAVGEGLAVNRAYKRCITLLRSLYAALRFLPAYRAFRRLCASGQVYNYCMGHRVGSFAAPFSRAEEAAMRTKRLAPVETQLGRLVVSVQYLPSLAAFNFEVTSLASAAIITDYVGSPAAEPMRAFPPSLTEATGSPFPQPSRRPNSWASPAPWPHTLGQPAKFSPPPAHYASPTPSPPTFGYLHSRFSGETAPMTIPQAGGGRGTVHHRNMSEPSRAFMFPPPSPKNVRGEAGMQESPTEINRSFKRADGIRMGDLYSNLPSGSKE

SEQ ID NO: 178560 - protein, 752 aa, Zea Mays
MNGVTEYTVADIYDYINKHEERAFVLKFSAIEIYNEAVRDLLSAENTPLRLWDDAEKGTYVENLTEVVLRDWNHLKGLISVCEAQRRTGETFLNEKSSRSHQILRLTIESSAREFLGKDKSTTLVASANFVDLAGSERASQALSAGTRLKEGCHINRSLLALGTVIRKLSMGSNAHIPYRDSKLTRILQPSLGGNARTAIICTLSPATSHIEHSRNTLLFGSCAKEVVTNAQVNVVMSDKALVKHLQKEVARLESELRQPASNSSLEALVKEKDNQIRKMEKEIKELKSQRDLAQSRLQNLLETVGDQVKHSGSGKRSARSPPSIGISPGISRDDSSQISHDDSDLFKDVRCIGTSGTGGNEQLDLSAGESSSLQGLNMNSSLHGSGSNASVNSRRSRLLSESPITLEQHLENIKRPFVSLGRDLGSSTHNSSGSRILGRSRSCRSLMGSTMFDGMEMDDGTPLHRSLVGFPGRPEGNHRRGSTPNHDAESETLSRAGSVVSTKTNAACDAEFTGIGEFVAELKEMAQVHYQKQLGNQITNGEFVDIKNIGLDPIADASQSPSRWPLEFEKKQQEIIGLWHACCISLVHRTYFFLLFKGEQADSIYMEVELRRLSFLRDTYSRGNTPSNAVVGSLNSSPAASAKKLQREREMLARQMQKRLTAEERERLYTKWGISLDSKKRKLQVARRLWTEAEDLEHVRESASLVAKLIGLQEPGQVLREMFGLSFAPQQQPPPRRRSSNGWRYGIPSFG

SEQ ID NO: 178561 - protein, 550 aa, Zea Mays
MLFSLKSLCILLMQTIESSAREFLGKDKSTTLVASANFVDLAGSERASQALSAGTRLKEGCHINRSLLALGTVIRKLSMGSNAHIPYRDSKLTRILQPSLGGNARTAIICTLSPATSHIEHSRNTLLFGSCAKEVVTNAQVNVVMSDKALVKHLQKEVARLESELRQPASNSSLEALVKEKDNQIRKMEKEIKELKSQRDLAQSRLQNLLETVGDQVKHSGSGKRSARSPPSIGISPGISRDDSSQISHDDSDLFKDVRCIGTSGTGGNEQLDLSAGESSSLQGLNMNSSLHGSGSNASVNSRRSRLLSESPITLEQHLENIKRPFVSLGRDLGSSTHNSSGSRILGRSRSCRSLMGSTMFDGMEMDDGTPLHRSLVGFPGRPEGNHRRGSTPNHDAESETLSRAGSVVSTKTNAACDAEFTGIGEFVAELKEMAQVHYQKQLGNQITNGEFVDIKNIGLDPIADASQSPSRWPLEFEKKQQEIIGLWHACCISLVHRTYFFLLFKGEQADSIYMEVELRRLSFLRDTYSRGNTPSNAVVGSLNSSPAAR

SEQ ID NO: 178562 - protein, 582 aa, Zea Mays
MGSNAHIPYRDSKLTRILQPSLGGNARTAIICTLSPATSHIEHSRNTLLFGSCAKEVVTNAQVNVVMSDKALVKHLQKEVARLESELRQPASNSSLEALVKEKDNQIRKMEKEIKELKSQRDLAQSRLQNLLETVGDQVKHSGSGKRSARSPPSIGISPGISRDDSSQISHDDSDLFKDVRCIGTSGTGGNEQLDLSAGESSSLQGLNMNSSLHGSGSNASVNSRRSRLLSESPITLEQHLENIKRPFVSLGRDLGSSTHNSSGSRILGRSRSCRSLMGSTMFDGMEMDDGTPLHRSLVGFPGRPEGNHRRGSTPNHDAESETLSRAGSVVSTKTNAACDAEFTGIGEFVAELKEMAQVHYQKQLGNQITNGEFVDIKNIGLDPIADASQSPSRWPLEFEKKQQEIIGLWHACCISLVHRTYFFLLFKGEQADSIYMEVELRRLSFLRDTYSRGNTPSNAVVGSLNSSPAASAKKLQREREMLARQMQKRLTAEERERLYTKWGISLDSKKRKLQVARRLWTEAEDLEHVRESASLVAKLIGLQEPGQVLREMFGLSFAPQQQPPPRRRSSNGWRYGIPSFG

SEQ ID NO: 178563 - protein, 788 aa, Zea Mays
MGAIGGNESVQWDKVAGADAVNGGGTSVGRMDRIQVLVRLRPLSEKEVARGEPAEWECINDTTVMFRSTFPDRPTAPTAYTFDRVFHSDCSTKEVYEEGVREVALSVVSGINSSVFAYGQTSSGKTYTMNGVTEYTVADIYDYINKHEERAFVLKFSAIEIYNEAVRDLLSAENTPLRLWDDAEKGTYVENLTEVVLRDWNHLKGLISVCEAQRRTGETFLNEKSSRSHQILRLTIESSAREFLGKDKSTTLVASANFVDLAGSERASQALSAGTRLKEGCHINRSLLALGTVIRKLSMGSNAHIPYRDSKLTRILQPSLGGNARTAIICTLSPATSHIEHSRNTLLFGSCAKEVVTNAQVNVVMSDKALVKHLQKEVARLESELRQPASNSSLEALVKEKDNQIRKMEKEIKELKSQRDLAQSRLQNLLETVGDQVKHSGSGKRSARSPPSIGISPGISRDDSSQISHDDSDLFKDVRCIGTSGTGGNEQLDLSAGESSSLQGLNMNSSLHGSGSNASVNSRRSRLLSESPITLEQHLENIKRPFVSLGRDLGSSTHNSSGSRILGRSRSCRSLMGSTMFDGMEMDDGTPLHRSLVGFPGRPEGNHRRGSTPNHDAESETLSRAGSVVSTKTNAACDAEFTGIGEFVAELKEMAQVHYQKQLGNQITNGEFVDIKNIGLDPIADASQSPSRWPLEFEKKQQEIIGLWHACCISLVHRTYFFLLFKGEQADSIYMEVELRRLSFLRDTYSRGNTPSNAVVGSLNSSPAARMRNDSPMNRFMQRQEAAA

SEQ ID NO: 178564 - protein, 169 aa, Zea Mays
MLSHLATFSQSGALSGELRKSASISVRILMSASVSSRGHRLPDAPAPLAPKSACMSSSWSLTATPAPEPPAANSSKLALDPAGCNCIVGRAGMAAVTDTASPVGVGENGAVPVPVPAVSGAMYGDPAPPWWCSMAAATFGSGPSGRRVMTETGSEGAVQLGGGGRRGSG

SEQ ID NO: 178565 - protein, 101 aa, Zea Mays
MHARERQERERSMEPGALLEGNEAWSEINNNQDDLDEICVFLHLEPDNIPLKVRKLPPFLPRDLLHATPDPAFFFNSSCSQESGSGLFFLLFSPRKTRLVS

SEQ ID NO: 178566 - protein, 276 aa, Zea Mays
MLMRARSKGWRVVVFNSRGCADSPVTTPKFYSASFTGDLRQVIGHILGRYPQSNVYATGWSLGANILVRYLGEETDKCPLSGAVSLCNPFNLVIADEDFHKGFNNVYDKALARALTTIFKKHALLFEGLEGEYDIPKAANARTVRDFDEGLTRVSFGFKSVDDYYSNSSSSDSIKDVCIPLLCIQADNDPIAPSRGIPRDDIKANKNCLLIVTPQGGHLGWVAGDEAPFGCPWTDPIVMEYLEHLENEKDSSTKNNTSYEGVSEASVSHLTVHGQR

SEQ ID NO: 178567 - protein, 167 aa, Zea Mays
MDNWQQINRATEEMNPIATAALTPSSFFASNRRFAPRLRSVLPAAAMSYAAVSASAPSPSSGTGEQVKAAPLPHSTLEIAGARRGLLSGFASLRAPYRAFPVLASNRHVETIFAALTRSLPAVKLRRECLRAPDDGAVALDWVSGDDRVLPNDAPVLILLVEVMIHM

SEQ ID NO: 178568 - protein, 343 aa, Zea Mays
MVIRSSRLSHSGISICIQVSRVFCSCSRLDQGHKQWLAEVHFLGVVEHPNLVRLIGYCAAQGERGPLRLLVYEFMTNKTLDDHLFNKAYPVLPWDIRLEIALDAAEGLLYLHEGLEVQVIYRDFKASNVLLDEEFRAKLSDFGLAREGPSAGDTHVSTAVMGTLGYAAPDYVETGHLTTKSDVWSFGVVLYEILTGRRSIERNRPKNEQKLLEWVRLYPVESKQFSKIIDARLEGHYSKQGTRKIAKLANSCLAKHRRDRPTMREVVESLKQAMQHKELDGKAGALNETSPPEEMSGKPSTEDVAVASARRRMLHLAALGENANSIARRRFMFMRTAASPTPT

SEQ ID NO: 178569 - protein, 269 aa, Zea Mays
MTNKTLDDHLFNKAYPVLPWDIRLEIALDAAEGLLYLHEGLEVQVIYRDFKASNVLLDEEFRAKLSDFGLAREGPSAGDTHVSTAVMGTLGYAAPDYVETGHLTTKSDVWSFGVVLYEILTGRRSIERNRPKNEQKLLEWVRLYPVESKQFSKIIDARLEGHYSKQGTRKIAKLANSCLAKHRRDRPTMREVVESLKQAMQHKELDGKAGALNETSPPEEMSGKPSTEDVAVASARRRMLHLAALGENANSIARRRFMFMRTAASPTPT

SEQ ID NO: 178570 - protein, 545 aa, Zea Mays
MLDKGRICGPWNTKTAIQGKKNIEMHRFVVHGITRRRKHPSPWVPCEYIFGHKDLKICKDWFQHLISCINNESGRPKNLMVFVHPLCGKGRGVSNWETVYPLFARAKIKTKVIVTERAGHAYDTLSSLSDIELKAFDGVVAVGGDGLFNEILNGILSSRHKVSYPPTPEGFGYVGSSDNCEEQTRNWVNFSKPTPDSGNAVFLGNPSKCDDQEPLLSTSHPTELEIPSNSTKEPCIGDQDNPVSFPNDWFRLGIIPSGSTDAIVLSTTGERDPVTSALLIILGRKVSLDIAQVVRWKTSPTAEVLPTVRYAASFAGYGFYGEVIRESEKYRWMGPARYDFSGTMVFLKHRSYGAKVAFLDTPYTHSLTASAQDDITGAQPLQSRWKKPRKIICRTNCFVCKEASTSGQNPEDVADNSRTICENQKWVWSEGHFLSVGAAVISCRNERAPDGLVADAHLSDGFLHLLLIRDCPLPLYLWHLTQFTKKGSDPLSFKFVEHHKTQAFTFISSHDESVWNLDGEMFQACEVSVQACRGLVNFFASGPEL

SEQ ID NO: 178571 - protein, 322 aa, Zea Mays
MQDGGEVLFLDGVGEVAVTIGRNGLSARPLHPELISSCWSSITLQPKLDSKINFSDVYAIEMLDKGRICGPWNTKTAIQGKKNIEMHRFVVHGITRRRKHPSPWVPCEYIFGHKDLKICKDWFQHLISCINNESGRPKNLMVFVHPLCGKGRGVSNWETVYPLFARAKIKTKVIVTERAGHAYDTLSSLSDIELKAFDGVVAVGGDGLFNEILNGILSSRHKVSYPPTPEGFGYVGSSDNCEEQTRNWVNFSKPTPDSGNAVFLGNPSKCDDQEPLLSTSHPTELEIPSNSTKEPCIGAQLGREILSPLLCLLFLAERCHLI

SEQ ID NO: 178572 - protein, 339 aa, Zea Mays
MERHLYLVEFKSSYFVCEKTDRWVRCAKQFQPMSMCRTNPLLQTNNKAALSGDHGAGALVREDLEQQRVRDAAVDDAGGAHPLGDGTDAALHLGNHPAADLLLGHHPSHPGDVHLPHQAPWIIAVRQYAGHVREEQKLLGSHRCRDLPGGGVGVDVVSLPGLVGRYGGDDRDVPGRDDGVEYGGVHARHFADEAEGGGVRGGPRGEEARVLAAQPDGGGTREADEGHELLVDLAHKHHLHDLHGDRVGDAEPVAELRLHADARQPGVDLGPAAVDENGAEADARQQDQVADHRRLQLRRLHRRATVLDHHRLALEPLDERERLRQHVHAAQCRRSARCR

SEQ ID NO: 178573 - protein, 257 aa, Zea Mays
MNPSAMPRNIRLQTPRHPSLLDRRVEGANQMPPRFIHKTTPARFMRRVRSSRNFRQRVDALDATNEWRLPKVSEGDDEGGDKKDWQSNTVSSRVSSARDWNFESDGAYQGSNRSDRAFGDSDGENCPVEVQRTERWTPSSVLKPQGNLVHAKLVAWKDAQIAKLIEKLKKKEADIDDWQRKKTIKARQKMRSAELKLEKKRAEIAEKMQKAIKRAQKKADKKKVKEQVATKVQIDGVERALDKMSRTGKLPWSLAFL

SEQ ID NO: 178574 - protein, 340 aa, Zea Mays
MAAAAAVPDGVSSCGSTNMRRADHLPQLPIPLPCMGEPTAASRVSPGSSPARSEASRGAPCYNADAEPDPDPEPEPEASVGRSTQMLLAMAAMGGHGGHYGRRPASSYGSCAAWSAGSLTRHRPASPSPICSPANSHDGGGEEEEDREPHGGDDASSFVTPREEEQGRTRADFMNPSAMPRNIRLQTPRHPSLLDRRVEGANQMPPRFIHKTTPARFMRRVRSSRNFRQRVDALDATNEWRLPKVSEGDDEGGDKKDWQSNTVSSRVSSARDWNFESDGAYQGSNRSDRAFGDSDGENCPVEVQRTERWTPSSVLKPQGNLVHAKLVAWKDAQIAKLIEK

SEQ ID NO: 178575 - protein, 128 aa, Zea Mays
MLQDPCRRRRPACPLRPEINVVMDLSKKMRLKLGATSEPVKPLEKPSAGSVKDELVKPSEKPSAGPVNDEPVKPSEKPSAGPVKNEPTEPAPAGENNQAPTVGQTTVSPNNAGVGAPVVKHDNSEAQK

SEQ ID NO: 178576 - protein, 141 aa, Zea Mays
MFSSICTMYIWSVTLLTWLDLIHIFLSCVLEINVVMDLSKKMRLKLGATSEPVKPLEKPSAGSVKDELVKPSEKPSAGPVNDEPVKPSEKPSAGPVKNEPTEPAPAGENNQAPTVGQTTVSPNNAGVGAPVVKHDNSEAQK

SEQ ID NO: 178577 - protein, 133 aa, Zea Mays
MSELTRHVFFKAQAHKLQKKKNPPSEHEHRHHTAHPNMAAPTTAVDTTAPPPPPPTAEPAAAPAPDQKVSPPPPAPQPDTAAPPPVPAPAPRKRGCTPPNATRSVPSSPTCVSASSRFAKLLISATRMQLVRF

SEQ ID NO: 178578 - protein, 95 aa, Zea Mays
MVHGQVRRAATREAGQQIAIASTMVGLVECKVYAYKVGLDVIKLLERMQIRQEVYEILSELYIHLEVAKKQLLMMQLSNILVPDYCFSSWIYCVH

SEQ ID NO: 178579 - protein, 76 aa, Zea Mays
MVHGQVRRAATREAGQQIAIASTMVGLVECKVYAYKVGLDVIKLLERMQIRQEVDLRFFFICFFFHQTRLISCILD

SEQ ID NO: 178580 - protein, 121 aa, Zea Mays
MSGGNNLVQNEKELFNHRHSSLRVSVEWTFYSLKRRFKILDDATPFFPFSTKVEIVVACCIIHNWVIQDGGDEFTIPESEKLPTINHQTSSHGQAMKHAIMVNLRQELANAMWEDYNANTI

SEQ ID NO: 178581 - protein, 74 aa, Zea Mays
MAYFMDLRAFILRTHVLKLYRQALRITHRAPVHARDELRQTARAEFEKYRHCDDKQKIRFLISEGKQRLKGVIM

SEQ ID NO: 178582 - protein, 86 aa, Zea Mays
MNHRSAAGQALSSDSVSALALQRGLYIVTFKYKDFPLATGSEVPMSRNNSEEAEIKKRIESFGRATNYWLGCLVLVKLIEMQRTLT

SEQ ID NO: 178583 - protein, 108 aa, Zea Mays
MHGLGVSFQGLRYSVGSSHAVVQSIMKHPQRLGFKDVTNACCGSGRFNGKSGCTPNATLCDNRHQYLFWDLLHPTHAASKIAAAAIYNGSLHFAAPMNFRQLAEDDRC

SEQ ID NO: 178584 - protein, 330 aa, Zea Mays
MATVPVLVVLHVLLLAAAAACAAAGGSSSKVPALYVFGDSTADVGTNNYLPGGAEVPRANFPHNGVDFPTARPTGRFSNGYNGVDFLGELHHPAEQAGGAVRLRAAQHLVARRQRVCCCRRPAVAVPVPRQHRRQRPVRLLRAEQHAVGRRQAAVRRQPRRAVPEPCEGSVRARGSEVRRDRRPAGRVLPLPEEPAPAGRLHRRAQRAGARVQRGRQGGHARPRRELPGAQVLRRELPRRRAEHHEAPSKAGVQGRDERVLRVGPVQRQVRVHAQRDAVRQPTPVPVLGPAAPHARRLQDRRRRHLQRLAPLRRADELQAAGRRRPVLAS

SEQ ID NO: 178585 - protein, 100 aa, Zea Mays
MATVPVLVVLHVLLLAAAAACAAAGGSSSKVPALYVFGDSTADVGTNNYLPGGAEVPRANFPHNGVDFPTARPTGRFSNGYNGVDFLGLCGDEREDVEKG

SEQ ID NO: 178586 - protein, 59 aa, Zea Mays
MTRELKLGLLGHPIPKFKPLSILLDRIDNFYVYIWPNYPVRLYKVAAHENCTPAVSKYN

SEQ ID NO: 178587 - protein, 68 aa, Zea Mays
MTSAVLARRDIFWKLCPQGRSWKLELLVTRAETSFAAVAADSCTTIALCPYSQFHCSLFKPFVNGSKF

SEQ ID NO: 178588 - protein, 302 aa, Zea Mays
MHVMFVGAVFILDPTLDWRIHEEPWYIGLYGVLVLLTLVQYFYTAGSSPGYVIDVMRAGSMMHATFVNTAALSKQSNSRNGNTNSPTSHAQLQKLSAMTPTSWAQMVVDLYPPGSNSRDWTCTHCRVVQPPRTRHCHDCDKCVLQFDHHCIWLGTCIGKKNHCRFWWYISEETILCIWTAVLYIESLRLDVDKAWWKDFVGVILLAVLIFILIFLLLLWLFHSYIAVTNQTTYEVARRKRIFYLRGVPERVHPFSRGICRNLYDFCCSSQKGYILEAVPPREELEARAARYTCRDVICCRCC

SEQ ID NO: 178589 - protein, 353 aa, Zea Mays
MAPELYDESYDELVDIYSFGMCLLEIFTLEYPYSECTNPAQIFKKVSTGVKPAALAKISDPQVKQFIEKCLVPASERSSAKELLQDPFLCPDNAHDSAGTKFTSPAPNKTVDMVSLHMEVDTFGSSPTNSGKENGCVAPHTPVLEFTRTNKNTELKLKGHARNIHFLFYLDSDTALSVAAEMVEQLELADCDVTFIADFIDLLIVNLIPGWRPVNDAATNSYTQSESELAITSHNNLSKLVPDYALIDGMMHPKDVNVSTGFLDSVSSATNIGGSPCSEGSVISVQRAESFKSVSDYEPEDYGTMDCGGYKEGISKENCSHVVDDGSRLIFHTDQDHFSWSWPMASSASIIYS

SEQ ID NO: 178590 - protein, 372 aa, Zea Mays
MAPELYDESYDELVDIYSFGMCLLEIFTLEYPYSECTNPAQIFKKVSTGVKPAALAKISDPQVKQFIEKCLVPASERSSAKELLQDPFLCPDNAHDSAGTKFTSPAPNKTVDMVSLHMEVDTFGSSPTNSGKENGCVAPHTPVLEFTRTNKNTELKLKGEKLDNNSVSLVLRIADLSGHARNIHFLFYLDSDTALSVAAEMVEQLELADCDVTFIADFIDLLIVNLIPGWRPVNDAATNSYTQSESELAITSHNNLSKLVPDYALIDGMMHPKDVNVSTGFLDSVSSATNIGGSPCSEGSVISVQRAESFKSVSDYEPEDYGTMDCGGYKEGISKENCSHVVDDGSRLIFHTDQDHFSWSWPMASSASIIYS

SEQ ID NO: 178591 - protein, 546 aa, Zea Mays
MEVFGCGDGVVDAEFAEVDPTGRYMRYNLILGRGAFKTVYKAFDEVEGIEVAWNQINVDEVMQCPDNLDRLYREVHLLKSLKHGNVMKFYYSWIDDQNKTINVITELFTSGSLRLYRQKHPHVNLKAIKNWARQILHGLDYLHSHQPPIIHRDLKCDNIFVNGNHGEVKIGDLGLATVMQTPRARSVIGTPEFMAPELYDESYDELVDIYSFGMCLLEIFTLEYPYSECTNPAQIFKKVSTGVKPAALAKISDPQVKQFIEKCLVPASERSSAKELLQDPFLCPDNAHDSAGTKFTSPAPNKTVDMVSLHMEVDTFGSSPTNSGKENGCVAPHTPVLEFTRTNKNTELKLKGHARNIHFLFYLDSDTALSVAAEMVEQLELADCDVTFIADFIDLLIVNLIPGWRPVNDAATNSYTQSESELAITSHNNLSKLVPDYALIDGMMHPKDVNVSTGFLDSVSSATNIGGSPCSEGSVISVQRAESFKSVSDYEPEDYGTMDCGGYKEGISKENCSHVVDDGSRLIFHTDQDHFSWSWPMASSASIIYS

SEQ ID NO: 178592 - protein, 485 aa, Zea Mays
MQCPDNLDRLYREVHLLKSLKHGNVMKFYYSWIDDQNKTINVITELFTSGSLRLYRQKHPHVNLKAIKNWARQILHGLDYLHSHQPPIIHRDLKCDNIFVNGNHGEVKIGDLGLATVMQTPRARSVIGTPEFMAPELYDESYDELVDIYSFGMCLLEIFTLEYPYSECTNPAQIFKKVSTGVKPAALAKISDPQVKQFIEKCLVPASERSSAKELLQDPFLCPDNAHDSAGTKFTSPAPNKTVDMVSLHMEVDTFGSSPTNSGKENGCVAPHTPVLEFTRTNKNTELKLKGHARNIHFLFYLDSDTALSVAAEMVEQLELADCDVTFIADFIDLLIVNLIPGWRPVNDAATNSYTQSESELAITSHNNLSKLVPDYALIDGMMHPKDVNVSTGFLDSVSSATNIGGSPCSEGSVISVQRAESFKSVSDYEPEDYGTMDCGGYKEGISKENCSHVVDDGSRLIFHTDQDHFSWSWPMASSASIIYS

SEQ ID NO: 178593 - protein, 222 aa, Zea Mays
MLLSKGVVALKVGLAYDGGHGLYCYIAKHLESANTMFSFVWWIIGFYWVSAGGEVLTRDAPQLYWLCIVFLAFDVFFVVFCVALACIIGIAVCCCLPCIIAILYAVSDQEGASEDDIRQIPKYKFRKMEEPEKQSVGVPGSSGGIMIECGTNQPIEKVLAAEDAECCICLSAYDDGAELRELPCGHHFHCVCIDKWLHINATCPLCKYNVRKNSSSSGSEEV

SEQ ID NO: 178594 - protein, 56 aa, Zea Mays
MMRRGAARGGPGRAAGVGGFPELVSEVLGETSISLVSSPPVRDLRGWGCLPCAARR

SEQ ID NO: 178595 - protein, 115 aa, Zea Mays
MPPHRTYLPVHEPKCSLEHRQLIGGRSRCKYLRSSKSEQFTISLQNTMTIHQKKKEKPKGRYRDCEREPLCYSSKCTKNAATHQARPVPVPPTNYRAAGRTAQPASMVSATPDSF

SEQ ID NO: 178596 - protein, 81 aa, Zea Mays
MLAIRQLVHHMVLIIYQVNSGRLGEDESRIYFHQLINAIDYCHSRGVYHRDLKPQNLLLDSNGALKVSNFGLSAFAPQTNV

SEQ ID NO: 178597 - protein, 172 aa, Zea Mays
MATAPYASSLFLASSPISTAPRASAGSFPPSAQPFSMRLRPRPSPAVAAAVQAEHQPAVAATPKPPALPFRVGHGFDLHRLEPNLPLIIGGIDIPHDRGCEAHSDGDVLLHCVVDAILGALGLPDIGQIFPDSDPRWKGADSSVFMREAVSFSSFQCVISSSFDAINSILFP

SEQ ID NO: 178598 - protein, 233 aa, Zea Mays
MEYSFDRDWKKIEAFVGSKTVIQIRSHAQKYFLKVQKNGTSEHVPPPRPKRKAAHPYPQKASKNEPNYGLKTDSSSIHRNSGMNVSVSSWPHRSIPQAVASSMVKEDLGAGTLGPNNFCSSSTEGPPRTWQPGETNGPINQIPSLRLMPDFAGVYSFLGSVFDPSTSDHLQKLKEMNPIDVETALLLMRNLSINLTSPDFEDQRKLLSLYSASDGPELGSSRSSALATSAPFM

SEQ ID NO: 178599 - protein, 154 aa, Zea Mays
MASSCQNVEIPGKPTETGTALLETATGTIQGFAPLSQIHQHLCAFHFYADDMGRQVEAHHFCAHLNEDVRQCLIFDGPGAGARLIGVEYIVSETVFLTLPDAEKPLWHTHEFEVKGGVLFMPGVPGVVERRDLEKVWRRSSVSPSRRRGRTGRT

SEQ ID NO: 178600 - protein, 50 aa, Zea Mays
MSCPKFRDSSSFSLPGCACIPRTDALPPIYWFCCSELALVFHFQYPLVIL

SEQ ID NO: 178601 - protein, 154 aa, Zea Mays
MSELMIIRSLQIFFGVHRITLKGGRKVRFVVMRNMFCTELRIHRKYDLKGSTQGRSTKKQNINENTTLEDLDLSYVFHVDKPWPDALFRQEEHTHEDLKEQQVVHGEVENTLGPGSINLALENPIPKDWRTIHMIGAESNLLDIVSNSVGTSIT

SEQ ID NO: 178602 - protein, 104 aa, Zea Mays
MMNCGASCSTTGGERTLQRSTRRRAPSLGRTSSPCRTGATDTDCKPPLAHLLQLHCFRLPSAAGVTAVDQQFSRLLSLCFCLACECVCVTSFPFVFVWPVSVCV

SEQ ID NO: 178603 - protein, 143 aa, Zea Mays
MMNCGASCSTTGGERTLQRSTRRRAPSLGRTSSPCRTGATDTDCKPPLAHLLQLHCFRLPSAAGVTAVDQQGVRIIREGKDYYLIYQGEIQRYLGSRQDTDGDCGEDAPRRDAGDEHRQISDRILFFLGDLEKACADAKRVKA

SEQ ID NO: 178604 - protein, 182 aa, Zea Mays
MNKLKKMALQVIAESLSEEEIAGLKEMFMAMDTDNSGAITYDELKEGLRKYGSTLKDTEIRDLMEAADIDNSGTIDYIEFIAATLHLNKLEREEHLVAAFSYFDKDGSGYITVDELQQACKEHNMPAAFLDDVIKEADQDNDGRIDYGEFVAMMTKGNMGVGRRTMRNSLNISMRDTPAGAL

SEQ ID NO: 178605 - protein, 454 aa, Zea Mays
MGNTCGVTLRSKYFASFRGSASQRRDAPGYSPVATSAAADEPSPHGNGKRATRPSQAAAAADGSAPPPAPGMRRGVPAPAELTANVLGHPTPSLRDHYALGRKLGQGQFGTTYLCTDLATGVDYACKSIAKRKLITKEDVEDVRREIQIMHHLAGHRNVVAIKGAYEDQLYVHIVMEFCAGGELFDRIIQRGHYSERKAAELTRIIVGVVEACHSLGVMHRDLKPENFLLSNKDDDMSLKAIDFGLSVFFKPGQIFTDVVGSPYYVAPEVLRKRYGPEADVWTAGVILYILLCGVPPFWAETQQGIFDAVLKGVIDFDLDPWPVISESAKDLIRRMLNPIPSERLTAHEVLCHPWICDHGVAPDRPLDPAVLSRIKQFSAMNKLKKMALQVIAESLSEEEIAGLKEMFMAMDTDNSGAITYDELKEGLRKYGSTLKDTEIRDLMEATTVGPLII

SEQ ID NO: 178606 - protein, 91 aa, Zea Mays
MRHGMDIVNTRLTCPLWFRLMINDCQWIVSQVESWTDQSVRLCVVQSCRSDCGMWVWSTGTVVDNEGEGHANSCRWTRSGEGRALKLDRGT

SEQ ID NO: 178607 - protein, 300 aa, Zea Mays
MLVNVTSELPNNELLLQKHFMAVISSVWRSKCHRDTSCFTNTYSSALHVFSPVKKPGGSCENWPMVNFRPSFNLVRKALADVQAKSTLMVIPPPSRNQEYPCNYLELELDFLKDQHAYDEDIPSVVNVSIQEPEPSKQTPEPVEQSLLSALSCRQAENRLRIASEACYDGESSHWASSAFHINDAARHKSGSKSIGKHKAALESGRLLKSKVQKITESHQEGAIAMSSFLRMPAQLLPSTADFHISDSLSDFGIRDSEFYFSEDLLQEVDALEFFPDQGDSGLLPGIEELESLSDFTDIG

SEQ ID NO: 178608 - protein, 675 aa, Zea Mays
MHERVFSHPVSYKELAILLRRLKSEGHRALIFTQMTKMLDVLEEFINLYGYTYLRLDGSTPPEERQTLMQRFNTNPKFFLFILSTRSGGVGINLVGADTVIFYDSDWNPAMDQQAQDRCHRIGQTREVHIYRLISESTIEENILKKANQKRALDDLVIQRGSYNTEFFKKLDPMEFFSGHTSLHAEDQEKNCSTTSGVSNDVDLALSIADVEAAIRQAEDEADYMALKKLEEEEAVDNQEFSEEAAGRQEEDELVNEENGKPDEHINEEQKYNSSDVEKEKHITLSTNRLNKEKALTLAVGDEDTDMLADVKQMAAAAAAAGQASSSFENQLRPIDRYAMRFMELWDPVIDKAALNHQVNVEEEEWELDRIEKFKEDLEAEIDEDQEPLSYESWDVDFATTAYRQHVEALTQKQLLEEQERQAQEATKELEEKNDNMSSHHRKSKKNKKKTGKLKPLKRVRLSPESEVILEETSVDNAPSPELTSDESPHHYCNKRKKITVATEENSNSRSLKKLKKTTKSSFISEALSPRLKEDLNDSDSKSVGRTKSDGRFFIPCMPVKRVIVIKPERLKRKGIWSRDCASDSWSSEEDAVLCGTVHEYGPLWELASDFLHFLPGGSLYRGRYHHPVHCCERYRELFCKHGMSATDNSNSEKVPSGTGKAILRVSEDSIRSLL

SEQ ID NO: 178609 - protein, 461 aa, Zea Mays
MLNWETEFLKWCPAFKILTYFGSAKERKQKRQGWMKPNFFHVCITTYRLVIQDSKVFKRKKWKYLILDEAHLIKNWKSQRWQTLLNFNSKRRILLTGTPLQNDLMELWSLMHFLMPHVFQSHQEFKDWFCNPISGMVEGQDKVNKEIIDRLHNVLRPFILRRLKRDVEKQLPKKQEHVIYCRLSRRQRNLYEDFIASSETQATLASGNYFGMISIIMQLRKVCNHPDLFEGRPIISSFDMAGINMQLSYSVCMLLDKSPFSQVGLSDMNLVFTQNEFSMSSWEADEVISAFPLSTTSWNHDLDTFCSNKDRQGSNLTNIFEDIQKALQEERIKESRERAASIAWWNRVRCQKRPVYGTNMIHVLTVKHHVSNILDKRNNPLCHMDYSSSLADLVLPSVERFQKMLDIVESFTFAIPAARAPPPVCWYSKGNSPVFIDPAYREKCMNEFSPILSPIRNLLFC

SEQ ID NO: 178610 - protein, 680 aa, Zea Mays
MHERVFSHPVSYKELAILLRRLKSEGHRALIFTQMTKMLDVLEEFINLYGYTYLRLDGSTPPEERQTLMQRFNTNPKFFLFILSTRSGGVGINLVGADTVIFYDSDWNPAMDQQAQDRCHRIGQTREVHIYRLISESTIEENILKKANQKRALDDLVIQRGSYNTEFFKKLDPMEFFSGHTSLHAEDQEKNCSTTSGVSNDVDLALSIADVEAAIRQAEDEADYMALKKLEEEEAVDNQEFSEEAAGRQEEDELVNEENGKPDEHINEEQKYNSSDVEKEKHITLSTNRLNKEKALTLAVGDEDTDMLADVKQMAAAAAAAGQASSSFENQLRPIDRYAMRFMELWDPVIDKAALNHQVNVEEEEWELDRIEKFKEDLEAEIDEDQEPLSYESWDVDFATTAYRQHVEALTQKQLLEEQERQAQEATKELEEKNDNMSHHRKSKKNKKKTGKLKPLKRVRLSPESEVILEETSVDNAPSPELTSDESPHHYCNKRKKITVATEENSNSRSLKKLKKTTKSSFISEALSPRLKEDLNDSDSKSVGRTKSDGRFFIPCMPVKRVIVIKPERLKRKGIWSRDCASDSWSSEEDAVLCGTVHEYGPLWELASDFLHFLPGGSLYRGRYHHPVHCCERYRELFCKHGMSATDNSNSEKVPSGTGKAILRVSEAVHVLLVGVYIDD

SEQ ID NO: 178611 - protein, 674 aa, Zea Mays
MHERVFSHPVSYKELAILLRRLKSEGHRALIFTQMTKMLDVLEEFINLYGYTYLRLDGSTPPEERQTLMQRFNTNPKFFLFILSTRSGGVGINLVGADTVIFYDSDWNPAMDQQAQDRCHRIGQTREVHIYRLISESTIEENILKKANQKRALDDLVIQRGSYNTEFFKKLDPMEFFSGHTSLHAEDQEKNCSTTSGVSNDVDLALSIADVEAAIRQAEDEADYMALKKLEEEEAVDNQEFSEEAAGRQEEDELVNEENGKPDEHINEEQKYNSSDVEKEKHITLSTNRLNKEKALTLAVGDEDTDMLADVKQMAAAAAAAGQASSSFENQLRPIDRYAMRFMELWDPVIDKAALNHQVNVEEEEWELDRIEKFKEDLEAEIDEDQEPLSYESWDVDFATTAYRQHVEALTQKQLLEEQERQAQEATKELEEKNDNMSHHRKSKKNKKKTGKLKPLKRVRLSPESEVILEETSVDNAPSPELTSDESPHHYCNKRKKITVATEENSNSRSLKKLKKTTKSSFISEALSPRLKEDLNDSDSKSVGRTKSDGRFFIPCMPVKRVIVIKPERLKRKGIWSRDCASDSWSSEEDAVLCGTVHEYGPLWELASDFLHFLPGGSLYRGRYHHPVHCCERYRELFCKHGMSATDNSNSEKVPSGTGKAILRVSEESCVSLY

SEQ ID NO: 178612 - protein, 399 aa, Zea Mays
MASKGPRSKLDHETRARRQKALEAPREPRRPKVHWDHVLAEMMWLSKEFDSERKWKLSMAKKIAQRANKSIVDQATKGERKQKEKEHRMRKVALNISKDVKKFWIKIEKLVVYKHQLELEERKKKALDKQLDFLLGQTERYSTMLAENLVDMPYPENLENRTSQINQRSHQEEVPEKNLNATISDDFDNMEVDDDYESSLDEEPEDDEHTIDEDEAQITEAERNEELAALEAEADLPLDVILKMYTKTKVSREGSPDSKDMLSNLGSKILIVDSLKQANGRDHEPAHSSSEDGNSSEEVDDGHSYAEFVKKNHCCVPSWCGAFAVRLMALSLAAAIEDKDYIATEEVKDDEATLSEEEELAKKEDPDYLEEVKLLQKESEIPLEELLARMAVQIMKQRS

SEQ ID NO: 178613 - protein, 393 aa, Zea Mays
MASKGPRSKLDHETRARRQKALEAPREPRRPKVHWDHVLAEMMWLSKEFDSERKWKLSMAKKIAQRANKSIVDQATKGERKQKEKEHRMRKVALNISKDVKKFWIKIEKLVVYKHQLELEERKKKALDKQLDFLLGQTERYSTMLAENLVDMPYPENLENRTSQINQRSHQEEVPEKNLNATISDDFDNMEVDDDYESSLDEEPEDDEHTIDEDEAQITEAERNEELAALEAEADLPLDVILKMYTKTKVQYVSVSREGSPDSKDMLSNLGSKILIVDSLKQANGRDHEPAHSSSEDGNSSEEVDDGHSYAEFVKKNHGKSNGNISSINDQEDKDYIATEEVKDDEATLSEEEELAKKEDPDYLEEVKLLQKESEIPLEELLARYREIMKQRS

SEQ ID NO: 178614 - protein, 389 aa, Zea Mays
MASKGPRSKLDHETRARRQKALEAPREPRRPKVHWDHVLAEMMWLSKEFDSERKWKLSMAKKIAQRANKSIVDQATKGERKQKEKEHRMRKVALNISKDVKKFWIKIEKLVVYKHQLELEERKKKALDKQLDFLLGQTERYSTMLAENLVDMPYPENLENRTSQINQRSHQEEVPEKNLNATISDDFDNMEVDDDYESSLDEEPEDDEHTIDEDEAQITEAERNEELAALEAEADLPLDVILKMYTKTKVSREGSPDSKDMLSNLGSKILIVDSLKQANGRDHEPAHSSSEDGNSSEEVDDGHSYAEFVKKNHGKSNGNISSINDQEDKDYIATEEVKDDEATLSEEEELAKKEDPDYLEEVKLLQKESEIPLEELLARMAVQIMKQRS

SEQ ID NO: 178615 - protein, 278 aa, Zea Mays
MASKGPRSKLDHETRARRQKALEAPREPRRPKVHWDHVLAEMMWLSKEFDSERKWKLSMAKKIAQRANKSIVDQATKGERKQKEKEHRMRKVALNISKDVKKFWIKIEKLVVYKHQLELEERKKKALDKQLDFLLGQTERYSTMLAENLVDMPYPENLENRTSQINQRSHQEEVPEKNLNATISDDFDNMEVDDDYESSLDEEPEDDEHTIDEDEAQITEAERNEELAALEAEADLPLDVILKMYTKTKVQYVSVSREGSPDSKDMLSNLGSKILIIL

SEQ ID NO: 178616 - protein, 272 aa, Zea Mays
MASKGPRSKLDHETRARRQKALEAPREPRRPKVHWDHVLAEMMWLSKEFDSERKWKLSMAKKIAQRANKSIVDQATKGERKQKEKEHRMRKVALNISKDVKKFWIKIEKLASSFLTSNVMRKQVVYKHQLELEERKKKALDKQLDFLLGQTERYSTMLAENLVDMPYPENLENRTSQINQRSHQEEVPEKNLNATISDDFDNMEVDDDYESSLDEEPEDDEHTIDEDEAQITEAERNEELAALEAEADLPLDVILKMYTKTKGKAVQIAKTC

SEQ ID NO: 178617 - protein, 401 aa, Zea Mays
MASKGPRSKLDHETRARRQKALEAPREPRRPKVHWDHVLAEMMWLSKEFDSERKWKLSMAKKIAQRANKSIVDQATKGERKQKEKEHRMRKVALNISKDVKKFWIKIEKLASSFLTSNVMRKQVVYKHQLELEERKKKALDKQLDFLLGQTERYSTMLAENLVDMPYPENLENRTSQINQRSHQEEVPEKNLNATISDDFDNMEVDDDYESSLDEEPEDDEHTIDEDEAQITEAERNEELAALEAEADLPLDVILKMYTKTKVSREGSPDSKDMLSNLGSKILIVDSLKQANGRDHEPAHSSSEDGNSSEEVDDGHSYAEFVKKNHGKSNGNISSINDQEDKDYIATEEVKDDEATLSEEEELAKKEDPDYLEEVKLLQKESEIPLEELLARYREIMKQRS

SEQ ID NO: 178618 - protein, 329 aa, Zea Mays
MAIDHATPLGLKRRGAMGGGGECDDGSDTRRWPPWLRPLLSASFFVQCRVHADAHKSECNMYCLDCMGGALCALCLAARHRDHHSIQVSGEPSAVRRLVQFGSSGGCVLVPQCLCLQHISFPSVAFSIRLSLCVFVFRFCFSLHDNQLTSSWACAAVTGCPFFHQIRRSSYHDVIRVSEIQKVLDIAGVQTYIINSARVVFLNERPQPRPGKGVTNTCEVCERSLLDCFRFCSLGCKIVGTARGYRPGKKKHGGGGGNKKRASPAPALKDVRSDSEDSCTSTSGASSDKSSVVQSSPPPPTSASHRPPGNKRRKGIPHRSPLGSLIVEL

SEQ ID NO: 178619 - protein, 1149 aa, Zea Mays
MHTGERQAAKMRLAYLRAMLDQDIAVFDTEASTGEVINAITSDILVVQDAISEKVGNFMHYISRFLAGFAIGFSQVWQISLVTLAIVPLIAIAGGTYAYVTIGLMARVRKSYVKAGEIAEEVIGNVRTVQAFVGEEKAVRSYREALLRTYKYGKRGGLAKGLGLGSMHSVLFLSWALLIWFTSVVVHKRISNGGESFTTMLNVVIAGLSLGQAAPNISTFLRARTAAYPIFQMIERSTVNTASSRTGRTLPVVDGHIQFRNVDFSYPSRPDVVILDRFSLNFPAGKIVALVGGSGSGKSTVVSLIERFYEPLSGSILLDGHDIKELDVKWLRRQIGLVNQEPALFATSIRENILYGKGDATAEEINHAAKLSEAITFINHLPDRYETQVGERGIQLSGGQKQRIAISRAILKNPSILLLDEATSALDAESEKSVQEALDRVMVGRTTVVIAHRLSTIRNADTIAVVDGGRIVETGTHEQLMANPYSAYSSLIQLQEAAQLQHKPSLSDSASITRPLSFKYSRELSGRTSMGASFRSDKDSISRYGGAGEAHDEVRKGKPVSMKKLYSMVRPDWFFGLSGTISAFVAGSQMPLFALGVTQALVSYYMGWETTKLEVRKIAVLFCCGAVLTVVFHVIEHLSFGIMGERLTLRVREKMFSAILRNEIGWFDDTSNTSAMLSSRLEADATLVRTIVVDRSTILLQNVGMIVTSLIIAFILNWRITLVVLATYPLMVSGHISEKMFMKGYGGNLGKSYLKANMLAAEAVSNIRTVAAFCSEEKVIKLYADELREPSKRSFRRGQGAGLFYGVSQFFLFSSYALALWYGSVLMSKELASFKSVMKSFMVLIVTALAMGETLAMAPDIIKGNQMASSVFEILDRKTDVRIDTGEDIKRVEGLIELRGIEFRYPSRPDVTVFKGLDLLMKAGKSMALVGMSGSGKSTVLSLILRFYDPIAGRVLIDGKDVKKLKLKCLRKHIGLVQQEPALFATTIYDNILYGKDGATEAEVVEAAKLANAHSFISSLPEGYKTKVGERGVQLSGGQKQRIAIARAIVKDPAILLLDEATSALDVESERVVQQALNRVMRNRTTVMVAHRLSTVKNADVISVLQDGKIIEQGAHQHLIEDKNGAYHKLVSLQQQQQMQTQQSSSEDI

SEQ ID NO: 178620 - protein, 672 aa, Zea Mays
MSSPENGAAPEASGKKKKKAEEEEVVAKVPFLKLFSFADRWDCVLMAVGSLGACAHGASVPVFFIFFGKLINIIGLAYLFPTTVSGRVAKYSLDFVYLGIVIFFSSWTEVACWMHTGERQAAKMRLAYLRAMLDQDIAVFDTEASTGEVINAITSDILVVQDAISEKVGNFMHYISRFLAGFAIGFSQVWQISLVTLAIVPLIAIAGGTYAYVTIGLMARVRKSYVKAGEIAEEVIGNVRTVQAFVGEEKAVRSYREALLRTYKYGKRGGLAKGLGLGSMHSVLFLSWALLIWFTSVVVHKRISNGGESFTTMLNVVIAGLSLGQAAPNISTFLRARTAAYPIFQMIERSTVNTASSRTGRTLPVVDGHIQFRNVDFSYPSRPDVVILDRFSLNFPAGKIVALVGGSGSGKSTVVSLIERFYEPLSGSILLDGHDIKELDVKWLRRQIGLVNQEPALFATSIRENILYGKGDATAEEINHAAKLSEAITFINHLPDRYETQVGERGIQLSGGQKQRIAISRAILKNPSILLLDEATSALDAESEKSVQEALDRVMVGRTTVVIAHRLSTIRNADTIAVVDGGRIVETGTHEQLMANPYSAYSSLIQLQEAAQLQHKPSLSDSASITRPLSIQGSCPGGRAWAPASAPTRTQSAGTAAPERRMTRCARGSPCP

SEQ ID NO: 178621 - protein, 288 aa, Zea Mays
MALNELRTHAFLQSDASDICENIQFLLGAFETATGEQWLAFRDDGRYSAADYANVTSARQLKEKSGGTPFWNPFDRAYKLELRRYFVLKLLNGAMSGLVHMHNHDRLHQSLGPSSVILNTALDKEGRYLVPRLRDLAFSVDIGYSSIGAGVLSDGLWRRASAAGASTPLEKRAFGIADDIYGAGLLLAYMSFIPFCKAGVMDGISLQRLLESTFRLDIYAAREYCLADDQLSEAVSFLDLGDGAGWELLQAMLNPDYRKRPIAEAVLNHSACSLSVASHCMAMAMASK

SEQ ID NO: 178622 - protein, 409 aa, Zea Mays
MQSVAEMASNAYRKPSVSPSATMLKALPMRFLASPEPGGWSRRLPRRSLRSVSAALMTNPAYFEVGRFLGGYGFMNITSYSSSQFGEPSNVAGIQDLGLGYSPEEIERLRVQDIGEGEVTIRLYEGRVVQGPFRGTRAVFKVYPGARADASEADLMALNELRTHAFLQSDASDICENIQFLLGAFETATGEQWLAFRDDGRYSAADYANVTSARQLKEKSGGTPFWNPFDRAYKLELRRYFVLKLLNGAMSGLVHMHNHDRLHQSLGPSSVILNTALDKEGRYLVPRLRDLAFSVDIGYSSIGAGVLSDGLWRRASAAGASTPLEKRAFGIADDMQRLLESTFRLDIYAAREYCLADDQLSEAVSFLDLGDGAGWELLQAMLNPDYRKRPIAEAVLNHRFITGAVLRNY

SEQ ID NO: 178623 - protein, 60 aa, Zea Mays
MFSLTSLSHKHFITPPIILFTLKKTKTGQRCKIGMYFNLLKLCFFLHQGFLGYIHFLCSF

SEQ ID NO: 178624 - protein, 283 aa, Zea Mays
MARWSSPKDPALEAALRRNRRWVVNNQIKRLLLRFPSRTAPVRFLQSRFKTLDLMGRAANWLSKYPSCFEVFSADDGGGEQEPHFGFTKRMAALVHAEEAAVAASEPAMADRLARVLMLARGRRLQVSKLAALRGPLGLPDDYLLRLVPANTDLFRLTNPYPHRRNAAELELVRWAPSLAVSAVEAASDSTPRFSCSLPASWVKSHAKMEDFNASTPYISPYSEWALPGTDAEAEKRSVALVHELLSLTSGAPRRLRGVRAEGEGSGGLGQGSARGADAGGAA

SEQ ID NO: 178625 - protein, 820 aa, Zea Mays
MEAATAMDFHTLSRRELQALCKRNGVRANMTNAAMAEALQGLTSVDGVDEIGTTLCLPTATPGRSAMKSAAKMVAVEEQQHGSPLPRGRRVSVKSPEAIRMEVGGEDEMKENVKTPGVVLRSTRRGIRATPAPLPTPVPASSARATARRTAVRRTGEVAPTPATRRRAASRKAAGAVEVDRPAEDVSEDKTSKMTRALDQEAEVVAVASKEEKGQQDEPRAALSDVKCDDPKGEEKVQQEEPKAVVLDVKCDGPEQEEVVQFLEGDNKVEEVEEGEEGSAAVLGKSCNDPKVEEVVVVMEEQFTEPHEGIVKEQEPISVERSASVEVMDDSPILGVIEKKQDASVEDCEDLAEFSPAREMTDEAIPVTEDKEVAISEESVTEDNEVAISEEAVTEDKEVAISEEAVTEDKEVAISEEAVTEDKEVAINEEAVTEDKEVAISEEAIEEDGFANTVETDPTPKEILLTEGEIILIEGKEGAANEMPQAGETSEEDEEDYLAELKEGAADQVLQAELADNETSKEDEDDLSEKREGTAAKMLQGELTDDETSEEDDLDEDEEWVSDDDENTEEDYLAELKEGVADQVLQAELANNETGEEDEDALSEEREGTAAKMLQGEPTDDETSEEDDLDEDEGWASDDDENTEEIGSTDETDEDPDETNEESYTSDAVQMMQGSGIAEDANEDASTEDDDFSGDLPPEFENIMIFSGAETESDIAPPVLEENKDAVVSATKTAKSLDDSALKTGQEEEGPEEVDNVVKSLDEEVESKEMQKQQPQDYNSMSLRKLKATHKKYLIAAKEEVTEGKRLPLEEVDENACIDH

SEQ ID NO: 178626 - protein, 558 aa, Zea Mays
MLLGMVDDPRVVLIKLADRLHNMRTIYALPVPKAEAVAQETLAVWCSLASRLGVWALKAELEDLCFAVLQPQIFKKIQSELTLMWNRTGKSKNMRRSSIRNELLASMKDGNMVSINDLFSSCNQERPNMKDLLQAVLPFDIFLDRKRRSYFLSNLNSNSGESIPNPKIVDDAAVALASLASCEEELERELLISTSYIPGMEVTLSSRLKSLYSIYCKMKRKEVGIRQVYDARALRVIVGDKNGAMHGSAVRSCYSILDIVHRLWTPIDGEFDDYIINPKGSGYQSLHTAVQASDSSPLEVQIRTQRMHEYAEHGLAAHWLYKESKVEYRSSMSKRIRQSTSYSSSSSEDESSVQDDIPSKYSSMKVGHPVLRIEGSHLLAAVVVSIDKGGKELIVAVSFSLEASEAVAELRSSFQLKRWEAYARLHKKVSEKWWCAPGHGDWSTNLERYTLCQDGIFHKQDQFGRLLPTFIQIIDLAEEEEEEYWMVVSAIFEGKETCSLPSESSYADKSSSEPPSSTPLSDPINNKNHASMGGASSSWRIFGREKSQCKHLHKGNPA

SEQ ID NO: 178627 - protein, 723 aa, Zea Mays
MKQSPASTAVSDSGMLGRRLALLPAATVGRGGRTTRARMTMGCVLLDHVAPRLAVASATLVGAREVIAAAAAAGAGGSGAVHGAVASTLAQVAVTAVAIASGACLSTKVDFLWPRIDQLPDTLIFEGVEVTGYQIFEDPKVQKAIEFASTAHLGQFRRTGDPYITHCIHTGKILAALVPSTGERAVNTIVAGILHDVVCDTSESLKSIEEQFGADVASLVSGVSKLSYINQLLRRHRQKNTGGSTLTSEEANNLRVMLLGMVDDPRVVLIKLADRLHNMRTIYALPVPKAEAVAQETLAVWCSLASRLGVWALKAELEDLCFAVLQPQIFKKIQSELTLMWNRTGKSKNMRRSSIRNELLASMKDGNMVSINDLFSSCNQERPNMKDLLQAVLPFDIFLDRKRRSYFLSNLNSNSGESIPNPKIVDDAAVALASLASCEEELERELLISTSYIPGMEVTLSSRLKSLYSIYCKMKRKEVGIRQVYDARALRVIVGDKNGAMHGSAVRSCYSILDIVHRLWTPIDGEFDDYIINPKGSGYQSLHTAVQASDSSPLEVQIRTQRMHEYAEHGLAAHWLYKESKVEYRSSMSKRIRQSTSYSSSSSEDESSVQDDIPSKYSSMKVGHPVLRIEGSHLLAAVVVSIDKGGKELIVAVSFSLEASEAVAELRSSFQLKRWEAYARLHKKVSEKWWCAPGHGDWSTNLERYTLCQDGIFHKRYKLLLVP

SEQ ID NO: 178628 - protein, 549 aa, Zea Mays
MKQSPASTAVSDSGMLGRRLALLPAATVGRGGRTTRARMTMGCVLLDHVAPRLAVASATLVGAREVIAAAAAAGAGGSGAVHGAVASTLAQVAVTAVAIASGACLSTKVDFLWPRIDQLPDTLIFEGVEVTGYQIFEDPKVQKAIEFASTAHLGQFRRTGDPYITHCIHTGKILAALVPSTGERAVNTIVAGILHDVVCDTSESLKSIEEQFGADVASLVSGVSKLSYINQLLRRHRQKNTGGSTLTSEEANNLRVMLLGMVDDPRVVLIKLADRLHNMRTIYALPVPKAEAVAQETLAVWCSLASRLGVWALKAELEDLCFAVLQPQIFKKIQSELTLMWNRTGKSKNMRRSSIRNELLASMKDGNMVSINDLFSSCNQERPNMKDLLQAVLPFDIFLDRKRRSYFLSNLNSNSGESIPNPKIVDDAAVALASLASCEEELERELLISTSYIPGMEVTLSSRLKSLYSIYCKMKRKEVGIRQVYDARALRVIVGDKNGAMHGSAVRSCYSILDIVHRLWTPIDGEFDDYIINPKGSGYQDLRSATQTI

SEQ ID NO: 178629 - protein, 467 aa, Zea Mays
MLLGMVDDPRVVLIKLADRLHNMRTIYALPVPKAEAVAQETLAVWCSLASRLGVWALKAELEDLCFAVLQPQIFKKIQSELTLMWNRTGKSKNMRRSSIRNELLASMKDGNMVSINDLFSSCNQERPNMKDLLQAVLPFDIFLDRKRRSYFLSNLNSNSGESIPNPKIVDDAAVALASLASCEEELERELLISTSYIPGMEVTLSSRLKSLYSIYCKMKRKEVGIRQVYDARALRVIVGDKNGAMHGSAVRSCYSILDIVHRLWTPIDGEFDDYIINPKGSGYQSLHTAVQASDSSPLEVQIRTQRMHEYAEHGLAAHWLYKESKVEYRSSMSKRIRQSTSYSSSSSEDESSVQDDIPSKYSSMKVGHPVLRIEGSHLLAAVVVSIDKGGKELIVAVSFSLEASEAVAELRSSFQLKRWEAYARLHKKVSEKWWCAPGHGDWSTNLERYTLCQDGIFHKRYKLLLVP

SEQ ID NO: 178630 - protein, 361 aa, Zea Mays
MKEGEELNTDKIHYSLRMNERKNSILTKYTTRCEMRVNERKVNERKNSMLTKYTLSLRMNGRKTNEGKNSMLTKYTRWEWMKGRTHFQLIIISCPRYYEGETKTKRKIGTRHIIAILISSCYLVAPQSTPTIPFSLSSPLQGPCHPHKAWTLGPAGGEEDKTNAAAGMMAICSAHTTTISLRSPCTTTVSNAAAGLVQKQVIFLTSINRRSGSRRRGGGVSRTLLQVSCSADGNKPVVIGLAADSGCGKSTFMRRLTSVFGGAAEPPRGGNPDSNTLISDTTTVICLDDYHSLDRTGRKEKGVTALDPRANNFDLMYEQVKAIKQGQAVQKPIYNHVTGLLDPPELITPPKIFVIEGSTSV

SEQ ID NO: 178631 - protein, 375 aa, Zea Mays
MKEGEELNTDKIHYSLRMNERKNSILTKYTTRCEMRVNERKVNERKNSMLTKYTLSLRMNGRKTNEGKNSMLTKYTRWEWMKGRTHFQLIIISCPRYYEGETKTKRKIGTRHIIAILISSCYLVAPQSTPTIPFSLSSPLQGPCHPHKAWTLGPAGGEEDKTNAAAGMMAICSAHTTTISLRSPCTTTVSNAAAGLVQKQVIFLTSINRRSGSRRRGGGVSRTLLQVSCSADGNKPVVIGLAADSGCGKSTFMRRLTSVFGGAAEPPRGGNPDSNTLISDTTTVICLDDYHSLDRTGRKEKGVTALDPRANNFDLMYEQVKFYGEVTQQMLKHADFPGSNNGTGLFQTIVGLKIRDLYEQIVAERAGAPVEAAKV

SEQ ID NO: 178632 - protein, 608 aa, Zea Mays
MGDFSPLGHSHGGATLENKESTVVKKNRSDGSDFEDSLVSKSDRRRPLSQVLQSSENLLPHLKQNDDFGALLIAESNNPSLAASWSRRNKYTYMASDSGETESHSDLPSIKMSSTRTDFENESYLQHPVYFSEEQTSDFIEKQITESSERECSESETEDDAELLQNASVILRTESHAPCPYSIPVSDKFKHVDYDDNEVIYSTYMPQLNEYEEEDGSSELGVSQWHMKGKRNNRNAVKRLVDMRDGNTWLNKYNGSLKGSLHNTNGGNPRKEGMHTSGEQFFEESFYQIKEEPNYDSDETNLFENMSHSETNLYYGKKYPSSLRTTRDLSRGYSYFNDSSNVSPLNKDTERIYHVDRNAYWDRPSFYQRKLTSSFGGMGPMLFNVNLKVQASYQGEHVPLVSLMSRLNGKAIVGHPIQIEIVEDGSTAVFCGDSGMQETTAAPPAWPTGRRTAMQRVPRSNPSGALLDGDNEGGLVYSDYETKPTLRKYSSSSNHQVKVNNKISSNAKRSSAKPPKKSSKKTNLSSQKLRALSSISTAKNHHGEGGQAKANWHNDIFGGLIGSEGAVPLVTCVPTKVVFTRILEAVGRPPLSAARRVRMASPPVRDPP

SEQ ID NO: 178633 - protein, 76 aa, Zea Mays
MSQGRVPGSPSLRRASAGLGRRNPRCGHEDLMNHPANWNLKCQASCVLDSLLIPNNVLCNHLPCIGLILMGPNRSP

SEQ ID NO: 178634 - protein, 420 aa, Zea Mays
MTYNGLETCIINCSAYDDDSGISATTCGDGCVTADSLDDEVSSCFSKDASGSSFSSHCLSKQEEHSLDELGTPIAIHLLPFKAKKPITYTLSASDIENMKKKFAKLLLGYDTSGGARGVCAALALSNGIINLSATVFGELWKLEPLCEDKKIRWRKEMDWLMSPTTYIVELVPRKQSGADGCTFEIMTPKARSDVHVNLPALQKLDTMLIEVMDSMIDTEFWYEESGSRADGPVKITGPRKSKKWWLPSPRVPEQGLSRFQRKRLVFQAKLVHQILKAAKSINEQVLFHMPIPAAVMDALPKSGRASLGEDLYQAITTEYIPIEEIFVSLSLKTEHSVLETMNQLEGAMFAWNQRILEERSKRSPGRHSWSFMKDSSSELDKMSACIERVDTLVQLLKARYPNLPPTFIDVLKVQYNVVS

SEQ ID NO: 178635 - protein, 55 aa, Zea Mays
MTAGVSPTAIAVQSPYIAQVQLLDYLQQISYLTSILNSTLQIVSSQYKIVFCTPI

SEQ ID NO: 178636 - protein, 63 aa, Zea Mays
MLILQRRRSTARVSPTAIAVQSPYIAQVQLLDYLQQISYLTSILNSTLQIVSSQYKIVFCTPI

SEQ ID NO: 178637 - protein, 68 aa, Zea Mays
MRHHLILDVISSSTGLGGLHLVLYSGLKVGHKLLQPPTTLSPGDVVWVRAPLLEGKALLIILRKMATT

SEQ ID NO: 178638 - protein, 199 aa, Zea Mays
MLKDSSVALLPKVPRSVDDQAIELPFAILRKESLRLLSPLANAGDVAQIHMLRQGKAFPSKNCVPDLMSEGAVMAGAAALNEGILSSVSEKNVAAHPWHDLEIGPEAPEVFNCVVEIPRGSKVKYELDKISGLIKVDRVLYSSVVYPHNYGFIPRTLCEDSDPMDVLVLMQEQVVPGCFLRARAIGLMPMIDQGEKDDK

SEQ ID NO: 178639 - protein, 51 aa, Zea Mays
MVHVFLVLCIYYMVHIYATTEYTNMSSRINVYTAIPSVLAISCCKSLGVDV

SEQ ID NO: 178640 - protein, 692 aa, Zea Mays
MLSAQSNLGHNRHSRNDVSTKHKSGYEPSDTETEWHESPWNDGALASNRNRLPKDSGRNDQVGTRRQNISPNCTLDYHAEKTSNLRYSRTPPRVTEQRRHPSPFTAVKNESRKKSSRTPPRFRSSMETFSRSSIKARFSRNRSISAPKLRPQEKEHPARAPAFPGSNPVSTHPEREVADNIEEDSHAENCSQEISELIANGKLPNSRYNEYAFTSTESIPAGDIFFSRDCRAPLEKTSTKLNNIDQSFTSDSNVHTENDGTVTQSNLGQPSQFVSARTGLSRTTTKSSYATGRHCQMSTTTTLSSPYSNGKLSGESGKFSEITGKLVGGVMKFTSSKVQNDTWLPCMTGKACRKSRTSNNKKNDESESSFIQKALVIEKIRLFWADKYRPQNLNGFTCHREQVQQLKQSGSISVPILVPVSSSNNHVELHMRFQSKNARYALMTLANEMSDKCKITEPIVRKSFKVIVLYDVDKVSQNNQRLIKWIIDSSSDACKIIMTCQDESNLLDSIKSRCKIISIGVPSTREVVDILTYTSRKESFDLPTSFATTIANQSRKNLREAILALEACKANNYPFIDGQAIPLGWEEVLEELAVEILDDPAPKRLFLARGKLQKLLVEFVPPKLILQKLVELFLKGIQTGVKREVYYWHAYYDKRLPVGASALLKLEEFVAKFMSIHRKSMSHEPKIPEVPQ

SEQ ID NO: 178641 - protein, 741 aa, Zea Mays
MLSAQSNLGHNRHSRNDVSTKHKSGYEPSDTETEWHESPWNDGALASNRNRLPKDSGRNDQVGTRRQNISPNCTLDYHAEKTSNLRYSRTPPRVTEQRRHPSPFTAVKNESRKKSSRTPPRFRSSMETFSRSSIKARFSRNRSISAPKLRPQEKEHPARAPAFPGSNPVSTHPEREVADNIEEDSHAENCSQEISELIANGKLPNSRYNEYAFTSTESIPAGDIFFSRDCRAPLEKTSTKLNNIDQSFTSDSNVHTENDGTVTQSNLGQPSQFVSARTGLSRTTTKSSYATGRHCQMSTTTTLSSPYSNGKLSGESGKFSEITGKLVGGVMKFTSSKVQNDTWLPCMTGKACRKSRTSNNKKNDESESSFIQKALVIEKIRLFWADKYRPQNLNGFTCHREQVQQLKQSVSAEFCPHIIFKGPPGSGKRSLCRAVLTEIFGDSSLNVSHYLKSCNGQQGSISVPILVPVSSSNNHVELHMRFQSKNARYALMTLANEMSDKCKITEPIVRKSFKVIVLYDVDKVSQNNQRLIKWIIDSSSDACKIIMTCQDESNLLDSIKSRCKIISIGVPSTREVVDILTYTSRKESFDLPTSFATTIANQSRKNLREAILALEACKANNYPFIDGQAIPLGWEEVLEELAVEILDDPAPKRLFLARGKLQKLLVEFVPPKLILQKLVELFLKGIQTGVKREVYYWHAYYDKRLPVGASALLKLEEFVAKFMSIHRKSMSHEPKIPEVPQ

SEQ ID NO: 178642 - protein, 699 aa, Zea Mays
MLSAQSNLGHNRHSRNDVSTKHKSGYEPSDTETEWHESPWNDGALASNRNRLPKDSGRNDQVGTRRQNISPNCTLDYHAEKTSNLRYSRTPPRVTEQRRHPSPFTAVKNESRKKSSRTPPRFRSSMETFSRSSIKARFSRNRSISAPKLRPQEKEHPARAPAFPGSNPVSTHPEREVADNIEEDSHAENCSQEISELIANGKLPNSRYNEYAFTSTESIPAGDIFFSRDCRAPLEKTSTKLNNIDQSFTSDSNVHTENDGTVTQSNLGQPSQFVSARTGLSRTTTKSSYATGRHCQMSTTTTLSSPYSNGKLSGESGKFSEITGKLVGGVMKFTSSKVQNDTWLPCMTGKACRKSRTSNNKKNDESESSFIQKALVIEKIRLFWADKYRPQNLNGFTCHREQVQQLKQSVSAEFCPHIIFKGPPGSGKRSLCRAVLTEIFGDSSLNVSHYLKSCNGQQGSISVPILVPVSSSNNHVELHMRFQSKNARYALMTLANEMSDKCKITEPIVRKSFKVIVLYDVDKVSQNNQRLIKWIIDSSSDACKIIMTCQDESNLLDSIKSRCKIISIGVPSTREVVDILTYTSRKESFDLPTSFATTIANQSRKNLREAILALEACKANNYPFIDGQAIPLGWEEVLEELAVEILDDPAPKRLFLARGKLQKLLVEFVPPKLILQEYYFLNRDNYAYELHSQISCRSS

SEQ ID NO: 178643 - protein, 441 aa, Zea Mays
MLSAQSNLGHNRHSRNDVSTKHKSGYEPSDTETEWHESPWNDGALASNRNRLPKDSGRNDQVGTRRQNISPNCTLDYHAEKTSNLRYSRTPPRVTEQRRHPSPFTAVKNESRKKSSRTPPRFRSSMETFSRSSIKARFSRNRSISAPKLRPQEKEHPARAPAFPGSNPVSTHPEREVADNIEEDSHAENCSQEISELIANGKLPNSRYNEYAFTSTESIPAGDIFFSRDCRAPLEKTSTKLNNIDQSFTSDSNVHTENDGTVTQSNLGQPSQFVSARTGLSRTTTKSSYATGRHCQMSTTTTLSSPYSNGKLSGESGKFSEITGKLVGGVMKFTSSKVQNDTWLPCMTGKACRKSRTSNNKKNDESESSFIQKALVIEKIRLFWADKYRPQNLNGFTCHREQVQQLKQSNFAHILFSKVLQDQERDLCAELSSLKFLAIHL

SEQ ID NO: 178644 - protein, 444 aa, Zea Mays
MSTTTTLSSPYSNGKLSGESGKFSEITGKLVGGVMKFTSSKVQNDTWLPCMTGKACRKSRTSNNKKNDESESSFIQKALVIEKIRLFWADKYRPQNLNGFTCHREQVQQLKQSVSAEFCPHIIFKGPPGSGKRSLCRAVLTEIFGDSSLNVSHYLKSCNGQGSISVPILVPVSSSNNHVELHMRFQSKNARYALMTLANEMSDKCKITEPIVRKSFKVIVLYDVDKVSQNNQRLIKWIIDSSSDACKIIMTCQDESNLLDSIKSRCKIISIGVPSTREVVDILTYTSRKESFDLPTSFATTIANQSRKNLREAILALEACKANNYPFIDGQAIPLGWEEVLEELAVEILDDPAPKRLFLARGKLQKLLVEFVPPKLILQKLVELFLKGIQTGVKREVYYWHAYYDKRLPVGASALLKLEEFVAKFMSIHRKSMSHEPKIPEVPQ

SEQ ID NO: 178645 - protein, 230 aa, Zea Mays
MMQRRELVTKAGIALAVSCSMATSPASANGAAQGLEILPFKADGYNFWTWRGRRIHYVEQGAGRPVVLIHGFGASAFHWRYNIPELAKKYKVYAIDLLGFGWSEKALVDYEATIWMEQVSDFLREIVKEPAVLVGNSLGGFTTLFTATEVPELVRGVVLLNSAGQFADPNKPAAAPAEEEEGGSALSRYIVQPLKEAFQRVVLGLLFWQSKQPARVEKVLKSVTLTQLDV

SEQ ID NO: 178646 - protein, 152 aa, Zea Mays
MADSSAPTRVMMAVNESSLKGYPHPSISCRTAFDWTLSKLVRSNPGGFHFLFVHVQVPDEDGFDDMDSIYASPEDFHQMKQRDKIRGLHLLEYFVNQCHQLGIKCEAWIRHGDPKEVICSEVKRVQPDLLVVGSRGLGPFQSSGRYMYCNRS

SEQ ID NO: 178647 - protein, 185 aa, Zea Mays
MLKLTPLVAASKLAVALPRRRLPRRELDLEAVVDVVDRGAGARHGLHRRALDLESAALLQVASDGVGGVGVLVGGVPLPGEPAPAQPAGDAGGHGEEGDRREHGEDRAERALGGRGRRPRAQDGVGGRGVVDRGVRHILGSRRSLKLLAADICHHHALPRRKWFGRLGVALLGTEGSAGRFMMGS

SEQ ID NO: 178648 - protein, 676 aa, Zea Mays
MAGSMQSEALEMHVEASGAGEPSIEQLYNNVCEMESSSEGGSPSRESFGSDGEESRIDSELRHLVAGEMEAMKVIEEEEENGSVANVVPPAPAENGTPVKEHSSSSSKKSKKASKSQLESDASVGLNGKASTEEGESEVSKPASRVGRRRKSNANPQSGTEDAGLDNPDLGPFLLKHARDLIASENPRRALKYALRATKSFEKCAGGKPSLNLVMSLHVVAAIYCNLGKYEEAVPVLHRSIEIPVIEEGQEHALAKFSGCMQLGDTYGMLGQTAHSLQWYASGLEIQKQTLGEQDPRVGETCRYLAEAHVQALQLDEAQRLCQIALDIHREHRETASLEETADRRLMGLICDTKGDHEAALEHLVMASMSMVANGQETEVASVDCSIGDIYLSLGRYDEAVFAYQKALTVFKTSKGENHATVASVFVRLADLYNKTGKLRESKSYCENALKIYQKPIPGTSLEEIATGLTDVSAIYETMNEHEQALKLLQKALKMYNNSAGQQSTIAGIEAQMGVLHYILGNYGESYDSFKSAIAKLRTCGEKKSAFFGIALNQMGLACVQRYSINEAAELFEEARTVLEQEYGPYHPDTLGVYSNLAGTYDAMGRLDEAIEILEYVVGMREEKLGTANPDVDDEKRRLGELLKEAGRVRSRKAKSLENLLETNPYIATKRNAVAA

SEQ ID NO: 178649 - protein, 244 aa, Zea Mays
MSRQNSLSFTGSIDESRHGDNVRHGATSSMSQYSSKQNHKSNDPGRDLSIQVLEKFSLVTKFARDTTSSLFRDNSGAHAYGRQQHQYILDNKSTNKHKNQYVTPEKASAPSATLESDPLPLVWGKQRDHPLSVEEWTSFLDREGRIMDSKALRKKVFYGGVDHALRKEVWKFLLGYHEYDSTYAEREYLAVMKRAEYEVIKSQWKSISATQAKRFTKFRERKGLIDKDVIGPFPIMKEMTIRML

SEQ ID NO: 178650 - protein, 457 aa, Zea Mays
MSRQNSLSFTGSIDESRHGDNVRHGATSSMSQYSSKQNHKSNDPGRDLSIQVLEKFSLVTKFARDTTSSLFRDNSGAHAYGRQQHQYILDNKSTNKHKNQYVTPEKASAPSATLESDPLPLVWGKQRDHPLSVEEWTSFLDREGRIMDSKALRKKVFYGGVDHALRKEVWKFLLGYHEYDSTYAEREYLAVMKRAEYEVIKSQWKSISATQAKRFTKFRERKGLIDKDVVRTDRSIPYYEGDDNQNVVVLRDILLTYSFYNFDLGYCQGMSDFLAPILYVMEDESESFWCFASLMERLGANFNRDQNGMHAQLLALSKLVELLDPSLHNYFRQNDCLNYFFCFRWVLIQFKSFDQIMLLWEVLWSHYLSEHFHLYLCVAILKKYRQRIIGEQMDFDTLLKFINELSGQINLDRAIQDAEALCTIAGENGASCIPPGTPPSMPVETDGGMYVQEDEVL

SEQ ID NO: 178651 - protein, 320 aa, Zea Mays
MSRQNSLSFTGSIDESRHGDNVRHGATSSMSQYSSKQNHKSNDPGRDLSIQVLEKFSLVTKFARDTTSSLFRDNSGAHAYGRQQHQYILDNKSTNKHKNQYVTPEKASAPSATLESDPLPLVWGKQRDHPLSVEEWTSFLDREGRIMDSKALRKKVFYGGVDHALRKEVWKFLLGYHEYDSTYAEREYLAVMKRAEYEVIKSQWKSISATQAKRFTKFRERKGLIDKDVVRTDRSIPYYEGDDNQNVVVLRDILLTYSFYNFDLGYCQGMSDFLAPILYVMEDESESFWCFASLMERLGANFNRDQNGMHAQLLALSKAK

SEQ ID NO: 178652 - protein, 314 aa, Zea Mays
MDSKALRKKVFYGGVDHALRKEVWKFLLGYHEYDSTYAEREYLAVMKRAEYEVIKSQWKSISATQAKRFTKFRERKGLIDKDVVRTDRSIPYYEGDDNQNVVVLRDILLTYSFYNFDLGYCQGMSDFLAPILYVMEDESESFWCFASLMERLGANFNRDQNGMHAQLLALSKLVELLDPSLHNYFRQNDCLNYFFCFRWVLIQFKREFSFDQIMLLWEVLWSHYLSEHFHLYLCVAILKKYRQRIIGEQMDFDTLLKFINELSGQINLDRAIQDAEALCTIAGENGASCIPPGTPPSMPVETDGGMYVQEDEVL

SEQ ID NO: 178653 - protein, 358 aa, Zea Mays
MSRQNSLSFTGSIDESRHGDNVRHGATSSMSQYSSKQNHKSNDPGRDLSIQVLEKFSLVTKFARDTTSSLFRDNSGAHAYGRQQHQYILDNKSTNKHKNQYVTPEKASAPSATLESDPLPLVWGKQRDHPLSVEEWTSFLDREGRIMDSKALRKKVFYGGVDHALRKEVWKFLLGYHEYDSTYAEREYLAVMKRAEYEVIKSQWKSISATQAKRFTKFRERKGLIDKDVVRTDRSIPYYEGDDNQNVVVLRDILLTYSFYNFDLGYCQGMSDFLAPILYVMEDESESFWCFASLMERLGANFNRDQNGMHAQLLALSKLVELLDPSLHNYFRQNDCLNYFFCFRWVLIQFKRSILSRS

SEQ ID NO: 178654 - protein, 141 aa, Zea Mays
MSRQNSLSFTGSIDESRHGDNVRHGATSSMSQYSSKQNHKSNDPGRDLSIQVLEKFSLVTKFARDTTSSLFRDNSGAHAYGRQQHQYILDNKSTNKHKNQYVTPEKASAPSATLESDPLPLVWGKQRDHPLSVEEGVDLRT

SEQ ID NO: 178655 - protein, 802 aa, Zea Mays
MTQKQADLLKREKDVKSLEAKLSKSEQALNDKKKSMENLQNDLDAKSKALKSWDESLKNDEKRLLKEKQQMDHEREQLETYKLELEKIKSALEAEKEKISEEQNNLKLTAQERQEHSLLIAKLKKEIEEYRMRSNSLSEEMEDLRKQRQKFEEEWEQLDEKRALLVEEDKRLNIERMNLERWRDNEEKRLNDMKLKMDEEYKQQLESLERKEKALSDDMKHKQMENDEFLKGERADVQRKLQLKRHELEMEMEQKQATKEKELEEKENELNKKIDFVENKLRHAIELNESKIEKLLLEKREVQMERELLLEERKKTETDKADIRRDIESLHSLSKSLKERREAYNRDRSRLIELFEKYKACKNCGISIFEGLDSLLLKDSAEIEHPSLAVEGDDHALTTDTSGPDTGTLVNSGGRFSLLQKCSRLFKFSPRKKGEQSSEQPSERNISFGARLEEATQSDGDYVPTPVYEIAHDSFNAEDELPSDGETRENEESERHDIADNAQMESSVGVADNSIDILGTKSFDGANDMAVEATIVSVDQNGEDSVVPAEAGVEPETSEQGRRQQNQRGRRKGGMKRTRSVNAVVEDAKMILGEVFEEKTDDQGDTVKVGATRKRRFAGATISEQDEEGSEAHSESVSLGGQRRKRRQTAGAVTDAPGERRYNLRHSRAANAGAATAQADKKKSSKARNKHTVEASADDTEGTSKVVEEPAPESKRVSESADYDASQLHEFSQVEVGDAHAVDGEGAGEEDGDILDGQDALPDVPMTPSGSEFGAEQEDEDDDDSERRNQSISKKLWSFFTT

SEQ ID NO: 178656 - protein, 1103 aa, Zea Mays
MGLLLIEKKEWAAKFEEISEVLTQKEEILKREQAAHLNAISEYERREENMRKALGVEKQCVADLEKALRDIRAEIAEVKFTSEKKITDAQSLEASLEEKSLEIEGKLHAADAKLAEANRKKSQADRDLEEAEARQRRLEKEKLYFETERKAREKQLKEQEESLQEWEKKLKESQNRLNELQRSINEREERANKNDQLFKIKQDELEEARRTVEAAKVTLKVKEDDINKRLNELHLQEKDADSKRSALEEQGKKLDEREAKVTNREKEGLQKLLEDHQVELESKRRDFELELERERKSFDQNMTQKQADLLKREKDVKSLEAKLSKSEQALNDKKKSMENLQNDLDAKSKALKSWDESLKNDEKRLLKEKQQMDHEREQLETYKLELEKIKSALEAEKEKISEEQNNLKLTAQERQEHSLLIAKLKKEIEEYRMRSNSLSEEMEDLRKQRQKFEEEWEQLDEKRALLVEEDKRLNIERMNLERWRDNEEKRLNDMKLKMDEEYKQQLESLERKEKALSDDMKHKQMENDEFLKGERADVQRKLQLKRHELEMEMEQKQATKEKELEEKENELNKKIDFVENKLRHAIELNESKIEKLLLEKREVQMERELLLEERKKTETDKADIRRDIESLHSLSKSLKERREAYNRDRSRLIELFEKYKACKNCGISIFEGLDSLLLKDSAEIEHPSLAVEGDDHALTTDTSGPDTGTLVNSGGRFSLLQKCSRLFKFSPRKKGEQSSEQPSERNISFGARLEEATQSDGDYVPTPVYEIAHDSFNAEDELPSDGETRENEESERHDIADNAQMESSVGVADNSIDILGTKSFDGANDMAVEATIVSVDQNGEDSVVPAEAGVEPETSEQGRRQQNQRGRRKGGMKRTRSVNAVVEDAKMILGEVFEEKTDDQGDTVKVGATRKRRFAGATISEQDEEGSEAHSESVSLGGQRRKRRQTAGAVTDAPGERRYNLRHSRAANAGAATAQADKKKSSKARNKHTVEASADDTEGTSKVVEEPAPESKRVSESADYDASQLHEFSQVEVGDAHAVDGEGAGEEDGDILDGQDALPDVPMTPSGSEFGAEQEDEDDDDSERRNQSISKKLWSFFTT

SEQ ID NO: 178657 - protein, 85 aa, Zea Mays
MFFRSGSCLFVVLQDCSLIGFWILIHHDHLLSGFGFRCSLALLCRLPFCLAENLSLAHQKINRMFCFRLLFVLTSSHVQDDALTR

SEQ ID NO: 178658 - protein, 698 aa, Zea Mays
MAQSCSWGILLAVLVAGLAAAVAVPPATAAVASIDLGSEWLKVAAVHLAPGRAPIAVATNEMSKRKSPALAALADGNRLIGEEAAGITARHPSKVFARARDLLAKPFSYVQSVTESLFLPYDLVPDARGAAAVRADDGQVYSLEEIVAMVLHYAAGLADAHVGAPVRDAVIAVPPYFGQAERRALTQATQLAGINVLALINEHAGAALQYGIDKDFSNASRHVIFYDMGAGSTYAALVCYSAYNAKEFGKTVSVNQFQVKDVRWNSELGGVEMEMRLVNYFADQFNKQLGNVVDIRQSPKAMAKLKKQVKRTKEILSANTAAPISVESLYNDVDFRSSITREKFEELCEDLWEQALTPVKEVLTHSGMKIDDIYAVELIGGATRVPKLQAKLQEFLGRRGLDKHLDADEAIVLGASLHAANLSDGIKLNRKLGMIDGSTYALVLEIDGPGYFKDESIDQILVPRMKKMPIKMFRSIRHTKDFDVSLNYDKAYELPPGIPSHKFAEYSVSGLTDASENTPIDEGNVQEIIAENVLKKRTFRVPLKVVEKTTGAGTILSKELYSEAKNRLEALDKKDAERRKTAELKNNLESYIYSMKEKLEESTGILTVSTEQERESFAQKLSEVQDWLYMDGEDAQANEFKERLGQLKAIGDPILFRLSELKARPAACENARLYLDELQKIWRSIPQRTWVAVCANQE

SEQ ID NO: 178659 - protein, 127 aa, Zea Mays
MLIIIRCCMLMVLLYSVLQFFSIHAGALQYLTFTRPDIAYATQQACLHMHDQREPHLVAIKCILRYIRGTLDLGLHIHSSIQSNRVVYSDTDWAGNPDTRKSTLGYMCSSMIIHLLVFQTLEYYLSF

SEQ ID NO: 178660 - protein, 54 aa, Zea Mays
MAWWKGISAPLGGSSQAGLNSIVILGAWCLWKHRNDCVFNGMSPNLSAALAGWK

SEQ ID NO: 178661 - protein, 143 aa, Zea Mays
MAPSLLLHMVWTPAPSLVAMDSPSPISFPKHKSHGRPTPARPAPAMDAVEPPVSYLPSPSSSGCRPSLDFALSTRRSSLLWRALAVFHLHRTTPSSLLAPVFSMVAPLLSLINTRRSSNMPDLCSPGNLDEKKALARRLPSAW

SEQ ID NO: 178662 - protein, 474 aa, Zea Mays
MDVRRLGGRIAAALRALAAGGSLPIPAWITNGLAMISLVLSSCDLLRLCSDRDRRLRFPLGGREFVTVVCQLASIVYLFSPCGTGIPSANPETPACRDQGGSADQTRAAAADAPEALHGGAEGEDEEIVAAVVSGALPSHHLESRLGDCRRAARLRREALRRMTGRGVEGLPLDGMDYQAILGQCCEMPVGYVQMPVGVAGPLLLDGKQYHVPMATTEGCLVASVNRGCRAIAASGGAFSVLLRDAMSRAPVVKLPSIKRAAELKAFVETHTNFETLAAVFNRSSRFGKLQGIHCALAGRNLYMRFTCSTGDAMGMNMVSKGVEDVLGYLQNDFPDMDLISLSGNYCSDKKAAAVNWIEGRGKSVVCEARVKGGVVQSVLKTTVQKLVELNIVKNLAGSAVAGALGGFNAHASNIVTALFIATGQDPAQNVESSQCITMMEAVNDGGDLHISVTMPSIEALSGVAPVLLHRPHA

SEQ ID NO: 178663 - protein, 130 aa, Zea Mays
MDHDSEVAFLKPRKGFVKIAIEMGCPVVPVFAFGQSYVYKWWRPGGKLIVKIARAIKFSPIIFWGKLGTPIPFATPMHVIVGRPIEVVKNPQPTIDEINQVHGQFVVAMQDLFEKYKSRTGYPDLQLRVL

SEQ ID NO: 178664 - protein, 375 aa, Zea Mays
MGLAVAVGRRPTQRSGVSRSRCAGKRPTAAEPRHHRHRTEGRKERNPGGSRRYQRPDSDASRAGEADHTRTRTLSTALLRYAPSRPDRTGPTFLHLSARRRPTRMGAGTNNGLSNGAAAGQRADDGTTVFRGTAYSPLRTTVALALWLGAIHFNAFLVLASLFLFPRRVAALVLATQLFFMFLPLSDKSRLGRKIARFISKYVIGYFPVTLHVEDYGAFDPNRAYVFGYEPHSVLPIAVGILGDLVGFMPLPKMKILASSAVFYTPFLRQIWTWLGLAPASRKSFYSYLGAGYSCIIVPGGVQEILHMDHDSEVAFLKPRKGFVKIAIEMGCPVVPVFAFGQSYVYKWWRPGGKLIVKIARAIKFSPIIFWGKLG

SEQ ID NO: 178665 - protein, 462 aa, Zea Mays
MLGRTKDQIRTTEQVNGAMASCQALKLDALVIIGGVTSNTDAAQLAETFAEAKCATKVVGVPVTLNGDLKNQFVETTVGFDTICKVNAQLISNVCTDALSAEKYYYFIRLMGRKASHVALECALQSHPNMVILGEEVAASKLTIFDITKQICDAVQARAEKDKNHGVVLIPEGLVESIPELYALLQEIHGLHGKGVSVENISSQLSPWASALFEFLPPFIRKQLLLHPESDDSAQLSQIETEKLLAQLVETEMNRRLKEGTYKGKKFNAICHFFGYQARGALPSKFDCDYAYVLGHVCYHIIAAGLNGYMATVTNVKSPVNKWRCGAAPISSMMTVQRWSRGPSATQIGKPAVHMASVDLKGKAYDVLRQNSSRFLLEDVYRNPGPLQFEGPGADSKPISLCVEDQDYMGRIKKLQEYLEKVKSIVKPGCSQDVLKAALSAMSSVTETLNIMTSSSTGQTAL

SEQ ID NO: 178666 - protein, 479 aa, Zea Mays
MSDPRGHAAGPDRDGDDPLAEDANSEEAWQTPEKEPVAVSKEAAARGGDTTPDAEPESDDGEGGVGSPDQMEPNADGERAPPVAAAEDPEGIVGSAKVETNGEDAISLDADGEEEDDDDDGDEEEEEEDDDDDDSTPDASPRAEVKVEGESSTGMTQSGAGHRVEVEPDPFLDGDDSGTEEEQGAFMAELERFHREHSLEFKPPKFYGKGLNCLKLWRQVAHLGGHEQVTVCKLWRQVGETFRPPKTCTTVSWSFRIFYEKALLEYEKHKVRTGQLQIPPPGLPQPSGADREVVVNQSSSARVRRDAAARAMQGWHAHRLLTNGTYGDNILKDKDTMPLPNRDKNLSFGVLKRKKASSPEYALKSSRSKTNKSQEDSMVVDVGEPADWVKINVRQTKDCFEVYALVPGLLREEQVHVQSDPAGRLVITGDPEQPDNPWGITPFKKVVNLPSRIDPHQTSAVVTLHGQLFVRAPFGHPDM

SEQ ID NO: 178667 - protein, 474 aa, Zea Mays
MSDPRGHAAGPDRDGDDPLAEDANSEEAWQTPEKEPVAVSKEAAARGGDTTPDAEPESDDGEGGVGSPDQMEPNADGERAPPVAAAEDPEGIVGSAKVETNGEDAISLDADGEEEDDDDDGDEEEEEEDDDDDDSTPDASPRAEVKVEGESSTGMTQSGAGHRVEVEPDPFLDGDDSGTEEEQGAFMAELERFHREHSLEFKPPKFYGKGLNCLKLWRQVAHLGGHEQVTVCKLWRQVGETFRPPKTCTTVSWSFRIFYEKALLEYEKHKVRTGQLQIPPPGLPQPSGADREVVVNQSSSARVRRDAAARAMQGWHAHRLLTNGTYGDNILKDKDTMPLPNRDKNLSFGVLKRKKASSPEYALKSSRSKTNKSQEDSMVVDVGEPADWVKINVRQTKDCFEVYALVPGLLREEVHVQSDPAGRLVITGDPEQPDNPWGITPFKKVVNLPSRIDPHQTSAVVTLHGQLFGLCQFC

SEQ ID NO: 178668 - protein, 464 aa, Zea Mays
MSDPRGHAAGPDRDGDDPLAEDANSEEAWQTPEKEPVAVSKEAAARGGDTTPDAEPESDDGEGGVGSPDQMEPNADGERAPPVAAAEDPEGIVGSAKVETNGEDAISLDADGEEEDDDDDGDEEEEEEDDDDDDSTPDASPRAEVKVEGESSTGMTQSGAGHRVEVEPDPFLDGDDSGTEEEQGAFMAELERFHREHSLEFKPPKFYGKGLNCLKLWRQVAHLGGHEQVTVCKLWRQVGETFRPPKTCTTVSWSFRIFYEKALLEYEKHKVRTGQLQIPPPGLPQPSGADREVVVNQSSSARVRRDAAARAMQGWHAHRLLTNGTYGDNILKDKDTMPLPNRDKNLSFGVLKRKKASSPEEDSMVVDVGEPADWVKINVRQTKDCFEVYALVPGLLREEVHVQSDPAGRLVITGDPEQPDNPWGITPFKKVVNLPSRIDPHQTSAVVTLHGQLFVRAPFGHPDM

SEQ ID NO: 178669 - protein, 216 aa, Zea Mays
MEVVAAAKQKAKKHIHLFYCSECEELALKVAASSDVIELQSINWRSFDDGFPNLFINKAHDIRGQHVAFLASFSSPAVIFEQVSVIFALPKLFIASFTLVLPFFPTGSFERVEEEGDVATAFTLAHILSMIPKSRGGPTSVVIYDIHALQERFYFGDDVLPCFETGIPLLLQRLRQLPDAENITIAFPDDGAWKRFHKLLQHFPMSVTRFVKVTRE

SEQ ID NO: 178670 - protein, 793 aa, Zea Mays
MIGTSTRLPPTQRLVEIKAVAEQFHFKISTLLLHAGKAVEAITWFRKHIRSYARVLGTPEVAFLHWEWFSRQFLVFGELIETTSTTIPDTLSPRFGTADYGLTEWEFQPAYYYQLAATYLREKRYAIECSSSMANLTTEVNGVPESVMPSVYVGQYVRLFEQGDTVSILPLSDTEYTSYALSEAERFQDSYEIIALFRKAYESFQSLGATRIASVCSGGMAMEYYAAGDFSNAKQLFDNVAGLYRKEGWTTLLWENLGYLRECSMKLNSPKDFISYSLEMAALPLFSRSEEENRENKIKSGPAGSPTISRRENIQQEVINVLERNQSSEGTDDGFNNAMEEVTHLDIDQISSLRMVLTTSVAFLDQSVKPGSPLLVSVSLLSHLPSPVVVDQLEVQFNQSDCNFVIHSRQEDSPPFYSNLHDQVVQDTSLTLFTNRWMRLTHEAKSEPAPSRAVLFGSPVPAAAEKPPMEVVAAAKQKAKKHIHLFYCSECEELALKVAASSDVIELQSINWRSFDDGFPNLFINKAHDIRGQHVAFLASFSSPAVIFEQVSVIFALPKLFIASFTLVLPFFPTGSFERVEEEGDVATAFTLAHILSMIPKSRGGPTSVVIYDIHALQERFYFGDDVLPCFETGIPLLLQRLRQLPDAENITIAFPDDGAWKRFHKLLQHFPMIVCNKVREGDKRIVRIKEGNPEGRHVVIVDDLVQSGGTLRECQKVLASHGASKVSAYVTHAVFPKQSYENFMASNSAGPGDQLAYFWITDSCPHTIKAIGQRPPFEVLSLAGSIADALQI

SEQ ID NO: 178671 - protein, 372 aa, Zea Mays
MIGTSTRLPPTQRLVEIKAVAEQFHFKISTLLLHAGKAVEAITWFRKHIRSYARVLGTPEVAFLHWEWFSRQFLVFGELIETTSTTIPDTLSPRFGTADYGLTEWEFQPAYYYQLAATYLREKRYAIECSSSMANLTTEVNGVPESVMPSVYVGQYVRLFEQGDTVSILPLSDTEYTSYALSEAERFQDSYEIIALFRKAYESFQSLGATRIASVCSGGMAMEYYAAGDFSNAKQLFDNVAGLYRKEGWTTLLWENLGYLRECSMKLNSPKDFISYSLEMAALPLFSRSEEENRENKIKSGPAGSPTISRRENIQQEVINVLERNQSSEGTDDGFNNAMEEVTHLDIDQISSLRMLWLISWRFNSINLTVTL

SEQ ID NO: 178672 - protein, 367 aa, Zea Mays
MIGTSTRLPPTQRLVEIKAVAEQFHFKISTLLLHAGKAVEAITWFRKHIRSYARVLGTPEVAFLHWEWFSRQFLVFGELIETTSTTIPDTLSPRFGTADYGLTEWEFQPAYYYQLAATYLREKRYAIECSSSMANLTTEVNGVPESVMPSVYVGQYVRLFEQGDTVSILPLSDTEYTSYALSEAERFQDSYEIIALFRKAYESFQSLGATRIASVCSGGMAMEYYAAGDFSNAKQLFDNVAGLYRKEGWTTLLWENLGYLRECSMKLNSPKDFISYSLEMAALPLFSRSEEENRENKIKSGPAGSPTISRRENIQQEVINVLERNQSSEGTDDGFNNAMEEVTHLDIDQISSLRMTGRFSSFLFKFA

SEQ ID NO: 178673 - protein, 468 aa, Zea Mays
MGLVVLSLASWLLLVKPSGCGGVKAHCDGPSAPGVALFYLSTYMIAFGNGGYQPSIATFGSDQFDETDPEEARSKVAFFSYFYLALNVGSLLSNTVLVYYEDSGRWVMGFWVSAAAAALALVLFLLGTPGYRHFKPSGNPLTRVAQVFVAALRKWRAEVPRGELLHEVVEAGEDPKVSGIRKILHSDGLRFLDKAATITEEEEEEGPWRLCTVTQVEEVKCILRMLPIWLCTIVYSVVFTQMASLFVEQGATMDTNIGSFHFPAASMSLFDVLSVLAFIAIYRRVLVPVMARLSGNPQGLTELQRMGVGLVIGMAAMVVAGVVEVERLKRVAAPDQPSSLSVLWQVPQYALIGASEVFMYVGQLEFFNGQAPDGVKSFGSALCMASISLGNYVSIMLVSVVTSLTAGEKRPGWIPGNLNSGHLDRFYFLLAALSLVDLAVYVACAMWYKGIKLDGGDGDNRRKVSAHV

SEQ ID NO: 178674 - protein, 746 aa, Zea Mays
MRVTPRDSNYIGQGHRFCVLRPELIASFVEAESMKQSLKQKVPDAPVASTSDAKATSVEADDKSEESSVHTHKENDNSSSEILFNPNVFTEYKLDGSPEEIAADEELVKRAGTYLIDIVIPKIVQDLCSLDISPMDGQTLTDALHLHGINIRYLGKIAGMVKHLPHLQDLFSAEIIVRSAKHVIKDILRQSLDHDIGPAIAHFLNCFMGKVLGASTEGSLSDMQSKTLKGHENSQTQKSTKGHKLSNAAASRKSLSAYSHLTSDGIWFSIKEFAKSKYQFEVPDDARLSAKRVAVLRNLCQKVGITIAARKYDLDASTPFEASDILNLQPVVKHSVPTCTEAKNLMEAGKVRMAEGTLNEAYALFSEAFSLLQQITGPMHKDAANCCRYLAMVLYHAGDTAGAVVQQHRELIINERCLGLDHPDTAHSYGNMALFYHGLNQTELALRHMSRTLLLLSLASGPDHPDVAATLINVAMMYQDASNMNTALRYLQEALMKNERLLGPVHVQTAVCYHALAIAFSCMSLYKLSIQHEKKTYDILVKQLGENDSRTEDSKNWLNTFKLREEQVNAQKQKGQEANASDNAVKFLKANPAVLQAMKAAAIQSGGVSANVNRSLNAAVVGEGVPRLRGVDERAARATAEARKKAAARGLNVRNGPVANHASDELAQILKLINAVSGSSTPGSAKTEVSASEGQATNGCIQNGTDTEPKAADTNGLSASVKSTVNAPFGLGTTLESKKQKSKQKS

SEQ ID NO: 178675 - protein, 764 aa, Zea Mays
MEQPQCNAPLQAVGQEKPRERRKRRYRRCVAEQLRESFAVDADYEYISKDHKPDCQNGSSRSTKVSSPDVITKPDHDESAEVVDSKSEEAQITDSEQATYASANNDLKGTKAYQEADVSGLYNLAMAIIDYRGHRVVAQSIIPGILQGDKSDSLLYGSVDNGKKISWNETFHSKVVEAAKRLHLKEHVVLDGSGNPVKLAATVECKGIVGSDDRHYILDLMRVTPRDSNYIGQGHRFCVLRPELIASFVEAESMKQSLKQKVPDAPVASTSDAKATSVEADDKSEESSVHTHKENDNSSSEILFNPNVFTEYKLDGSPEEIAADEELVKRAGTYLIDIVIPKIVQDLCSLDISPMDGQTLTDALHLHGINIRYLGKIAGMVKHLPHLQDLFSAEIIVRSAKHVIKDILRQSLDHDIGPAIAHFLNCFMGKVLGASTEGSLSDMQSKTLKGHENSQTQKSTKGHKLSNAAASRKSLSAYSHLTSDGIWFSIKEFAKSKYQFEVPDDARLSAKRVAVLRNLCQKVGITIAARKYDLDASTPFEASDILNLQPVVKHSVPTCTEAKNLMEAGKVRMAEGTLNEAYALFSEAFSLLQQITGPMHKDAANCCRYLAMVLYHAGDTAGAVVQQHRELIINERCLGLDHPDTAHSYGNMALFYHGLNQTELALRHMSRTLLLLSLASGPDHPDVAATLINVAMMYQDASNMNTALRYLQEALMKNERLLGPVHVQTAVCYHALAIAFSCMSLYKLSIQGKMTHGLKTQKIG

SEQ ID NO: 178676 - protein, 587 aa, Zea Mays
MVKHLPHLQDLFSAEIIVRSAKHVIKDILRQSLDHDIGPAIAHFLNCFMGKVLGASTEGSLSDMQSKTLKGHENSQTQKSTKGHKLSNAAASRKSLSAYSHLTSDGIWFSIKEFAKSKYQFEVPDDARLSAKRVAVLRNLCQKVGITIAARKYDLDASTPFEASDILNLQPVVKHSVPTCTEAKNLMEAGKVRMAEGTLNEAYALFSEAFSLLQQITGPMHKDAANCCRYLAMVLYHAGDTAGAVVQQHRELIINERCLGLDHPDTAHSYGNMALFYHGLNQTELALRHMSRTLLLLSLASGPDHPDVAATLINVAMMYQDASNMNTALRYLQEALMKNERLLGPVHVQTAVCYHALAIAFSCMSLYKLSIQHEKKTYDILVKQLGENDSRTEDSKNWLNTFKLREEQVNAQKQKGQEANASDNAVKFLKANPAVLQAMKAAAIQSGGVSANVNRSLNAAVVGEGVPRLRGVDERAARATAEARKKAAARGLNVRNGPVANHASDELAQILKLINAVSGSSTPGSAKTEVSASEGQATNGCIQNGTDTEPKAADTNGLSASVKSTVNAPFGLGTTLESKKQKSKQKS

SEQ ID NO: 178677 - protein, 966 aa, Zea Mays
MEQPQCNAPLQAVGQEKPRERRKRRYRRCVAEQLRESFAVDADYEYISKDHKPDCQNGSSRSTKVSSPDVITKPDHDESAEVVDSKSEEAQITDSEQATYASANNDLKGTKAYQEADVSGLYNLAMAIIDYRGHRVVAQSIIPGILQGDKSDSLLYGSVDNGKKISWNETFHSKVVEAAKRLHLKEHVVLDGSGNPVKLAATVECKGIVGSDDRHYILDLMRVTPRDSNYIGQGHRFCVLRPELIASFVEAESMKQSLKQKVPDAPVASTSDAKATSVEADDKSEESSVHTHKENDNSSSEILFNPNVFTEYKLDGSPEEIAADEELVKRAGTYLIDIVIPKIVQDLCSLDISPMDGQTLTDALHLHGINIRYLGKIAGMVKHLPHLQDLFSAEIIVRSAKHVIKDILRQSLDHDIGPAIAHFLNCFMGKVLGASTEGSLSDMQSKTLKGHENSQTQKSTKGHKLSNAAASRKSLSAYSHLTSDGIWFSIKEFAKSKYQFEVPDDARLSAKRVAVLRNLCQKVGITIAARKYDLDASTPFEASDILNLQPVVKHSVPTCTEAKNLMEAGKVRMAEGTLNEAYALFSEAFSLLQQITGPMHKDAANCCRYLAMVLYHAGDTAGAVVQQHRELIINERCLGLDHPDTAHSYGNMALFYHGLNQTELALRHMSRTLLLLSLASGPDHPDVAATLINVAMMYQDASNMNTALRYLQEALMKNERLLGPVHVQTAVCYHALAIAFSCMSLYKLSIQHEKKTYDILVKQLGENDSRTEDSKNWLNTFKLREEQVNAQKQKGQEANASDNAVKFLKANPAVLQAMKAAAIQSGGVSANVNRSLNAAVVGEGVPRLRGVDERAARATAEARKKAAARGLNVRNGPVANHASDELAQILKLINAVSGSSTPGSAKTEVSASEGQATNGCIQNGTDTEPKAADTNGLSASVKSTVNAPFGLGTTLESKKQKSKQKS

SEQ ID NO: 178678 - protein, 1350 aa, Zea Mays
MAGKTKGGKNKGKAQGAGQSASAEPEVPATDGAEVVNPENGEVNEPPVTEDGVKNVEKGDGDALEVVQPARKPAEGELHLYAVPVRTQSGEKLELQLSPGDSVIDVKQFLLDAPETCFYTCYNLILHTEDGSAHQLEDYNEISEIADITSSGCSLEMVAAIYDERSIRSHLRRVRELLSLSSLYVSLSTSLALHQESAQGKSAGPEKGPIQELDGLNFMEDSAGALTNLLASAPAEIKCVGSIVFSSFNPPPSYRSSKGSIFDSKPTKQGLEASTLIGLLQKISTKFKKGFRELLDRRASAHPFENVQSLLPVTSWLGAFPVPEHRRDEARAEDSVVLSYGTELIGMQRDWNEELQSCQEFPHGNPQERILRGRARYKVTCDFVDAAVKGAVGVINRCIPPINPTDPECFHMYVHNNIFFSFAVDADYEYISKDHKPDCQNGSSRSTKVSSPDVITKPDHDESAEVVDSKSEEAQITDSEQATYASANNDLKGTKAYQEADVSGLYNLAMAIIDYRGHRVVAQSIIPGILQGDKSDSLLYGSVDNGKKISWNETFHSKVVEAAKRLHLKEHVVLDGSGNPVKLAATVECKGIVGSDDRHYILDLMRVTPRDSNYIGQGHRFCVLRPELIASFVEAESMKQSLKQKVPDAPVASTSDAKATSVEADDKSEESSVHTHKENDNSSSEILFNPNVFTEYKLDGSPEEIAADEELVKRAGTYLIDIVIPKIVQDLCSLDISPMDGQTLTDALHLHGINIRYLGKIAGMVKHLPHLQDLFSAEIIVRSAKHVIKDILRQSLDHDIGPAIAHFLNCFMGKVLGASTEGSLSDMQSKTLKGHENSQTQKSTKGHKLSNAAASRKSLSAYSHLTSDGIWFSIKEFAKSKYQFEVPDDARLSAKRVAVLRNLCQKVGITIAARKYDLDASTPFEASDILNLQPVVKHSVPTCTEAKNLMEAGKVRMAEGTLNEAYALFSEAFSLLQQITGPMHKDAANCCRYLAMVLYHAGDTAGAVVQQHRELIINERCLGLDHPDTAHSYGNMALFYHGLNQTELALRHMSRTLLLLSLASGPDHPDVAATLINVAMMYQDASNMNTALRYLQEALMKNERLLGPVHVQTAVCYHALAIAFSCMSLYKLSIQHEKKTYDILVKQLGENDSRTEDSKNWLNTFKLREEQVNAQKQKGQEANASDNAVKFLKANPAVLQAMKAAAIQSGGVSANVNRSLNAAVVGEGVPRLRGVDERAARATAEARKKAAARGLNVRNGPVANHASDELAQILKLINAVSGSSTPGSAKTEVSASEGQATNGCIQNGTDTEPKAADTNGLSASVKSTVNAPFGLGTTLESKKQKSKQKS

SEQ ID NO: 178679 - protein, 1381 aa, Zea Mays
MAGKTKGGKNKGKAQGAGQSASAEPEVPATDGAEVVNPENGEVNEPPVTEDGVKNVEKGDGDALEVVQPARKPAEGELHLYAVPVRTQSGEKLELQLSPGDSVIDVKQFLLDAPETCFYTCYNLILHTEDGSAHQLEDYNEISEIADITSSGCSLEMVAAIYDERSIRSHLRRVRELLSLSSLYVSLSTSLALHQESAQGKSAGPEKGPIQELDGLNFMEDSAGALTNLLASAPAEIKCVGSIVFSSFNPPPSYRRLHGDLIYIDVTTLEGNKYCITGSSKFFYVNSSKGSIFDSKPTKQGLEASTLIGLLQKISTKFKKGFRELLDRRASAHPFENVQSLLPVTSWLGAFPVPEHRRDEARAEDSVVLSYGTELIGMQRDWNEELQSCQEFPHGNPQERILRGRARYKVTCDFVDAAVKGAVGVINRCIPPINPTDPECFHMYVHNNIFFSFAVDADYEYISKDHKPDCQNGSSRSTKVSSPDVITKPDHDESAEVVDSKSEEAQITDSEQATYASANNDLKGTKAYQEADVSGLYNLAMAIIDYRGHRVVAQSIIPGILQGDKSDSLLYGSVDNGKKISWNETFHSKVVEAAKRLHLKEHVVLDGSGNPVKLAATVECKGIVGSDDRHYILDLMRVTPRDSNYIGQGHRFCVLRPELIASFVEAESMKQSLKQKVPDAPVASTSDAKATSVEADDKSEESSVHTHKENDNSSSEILFNPNVFTEYKLDGSPEEIAADEELVKRAGTYLIDIVIPKIVQDLCSLDISPMDGQTLTDALHLHGINIRYLGKIAGMVKHLPHLQDLFSAEIIVRSAKHVIKDILRQSLDHDIGPAIAHFLNCFMGKVLGASTEGSLSDMQSKTLKGHENSQTQKSTKGHKLSNAAASRKSLSAYSHLTSDGIWFSIKEFAKSKYQFEVPDDARLSAKRVAVLRNLCQKVGITIAARKYDLDASTPFEASDILNLQPVVKHSVPTCTEAKNLMEAGKVRMAEGTLNEAYALFSEAFSLLQQITGPMHKDAANCCRYLAMVLYHAGDTAGAVVQQHRELIINERCLGLDHPDTAHSYGNMALFYHGLNQTELALRHMSRTLLLLSLASGPDHPDVAATLINVAMMYQDASNMNTALRYLQEALMKNERLLGPVHVQTAVCYHALAIAFSCMSLYKLSIQHEKKTYDILVKQLGENDSRTEDSKNWLNTFKLREEQVNAQKQKGQEANASDNAVKFLKANPAVLQAMKAAAIQSGGVSANVNRSLNAAVVGEGVPRLRGVDERAARATAEARKKAAARGLNVRNGPVANHASDELAQILKLINAVSGSSTPGSAKTEVSASEGQATNGCIQNGTDTEPKAADTNGLSASVKSTVNAPFGLGTTLESKKQKSKQKS

SEQ ID NO: 178680 - protein, 431 aa, Zea Mays
MEQPQCNAPLQAVGQEKPRERRKRRYRRCVAEQLRESFAVDADYEYISKDHKPDCQNGSSRSTKVSSPDVITKPDHDESAEVVDSKSEEAQITDSEQATYASANNDLKGTKAYQEADVSGLYNLAMAIIDYRGHRVVAQHLFVYYYAKLSQMSIIPGILQGDKSDSLLYGSVDNGKKISWNETFHSKVVEAAKRLHLKEHVVLDGSGNPVKLAATVECKGIVGSDDRHYILDLMRVTPRDSNYIGQGHRFCVLRPELIASFVEAESMKQSLKQKVPDAPVASTSDAKATSVEADDKSEESSVHTHKENDNSSSEILFNPNVFTEYKLDGSPEEIAADEELVKRAGTYLIDIVIPKIVQDLCSLDISPMDGQTLTDALHLHGINIRYLGKVSLYVDQLKLTLHFICFVHYMILVSDCRHGQTFTTLTGLVFC

SEQ ID NO: 178681 - protein, 413 aa, Zea Mays
MAGKTKGGKNKGKAQGAGQSASAEPEVPATDGAEVVNPENGEVNEPPVTEDGVKNVEKGDGDALEVVQPARKPAEGELHLYAVPVRTQSDGSAHQLEDYNEISEIADITSSGCSLEMVAAIYDERSIRSHLRRVRELLSLSSLYVSLSTSLALHQESAQGKSAGPEKGPIQELDGLNFMEDSAGALTNLLASAPAEIKCVGSIVFSSFNPPPSYRRLHGDLIYIDVTTLEGNKYCITGSSKFFYVNSSKGSIFDSKPTKQGLEASTLIGLLQKISTKFKKGFRELLDRRASAHPFENVQSLLPVTSWLGAFPVPEHRRDEARAEDSVVLSYGTELIGMQRDWNEELQSCQEFPHGNPQERILRGRARYKVTCDFVDAAVKGAVGVINRCIPPINPTDPECFHIVNNVNRFYVA

SEQ ID NO: 178682 - protein, 160 aa, Zea Mays
MTDVAAVAQRAPCAWCCSSGDHAVTEAKVVDVDHSCDDAADGCLWCRRLMATTRRIGSCGVEGYPVAAPLQVGPPWRPIVADWASRSTHSRSRATPGPPQARKRAAVVAQPPQCRTQPPPPPWVCPVAAHRPHRPRPGRLRPRPGRPRSRLGCLCPGSPR

SEQ ID NO: 178683 - protein, 161 aa, Zea Mays
MYLSELLAERHKLTPFIPVIPHSVRLLNQEIFRVSTLLENASLLNQSGLEHGSPLTTGGLYSNGAATDMNGWPSAFQSESSPAYSWLGGSQGSSSGLIVKKTMKVDIPVDKYPTYNFVGRILGPRGNSLKRVEANTDCRVLIRGRGSIKDPARVNIQISAS

SEQ ID NO: 178684 - protein, 276 aa, Zea Mays
MSSGRYMAYSPSPSTTPHSPRIHGLRTPSAAVAEQEKYLSELLAERHKLTPFIPVIPHSVRLLNQEIFRVSTLLENASLLNQSGLEHGSPLTTGGLYSNGAATDMNGWPSAFQSESSPAYSWLGGSQGSSSGLIVKKTMKYNFVGRILGPRGNSLKRVEANTDCRVLIRGRGSIKDPAREEMMRGKPGYEHLNEPLHILVEAELPVDIIDARLMQAREILQDLLKPVDESQDFFKKQQLRELAMLNGTLREEGMQRFGSASPFHNSLGMKRAKTRG

SEQ ID NO: 178685 - protein, 127 aa, Zea Mays
MSQSHLACSAQLLYIRFGIPSPPRSSGLVTLSHATRQCPPFTSFLPFHKKPRRILSIALITHLGTFMAMKRYTGIAESTNRTKAALPARFSSGAFQPGSRLAIHCKRSLLPNFLSETASWEEIHHIL

SEQ ID NO: 178686 - protein, 95 aa, Zea Mays
MAYAFLVVSPPDMSQCFEEMAAAASNKTSSKPGLNYPDLEEQALQFILDCCESNIEKYTKYLEVTSFPCHLLRTTTSHKILTICYPIIIIIVIII

SEQ ID NO: 178687 - protein, 211 aa, Zea Mays
MATSSTTALHSQFRPPLRAPRHLRPLPHSYSSSSRTRGCAPVRASAASASAPAQREIAAGVPWGCEIESLESAASLERWLIDSGLPEQRLAIQRVDIGERGLVALKNIRKGEKLLFVPPSLVITADSEWGRPEVGDVMKRNSVPDWPLIATYLISEASLEGSSRWISYIAALPRQPYSLLYCLHVLLQDSCRARCILSGLTNQETCNSEDN

SEQ ID NO: 178688 - protein, 107 aa, Zea Mays
MEVKVPVGCLLIQSGKQLEWLTGGDCLAGMHEVVVTKRTLEAIALAKEQNRSLWRVSSTLFAHIASDAILKPLGHFAETPDAHSYPPICAGDYVEQELSVINLKGKD

SEQ ID NO: 178689 - protein, 253 aa, Zea Mays
MQEKIRSMPKDFRPATPKGPDPKWRYMWRVGPRPTNTRFKELNSEPVIPEGLPEWEEMMDSWGSKMISAIEVVAEMAAIGFGLSKDAFTSLMKEGPHLLAPTGSDLQRHGSEGTVFAGFHYDLNFLTIHGRSRFPGLNIWLRNGKKMEVKVPVGCLLIQSGKQLEWLTGGDCLAGMHEVVVTKRTLEAIALAKEQNRSLWRVSSTLFAHIASDAILKPLGHFAETPDAHSYPPICAGDYVEQELSVINLKGKD

SEQ ID NO: 178690 - protein, 94 aa, Zea Mays
MDVVVRNVSLRGLIEVEERASYRPHPDRPDDWTQFRQETTIRCRPLAALAAVAEKVETRCAERFLQNSAKGREVVERICRYLEAESAGAAPSVT

SEQ ID NO: 178691 - protein, 58 aa, Zea Mays
MGTTSALHPSHFALSAWTSCPFPSPMEKPPPSSSATSLRALLTMSGTASFVLALPGTC

SEQ ID NO: 178692 - protein, 408 aa, Zea Mays
MQEFQSIPGLAGRLFGGAAAAGLRRAQGQCGGGGASAAAAVKCPRCESTNTKFCYYNNYNLSQPRHFCKGCRRYWTKGGTLRHVLSLHVLVDYYDDAKLHRLPGGSADVSTLFQASGDAPGSAGMVRVAERRGGRVAFAPEDDAGSAAAAVFYVGPVHEAPYNISVLWVSGVISSPAAEAPAAAADRPPSRRNVSDVMSENGCGRFAGLVAATGDAAATFERQADGGGGLTLFCPADRAVEAFQPTLNSLSADARLAVVLYHGAPGHHSMQALRAGDQDLRTAASLDGGRSHLALAVRNVRGRVTLLASATRDVARVTRTLADEEAVAVYMIDAVLVPGNLTAQGTAGGTEHGELTSGSGGEEDGGGGGVRQSSGSRALAPAPCWLPRGWFAAWALLLALLAAFAASG

SEQ ID NO: 178693 - protein, 241 aa, Zea Mays
MWREIRLLANSKPVVASMSDVAASGGYYMAMAAPVIVAEKLTLTGSIGVVTGKFCLQKLYERIDFNKEIISKGRYAELNVNDQRPLRPDEAELFEKSAQNAYALFRDKAAMSRSMSVDQMESVAQGRVWSGHDAFSRGLVDSVGGLSQALAIAKQKANIPKDKKIQLVEVSKPSPSLPEILSGIGGSLLGVDRAVKGVLQDMTSLSGVQARMDGILFESLGDMSGENQLLLLVKDIMNYFD

SEQ ID NO: 178694 - protein, 342 aa, Zea Mays
MTLLKERVGQKDKKSLRMVDYSKYSRVSKKTLGLQGGGEQIAIIRASGSITRTRSPLSAPSSGIVAEQLIEKIRTVRESEKYKAVILRIDSPGGDALASDLMWREIRLLANSKPVVASMSDVAASGGYYMAMAAPVIVAEKLTLTGSIGVVTGKFCLQKLYERIDFNKEIISKGRYAELNVNDQRPLRPDEAELFEKSAQNAYALFRDKAAMSRSMSVDQMESVAQGRVWSGHDAFSRGLVDSVGGLSQALAIAKQKANIPKDKKIQLVEVSKPSPSLPEILSGIGGSLLGVDRAVKGVLQDMTSLSGVQARMDGILFESLGDMSGENQLLLLVKDIMNYFD

SEQ ID NO: 178695 - protein, 492 aa, Zea Mays
MRSEGTLWISRSKFVVGYMPVCGEKEYYLACACGELYAPPSAYVALFGLTVQQTFLRGVLEKVGIEPEIQRIGKYKSAGDQLARKSMSNEVREMLAALLDNIYGNWLETISSTHGKKKEEIEGFINSGVYQVARLKEEGWVTDLLYDDEVMTLLKERVGQKDKKSLRMVDYSKYSRVSKKTLGLQGGGEQIAIIRASGSITRTRSPLSAPSSGIVAEQLIEKIRTVRESEKYKAVILRIDSPGGDALASDLMWREIRLLANSKPVVASMSDVAASGGYYMAMAAPVIVAEKLTLTGSIGVVTGKFCLQKLYERIDFNKEIISKGRYAELNVNDQRPLRPDEAELFEKSAQNAYALFRDKAAMSRSMSVDQMESVAQGRVWSGHDAFSRGLVDSVGGLSQALAIAKQKANIPKDKKIQLVEVSKPSPSLPEILSGIGGSLLGVDRAVKGVLQDMTSLSGVQARMDGILFESLGDMSGENQLLLLVKDIMNYFD

SEQ ID NO: 178696 - protein, 930 aa, Zea Mays
MARLLVLRTAPYRHSAHLCAATLLVLPPSQHRHFASFTSPAPFAARRILPSPLRLPIRAVESSPGPTKEDQEPSPAASEAQEQLAPAVPAFEVEELGWGTQLAVKLRMLVAPPWQRVRKGSVLNMKLRGEISDQLKTRFSSGLSLPQICENFVKAAYDPRISGIYLHIEPLRCGWAKVDEIRRHIVDFKKSGKFVVGYMPVCGEKEYYLACACGELYAPPSAYVALFGLTVQQTFLRGVLEKVGIEPEIQRIGKYKSAGDQLARKSMSNEVREMLAALLDNIYGNWLETISSTHGKKKEEIEGFINSGVYQVARLKEEGWVTDLLYDDEMPATQEDEAAKVPAFEGRQVHEGESSVCWGDGNVSGSPKEIHPGLESAFIGEPGEKHTMGECGRTSMIFQHFEEEVRVQGAILFSKNTLPAIWRIIGRPLKESLQQPGSVELVSLNFGWRKISAFLKVVEQCDEEDKVEVSKREPRTLNRGVEVREFNEEGRGEVVVMTLLKERVGQKDKKSLRMVDYSYLRDDDESRAAAELRCPLSQWRRGRVNPMTPVAHRIVACEVGAVGYWVFFAWAEEVKNTREFRFVLGKERGVGTVSPPLDSAPAHSEDSLYSKYSRVSKKTLGLQGGGEQIAIIRASGSITRTRSPLSAPSSGIVAEQLIEKIRTVRESEKYKAVILRIDSPGGDALASDLMWREIRLLANSKPVVASMSDVAASGGYYMAMAAPVIVAEKLTLTGSIGVVTGKFCLQKLYERIDFNKEIISKGRYAELNVNDQRPLRPDEAELFEKSAQNAYALFRDKAAMSRSMSVDQMESVAQGRVWSGHDAFSRGLVDSVGGLSQALAIAKQKANIPKDKKIQLVEVSKPSPSLPEILSGIGGSLLGVDRAVKGVLQDMTSLSGVQARMDGILFESLGDMSGENQLLLLVKDIMNYFD

SEQ ID NO: 178697 - protein, 435 aa, Zea Mays
MARLLVLRTAPYRHSAHLCAATLLVLPPSQHRHFASFTSPAPFAARRILPSPLRLPIRAVESSPGPTKEDQEPSPAASEAQEQLAPAVPAFEVEELGWGTQLAVKLRMLVAPPWQRVRKGSVLNMKLRGEISDQLKTRFSSGLSLPQICENFVKAAYDPRISGIYLHIEPLRCGWAKVDEIRRHIVDFKKSGKFVVGYMPVCGEKEYYLACACGELYAPPSAYVALFGLTVQQTFLRGVLEKVGIEPEIQRIGKYKSAGDQLARKSMSNEVREMLAALLDNIYGNWLETISSTHGKKKEEIEGFINSGVYQVARLKEEGWVTDLLYDDEVMTLLKERVGQKDKKSLRMVDYSKYSRVSKKTLGLQGGGEQIAIIRASGSITRTRSPLSAPSSGIVAEQLIEKIRTVRESEKYKAVILRIDSPGGDALASDLCFDV

SEQ ID NO: 178698 - protein, 838 aa, Zea Mays
MARLLVLRTAPYRHSAHLCAATLLVLPPSQHRHFASFTSPAPFAARRILPSPLRLPIRAVESSPGPTKEDQEPSPAASEAQEQLAPAVPAFEVEELGWGTQLAVKLRMLVAPPWQRVRKGSVLNMKLRGEISDQLKTRFSSGLSLPQICENFVKAAYDPRISGIYLHIEPLRCGWAKVDEIRRHIVDFKKSGKFVVGYMPVCGEKEYYLACACGELYAPPSAYVALFGLTVQQTFLRGVLEKVGIEPEIQRIGKYKSAGDQLARKSMSNEVREMLAALLDNIYGNWLETISSTHGKKKEEIEGFINSGVYQVARLKEEGWVTDLLYDDEMPATQEDEAAKVPAFEGRQVHEGESSVCWGDGNVSGSPKEIHPGLESAFIGEPGEKHTMGECGRTSMIFQHFEEEVRVQGAILFSKNTLPAIWRIIGRPLKESLQQPGSVELVSLNFGWRKISAFLKVVEQCDEEDKVEVSKREPRTLNRGVEVREFNEEGRGEVVVMTLLKERVGQKDKKSLRMVDYSKYSRVSKKTLGLQGGGEQIAIIRASGSITRTRSPLSAPSSGIVAEQLIEKIRTVRESEKYKAVILRIDSPGGDALASDLMWREIRLLANSKPVVASMSDVAASGGYYMAMAAPVIVAEKLTLTGSIGVVTGKFCLQKLYERIDFNKEIISKGRYAELNVNDQRPLRPDEAELFEKSAQNAYALFRDKAAMSRSMSVDQMESVAQGRVWSGHDAFSRGLVDSVGGLSQALAIAKQKANIPKDKKIQLVEVSKPSPSLPEILSGIGGSLLGVDRAVKGVLQDMTSLSGVQARMDGILFESLGDMSGENQLLLLVKDIMNYFD

SEQ ID NO: 178699 - protein, 354 aa, Zea Mays
MARLLVLRTAPYRHSAHLCAATLLVLPPSQHRHFASFTSPAPFAARRILPSPLRLPIRAVESSPGPTKEDQEPSPAASEAQEQLAPAVPAFEVEELGWGTQLAVKLRMLVAPPWQRVRKGSVLNMKLRGEISDQLKTRFSSGLSLPQICENFVKAAYDPRISGIYLHIEPLRCGWAKVDEIRRHIVDFKKSGKFVVGYMPVCGEKEYYLACACGELYAPPSAYVALFGLTVQQTFLRGVLEKVGIEPEIQRIGKYKSAGDQLARKSMSNEVREMLAALLDNIYGNWLETISSTHGKKKEEIEGFINSGVYQVARLKEEGWVTDLLYDDEVMTLLKERVGQKDKKSLRMVDYRSS

SEQ ID NO: 178700 - protein, 353 aa, Zea Mays
MARLLVLRTAPYRHSAHLCAATLLVLPPSQHRHFASFTSPAPFAARRILPSPLRLPIRAVESSPGPTKEDQEPSPAASEAQEQLAPAVPAFEVEELGWGTQLAVKLRMLVAPPWQRVRKGSVLNMKLRGEISDQLKTRFSSGLSLPQICENFVKAAYDPRISGIYLHIEPLRCGWAKVDEIRRHIVDFKKSGKFVVGYMPVCGEKEYYLACACGELYAPPSAYVALFGLTVQQTFLRESEKYKAVILRIDSPGGDALASDLMWREIRLLANSKPVVASMSDVAASGGYYMAMAAPVIVAEKLTLTGSIGVVTGKFCLQKLYERIDFNKEIISKGRYAELNVNDQRPLRRGRAF

SEQ ID NO: 178701 - protein, 669 aa, Zea Mays
MARLLVLRTAPYRHSAHLCAATLLVLPPSQHRHFASFTSPAPFAARRILPSPLRLPIRAVESSPGPTKEDQEPSPAASEAQEQLAPAVPAFEVEELGWGTQLAVKLRMLVAPPWQRVRKGSVLNMKLRGEISDQLKTRFSSGLSLPQICENFVKAAYDPRISGIYLHIEPLRCGWAKVDEIRRHIVDFKKSGKFVVGYMPVCGEKEYYLACACGELYAPPSAYVALFGLTVQQTFLRGVLEKVGIEPEIQRIGKYKSAGDQLARKSMSNEVREMLAALLDNIYGNWLETISSTHGKKKEEIEGFINSGVYQVARLKEEGWVTDLLYDDEVMTLLKERVGQKDKKSLRMVDYSKYSRVSKKTLGLQGGGEQIAIIRASGSITRTRSPLSAPSSGIVAEQLIEKIRTVRESEKYKAVILRIDSPGGDALASDLMWREIRLLANSKPVVASMSDVAASGGYYMAMAAPVIVAEKLTLTGSIGVVTGKFCLQKLYERIDFNKEIISKGRYAELNVNDQRPLRPDEAELFEKSAQNAYALFRDKAAMSRSMSMESVAQGRVWSGHDAFSRGLVDSVGGLSQALAIAKQKANIPKDKKIQLVEVSKPSPSLPEILSGIGGSLLGVDRAVKGVLQDMTSLSGVQARMDGILFESLGDMSGENQLLLLVKDIMNYFD

SEQ ID NO: 178702 - protein, 393 aa, Zea Mays
MAPVPVSVSATLAPPPAAPPKATSRSWERRAPADAAFAAASSVAISAALLTLTPAAPAAALSKEDVAGSLTKAVDTVSQAIDVGGKAAEQVAAVLKALGEAVKPALPVLKSASDEALKLAAPVVSAASKQATEALQGAGVDPAPVLSVAKTAAEQSTKVIDAAKPVASAAVETITSLGPEDYVVAAGAAFLAYLLVPPVWSLVSSSLRGYKGDLTPAQALDKVTTQGYVLIDVRSDKDKAKAGLPQLPSNAKNKLVSVPLEDLPSKLKGMVRNAKKAEAEIAALKISYLKKIGKGSNVIIMDSDVAKTVAKTLDSVGFKNCWVMAGGFSGRKGWAQSRLGTDSYNLSVVEVVTPSRVIPAVAGRRTGTTAARIGTASSASRATTRKLLPGGVD

SEQ ID NO: 178703 - protein, 803 aa, Zea Mays
MASPSSSPPPKLPIPGRRNILITSALPYVNNVPHLGNIIGCVLSADVFARYCRLRGYNALYICGTDEYGTATETKAMEEECSPKEICDKYHAIHSEVYKWFDIEFDKFGRTSSPQQTTICQAIFHKLMENNWLSENTMQQVSALQLYCDTCQRFLADRLVEGACPTEGCTNKAARGDQCDNCSHMLNPTELIDPKCKVCKNTPHIRETDHLFLDLPRIEDKLVNYINDTSVAGMWSQNAIQATNAWLKEGLKSRCITRDLKWGVPVPIEKYKDKVFYVWFDAPIGYVSITSSYTPEWERWWKNPDNVELFQFMGKDNVPFHTIMFPSTLLGTGENWTMMKTICVTEYLNYEGGKFSKSKGIGVFGNDAKDTNIPPEVWRYYLLMNRPEASDTLFTWTDLQAKLNSELLNNLGNFINRVLSFIAKPAGAGYDSIIPDAPGAESHPSTSVIAEKVSKSVEQYLDAMEKVKLKQGLKSAMGISTDGNRYLQDSEFWKLYKDNPASCAIVMKTSVGLVYLLACLLEPFMPSFSKEVLRQLNLSPEENISFSEENGESVKAKPPWDLVPAGHKIGRPVPLFEELVSEYREKYAGSQAERNSKAVADAEATKIANQTQSIALSGGSKKEQKKQSGNSKSKVAEAELSVAKLEIRVGLIRKAEKHPDADSLYVEEIDVGEEAPRTVVSGLVKYIPLEEIQNRKVCVLCNLKPVVMRGIKSDAMVLAASNEDHTRVELVEPPADAAVGERVTFAGHSGETEASLSGKSKVWEKLAADLRSNGDLVACYQDVPFMTSAGVCKVQTIANGEIR

SEQ ID NO: 178704 - protein, 495 aa, Zea Mays
MGKDNVPFHTIMFPSTLLGTGENWTMMKTICVTEYLNYEGGKFSKSKGIGVFGNDAKDTNIPPEVWRYYLLMNRPEASDTLFTWTDLQAKLNSELLNNLGNFINRVLSFIAKPAGAGYDSIIPDAPGAESHPSTSVIAEKVSKSVEQYLDAMEKVKLKQGLKSAMGISTDGNRYLQDSEFWKLYKDNPASCAIVMKTSVGLVYLLACLLEPFMPSFSKEVLRQLNLSPEENISFSEENGESVKAKPPWDLVPAGHKIGRPVPLFEELKDEKVSEYREKYAGSQAERNSKAVADAEATKIANQTQSIALSGGSKKEQKKQSGNSKSKVAEAELSVAKLEIRVGLIRKAEKHPDADSLYVEEIDVGEEAPRTVVSGLVKYIPLEEIQNRKVCVLCNLKPVVMRGIKSDAMVLAASNEDHTRVELVEPPADAAVGERVTFAGHSGETEASLSGKSKVWEKLAADLRSNGDLVACYQDVPFMTSAGVCKVQTIANGEIR

SEQ ID NO: 178705 - protein, 489 aa, Zea Mays
MASPSSSPPPKLPIPGRRNILITSALPYVNNVPHLGNIIGCVLSADVFARYCRLRGYNALYICGTDEYGTATETKAMEEECSPKEICDKYHAIHSEVYKWFDIEFDKFGRTSSPQQTTICQAIFHKLMENNWLSENTMQQLYCDTCQRFLADRLVEGACPTEGCTNKAARGDQCDNCSHMLNPTELIDPKCKVCKNTPHIRETDHLFLDLPRIEDKLVNYINDTSVAGMWSQNAIQATNAWLKEGLKSRCITRDLKWGVPVPIEKYKDKVFYVWFDAPIGYVSITSSYTPEWERWWKNPDNVELFQFMGKDNVPFHTIMFPSTLLGTGENWTMMKTICVTEYLNYEGGKFSKSKGIGVFGNDAKDTNIPPEVWRYYLLMNRPEASDTLFTWTDLQAKLNSELLNNLGNFINRVLSFIAKPAGAGYDSIIPDAPGAESHPSTSVIAEKVSKSVEQYLDAMEKVKLKQGLKSAMGISTDGNRYLQRILETL

SEQ ID NO: 178706 - protein, 574 aa, Zea Mays
MWSQNAIQATNAWLKEGLKSRCITRDLKWGVPVPIEKYKDKVFYVWFDAPIGYVSITSSYTPEWERWWKNPDNVELFQFMGKDNVPFHTIMFPSTLLGTGENWTMMKTICVTEYLNYEGGKFSKSKGIGVFGNDAKDTNIPPEVWRYYLLMNRPEASDTLFTWTDLQAKLNSELLNNLGNFINRVLSFIAKPAGAGYDSIIPDAPGAESHPSTSVIAEKVSKSVEQYLDAMEKVKLKQGLKSAMGISTDGNRYLQDSEFWKLYKDNPASCAIVMKTSVGLVYLLACLLEPFMPSFSKEVLRQLNLSPEENISFSEENGESVKAKPPWDLVPAGHKIGRPVPLFEELKDEKVSEYREKYAGSQAERNSKAVADAEATKIANQTQSIALSGGSKKEQKKQSGNSKSKVAEAELSVAKLEIRVGLIRKAEKHPDADSLYVEEIDVGEEAPRTVVSGLVKYIPLEEIQNRKVCVLCNLKPVVMRGIKSDAMVLAASNEDHTRVELVEPPADAAVGERVTFAGHSGETEASLSGKSKVWEKLAADLRSNGDLVACYQDVPFMTSAGVCKVQTIANGEIR

SEQ ID NO: 178707 - protein, 123 aa, Zea Mays
MKLVNRMKFSMPEESTLGDGLGKGYGLLGQAGSGKLRVSAGQSKLSTKIAKMGEATWLAVDAHTSLQIQNSVIIIKISPYKHLSYPILMHPQESCTPFISITITKKQTRQQCDGLMVVLEWTY

SEQ ID NO: 178708 - protein, 128 aa, Zea Mays
MKLVNRMKFSMPEESTLGDGLGKGYGLLGQAGSGKLRVSAGQSKLSTKIAKMSSDSRGEATWLAVDAHTSLQIQNSVIIIKISPYKHLSYPILMHPQESCTPFISITITKKQTRQQCDGLMVVLEWTY

SEQ ID NO: 178709 - protein, 395 aa, Zea Mays
MAATARTNSTALLPIKGNVFPDGQYYTSIFIGNPPRPYFLDVDTGSDLTWIQCDAPCTNCAKGPHPLYKPAKEKIVPPRDLLCQELQGNQNYCETCKQCDYEIEYADQSSSMGVLARDDMHMIATNGGREKLDFVFGCAYDQQGQLLSSPAKTDGILGLSSAAISFPSQLASHGIIANVFGHCITREQGGGGYMFLGDDYVPRWGVTWTSIRSGPDNLYHTQAHHVKYGDQQLRRPEQAGSTVQVIFDSGSSYTYLPNEIYENLVAAIKYASPGFVQDTSDRTLPLCWKADFPVRYLEDVKQFFEPLNLHFGKKWLFMSKTFTISPEDYLIISDKGNVCLGLLNGTEINHGSTIIVGDVSLRGKLVVYDNQRKQIGWADSDCTKPQSQKGFPFFL

SEQ ID NO: 178710 - protein, 129 aa, Zea Mays
MRKVTKGNVTIKLWDLGGQRRFRTMWERYCRGVSAILYVVDAADRDSVPIAKSELHDLLTKQSLAGIPLLVLGNKIDKSEALSKQALVDQLGLELIKDREVCCYMISCKDSVNIDVVIDWLIKHSRTAK

SEQ ID NO: 178711 - protein, 292 aa, Zea Mays
MLLLYFDQKDVIFNKPWYCSEIHVGSVGHPFRTCRGMSSDQRRGEHDWGSTLVEAVFLPVEAYHLEDRLGNRIPHDQRFTVPRIPALVELCIQAGVDLPEYPTKRRRKPIIKIGRKEFVDANEDDLPEPEPDRFRQPLLEELRYDEIIAPSSPEETVALAEETLEAWEAVRDGALKLMKGYAVRVCGYCPEVHVGPTGHKARNCGAFKHQQRNGQHGWQAAVLDDLIPPRYVWHMPESGEELQRELKTFYGQAPAVVEMCIQGGAKVPEKYKATMRLDIGIPSSLKEAEMVV

SEQ ID NO: 178712 - protein, 452 aa, Zea Mays
MRTSTATCAILPPPTCSSRSLPLRSFIGLRWSAPRFQLLSCGACLPQVRERAGASVAVVNGKPGCSFRLGVPTLNVCQSRQRSVVIRNEHAQNADLPRKYSKREKKPFPIPVLELRRRAKERMKAAQGKPKQPMPPPKNGMLVRRLIPVAYKVYNARILLINNLKRLMKVVPVKGCKYCSEIHVGSVGHPFRTCRGMSSDQRRGEHDWGSTLVEAVFLPVEAYHLEDRLGNRIPHDQRFTVPRIPALVELCIQAGVDLPEYPTKRRRKPIIKIGRKEFVDANEDDLPEPEPDRFRQPLLEELRYDEIIAPSSPEETVALAEETLEAWEAVRDGALKLMKGYAVRVCGYCPEVHVGPTGHKARNCGAFKHQQRNGQHGWQAAVLDDLIPPRYVWHMPESGEELQRELKTFYGQAPAVVEMCIQGGAKVPEKYKATMRLDIGIPSSLKEAEMVV

SEQ ID NO: 178713 - protein, 330 aa, Zea Mays
MKAAQGKPKQPMPPPKNGMLVRRLIPVAYKVYNARILLINNLKRLMKVVPVKGCKYCSEIHVGSVGHPFRTCRGMSSDQRRGEHDWGSTLVEAVFLPVEAYHLEDRLGNRIPHDQRFTVPRIPALVELCIQAGVDLPEYPTKRRRKPIIKIGRKEFVDANEDDLPEPEPDRFRQPLLEELRYDEIIAPSSPEETVALAEETLEAWEAVRDGALKLMKGYAVRVCGYCPEVHVGPTGHKARNCGAFKHQQRNGQHGWQAAVLDDLIPPRYVWHMPESGEELQRELKTFYGQAPAVVEMCIQGGAKVPEKYKATMRLDIGIPSSLKEAEMVV

SEQ ID NO: 178714 - protein, 87 aa, Zea Mays
MQYISTGTLCILRYHNKNKFQPEPSQWKLVGRVFAVHLASCGCVCIGVSMGMHICGGQTLGAARGSRCCGKGSKGTGSKGWSGGRVK

SEQ ID NO: 178715 - protein, 63 aa, Zea Mays
MFVNSCNMIEDKMDYAKTYEMSSTFHYSLLSQLMLFHSHIFKDIRPRINTSKKDYLRTKVQAS

SEQ ID NO: 178716 - protein, 266 aa, Zea Mays
MCDCYTPAGEPIPTNKRYSAAKIFSSLEVAAEEPWYGIEQEYTLLQKDTNWPLGWPIGGFPGPQGPYYCGIGAEKSFGRDIVDAHYKACLYAGINISGINGEVMPGQWEFQVGPSVGISSGDQVWVARYILERITEIAGVVVTFDPKPIPGDWNGAGAHTNYSTESMRKEGGYEVIKAAIEKLKLRHKEHIAAYGEGNERRLTGRHETADINTFSWGVANRGASVRVGRETEQNGKGYFEDRRPASNMDPYVVTSMIAETTIVWKP

SEQ ID NO: 178717 - protein, 300 aa, Zea Mays
MSAGSTASLLAAVICLALAVLAPVVPGDGATLESVPDLVKAMYLNVESFPCVRLLNLSGEIGCSNPGSEKVIAPIVRLRKGSDQLVQPSTILLSLDQMSDFFLRVSNDPELHQKVAGVLVESNGVNNDLQELSPDRKFPQDDFAPYSNHSHDWNPAGSGIMWNKYNFPVFLLSEESTNTLQKISEKNEKTGNGYKANVAEFDLVMQTTKAQTHDSASCLKEQSCLPLGGHSVWTSLPPLNNGSTEHPKPLILAIASQDSASFFRDRSLGSDSPISGLIALLTAVDALSHIHGLSKLKKQV

SEQ ID NO: 178718 - protein, 647 aa, Zea Mays
MSAGSTASLLAAVICLALAVLAPVVPGDGATLESVPDLVKAMYLNVESFPCVRLLNLSGEIGCSNPGSEKVIAPIVRLRKGSDQLVQPSTILLSLDQMSDFFLRVSNDPELHQKVAGVLVESNGVNNDLQELSPDRKFPQDDFAPYSNHSHDWNPAGSGIMWNKYNFPVFLLSEESTNTLQKISEKNEKTGNGYKANVAEFDLVMQTTKAQTHDSASCLKEQSCLPLGGHSVWTSLPPLNNGSTEHPKPLILAIASQDSASFFRDRSLGSDSPISGLIALLTAVDALSHIHGLSKLKKQLVFAVFNGEAWGYLGSRKFLQELDEGAASVNGISSLKIDQNPSASKEILDALQSASKSLGSDNVKVKQAASSNPGVPPSSLMSFIRKNMSTSGVVLEDFDSHFSNRFYHSYLDNSVNINSSSIAAAAALVARSMYILASDDSVVDLITLNTIKVNVSLVEELIGCLLTCNPGLSCGLVKRFISPSNPCPSHYVGVFLDDPSGTQLPSYADDTSRFVWNFLADRTNSAGNKSSCTGKCGDEGEVCVGAEVEGGGRCVVSTTRYVPAYSTRVKFEDNAWHVLPANSSDPMGAADPVWTESFWNTIGLRVYAVQDPAYDWLILLAGLGITAASYCAVHFGRAYISKVAKLD

SEQ ID NO: 178719 - protein, 467 aa, Zea Mays
MQTTKAQTHDSASCLKEQSCLPLGGHSVWTSLPPLNNGSTEHPKPLILAIASQDSASFFRDRSLGSDSPISGLIALLTAVDALSHIHGLSKLKKQLVFAVFNGEAWGYLGSRKFLQELDEGAASVNGISSLKIDQVLEIGSVGKAILEEYPSFYVHAEGNPSASKEILDALQSASKSLGSDNVKVKQAASSNPGVPPSSLMSFIRKNMSTSGVVLEDFDSHFSNRFYHSYLDNSVNINSSSIAAAAALVARSMYILASDDSVVDLITLNTIKVNVSLVEELIGCLLTCNPGLSCGLVKRFISPSNPCPSHYVGVFLDDPSGTQLPSYADDTSRFVWNFLADRTNSAGNKSSCTGKCGDEGEVCVGAEVEGGGRCVVSTTRYVPAYSTRVKFEDNAWHVLPANSSDPMGAADPVWTESFWNTIGLRVYAVQDPAYDWLILLAGLGITAASYCAVHFGRAYISKVAKLD

SEQ ID NO: 178720 - protein, 1092 aa, Zea Mays
MAAGAGAAHLPRAAGPCPPGVRQNPRPGRARLQRAHPRLLLARPLPRRYRPLPLYAPLPRGPQQVHLSLRPQGMLSARGPPCRPHHPRPRRRRGPPYRPVCLHRPDRPLHQDHGGLRPNASTLVSLLPLLAQHGALFQGTSIHAYCLRACLEQNEEQVLIGTALLDMYAKCKQLVYACRVFHGMPVRNDVTWSALIGGFVLCDRMTEAFNLFKDMLVEGLCFLSATSVASALRVCASLADLHMGTQLHALIAKSGIHADLTASNSLLSMYAKAGLINEATMFFDEIAVKDTISYGALLSGCVQNGKAEEAFLVFKKMQACNMEPDIATMVSLIPACSHLAALQHGKCSHGSVIIRGLALETSICNSLIDMYAKCGKIDLSRQVFDKMPARDVVSWNTMIAGYGIHGLGKEATTLFLGMKNQGFAPDDVTFICLIAACSHSGLVTEGKHWFDTMTHKYGILPRMEHYICMVDLLARGGLLDEAYQFIQSMPLKADVRVWGALLGACRIHKNIDLGKQVSRIIQKLGPEGTGNFVLLSNIFSAAGRFDEAAEVRIIQKVKGFKKSPGYSWIEINGSLHAFVGGDQSHPCSRDIYHELDNIMVDIKKLGYQADTSFVLQDLEEEEKEKALLYHSEKLAIAFGVLSLNEDKTIFVTKNLRVCGDCHTAIKYMTLVRNRTIIVRDTNRFHHFKNGQCSCGNFWLSILLLMTIHVAFIASWHESENLDKVSRNKIAKLQGKSQIVQDELARLGEQMVQSAEGTRAVALELCREFEDKFLAHITSGKGSGWKIVASFEGKFPDRIKQLPLDRHFDLNNMKRIVLEADGYQPYLISPEKGLRSLKKGVLEKAKEPSRLCVEEVHRVLLDIVNAAANATPGLGRYPPFKREVIAIASNALDAFKIDAKKMVVALVDMERAFVPPQHFIRLVQRRMERQRREDELKNNRASKKGQDAEQFKMNRASSPQTVSDEGGGNLKSMKDKSNQQDKDTKEGPNLQVTLKRSAKNNEWSKRWFVLNEKSGKLGYTKKQEERHFRGVIVLEECNLVEIEEEEISKSSKDSKKANGQDKGPSLVFKITNRVAYKSVLKTHSAVILKAEYG

SEQ ID NO: 178721 - protein, 160 aa, Zea Mays
MSPSLLLLHSSATPCRGLLPPPSSCFATFSRASSPLRPRHRIRLVCAAEQPNGAASPGSGSGGDATANPTNNGLPKNRRVILLEYVKNVQPEFMELFIKRAPAQVVEAMRQTVTNMMGTLPPQFFAGMHSTVWNCNRVWSRLLFLNQKKKRITLLELRKR

SEQ ID NO: 178722 - protein, 149 aa, Zea Mays
MSPSLLLLHSSATPCRGLLPPPSSCFATFSRASSPLRPRHRIRLVCAAEQPNGAASPGSGSGGDATANPTNNGLPKNRRVILLEYVKNVQPEFMELFIKRAPAQVVEAMRQTVTNMMGTLPPQFFAVTVSTECTVPSGTATEFGADCSS

SEQ ID NO: 178723 - protein, 54 aa, Zea Mays
MIQVSRLVLQVQRRLVETMWMDRMSLLVFRGRLAQIVQRSSRVLWVPRRQVSTA

SEQ ID NO: 178724 - protein, 56 aa, Zea Mays
MRTMQRSSRVLQVQRRLVETMWMDRMSLLVFRGRLAQIVQRSSRVLWVPRRQVSTA

SEQ ID NO: 178725 - protein, 575 aa, Zea Mays
MAGAPTTPRPAQQSVPHQASASVPAQPQGSVPATAKQGVPCYYFQKGMCTKGDRCAFLHAPRSAGNPAPQPPAKVFTTPALQPNLHPPLNNSWTKPNLSAPAVAVVDKPKASTYHDGKPLHHKENLTSRTENPSRVVYQNHSSSYAQPGAPKRYQPQPSARDGLTDNGMEAGEFAREPSAGSCVTAGFNGAGGMTRQTHGGYEPERSYRNSAERSSSEKRIPQREHIPSVAAGSSDLRHRLLKQRKSNNNSRSAEALGRHDTHLEDERNDQHRPRGEQQDGLSRSRLHDRIRLPGETAFDSLGSRSEEWDRGSRARLSPPKSSDLRGRLHERLKGRLGEEIPGSSAKGLAVKASSSEDTESLNFAGPKSLAELKAKKGVGRSGEDAVVKGLGSSRMTSEIVWSREAASFEGPKPLSAILKRKREPASEIPAAQPGITQEADNYAAGAEEEIQTLANDTVGENMEGIGEEEEEEEAFHPEDDVAYDDNANEAAVAQELDEYEDADAAAQDYDDEAAAAQEVEEHQDGEAAAEDYDYEEADVNAEEENEYQDYQDEDDDDLEDGDDDFARKVSVMIS

SEQ ID NO: 178726 - protein, 1721 aa, Zea Mays
MVARHTPLPLLEALLRWRESESPKGAHDASTYQKKLAVECIFSSACIRFAECCPQEGITEKLWIGLESFVFDWLINADRVVSQVEYPSLVDLRGLLLDLVAQLLGALSRIRFSSVTERFFIELNVRRIDSLALRSETLSIINGMRYLKLGVKTEGGLNASVSFIAKANPLNRPPNKRKSELQHALCNMLSSILAPLAEGGKNHWPPLGVEPALSLWYDAVARIRVQLMYWMDKQSKHVAVGFPLVTLLLCLGDANAFNSSFSQHMEILYKYLKDKNHRSMALDCLHRLVKFYLNIYADYQPRNHVWDYLDSVTSQLLTVLKKGLLTQDVQHDKLVEFCVTLAQSNLDFAMNHMILELLKPDSLSEAKVVGLRALLEIVVSPSNQQIGLDVLQVFGIGHYIPKVKSAIESILRSCNKAYSLALLTSSKTTIDNVTKDKSQGSLFRSVLKCIPYLIEEAGRNDKMTEIIPQHGISIDPGVREEAVQVLNRIVRCLPNRRFAVLKGMANFILKLPDEFPLLIQTSLGRLVELMRLWRVCLSEEALAKDMQSGRRLSIGGDALQRSPFHRSRDVSEFRASEMDAVGLVFLSSADVQIRLTALELLRCVRALQNNLRDYSANEWGDNKLKLEPEPIFIIDIIEENGEDIVQSCYWDPGRPYDLRREMDPIPLDVTLQSILESVDKNRWARYLSEIVKYAAELCPSSVQDARHELWSFLERLHAQFTIIGHLINFTAKLHRLEVIRRLEQITPADLGGKAQQPQDSETKLDQWLIYAMFACSCPPDIREEFSIKSAREVFHMIFPSLRHGSEAYALAATSALGHSHLEVCEIMFGDLALFVEEVSSETEGKPKWKQNPRSRREDLRTHVANIHRILAEKVWPGMLSRKPVLCQHFLKFIEETYRQITISLADSFQDLQPLRYALASVLRYLAPEFVDAKAERFDNRIRKKLFDLLLTWSEDSGSSWGQESSSDYRREIERYKSNQHTRSRESFDKLAFDREMAEQLEAINWASMNAIASLLYGPCFDDNARKMSGRVISWINSLFMEPSARAPFGHSPVDPRTPSYSKHTDGRFGGRDKQKTSHLRLLLAKTALKNILQTNLDLFPACIDQGSECEYRHSDAARMNPRDCWYWFHGNCANPKCSFRHPPLDNMAGAPTTPRPAQQSVPHQASASVPAQPQGSVPATAKQGVPCYYFQKGMCTKGDRCAFLHAPRSAGNPAPQPPAKVFTTPALQPNLHPPLNNSWTKPNLSAPAVAVVDKPKASTYHDGKPLHHKENLTSRTENPSRVVYQNHSSSYAQPGAPKRYQPQPSARDGLTDNGMEAGEFAREPSAGSCVTAGFNGAGGMTRQTHGGYEPERSYRNSAERSSSEKRIPQREHIPSVAAGSSDLRHRLLKQRKSNNNSRSAEALGRHDTHLEDERNDQHRPRGEQQDGLSRSRLHDRIRLPGETAFDSLGSRSEEWDRGSRARLSPPKSSDLRGRLHERLKGRLGEEIPGSSAKGLAVKASSSEDTESLNFAGPKSLAELKAKKGVGRSGEDAVVKGLGSSRMTSEIVWSREAASFEGPKPLSAILKRKREPASEIPAAQPGITQEADNYAAGAEEEIQTLANDTVGENMEGIGEEEEEEEAFHPEDDVAYDDNANEAAVAQELDEYEDADAAAQDYDDEAAAAQEVEEHQDGEAAAEDYDYEEADVNAEEENEYQDYQDEDDDDLEDGDDDFARKVSVMIS

SEQ ID NO: 178727 - protein, 2054 aa, Zea Mays
MYGWDKVSGGFSTCVRSSQCNIRGCLIPSRVVSQVEYPSLVDLRGLLLDLVAQLLGALSRIRFSSVTERFFIELNVRRIDSLALRSETLSIINGMRYLKLGVKTEGGLNASVSFIAKANPLNRPPNKRKSELQHALCNMLSSILAPLAEGGKNHWPPLGVEPALSLWYDAVARIRVQLMYWMDKQSKHVAVGFPLVTLLLCLGDANAFNSSFSQHMEILYKYLKDKNHRSMALDCLHRLVKFYLNIYADYQPRNHVWDYLDSVTSQLLTVLKKGLLTQDVQHDKLVEFCVTLAQSNLDFAMNHMILELLKPDSLSEAKVVGLRALLEIVVSPSNQQIGLDVLQVFGIGHYIPKVKSAIESILRSCNKAYSLALLTSSKTTIDNVTKDKSQGSLFRSVLKCIPYLIEEAGRNDKMTEIIPQHGISIDPGVREEAVQVLNRIVRCLPNRRFAVLKGMANFILKLPDEFPLLIQTSLGRLVELMRLWRVCLSEEALAKDMQSGRRLSIGGDALQRSPFHRSRDVSEFRASEMDAVGLVFLSSADVQIRLTALELLRCVRALQNNLRDYSANEWGDNKLKLEPEPIFIIDIIEENGEDIVQSCYWDPGRPYDLRREMDPIPLDVTLQSILESVDKNRWARYLSEIVKYAAELCPSSVQDARLEVIRRLEQITPADLGGKAQQPQDSETKLDQWLIYAMFACSCPPDIREEFSIKSAREVFHMIFPSLRHGSEAYALAATSALGHSHLEVCEIMFGDLALFVEEVSSETEGKPKWKNPRSRREDLRTHVANIHRILAEKVWPGMLSRKPVLCQHFLKFIEETYRQITISLADSFQDLQPLRYALASVLRYLAPEFVDAKAERFDNRIRKKLFDLLLTWSEDSGSSWGQESSSDYRREIERYKSNQHTRSRESFDKLAFDREMAEQLEAINWASMNAIASLLYGPCFDDNARKMSGRVISWINSLFMEPSARAPFGHSPVDPRTPSYSKHTDGRFGGRDKQKTSHLRLLLAKTALKNILQTNLDLFPACIDQCYSPDPQIADGYFSVLAEVYMRQEIPKCEIQRLVSLILYKVVDQTKLIRDSALQMLETLSLREWAEDDTDGVGHYRASVVGNLPDSYQQFQYKLSSKLAKDHPELSEHLCEEIMQRQLDAVDIIAQHQVLTCMAPWIENLNFVRLKESGWSERLLKSLYYVTWKHGDQFPDEIEKLWSTVASNTRNIIPVLNFLITRGIEDCDANPSAEITGAFATYFSVAKRVSLYLARICPQQTIDHLVFELSQRMLEDDEEPVRLGKVDVSANVVLEFSQGPTASQVATVVDSQPHMSPLLVRGSLDGAVRNVSGNLSWRTSAVTGRSVSGPLSPLAHEVSIPNPTAGRSGQLLPALITMSGPLSGVRSSAGNLRSRHVSRDSGDYYFDTPNSTDDILHQGGSGIHGINANELQSALQGHQHLLSRADIALILLAEIAYENDEDFRENLPLLFHVTCVSMDSSEDIVLEHCQDLLVNLLYSLAGRHLELYEIESSERENKHHVVSLIKYIQSKRGSLMWENEDPTLFRIELPSASLLSALVQSMVSAIFFQGDLRETWGSEALKWAMECTSRHLACRSHQIYRALRPSVKSDSCVLLLRCIHRCLGNPVPAVLGFAMEILLTLQVMVENMEPEKVILYPQLFWGCVALMHTDFVHIYCQVLELFCRVIDRLTFRDRTTENVLLSSMPRDEFDINGYASDLHRLESRTTSERLLSVTGTGKVPAFEGVQPLVLKGLMSTVSHGSAIELLSRITIPTCDSIFGSPDTRLLMHITGLLPWLGLQLTREAPPSLGSASPLQEQNQKAYYVSSNISAWCRAKSLDDLAEVFRAYSFGEIMSLEDLFARASPPICAEWFPRHSSLAFGHLLRLLERGPLDYQRVVLLMLKSLLQQTPVDPSQIPQVYNFVSQLVESTLCSEALNVLEALLRSCGGGGQGEEAGFGDNGGHGSGEKVLQSMLLPQSSFKARSGPLQYAAGSGLGSLMGQGGGGSSSAADSGLVARDVALQNTRLLLGRVLDTCALGRKRDHKRLVPFVANVG

SEQ ID NO: 178728 - protein, 1641 aa, Zea Mays
MTEIIPQHGISIDPGVREEAVQVLNRIVRCLPNRRFAVLKGMANFILKLPDEFPLLIQTSLGRLVELMRLWRVCLSEEALAKDMQSGRRLSIGGDALQRSPFHRSRDVSEFRASEMDAVGLVFLSSADVQIRLTALELLRCVRALQNNLRDYSANEWGDNKLKLEPEPIFIIDIIEENGEDIVQSCYWDPGRPYDLRREMDPIPLDVTLQSILESVDKNRWARYLSEIVKYAAELCPSSVQDARLEVIRRLEQITPADLGGKAQQPQDSETKLDQWLIYAMFACSCPPDIREEFSIKSAREVFHMIFPSLRHGSEAYALAATSALGHSHLEVCEIMFGDLALFVEEVSSETEGKPKWKNPRSRREDLRTHVANIHRILAEKVWPGMLSRKPVLCQHFLKFIEETYRQITISLADSFQDLQPLRYALASVLRYLAPEFVDAKAERFDNRIRKKLFDLLLTWSEDSGSSWGQESSSDYRREIERYKSNQHTRSRESFDKLAFDREMAEQLEAINWASMNAIASLLYGPCFDDNARKMSGRVISWINSLFMEPSARAPFGHSPVDPRTPSYSKHTDGRFGGRDKQKTSHLRLLLAKTALKNILQTNLDLFPACIDQCYSPDPQIADGYFSVLAEVYMRQEIPKCEIQRLVSLILYKVVDQTKLIRDSALQMLETLSLREWAEDDTDGVGHYRASVVGNLPDSYQQFQYKLSSKLAKDHPELSEHLCEEIMQRQLDAVDIIAQHQVLTCMAPWIENLNFVRLKESGWSERLLKSLYYVTWKHGDQFPDEIEKLWSTVASNTRNIIPVLNFLITRGIEDCDANPSAEITGAFATYFSVAKRVSLYLARICPQQTIDHLVFELSQRMLEDDEEPVRLGKVDVSANVVLEFSQGPTASQVATVVDSQPHMSPLLVRGSLDGAVRNVSGNLSWRTSAVTGRSVSGPLSPLAHEVSIPNPTAGRSGQLLPALITMSGPLSGVRSSAGNLRSRHVSRDSGDYYFDTPNSTDDILHQGGSGIHGINANELQSALQGHQHLLSRADIALILLAEIAYENDEDFRENLPLLFHVTCVSMDSSEDIVLEHCQDLLVNLLYSLAGRHLELYEIESSERENKHHVVSLIKYIQSKRGSLMWENEDPTLFRIELPSASLLSALVQSMVSAIFFQGDLRETWGSEALKWAMECTSRHLACRSHQIYRALRPSVKSDSCVLLLRCIHRCLGNPVPAVLGFAMEILLTLQVMVENMEPEKVILYPQLFWGCVALMHTDFVHIYCQVLELFCRVIDRLTFRDRTTENVLLSSMPRDEFDINGYASDLHRLESRTTSERLLSVTGTGKVPAFEGVQPLVLKGLMSTVSHGSAIELLSRITIPTCDSIFGSPDTRLLMHITGLLPWLGLQLTREAPPSLGSASPLQEQNQKAYYVSSNISAWCRAKSLDDLAEVFRAYSFGEIMSLEDLFARASPPICAEWFPRHSSLAFGHLLRLLERGPLDYQRVVLLMLKSLLQQTPVDPSQIPQVYNFVSQLVESTLCSEALNVLEALLRSCGGGGQGEEAGFGDNGGHGSGEKVLQSMLLPQSSFKARSGPLQYAAGSGLGSLMGQGGGGSSSAADSGLVARDVALQNTRLLLGRVLDTCALGRKRDHKRLVPFVANVG

SEQ ID NO: 178729 - protein, 2156 aa, Zea Mays
MGAGGAAKQIVDSLLARFLPLARRRIETAQAQDGQYLRPCDPSYEQVLDSLAMVARHTPLPLLEALLRWRESESPKGAHDASTYQKKLAVECIFSSACIRFAECCPQEGITEKLWIGLESFVFDWLINADRVVSQVEYPSLVDLRGLLLDLVAQLLGALSRIRFSSVTERFFIELNVRRIDSLALRSETLSIINGMRYLKLGVKTEGGLNASVSFIAKANPLNRPPNKRKSELQHALCNMLSSILAPLAEGGKNHWPPLGVEPALSLWYDAVARIRVQLMYWMDKQSKHVAVGFPLVTLLLCLGDANAFNSSFSQHMEILYKYLKDKNHRSMALDCLHRLVKFYLNIYADYQPRNHVWDYLDSVTSQLLTVLKKGLLTQDVQHDKLVEFCVTLAQSNLDFAMNHMILELLKPDSLSEAKVVGLRALLEIVVSPSNQQIGLDVLQVFGIGHYIPKVKSAIESILRSCNKAYSLALLTSSKTTIDNVTKDKSQGSLFRSVLKCIPYLIEEAGRNDKMTEIIPQHGISIDPGVREEAVQVLNRIVRCLPNRRFAVLKGMANFILKLPDEFPLLIQTSLGRLVELMRLWRVCLSEEALAKDMQSGRRLSIGGDALQRSPFHRSRDVSEFRASEMDAVGLVFLSSADVQIRLTALELLRCVRALQNNLRDYSANEWGDNKLKLEPEPIFIIDIIEENGEDIVQSCYWDPGRPYDLRREMDPIPLDVTLQSILESVDKNRWARYLSEIVKYAAELCPSSVQDASRLEVIRRLEQITPADLGGKAQQPQDSETKLDQWLIYAMFACSCPPDIREEFSIKSAREVFHMIFPSLRHGSEAYALAATSALGHSHLEVCEIMFGDLALFVEEVSSETEGKPKWKNPRSRREDLRTHVANIHRILAEKVWPGMLSRKPVLCQHFLKFIEETYRQITISLADSFQDLQPLRYALASVLRYLAPEFVDAKAERFDNRIRKKLFDLLLTWSEDSGSSWGQESSSDYRREIERYKSNQHTRSRESFDKLAFDREMAEQLEAINWASMNAIASLLYGPCFDDNARKMSGRVISWINSLFMEPSARAPFGHSPVDPRTPSYSKHTDGRFGGRDKQKTSHLRLLLAKTALKNILQTNLDLFPACIDQCYSPDPQIADGYFSVLAEVYMRQEIPKCEIQRLVSLILYKVVDQTKLIRDSALQMLETLSLREWAEDDTDGVGHYRASVVGNLPDSYQQFQYKLSSKLAKDHPELSEHLCEEIMQRQLDAVDIIAQHQVLTCMAPWIENLNFVRLKESGWSERLLKSLYYVTWKHGDQFPDEIEKLWSTVASNTRNIIPVLNFLITRGIEDCDANPSAEITGAFATYFSVAKRVSLYLARICPQQTIDHLVFELSQRMLEDDEEPVRLGKVDVSANVVLEFSQGPTASQVATVVDSQPHMSPLLVRGSLDGAVRNVSGNLSWRTSAVTGRSVSGPLSPLAHEVSIPNPTAGRSGQLLPALITMSGPLSGVRSSAGNLRSRHVSRDSGDYYFDTPNSTDDILHQGGSGIHGINANELQSALQGHQHLLSRADIALILLAEIAYENDEDFRENLPLLFHVTCVSMDSSEDIVLEHCQDLLVNLLYSLAGRHLELYEIESSERENKHHVVSLIKYIQSKRGSLMWENEDPTLFRIELPSASLLSALVQSMVSAIFFQGDLRETWGSEALKWAMECTSRHLACRSHQIYRALRPSVKSDSCVLLLRCIHRCLGNPVPAVLGFAMEILLTLQVMVENMEPEKVILYPQLFWGCVALMHTDFVHIYCQVLELFCRVIDRLTFRDRTTENVLLSSMPRDEFDINGYASDLHRLESRTTSERLLSVTGTGKVPAFEGVQPLVLKGLMSTVSHGSAIELLSRITIPTCDSIFGSPDTRLLMHITGLLPWLGLQLTREAPPSLGSASPLQEQNQKAYYVSSNISAWCRAKSLDDLAEVFRAYSFGEIMSLEDLFARASPPICAEWFPRHSSLAFGHLLRLLERGPLDYQRVVLLMLKSLLQQTPVDPSQIPQVYNFVSQLVESTLCSEALNVLEALLRSCGGGGQGEEAGFGDNGGHGSGEKVLQSMLLPQSSFKARSGPLQYAAGSGLGSLMGQGGGGSSSAADSGLVARDVALQNTRLLLGRVLDTCALGRKRDHKRLVPFVANVG

SEQ ID NO: 178730 - protein, 1399 aa, Zea Mays
MQLEVIRRLEQITPADLGGKAQQPQDSETKLDQWLIYAMFACSCPPDIREEFSIKSAREVFHMIFPSLRHGSEAYALAATSALGHSHLEVCEIMFGDLALFVEEVSSETEGKPKWKNPRSRREDLRTHVANIHRILAEKVWPGMLSRKPVLCQHFLKFIEETYRQITISLADSFQDLQPLRYALASVLRYLAPEFVDAKAERFDNRIRKKLFDLLLTWSEDSGSSWGQESSSDYRREIERYKSNQHTRSRESFDKLAFDREMAEQLEAINWASMNAIASLLYGPCFDDNARKMSGRVISWINSLFMEPSARAPFGHSPVDPRTPSYSKHTDGRFGGRDKQKTSHLRLLLAKTALKNILQTNLDLFPACIDQCYSPDPQIADGYFSVLAEVYMRQEIPKCEIQRLVSLILYKVVDQTKLIRDSALQMLETLSLREWAEDDTDGVGHYRASVVGNLPDSYQQFQYKLSSKLAKDHPELSEHLCEEIMQRQLDAVDIIAQHQVLTCMAPWIENLNFVRLKESGWSERLLKSLYYVTWKHGDQFPDEIEKLWSTVASNTRNIIPVLNFLITRGIEDCDANPSAEITGAFATYFSVAKRVSLYLARICPQQTIDHLVFELSQRMLEDDEEPVRLGKVDVSANVVLEFSQGPTASQVATVVDSQPHMSPLLVRGSLDGAVRNVSGNLSWRTSAVTGRSVSGPLSPLAHEVSIPNPTAGRSGQLLPALITMSGPLSGVRSSAGNLRSRHVSRDSGDYYFDTPNSTDDILHQGGSGIHGINANELQSALQGHQHLLSRADIALILLAEIAYENDEDFRENLPLLFHVTCVSMDSSEDIVLEHCQDLLVNLLYSLAGRHLELYEIESSERENKHHVVSLIKYIQSKRGSLMWENEDPTLFRIELPSASLLSALVQSMVSAIFFQGDLRETWGSEALKWAMECTSRHLACRSHQIYRALRPSVKSDSCVLLLRCIHRCLGNPVPAVLGFAMEILLTLQVMVENMEPEKVILYPQLFWGCVALMHTDFVHIYCQVLELFCRVIDRLTFRDRTTENVLLSSMPRDEFDINGYASDLHRLESRTTSERLLSVTGTGKVPAFEGVQPLVLKGLMSTVSHGSAIELLSRITIPTCDSIFGSPDTRLLMHITGLLPWLGLQLTREAPPSLGSASPLQEQNQKAYYVSSNISAWCRAKSLDDLAEVFRAYSFGEIMSLEDLFARASPPICAEWFPRHSSLAFGHLLRLLERGPLDYQRVVLLMLKSLLQQTPVDPSQIPQVYNFVSQLVESTLCSEALNVLEALLRSCGGGGQGEEAGFGDNGGHGSGEKVLQSMLLPQSSFKARSGPLQYAAGSGLGSLMGQGGGGSSSAADSGLVARDVALQNTRLLLGRVLDTCALGRKRDHKRLVPFVANVG

SEQ ID NO: 178731 - protein, 1138 aa, Zea Mays
MAEQLEAINWASMNAIASLLYGPCFDDNARKMSGRVISWINSLFMEPSARAPFGHSPVDPRTPSYSKHTDGRFGGRDKQKTSHLRLLLAKTALKNILQTNLDLFPACIDQCYSPDPQIADGYFSVLAEVYMRQEIPKCEIQRLVSLILYKVVDQTKLIRDSALQMLETLSLREWAEDDTDGVGHYRASVVGNLPDSYQQFQYKLSSKLAKDHPELSEHLCEEIMQRQLDAVDIIAQHQVLTCMAPWIENLNFVRLKESGWSERLLKSLYYVTWKHGDQFPDEIEKLWSTVASNTRNIIPVLNFLITRGIEDCDANPSAEITGAFATYFSVAKRVSLYLARICPQQTIDHLVFELSQRMLEDDEEPVRLGKVDVSANVVLEFSQGPTASQVATVVDSQPHMSPLLVRGSLDGAVRNVSGNLSWRTSAVTGRSVSGPLSPLAHEVSIPNPTAGRSGQLLPALITMSGPLSGVRSSAGNLRSRHVSRDSGDYYFDTPNSTDDILHQGGSGIHGINANELQSALQGHQHLLSRADIALILLAEIAYENDEDFRENLPLLFHVTCVSMDSSEDIVLEHCQDLLVNLLYSLAGRHLELYEIESSERENKHHVVSLIKYIQSKRGSLMWENEDPTLFRIELPSASLLSALVQSMVSAIFFQGDLRETWGSEALKWAMECTSRHLACRSHQIYRALRPSVKSDSCVLLLRCIHRCLGNPVPAVLGFAMEILLTLQVMVENMEPEKVILYPQLFWGCVALMHTDFVHIYCQVLELFCRVIDRLTFRDRTTENVLLSSMPRDEFDINGYASDLHRLESRTTSERLLSVTGTGKVPAFEGVQPLVLKGLMSTVSHGSAIELLSRITIPTCDSIFGSPDTRLLMHITGLLPWLGLQLTREAPPSLGSASPLQEQNQKAYYVSSNISAWCRAKSLDDLAEVFRAYSFGEIMSLEDLFARASPPICAEWFPRHSSLAFGHLLRLLERGPLDYQRVVLLMLKSLLQQTPVDPSQIPQVYNFVSQLVESTLCSEALNVLEALLRSCGGGGQGEEAGFGDNGGHGSGEKVLQSMLLPQSSFKARSGPLQYAAGSGLGSLMGQGGGGSSSAADSGLVARDVALQNTRLLLGRVLDTCALGRKRDHKRLVPFVANVG

SEQ ID NO: 178732 - protein, 2165 aa, Zea Mays
MGAGGAAKQIVDSLLARFLPLARRRIETAQAQDGQYLRPCDPSYEQVLDSLAMVARHTPLPLLEALLRWRESESPKGAHDASTYQKKLAVECIFSSACIRFAECCPQEGITEKLWIGLESFVFDWLINADRVVSQVEYPSLVDLRGLLLDLVAQLLGALSRIRFSSVTERFFIELNVRRIDSLALRSETLSIINGMRYLKLGVKTEGGLNASVSFIAKANPLNRPPNKRKSELQHALCNMLSSILAPLAEGGKNHWPPLGVEPALSLWYDAVARIRVQLMYWMDKQSKHVAVGFPLVTLLLCLGDANAFNSSFSQHMEILYKYLKDKNHRSMALDCLHRLVKFYLNIYADYQPRNHVWDYLDSVTSQLLTVLKKGLLTQDVQHDKLVEFCVTLAQSNLDFAMNHMILELLKPDSLSEAKVVGLRALLEIVVSPSNQQIGLDVLQVFGIGHYIPKVKSAIESILRSCNKAYSLALLTSSKTTIDNVTKDKSQGSLFRSVLKCIPYLIEEAGRNDKMTEIIPQHGISIDPGVREEAVQVLNRIVRCLPNRRFAVLKGMANFILKLPDEFPLLIQTSLGRLVELMRLWRVCLSEEALAKDMQSGRRLSIGGDALQRSPFHRSRDVSEFRASEMDAVGLVFLSSADVQIRLTALELLRCVRALQNNLRDYSANEWGDNKLKLEPEPIFIIDIIEENGEDIVQSCYWDPGRPYDLRREMDPIPLDVTLQSILESVDKNRWARYLSEIVKYAAELCPSSVQDARLEVIRRLEQITPADLGGKAQQPQDSETKLDQWLIYAMFACSCPPDIREEFSIKSAREVFHMIFPSLRHGSEAYALAATSALGHSHLEVCEIMFGDLALFVEEVSSETEGKPKWKNMVLNTDTLQNPRSRREDLRTHVANIHRILAEKVWPGMLSRKPVLCQHFLKFIEETYRQITISLADSFQDLQPLRYALASVLRYLAPEFVDAKAERFDNRIRKKLFDLLLTWSEDSGSSWGQESSSDYRREIERYKSNQHTRSRESFDKLAFDREMAEQLEAINWASMNAIASLLYGPCFDDNARKMSGRVISWINSLFMEPSARAPFGHSPVDPRTPSYSKHTDGRFGGRDKQKTSHLRLLLAKTALKNILQTNLDLFPACIDQCYSPDPQIADGYFSVLAEVYMRQEIPKCEIQRLVSLILYKVVDQTKLIRDSALQMLETLSLREWAEDDTDGVGHYRASVVGNLPDSYQQFQYKLSSKLAKDHPELSEHLCEEIMQRQLDAVDIIAQHQVLTCMAPWIENLNFVRLKESGWSERLLKSLYYVTWKHGDQFPDEIEKLWSTVASNTRNIIPVLNFLITRGIEDCDANPSAEITGAFATYFSVAKRVSLYLARICPQQTIDHLVFELSQRMLEDDEEPVRLGKVDVSANVVLEFSQGPTASQVATVVDSQPHMSPLLVRGSLDGAVRNVSGNLSWRTSAVTGRSVSGPLSPLAHEVSIPNPTAGRSGQLLPALITMSGPLSGVRSSAGNLRSRHVSRDSGDYYFDTPNSTDDILHQGGSGIHGINANELQSALQGHQHLLSRADIALILLAEIAYENDEDFRENLPLLFHVTCVSMDSSEDIVLEHCQDLLVNLLYSLAGRHLELYEIESSERENKHHVVSLIKYIQSKRGSLMWENEDPTLFRIELPSASLLSALVQSMVSAIFFQGDLRETWGSEALKWAMECTSRHLACRSHQIYRALRPSVKSDSCVLLLRCIHRCLGNPVPAVLGFAMEILLTLQVMVENMEPEKVILYPQLFWGCVALMHTDFVHIYCQVLELFCRVIDRLTFRDRTTENVLLSSMPRDEFDINGYASDLHRLESRTTSERLLSVTGTGKVPAFEGVQPLVLKGLMSTVSHGSAIELLSRITIPTCDSIFGSPDTRLLMHITGLLPWLGLQLTREAPPSLGSASPLQEQNQKAYYVSSNISAWCRAKSLDDLAEVFRAYSFGEIMSLEDLFARASPPICAEWFPRHSSLAFGHLLRLLERGPLDYQRVVLLMLKSLLQQTPVDPSQIPQVYNFVSQLVESTLCSEALNVLEALLRSCGGGGQGEEAGFGDNGGHGSGEKVLQSMLLPQSSFKARSGPLQYAAGSGLGSLMGQGGGGSSSAADSGLVARDVALQNTRLLLGRVLDTCALGRKRDHKRLVPFVANVG

SEQ ID NO: 178733 - protein, 489 aa, Zea Mays
MLQVEINIHRFFSGYTTGRTHARTHWPQMLKLKDWPPSSSFDKRLPRHGAEFISALPFREYTDPRYGPLNLAAKLPAGVLKPDLGPKSYIAYGFYKELGRGDSVTKLHCDMSDAVNILTHTAEVTCQTDIGLIEKIQKDMREQDLQELYGGLNSRSELKLSPAPTECRDESVDEGLKTSYSREGNCVNRDNYNGLDINALPPDDDGDIAKDKESSPGSEWQSELGQSSDHNNGVNTTDEMYNGAHYISHNQKSTGRKVGIKPQEEKSEKADCSGTCAYLKGSSEDNPEMPIVESSEEQSTGGALWDIFRRQDSDKLQDYLRKHCSEFRHIYCNPVKKVFHPIHDQSFYLTEEHKRKLKEEYGIEPWTFEQKLGEAVFIPAGCPHQVRNLKSCIKVALDFVSPENVGECVKLTEEFRRLPSFHKAKEDKLEIKKMAVHALNEAVNFLDPRSSEELKIGVGENICEDESVDEKELPPRRGVEVSGVDEKPK

SEQ ID NO: 178734 - protein, 739 aa, Zea Mays
MADEAEWNEAEAGIAAPGAGVAPPAPGGGEETKRKRGRPKGSLDTYKRRRRRRRTGDLVSAVPAASLGDMGHSCGCIPAPPLPPPCTVYTVRDGGVAITPQSMEDEAEGVEAESGNAGAASAARDGEETKRKRGSPEGSLNERNKDRTPKPKAKGRRRRRTDDQTLSVSAVSLGDLGLGVAAGTRSIRERRPAPNAFFDVGSDSDTEHDDDDDEEQTTIDQANHESAKTGDSVKKGGRPRKMEAGQLHTRTQISNGKSNGHTNGNPAGKKRGRGRPKKLTVEQAITRCQFSNGETNKSGAEAARSKQSRNRRISQNAKKRKRDEGKESMTKKLNKRSKMLTGENALMCHQCQRKDKPRVVRCQSCKKKRFCLPCIEQWYPNLPEDEFAVKCPYCRKNCNCKACLRMRGVEEPPKKEISKENEIRYAFHIVTMLLPWMRELRQEQLEEKEVEANIQGVSMNEIKVEQAEFDLDDRVYCDRCKTSIVDFHRSCKRCFYDLCLNCCKELRKGEIPGGEEVEYVPPEPKGRSYSFGKIHLLKDADRSKNSSNGESYNGMPAVGNSNNGLLLWKAKSNGSIPCPPKEVGGCGSTLLDLKCLFPEKMFAELEYRADKVLRSGTLAKAMVSRSDRCPCFNQSGKIRTESKSVREAASRKGSSDNFLYCPVAIGIQDDDIVHFQMHWAKGEPVVVSDVLQLTSGLSWEPMVMWRALRERSKGKAEDEQFAVWAIDCLDWCEKFLGRH

SEQ ID NO: 178735 - protein, 1060 aa, Zea Mays
MADEAEWNEAEAGIAAPGAGVAPPAPGGGEETKRKRGRPKGSLDTYKRRRRRRRTGDLVSAVPAASLGDMGHSCGCIPAPPLPPPCTVYTVRDGGVAITPQSMEDEAEGVEAESGNAGAASAARDGEETKRKRGSPEGSLNERNKDRTPKPKAKGRRRRRTDDQTLSVSAVSLGDLGLGVAAGTRSIRERRPAPNAFFDVGSDSDTEHDDDDDEEQTTIDQANHESAKTGDSVKKGGRPRKMEAGQLHTRTQISNGKSNGHTNGNPAGKKRGRGRPKKLTVEQAITRCQFSNGETNKSGAEAARSKQSRNRRISQNAKKRKRDEGKESMTKKLNKRSKMLTGENALMCHQCQRKDKPRVVRCQSCKKKRFCLPCIEQWYPNLPEDEFAVKCPYCRKNCNCKACLRMRGVEEPPKKEISKENEIRYAFHIVTMLLPWMRELRQEQLEEKEVEANIQGVSMNEIKVEQAEFDLDDRVYCDRCKTSIVDFHRSCKRCFYDLCLNCCKELRKGEIPGGEEVEYVPPEPKGRSYSFGKIHLLKDADRSKNSSNGESYNGMPAVGNSNNGLLLWKAKSNGSIPCPPKEVGGCGSTLLDLKCLFPEKMFAELEYRADKVLRSGTLAKAMVSRSDRCPCFNQSGKIRTESKSVREAASRKGSSDNFLYCPVAIGIQDDDIVHFQMHWAKGEPVVVSDVLQLTSGLSWEPMVEINIHRFFSGYTTGRTHARTHWPQMLKLKDWPPSSSFDKRLPRHGAEFISALPFREYTDPRYGPLNLAAKLPAGVLKPDLGPKSYIAYGFYKELGRGDSVTKLHCDMSDAVNILTHTAEVTCQTDIGLIEKIQKDMREQDLQELYGGLNSRSELKLSPAPTECRDESVDEGLKTSYSREGNCVNRDNYNGLDINALPPDDDGDIAKDKESSPGSEWQSELGQSSDHNNGVNTTDEMYNGAHYISHNQKSTGRKVGIKPQEEKSEKADCSGTCAYLKGSSEDNPEMPIVESSEEQSTGGALWDIFRRQDSDKLQDYLRKHCSEFRHIYCNPVKKVLNPGRLNRSLVKLFSFLLDVLTK

SEQ ID NO: 178736 - protein, 1188 aa, Zea Mays
MADEAEWNEAEAGIAAPGAGVAPPAPGGGEETKRKRGRPKGSLDTYKRRRRRRRTGDLVSAVPAASLGDMGHSCGCIPAPPLPPPCTVYTVRDGGVAITPQSMEDEAEGVEAESGNAGAASAARDGEETKRKRGSPEGSLNERNKDRTPKPKAKGRRRRRTDDQTLSVSAVSLGDLGLGVAAGTRSIRERRPAPNAFFDVGSDSDTEHDDDDDEEQTTIDQANHESAKTGDSVKKGGRPRKMEAGQLHTRTQISNGKSNGHTNGNPAGKKRGRGRPKKLTVEQAITRCQFSNGETNKSGAEAARSKQSRNRRISQNAKKRKRDEGKESMTKKLNKRSKMLTGENALMCHQCQRKDKPRVVRCQSCKKKRFCLPCIEQWYPNLPEDEFAVKCPYCRKNCNCKACLRMRGVEEPPKKEISKENEIRYAFHIVTMLLPWMRELRQEQLEEKEVEANIQGVSMNEIKVEQAEFDLDDRVYCDRCKTSIVDFHRSCKRCFYDLCLNCCKELRKGEIPGGEEVEYVPPEPKGRSYSFGKIHLLKDADRSKNSSNGESYNGMPAVGNSNNGLLLWKAKSNGSIPCPPKEVGGCGSTLLDLKCLFPEKMFAELEYRADKVLRSGTLAKAMVSRSDRCPCFNQSGKIRTESKSVREAASRKGSSDNFLYCPVAIGIQDDDIVHFQMHWAKGEPVVVSDVLQLTSGLSWEPMVEINIHRFFSGYTTGRTHARTHWPQMLKLKDWPPSSSFDKRLPRHGAEFISALPFREYTDPRYGPLNLAAKLPAGVLKPDLGPKSYIAYGFYKELGRGDSVTKLHCDMSDAVNILTHTAEVTCQTDIGLIEKIQKDMREQDLQELYGGLNSRSELKLSPAPTECRDESVDEGLKTSYSREGNCVNRDNYNGLDINALPPDDDGDIAKDKESSPGSEWQSELGQSSDHNNGVNTTDEMYNGAHYISHNQKSTGRKVGIKPQEEKSEKADCSGTCAYLKGSSEDNPEMPIVESSEEQSTGGALWDIFRRQDSDKLQDYLRKHCSEFRHIYCNPVKKVFHPIHDQSFYLTEEHKRKLKEEYGIEPWTFEQKLGEAVFIPAGCPHQVRNLKSCIKVALDFVSPENVGECVKLTEEFRRLPSFHKAKEDKLEIKKMAVHALNEAVNFLDPRSSEELKIGVGENICEDESVDEKELPPRRGVEVSGVDEKPK

SEQ ID NO: 178737 - protein, 849 aa, Zea Mays
MADEAEWNEAEAGIAAPGAGVAPPAPGGGEETKRKRGRPKGSLDTYKRRRRRRRTGDLVSAVPAASLGDMGHSCGCIPAPPLPPPCTVYTVRDGGVAITPQSMEDEAEGVEAESGNAGAASAARDGEETKRKRGSPEGSLNERNKDRTPKPKAKGRRRRRTDDQTLSVSAVSLGDLGLGVAAGTRSIRERRPAPNAFFDVGSDSDTEHDDDDDEEQTTIDQANHESAKTGDSVKKGGRPRKMEAGQLHTRTQISNGKSNGHTNGNPAGKKRGRGRPKKLTVEQAITRCQFSNGETNKSGAEAARSKQSRNRRISQNAKKRKRDEGKESMTKKLNKRSKMLTGENALMCHQCQRKDKPRVVRCQSCKKKRFCLPCIEQWYPNLPEDEFAVKCPYCRKNCNCKACLRMRGVEEPPKKEISKENEIRYAFHIVTMLLPWMRELRQEQLEEKEVEANIQGVSMNEIKVEQAEFDLDDRVYCDRCKTSIVDFHRSCKRCFYDLCLNCCKELRKGEIPGGEEVEYVPPEPKGRSYSFGKIHLLKDADRSKNSSNGESYNGMPAVGNSNNGLLLWKAKSNGSIPCPPKEVGGCGSTLLDLKCLFPEKMFAELEYRADKVLRSGTLAKAMVSRSDRCPCFNQSGKIRTESKSVREAASRKGSSDNFLYCPVAIGIQDDDIVHFQMHWAKGEPVVVSDVLQLTSGLSWEPMVMWRALRERSKGKAEDEQFAVWAIDCLDWCEVEINIHRFFSGYTTGRTHARTHWPQMLKLKDWPPSSSFDKRLPRHGAEFISALPFREYTDPRYGPLNLAAKLPAGVLKPDLGPKSYIAYGFYKELGRGDSVTKLHCDMSDAVCCFY

SEQ ID NO: 178738 - protein, 1211 aa, Zea Mays
MADEAEWNEAEAGIAAPGAGVAPPAPGGGEETKRKRGRPKGSLDTYKRRRRRRRTGDLVSAVPAASLGDMGHSCGCIPAPPLPPPCTVYTVRDGGVAITPQSMEDEAEGVEAESGNAGAASAARDGEETKRKRGSPEGSLNERNKDRTPKPKAKGRRRRRTDDQTLSVSAVSLGDLGLGVAAGTRSIRERRPAPNAFFDVGSDSDTEHDDDDDEEQTTIDQANHESAKTGDSVKKGGRPRKMEAGQLHTRTQISNGKSNGHTNGNPAGKKRGRGRPKKLTVEQAITRCQFSNGETNKSGAEAARSKQSRNRRISQNAKKRKRDEGKESMTKKLNKRSKMLTGENALMCHQCQRKDKPRVVRCQSCKKKRFCLPCIEQWYPNLPEDEFAVKCPYCRKNCNCKACLRMRGVEEPPKKEISKENEIRYAFHIVTMLLPWMRELRQEQLEEKEVEANIQVEQAEFDLDDRVYCDRCKTSIVDFHRSCKRCFYDLCLNCCKELRKGEIPGGEEVEYVPPEPKGRSYSFGKIHLLKDADRSKNSSNGESYNGMPAVGNSNNGLLLWKAKSNGSIPCPPKEVGGCGSTLLDLKCLFPEKMFAELEYRADKVLRSGTLAKAMVSRSDRCPCFNQSGKIRTESKSVREAASRKGSSDNFLYCPVAIGIQDDDIVHFQMHWAKGEPVVVSDVLQLTSGLSWEPMVMWRALRERSKGKAEDEQFAVWAIDCLDWCEVEINIHRFFSGYTTGRTHARTHWPQMLKLKDWPPSSSFDKRLPRHGAEFISALPFREYTDPRYGPLNLAAKLPAGVLKPDLGPKSYIAYGFYKELGRGDSVTKLHCDMSDAVNILTHTAEVTCQTDIGLIEKIQKDMREQDLQELYGGLNSRSELKLSPAPTECRDESVDEGLKTSYSREGNCVNRDNYNGLDINALPPDDDGDIAKDKESSPGSEWQSELGQSSDHNNGVNTTDEMYNGAHYISHNQKSTGRKVGIKPQEEKSEKADCSGTCAYLKGSSEDNPEMPIVESSEEQSTGGALWDIFRRQDSDKLQDYLRKHCSEFRHIYCNPVKKVFHPIHDQSFYLTEEHKRKLKEEYGIEPWTFEQKLGEAVFIPAGCPHQVRNLKSCIKVALDFVSPENVGECVKLTEEFRRLPSFHKAKEDKLEIKKMAVHALNEAVNFLDPRSSEELKIGVGENICEDESVDEKELPPRRGVEVSGVDEKPK

SEQ ID NO: 178739 - protein, 487 aa, Zea Mays
MADEAEWNEAEAGIAAPGAGVAPPAPGGGEETKRKRGRPKGSLDTYKRRRRRRRTGDLVSAVPAASLGDMGHSCGCIPAPPLPPPCTVYTVRDGGVAITPQSMEDEAEGVEAESGNAGAASAARDGEETKRKRGSPEGSLNERNKDRTPKPKAKGRRRRRTDDQTLSVSAVSLGDLGLGVAAGTRSIRERRPAPNAFFDVGSDSDTEHDDDDDEEQTTIDQANHESAKTGDSVKKGGRPRKMEAGQLHTRTQISNGKSNGHTNGNPAGKKRGRGRPKKLTVEQAITRCQFSNGETNKSGAEAARSKQSRNRRISQNAKKRKRDEGKESMTKKLNKRSKMLTGENALMCHQCQRKDKPRVVRCQSCKKKRFCLPCIEQWYPNLPEDEFAVKCPYCRKNCNCKACLRMRGVEEPPKKEISKENEIRYAFHIVTMLLPWMRELRQEQLEEKEVEANIQGVSMNEIKVEQAEFDLDDRVYWLISFPDYILP

SEQ ID NO: 178740 - protein, 1219 aa, Zea Mays
MADEAEWNEAEAGIAAPGAGVAPPAPGGGEETKRKRGRPKGSLDTYKRRRRRRRTGDLVSAVPAASLGDMGHSCGCIPAPPLPPPCTVYTVRDGGVAITPQSMEDEAEGVEAESGNAGAASAARDGEETKRKRGSPEGSLNERNKDRTPKPKAKGRRRRRTDDQTLSVSAVSLGDLGLGVAAGTRSIRERRPAPNAFFDVGSDSDTEHDDDDDEEQTTIDQANHESAKTGDSVKKGGRPRKMEAGQLHTRTQISNGKSNGHTNGNPAGKKRGRGRPKKLTVEQAITRCQFSNGETNKSGAEAARSKQSRNRRISQNAKKRKRDEGKESMTKKLNKRSKMLTGENALMCHQCQRKDKPRVVRCQSCKKKRFCLPCIEQWYPNLPEDEFAVKCPYCRKNCNCKACLRMRGVEEPPKKEISKENEIRYAFHIVTMLLPWMRELRQEQLEEKEVEANIQGVSMNEIKVEQAEFDLDDRVYCDRCKTSIVDFHRSCKRCFYDLCLNCCKELRKGEIPGGEEVEYVPPEPKGRSYSFGKIHLLKDADRSKNSSNGESYNGMPAVGNSNNGLLLWKAKSNGSIPCPPKEVGGCGSTLLDLKCLFPEKMFAELEYRADKVLRSGTLAKAMVSRSDRCPCFNQSGKIRTESKSVREAASRKGSSDNFLYCPVAIGIQDDDIVHFQMHWAKGEPVVVSDVLQLTSGLSWEPMVMWRALRERSKGKAEDEQFAVWAIDCLDWCEVEINIHRFFSGYTTGRTHARTHWPQMLKLKDWPPSSSFDKRLPRHGAEFISALPFREYTDPRYGPLNLAAKLPAGVLKPDLGPKSYIAYGFYKELGRGDSVTKLHCDMSDAVNILTHTAEVTCQTDIGLIEKIQKDMREQDLQELYGGLNSRSELKLSPAPTECRDESVDEGLKTSYSREGNCVNRDNYNGLDINALPPDDDGDIAKDKESSPGSEWQSELGQSSDHNNGVNTTDEMYNGAHYISHNQKSTGRKVGIKPQEEKSEKADCSGTCAYLKGSSEDNPEMPIVESSEEQSTGGALWDIFRRQDSDKLQDYLRKHCSEFRHIYCNPVKKVFHPIHDQSFYLTEEHKRKLKEEYGIEPWTFEQKLGEAVFIPAGCPHQVRNLKSCIKVALDFVSPENVGECVKLTEEFRRLPSFHKAKEDKLEIKKMAVHALNEAVNFLDPRSSEELKIGVGENICEDESVDEKELPPRRGVEVSGVDEKPK

SEQ ID NO: 178741 - protein, 726 aa, Zea Mays
MPKLSNDRLSAGGPRETKDKKNIVEVFPAKKMAKIKGNSLCLSGPDGSQATIELLNCTVLAVSASSMPSRKWAKRFPVKLESKDNEIYNGSKVCYLYTDTSWEKESWCKALRIAATADKEKLNWHAKLSEKFLNYISSLNSEYPCFLKPPILSGEDHEVMDKTSKTDGSSKVRLFLKKLAKKASTKAALESKTSSGMSVQGEKKILDKLRSYQGAPFIEALIGPQEDKLGGNSSQDTVKATAPPAALNQIGQLSTSPDVNADDRVADEGTLCWNLLSSRLFFDAKMSDEINKAIKARIQRTLSNMRTPTYVGEITLTDFSLGELPPYVHAMRVLPLDLNELWAFEVDFEYSGGILLHIETRLEVQEPELQKDIMKSNFGADANGDVDSDLLESIEQYGNQFKGSHNSASSIGENDEADASSQSKSIGWTSAYISRWKTILHSIADHVSQVPLSLAIRISSVRGILRIQMKPPPSDQIWYGFTSMPDLEWDLESSVGDRKITNSHIAALIGNRFKASLRDSLVLPNCESISMPWMLAEKDDWVPRKDAPFIWLNHEPTEMRIHATATASTQSEEGGLKDGGSEESSRVVASIDEAKQEPKAEASLHGQSSSAPGSESAHSDANDELRKPLLITEKLQEEASEGIAMSPMSTSRRAVIPAGEQPQVSASPIGEDAKRKSGRRARMMDFGKRMGDKLEEKRRTIEEKGRHIVEKMRENARTNSMERTSS

SEQ ID NO: 178742 - protein, 425 aa, Zea Mays
MRMTELRMKAHFVGTSDFSLGELPPYVHAMRVLPLDLNELWAFEVDFEYSGGILLHIETRLEVQEPELQKDIMKSNFGADANGDVDSDLLESIEQYGNQFKGSHNSASSIGENDEADASSQSKSIGWTSAYISRWKTILHSIADHVSQVPLSLAIRISSVRGILRIQMKPPPSDQIWYGFTSMPDLEWDLESSVGDRKITNSHIAALIGNRFKASLRDSLVLPNCESISMPWMLAEKDDWVPRKDAPFIWLNHEPTEMRIHATATASTQSEEGGLKDGGSEESSRVVASIDEAKQEPKAEASLHGQSSSAPGSESAHSDANDELRKPLLITEKLQEEASEGIAMSPMSTSRRAVIPAGEQPQVSASPIGEDAKRKSGRRARMMDFGKRMGDKLEEKRRTIEEKGRHIVEKMRENARTNSMERTSS

SEQ ID NO: 178743 - protein, 196 aa, Zea Mays
MFGGMSHLGSSLLNLAIMFYFMVPSPLSHGSGYGNLAPPPKCKTFLWLAIRNRCWTADRLRKCGMPHPVVCPLCDQEQETVQHLLTTCVFTRQFWHGILAPFNLGHLIPSPVEASFVEWWGGVINQIHKDKKKGFNSAIILGAWYLWLHRNRVIFHEESPSIAKVLRSFLDELACWVLAGAKQLGSIGLADCVSAL

SEQ ID NO: 178744 - protein, 1011 aa, Zea Mays
MEPPSPPATHSAAVRVLSRTPPPTSPNPSSTGPAAPSPASRDGVVAVGFVGAAGTARLADRILDAHVFSPGGSAGSLAGRVRYHRDAGKRMVFLHLTPPPPAPLEAVAGCCDDGELPEMLFMFSVCHVIIFLQQGFRFNTQTLKKFRLLQSSKHALAPFVKPLVAAAMPARTVASDTPTRATHRASSVSPPTRRGGHAGRQSSAISLMSGTSSTPSVLPGQCIPVLLFVFEDDAVDVSSAAASPDDIGDASSSNQGSTPDGLPKQSLASKSSGSVIMLSRAANKSEGSSGKKLHSSLEGQIRVLIKKCRVLAGMEPGHIGPRGVSNMSHHLPLFSLDTSRVVALLERYINKKQEPLDTIAGLFEDSLCSKSPLDILSLENNYHPTNHDDFQLIKDFIFRQSDALRGKGGYSSNASAGSVAGVGMVAAAAAAAAASAASGKPVNAPDLPTFDKWLSISTSILTALLSGRNVLRCQSESKTHTSPTEKNGQLPVGSNAIEIALSCLESNNGLNMKFSSSWCQRVLPAAKEIYLKGLPAFYPTRMHEVQLQKALRSFGSMVKGPAVRVFSKKLEDECRAIWESGRQQCDAVSLTGRPCKHRRHGDFFSSDAMEQHSSGYVFLHACSCGRSRRLRDDPFDFQTANVSFNCFQNCDDLLPTLALPRGSNDGSFSVSSWCLVRLGGARYYKPTKGLLQSGFSSKERYLLRWIVSVHKGQVRNDIRSNTITSSARSGMNPQTPPIVTGEVKSAITQVTAQIKYAKLENSGKQAEVEPVSNLGINFGKGLPNFTMKKPFSEVVAGTTSKDTEFPALQQTRPPKPGGRKDEQRQMNIVDQTNGRGHVAVSQGSVAETESAKASRNKSSENADGKPFLQIGSNIVPVIAGNETRETSQPVQQFVVYIGFEHECPYGHRFLLSEKHMKEIESSCLQYQRPHLNKEAEVKHAQKLLQNASGLIASAVDINSARKNSKPLESSGRNSQQQSLQLRIDAETSQPSPRLSDPQNAKRSQKGRNIKM

SEQ ID NO: 178745 - protein, 228 aa, Zea Mays
MEPPSPPATHSAAVRVLSRTPPPTSPNPSSTGPAAPSPASRDGVVAVGFVGAAGTARLADRILDAHVFSPGGSAGSLAGRVRYHRDAGKRMVFLHLTPPPPAPLEAVAGCCDDGELPEMLFMFSVTPDFPVLLASCPLVQFEGSCLPSNVSDHDREGSFSIGCRVILPPESFLTMRLPFVYGVETKEGSKFPLKYFERQPELTAWLVAGTALQIVSVGDVTEKETVMK

SEQ ID NO: 178746 - protein, 1026 aa, Zea Mays
MEPPSPPATHSAAVRVLSRTPPPTSPNPSSTGPAAPSPASRDGVVAVGFVGAAGTARLADRILDAHVFSPGGSAGSLAGRVRYHRDAGKRMVFLHLTPPPPAPLEAVAGCCDDGELPEMLFMFSVCHVIIFLQQGFRFNTQTLKKFRLLQSSKHALAPFVKPLVAAAMPARTVASDTPTRATHRASSVSPPTRRGGHAGRQSSAISLMSGTSSTPSVLPGQCIPVLLFVFEDDAVDVSSAAASPDDIGDASSSNQGSTPDGLPKQSLASKSSGSVIMLSRAANKSEGSSGKKLHSSLEGQIRVLIKKCRVLAGMEPGHIGPRGVSNMSHHLPLFSLDTSRVVALLERYINKKQEPLDTIAGLFEDSLCSKSPLDILSLENNYHPTNHDDFQLIKDFIFRQSDALRGKGGYSSNASAGSVAGVGMVAAAAAAAAASAASGKPVNAPDLPTFDKWLSISTSILTALLSGRNVLRCQSESKTHTSPTEKNGQLPVGSNAIEIALSCLESNNGLNMKFSSSWCQRVLPAAKEIYLKGLPAFYPTRMHEVQLQKALRSFGSMVKGPAVRVFSKKLEDECRAIWESGRQQCDAVSLTGRPCKHRRHGDFFSSDAMEQHSSGYVFLHACSCGRSRRLRDDPFDFQTANVSFNCFQNCDDLLPTLALPRGSNDGSFSVSSWCLVRLGGARYYKPTKGLLQSGFSSKERYLLRWIVSVHKGQVRNDIRSNTITSSARSGMNPQTPPIVTGEVKSAITQVTAQIKYAKLENSGKQAEVEPVSNLGINFGKGLPNFTMKKPFSEVVAGTTSKDTEFPALQQTRPPKPGGRKDEQRQMNIVDQTNGRGHVAVSQGSVAETESAKASRNKSSENADGKPFLQIGSNIVPVIAGNETRETSQPVQQFVVYIGFEHECPYGHRFLLSEKHMKEIESSCLQYQRPHLNKEAEVKHAQKLLQNASGLIASAVDINSARKNSKPLESSGRNSQQQSLQLRIDAETSQPSPRLSDPQNAKRKEGTSRCKVCWCCVSTSADFHCDT

SEQ ID NO: 178747 - protein, 545 aa, Zea Mays
MDEYHHHHQRMGAAADFRRDLEDLVCDHLGGCFSPAPSSSSSCSAAAGGGAADHEPDGEAESSAVRRRRRESRLLSRWVARQAEEVLSSMEREVERRNREAELLALARLHPVSTLDPSSFLLSSTAAPPPPRPQAPSLNAPSSLLQMWRELEHPRADAAHPFDREPSPDNADRDRERVRQIARRLTDTAAAAATATAGGEWLGETERQRVRLVREWVQMASQPRDSRAGTRRDEPAAGTDRDRRGELEPPRLRGRQARLDVISRMARERQRELQGISGYHVVSEFPRRSRNRIQGLLRGRFLRNGALEEERPPSVAARELGQLRQSHRMPALRPESIASSQDVSQSDASVVESVRLLDNDESQQGAEVAFTDSEDTTQTVLENVDLQEMGADGAEAHSPSIPMDDMVMMQESLTQGDNMQQDGTEDDTGFWQTSLDASLNRWPSEIGGGADRTWEDNAEDLHSETMEEDDREHGHLQEEHDGWHDNESHGTMENWQDDYQDSALDTGPIPRNENRFIPPDDDNVYSMELRELLSRAWSWSPQLES

SEQ ID NO: 178748 - protein, 614 aa, Zea Mays
MDEYHHHHQRMGAAADFRRDLEDLVCDHLGGCFSPAPSSSSSCSAAAGGGAADHEPDGEAESSAVRRRRRESRLLSRWVARQAEEVLSSMEREVERRNREAELLALARLHPVSTLDPSSFLLSSTAAPPPPRPQAPSLNAPSSLLQMWRELEHPRADAAHPFDREPSPDNADRDRERVRQIARRLTDTAAAAATATAGGEWLGETERQRVRLVREWVQMASQPRDSRAGTRRDEPAAGTDRDRRGELEPPRLRGRQARLDVISRMARERQRELQGISGYHVVSEFPRRSRNRIQGLLRGRFLRNGALEEERPPSVAARELGQLRQSHRMPALRPESIASSQDVSQSDASVVESVRLLDNDESQQGAEVAFTDSEDTTQTVLENVDLQEMGADGAEAHSPSIPMDDMVMMQESLTQGDNMQQDGTEDDTGFWQTSLDASLNRWPSEIGGGADRTWEDNAEDLHSETMEEDDREHGHLQEEHDGWHDNESHGTMENWQDDYQDSALDTGPIPRNENRFIPPDDDNVYSMELRELLSSVVMVPSTGILMQPCTLQMDQMQIRNKNGTLKLSNSRLLSIDLPLLSLLHLCHHDNHYGTENCVITTGTADTGNGMLLMI

SEQ ID NO: 178749 - protein, 475 aa, Zea Mays
MARRALELAAVLLALAALAAVAAGGDIVHQDDEAPKIPGCSNDFVLVKVQTWINKKDKDEFVGVGARFGPKIESKEKHANWTNLLLADPSDCCTPPREKVAGDILLVERGNCKFTTKAKVAESAGASAIIIINDKHELYKMVCETNETNLDIGIHAVLLPKDAGSSLQRSLSSGEVLVELYSPDRPLVDTAEVFLWLMAVGTILCASYWSAWSAREADIEQEKLLKDGREVAPNFEPGGSSGMVDINMVSAILFVVIASCFLITLYKLMSHWFVELLVVIFCIGGVEGITLIVTVIQIVRIPNLKVGSALLGCAFLYDIFWVFISKMLFHESVMIVVARGDKTDEDGVPMLLKIPRMFDPWGGYSIIGFGDILLPGLLVAFALRYDWAAKKTLQSGYFLWSMVAYGSGLLITYVALNLMDGHGQPALLYIVPFTIALGMKRGELRNLWTKGQPERVCTHMHPSPKDSPVAVSSLS

SEQ ID NO: 178750 - protein, 257 aa, Zea Mays
MARRALELAAVLLALAALAAVAAGGDIVHQDDEAPKIPGCSNDFVLVKVQTWINKKDKDEFVGVGARFGPKIESKEKHANWTNLLLADPSDCCTPPREKVAGDILLVERGNCKFTTKAKVAESAGASAIIIINDKHELYKMVCETNETNLDIGIHAVLLPKDAGSSLQRSLSSGEVLVELYSPDRPLVDTAEVFLWLMAVGTILCASYWSAWSAREADIEQEKLLKDGREVAPNFEPGGSSGSANMLGGLTVNVKAV

SEQ ID NO: 178751 - protein, 643 aa, Zea Mays
MRTPRSKKALTVQWKANPSCKIWFLCRGNLICTREASEGQAHSRAESSTASTSSRSSTSGYSTPAARDRSIEDQAVGTLDGAAVQLLQEIEEDRPETPTSDAGEMDDALYDKLKRALMEAESLKHEAYEETRRRQMAERELAEASRMADEAERSNQREARHRKEVEEMVARERAAIEQDRRELDDILEKIRKVDDRSAELELQITSSERTMNDLEARLSESYNLLHTLRQGDPWSTATESASESTEDGGGEQRVSFLQLGYSELDEATKHFDESVRIDGGGDGSRGKVYGGELRGMAVAVKVVNPDVAVHEARFARAVERIGRARHPNLVTLVGACPAARAVVYELVPGGSLEERLDPGGGSGSAPPPLPWHARCGVAYGACSALAFLHSTLPRPTVHGDVRPANILVLADNAPHGWSCKLAGLGARGLVEEREQPRPGAADRAYADPRYLAATGELNPHRDVYALGVVLLRLVTGRPAFLARKAAREAVDGRASWQEVAGGWPTERAREVALLGLRCCGVDVEAEQRPRLPAALLLEEARGVLEAAVSAAPSRSPSSLSESDGAPSYFLCPILKEVMRDPQISGDGFTYEAEAIREWLRSGHDTSPMTNLKLPTQQLVPNHALRSAIHEWRHRQLRAHHRLH

SEQ ID NO: 178752 - protein, 464 aa, Zea Mays
MEEEWEEDDDAIENGSTHDASGQIAATTCAVDEESNEDDENAYCETNRPARVEPSHLPSVHEMLNPPEMAPLQGQDSKETSDGSCSDVAISLEEILQEPLSNISVENMHRLEGQNATDDNISVDNLLSAYPTKDNGYVGQYNTMNGSAPADEAHARWPLRTYSNQNYVNGPLADEFFDTGNDTNGVAYSRQQQADGFPAPRQVDESMVFYDAPSDYNLVDGKDDFVYLNDILNEPLGNESLFDGDDMMAYFDATENDFKYDILGSGQGLDYPLADMPLNFAQKSDKEDKFTFEGISEVPEANPQYGASSSGSHEDLYTDTEFLGVPTDDTADKTYGNRLASMLGSIPAPPAMASEFPPSTGKSAGMLSAVSSSSIRFTAGIIQLDGLTFSSGSGQWPLQKNGDLSLLVSFAVEGDVASKLPVGLGRATRISTVPMVLRSGFYLFFMSAMILLFSYKVGSCIYSR

SEQ ID NO: 178753 - protein, 488 aa, Zea Mays
MDLHVVCRIFQKHGSGPQNGAQYGAPYMEEEWEEDDDAIENGSTHDASGQIAATTCAVDEESNEDDENAYCETNRPARVEPSHLPSVHEMLNPPEMAPLQGQDSKETSDGSCSDVAISLEEILQEPLSNISVENMHRLEGQNATDDNISVDNLLSAYPTKDNGYVGQYNTMNGSAPADEAHARWPLRTYSNQNYVNGPLADEFFDTGNDTNGVAYSRQQQADGFPAPRQVDESMVFYDAPSDYNLVDGKDDFVYLNDILNEPLGNESLFDGDDMMAYFDATENDFKYDILGSGQGLDYPLADMPLNFAQKEDKFTFEGISEVPEANPQYGASSSGSHEDLYTDTEFLGVPTDDTADKTYGNRLASMLGSIPAPPAMASEFPPSTGKSAGMLSAVSSSSIRFTAGIIQLDGLTFSSGSGQWPLQKNGDLSLLVSFAVEGDVASKLPVGLGRATRISTVPMVLRSGFYLFFMSAMILLFSYKVGSCIYSR

SEQ ID NO: 178754 - protein, 385 aa, Zea Mays
MDLHVVCRIFQKHGSGPQNGAQYGAPYMEEEWEEDDDAIENGSTHDASGQIAATTCAVDEESNEDDENAYCETNRPARVEPSHLPSVHEMLNPPEMAPLQGNDTNGVAYSRQQQADGFPAPRQVDESMVFYDAPSDYNLVDGKDDFVYLNDILNEPLGNESLFDGDDMMAYFDATENDFKYDILGSGQGLDYPLADMPLNFAQKSDKEDKFTFEGISEVPEANPQYGASSSGSHEDLYTDTEFLGVPTDDTADKTYGNRLASMLGSIPAPPAMASEFPPSTGKSAGMLSAVSSSSIRFTAGIIQLDGLTFSSGSGQWPLQKNGDLSLLVSFAVEGDVASKLPVGLGRATRISTVPMVLRSGFYLFFMSAMILLFSYKVGSCIYSR

SEQ ID NO: 178755 - protein, 489 aa, Zea Mays
MQTDLRIFQKHGSGPQNGAQYGAPYMEEEWEEDDDAIENGSTHDASGQIAATTCAVDEESNEDDENAYCETNRPARVEPSHLPSVHEMLNPPEMAPLQGQDSKETSDGSCSDVAISLEEILQEPLSNISVENMHRLEGQNATDDNISVDNLLSAYPTKDNGYVGQYNTMNGSAPADEAHARWPLRTYSNQNYVNGPLADEFFDTGNDTNGVAYSRQQQADGFPAPRQVDESMVFYDAPSDYNLVDGKDDFVYLNDILNEPLGNESLFDGDDMMAYFDATENDFKYDILGSGQGLDYPLADMPLNFAQKSDKEDKFTFEGISEVPEANPQYGASSSGSHEDLYTDTEFLGVPTDDTADKTYGNRLASMLGSIPAPPAMASEFPPSTGKSAGMLSAVSSSSIRFTAGIIQLDGLTFSSGSGQWPLQKNGDLSLLVSFAVEGDVASKLPVGLGRATRISTVPMVLRSGFYLFFMSAMILLFSYKVGSCIYSR

SEQ ID NO: 178756 - protein, 348 aa, Zea Mays
MEAPGSPYASSPESAPKRAPRSPPQQQQSPSEEGDDKEKPTHLRFLVSNTAAGCIIGKGGSTINDFQSQSGARIQLSRSNEFFPGTNDRIIMVSGLFDEVMKAMELILEKLLAELFYQGEEFNEAEARPKVRLVVPNSSCGGIIGKGGATIKSFIEESHAGIKISPQDNNYVGLHDRLVTITGTFDNQMNAIDLILKKLSEDVHYPPNLSSPFPYAGLTFPSYPGVPVGYMIPQVPYSNAVNYGPNNGYGGRYQNNKPTTPMRSPASNEAQESLTIGIADEHIGAVVGRAGRNITEIIQASGARIKISDRGDYISGTSDRKVTITGTPEAIRTAESMIMQRVSASSER

SEQ ID NO: 178757 - protein, 508 aa, Zea Mays
MVWIQSGDLLMVWIQISLLLLAALAGGRARRDTGSRLPANHCGPQSMAGRDRRGAFLASSSSSGSGSGRRAPEHEWWPRSPAWSRPLSDSGGARGRKSGSSTSSSSFRSLFRSIGVWFSSLSTASPSPASSSMKQKSRDAGAKKPPLPGYAGTKTSARGLYSGGGGGRQHRPSFQNSVFSIEEILSATNNFSPALKIGQGGFGAVYKGVLPDGTVVAVKRAKLRMQNPHVDVEFRSEIKIMARIEHQSLVRFYGYMECGEERIVVVEYVPNGTLREHLDRCNGRFLDFGTRLDIAIDVAHAVTYLHMYSDHPIIHRDIKSSNILLTDSMRAKVADFGFARLGAGLGAGGEATHVTTQVKGTAGYLDPEYLKTCQLTDRSDVYSFGVLLVELASARRPIETKREMKERLTARWAMGRFIGGASADVLDPHLARTPAADRALEAVLELAFRCMGPVRQDRPAMSDCCRALWAIRKTYRDMLAADATPQFSDRRATTSSSSADSSGDLWRI

SEQ ID NO: 178758 - protein, 185 aa, Zea Mays
MAGRDRRGAFLASSSSSGSGSGRRAPEHEWWPRSPAWSRPLSDSGGARGRKSGSSTSSSSFRSLFRSIGVWFSSLSTASPSPASSSMKQKSRDAGAKKPPLPGYAGTKTSARGLYSGGGGGRQHRPSFQNSVFSIEEILSATNNFSPALKIGQGGFGAVYKGVLPDGTVVAVKRAKLINLNSGMD

SEQ ID NO: 178759 - protein, 596 aa, Zea Mays
MRWLLLLAFAAAPAAGEMGYAHCGCDGSGGAGGGSGFWSLDNIFKWQKVSDLLIAAAYFSIPLEILYFVAGLRHLLPFRWVLVQFGAFIVLCGLTHLLAAFTYEPHPFMVVLLLTAAKFLTALVSFLTAITLLTLIPQLLRVKVRESLLWIKARELDREVVLMKRQEEASWHVRMLTQEIRRSLDRHTVLYTTLIELSRVLALDNCAVWMPSEDKSGMCLTHELRRGSDDGEAVVGADDADVLEVKGADGVKLLPPGSVLGSASGGGKEGTGTVAAIRMPMLRVADFKGGTPQVIKASYAVLVLVPPSGRKWAPHELEIVEVVADQVAVALSHASLLEESQAMRDRLAEQNRELLQARRDALMANEARDAFQRVMSQGMRRPIHSVQGLVSVVQEEEGLASEQRLVVDAVARTATVVSTLINDVMEMSAATSQERFPLETRPFRLRSMVRDAACVARCLCDLSGRFGFAVHVENVLPDLVIGDERRIFHVLLHMVGNLIGRVDEGDVTFRVRADDEATEDQRWDPWRPSYSGGHSSVRFVVGVKRQQNAGDSLPRFLRRPRTHDGLDLRLSFSMCRKLVQVPACVRALCFFFGLVV

SEQ ID NO: 178760 - protein, 142 aa, Zea Mays
MQPPTLLPPGLLHKPLQRASTRRRNAASAATTPAGHTEPGNNLPHASHCRAPKPKPAVAVGPGTRGHQSHLPSGAPPPSPPSCACPGHLLSLPCHQTRGGPRRRRHLGRPRSPAGAPRRATGRLSPSVQPPNAQAVWYAFGS

SEQ ID NO: 178761 - protein, 103 aa, Zea Mays
MQALSGYVWNELCKAVHLGVKLALTVVASHYEIDLERVCKGYVLPDEPDLTDAEMLGLVDVVEGPGSSLARHFEAEVVPPIPSPAAVVPPSDSKGGVLPPPTL

SEQ ID NO: 178762 - protein, 966 aa, Zea Mays
MAPSQAAAAAGPTFEDLERDLQAVLMDQNHMSPVDDLGMFRSGSAPPTVEGSRTAIGALFSGPPLHANSLGAGGGSGGTASGLDVLTDEEIRSHPAYLSYYYSNEHLNPRLPPPMVSKEDWRAAQWFQAVSGGIGDRRRRPAEVGSGNSLFSVQPGANEVGGEKALLSDRMERSGRNGLARQQSSEWLGRGSDGLIGLSDASALGSPRKSFADALQENISRPAVIAGHLSRSNSRNVLEGPTPIRSSDSRKPQLQNRSESMNGLRSGSTSPSLVRVQSLGSSMSHTFASAVGSSISRSTTPDPQLIRRTPSPCLPPVGVRMGSSDKKVEASVSSLNHDGADIVATLSSLSLSGNKMSNVENEVQTHAYQNFGDQADVLFNVPKEHRQFSPRNLTQKTDEDLLNAPEYAVFPNGGSNFSNLHASKVASHSNSKFPMQSPHGNANKKGSLMSSAGSVSQYQHLNGDSHDIDVSGWHTHTGGFTSSMLNNQLNPDGDYGNVLSNHGGSSYQGQPTETMYAQCLQANPDSPLGAAASMSPFQGRGFTGSGHLDSPGYQKAYLGSLFGQQKLQYGMPYLGNSGALNQNIYGNDSAFGIGMTYLTSPPSTPYISSPQGHVGQGNRLTRLPAVVRNTAGGSMGSWNSENGLMDNGYGSSLLEEFKSNKTRSFELLDIVGHVVEFSSDQYGSRFIQQKLETASTEQKNMIFPEILPQARTLMTDVFGNYVIQKALEVVEVEQQTQMALELDGSIMRCVRDQNGNHVIQKCIECIPQERIRFIISAFYGHVVELSMHPYGCRVIQRILEHCDDESTQNAMMEEIMQSVVTLTEDQYGNYVIQHVLQYGKPEERSTIIAQLAGQIVKMSQQKFASNVVEKCLTFGSPEQRQILINEMLGTTDENEPLQAMMKDQFANYVVQKVLETCDDQNRELILSRIKVHLNALKRYTYGKHIVTRVEKLIAAGERRIGALPSC

SEQ ID NO: 178763 - protein, 984 aa, Zea Mays
MAPSQAAAAAGPTFEDLERDLQAVLMDQNHMSPVDDLGMFRSGSAPPTVEGSRTAIGALFSGPPLHANSLGAGGGSGGTASGLDVLTDEEIRSHPAYLSYYYSNEHLNPRLPPPMVSKEDWRAAQWFQAVSGGIGDRRRRPAEVGSGNSLFSVQPGANEVGGEKALLSDRMERSGRNGLARQQSSEWLGRGSDGLIGLSDASALGSPRKSFADALQENISRPAVIAGHLSRSNSRNVLEGPTPIRSSDSRKPQLQNRSESMNGLRSGSTSPSLVRVQSLGSSMSHTFASAVGSSISRSTTPDPQLIRRTPSPCLPPVGVRMGSSDKKVEASVSSLNHDGADIVATLSSLSLSGNKMSNVENEVQTHAYQNFGDQADVLFNVPKEHRQFSPRNLTQKTDEDLLNAPEYAVFPNGGSNFSNLHASKVASHSNSKFPMQSPHGNANKKGSLMSSAGSVSQYQHLNGDSHDIDVSGWHTHTGGFTSSMLNNQLNPDGDYGNVLSNHGGSSYQGQPTETMYAQCLQANPDSPLGAAASMSPFQGRGFTGSGHLDSPGYQKAYLGSLFGQQKLQYGMPYLGNSGALNQNIYGNDSAFGIGMTYLTSPPSTPYISSPQGHVGQGNRLTRLPAVVRNTAGGSMGSWNSENGLMDNGYGSSLLEEFKSNKTRSFELLDIVGHVVEFSSDQYGSRFIQQKLETASTEQKNMIFPEILPQARTLMTDVFGNYVIQKGFVLQLSLQMYGCRVIQKALEVVEVEQQTQMALELDGSIMRCVRDQNGNHVIQKCIECIPQERIRFIISAFYGHVVELSMHPYGCRVIQRILEHCDDESTQNAMMEEIMQSVVTLTEDQYGNYVIQHVLQYGKPEERSTIIAQLAGQIVKMSQQKFASNVVEKCLTFGSPEQRQILINEMLGTTDENEPLQAMMKDQFANYVVQKVLETCDDQNRELILSRIKVHLNALKRYTYGKHIVTRVEKLIAAGERRIGALPSC

SEQ ID NO: 178764 - protein, 520 aa, Zea Mays
MAPSQAAAAAGPTFEDLERDLQAVLMDQNHMSPVDDLGMFRSGSAPPTVEGSRTAIGALFSGPPLHANSLGAGGGSGGTASGLDVLTDEEIRSHPAYLSYYYSNEHLNPRLPPPMVSKEDWRAAQWFQAVSGGIGDRRRRPAEVGSGNSLFSVQPGANEVGGEKALLSDRMERSGRNGLARQQSSEWLGRGSDGLIGLSDASALGSPRKSFADALQENISRPAVIAGHLSRSNSRNVLEGPTPIRSSDSRKPQLQNRSESMNGLRSGSTSPSLVRVQSLGSSMSHTFASAVGSSISRSTTPDPQLIRRTPSPCLPPVGVRMGSSDKKVEASVSSLNHDGADIVATLSSLSLSGNKMSNVENEVQTHAYQNFGDQADVLFNVPKEHRQFSPRNLTQKTDEDLLNAPEYAVFPNGGSNFSNLHASKVASHSNSKFPMQSPHGNANKKGSLMSSAGSVSQYQHLNGDSHDIDVSGWHTHTGMVTMAMFFRIMVDRVIRANQQRRCTHNACRQTLIHPLAQLQA

SEQ ID NO: 178765 - protein, 973 aa, Zea Mays
MAPSQAAAAAGPTFEDLERDLQAVLMDQNHMSPVDDLGMFRSGSAPPTVEGSRTAIGALFSGPPLHANSLGAGGGSGGTASGLDVLTDEEIRSHPAYLSYYYSNEHLNPRLPPPMVSKEDWRAAQWFQAVSGGIGDRRRRPAEVGSGNSLFSVQPGANEVGGEKALLSDRMERSGRNGLARQQSSEWLGRGSDGLIGLSDASALGSPRKSFADALQENISRPAVIAGHLSRSNSRNVLEGPTPIRSSDSRKPQLQNRSESMNGLRSGSTSPSLVRVQSLGSSMSHTFASAVGSSISRSTTPDPQLIRRTPSPCLPPVGVRMGSSDKKVEASVSSLNHDGADIVATLSSLSLSGNKMSNVENEVQTHAYQNFGDQADVLFNVPKEHRQFSPRNLTQKTDEDLLNAPEYAVFPNGGSNFSNLHASKVASHSNSKFPMQSPHGNANKKGSLMSSAGSVSQYQHLNGDSHDIDVSGWHTHTGGFTSSMLNNQLNPDGDYGNVLSNHGGSSYQGQPTETMYAQCLQANPDSPLGAAASMSPFQGRGFTGSGHLDSPGYQKAYLGSLFGQQKLQYGMPYLGNSGALNQNIYGNDSAFGIGMTYLTSPPSTPYISSPQGHVGQGNRLTRLPAVVRNTAGGSMGSWNSENGLMDNGYGSSLLEEFKSNKTRSFELLDIVGHVVEFSSDQYGSRFIQQKLETASTEQKNMIFPEILPQFFEYGTETQTKQLATLLKGFVLQLSLQMYGCRVIQKALEVVEVEQQTQMALELDGSIMRCVRDQNGNHVIQKCIECIPQERIRFIISAFYGHVVELSMHPYGCRVIQRILEHCDDESTQNAMMEEIMQSVVTLTEDQYGNYVIQHVLQYGKPEERSTIIAQLAGQIVKMSQQKFASNVVEKCLTFGSPEQRQILINEMLGTTDENEPLQKVLETCDDQNRELILSRIKVHLNALKRYTYGKHIVTRVEKLIAAGERRIGALPSC

SEQ ID NO: 178766 - protein, 630 aa, Zea Mays
MAPSQAAAAAGPTFEDLERDLQAVLMDQNHMSPVDDLGMFRSGSAPPTVEGSRTAIGALFSGPPLHANSLGAGGGSGGTASGLDVLTDEEIRSHPAYLSYYYSNEHLNPRLPPPMVSKEDWRAAQWFQAVSGGIGDRRRRPAEVGSGNSLFSVQPGANEVGGEKALLSDRMERSGRNGLARQQSSEWLGRGSDGLIGLSDASALGSPRKSFADALQENISRPAVIAGHLSRSNSRNVLEGPTPIRSSDSRKPQLQNRSESMNGLRSGSTSPSLVRVQSLGSSMSHTFASAVGSSISRSTTPDPQLIRRTPSPCLPPVGVRMGSSDKKVEASVSSLNHDGADIVATLSSLSLSGNKMSNVENEVQTHAYQNFGDQADVLFNVPKEHRQFSPRNLTQKTDEDLLNAPEYAVFPNGGSNFSNLHASKVASHSNSKFPMQSPHGNANKKGSLMSSAGSVSQYQHLNGDSHDIDVSGWHTHTDGDYGNVLSNHGGSSYQGQPTETMYAQCLQANPDSPLGAAASMSPFQGRGFTGSGHLDSPGYQKAYLGSLFGQQKLQYGMPYLGNSGALNQNIYGNDSAFGIGMTYLTSPPSTPYISSPQGHVGQGNRLTRLPAVFGSVWESLYTAETRNCFY

SEQ ID NO: 178767 - protein, 989 aa, Zea Mays
MAPSQAAAAAGPTFEDLERDLQAVLMDQNHMSPVDDLGMFRSGSAPPTVEGSRTAIGALFSGPPLHANSLGAGGGSGGTASGLDVLTDEEIRSHPAYLSYYYSNEHLNPRLPPPMVSKEDWRAAQWFQAVSGGIGDRRRRPAEVGSGNSLFSVQPGANEVGGEKALLSDRMERSGRNGLARQQSSEWLGRGSDGLIGLSDASALGSPRKSFADALQENISRPAVIAGHLSRSNSRNVLEGPTPIRSSDSRKPQLQNRSESMNGLRSGSTSPSLVRVQSLGSSMSHTFASAVGSSISRSTTPDPQLIRRTPSPCLPPVGVRMGSSDKKVEASVSSLNHDGADIVATLSSLSLSGNKMSNVENEVQTHAYQNFGDQADVLFNVPKEHRQFSPRNLTQKTDEDLLNAPEYAVFPNGGSNFSNLHASKVASHSNSKFPMQSPHGNANKKGSLMSSAGSVSQYQHLNGDSHDIDVSGWHTHTGGFTSSMLNNQLNPDGDYGNVLSNHGGSSYQGQPTETMYAQCLQANPDSPLGAAASMSPFQGRGFTGSGHLDSPGYQKAYLGSLFGQQKLQYGMPYLGNSGALNQNIYGNDSAFGIGMTYLTSPPSTPYISSPQGHVGQGNRLTRLPAVVRNTAGGSMGSWNSENGLMDNGYGSSLLEEFKSNKTRSFELLDIVGHVVEFSSDQYGSRFIQQKLETASTEQKNMIFPEILPQARTLMTDVFGNYVIQKFFEYGTETQTKQLATLLKGFVLQLSLQMYGCRVIQKALEVVEVEQQTQMALELDGSIMRCVRDQNGNHVIQKCIECIPQERIRFIISAFYGHVVELSMHPYGCRVIQRILEHCDDESTQNAMMEEIMQSVVTLTEDQYGNYVIQHVLQYGKPEERSTIIAQLAGQIVKMSQQKFASNVVEKCLTFGSPEQRQILINEMLGTTDENEPLQKVLETCDDQNRELILSRIKVHLNALKRYTYGKHIVTRVEKLIAAGERRIGALPSC

SEQ ID NO: 178768 - protein, 996 aa, Zea Mays
MAPSQAAAAAGPTFEDLERDLQAVLMDQNHMSPVDDLGMFRSGSAPPTVEGSRTAIGALFSGPPLHANSLGAGGGSGGTASGLDVLTDEEIRSHPAYLSYYYSNEHLNPRLPPPMVSKEDWRAAQWFQAVSGGIGDRRRRPAEVGSGNSLFSVQPGANEVGGEKALLSDRMERSGRNGLARQQSSEWLGRGSDGLIGLSDASALGSPRKSFADALQENISRPAVIAGHLSRSNSRNVLEGPTPIRSSDSRKPQLQNRSESMNGLRSGSTSPSLVRVQSLGSSMSHTFASAVGSSISRSTTPDPQLIRRTPSPCLPPVGVRMGSSDKKVEASVSSLNHDGADIVATLSSLSLSGNKMSNVENEVQTHAYQNFGDQADVLFNVPKEHRQFSPRNLTQKTDEDLLNAPEYAVFPNGGSNFSNLHASKVASHSNSKFPMQSPHGNANKKGSLMSSAGSVSQYQHLNGDSHDIDVSGWHTHTGGFTSSMLNNQLNPDGDYGNVLSNHGGSSYQGQPTETMYAQCLQANPDSPLGAAASMSPFQGRGFTGSGHLDSPGYQKAYLGSLFGQQKLQYGMPYLGNSGALNQNIYGNDSAFGIGMTYLTSPPSTPYISSPQGHVGQGNRLTRLPAVVRNTAGGSMGSWNSENGLMDNGYGSSLLEEFKSNKTRSFELLDIVGHVVEFSSDQYGSRFIQQKLETASTEQKNMIFPEILPQARTLMTDVFGNYVIQKFFEYGTETQTKQLATLLKGFVLQLSLQMYGCRVIQKALEVVEVEQQTQMALELDGSIMRCVRDQNGNHVIQKCIECIPQERIRFIISAFYGHVVELSMHPYGCRVIQRILEHCDDESTQNAMMEEIMQSVVTLTEDQYGNYVIQHVLQYGKPEERSTIIAQLAGQIVKMSQQKFASNVVEKCLTFGSPEQRQILINEMLGTTDENEPLQAMMKDQFANYVVQKVLETCDDQNRELILSRIKVHLNALKRTAHWRTTLLLRWQWLGHLYSRR

SEQ ID NO: 178769 - protein, 898 aa, Zea Mays
MAPSQAAAAAGPTFEDLERDLQAVLMDQNHMSPVDDLGMFRSGSAPPTVEGSRTAIGALFSGPPLHANSLGAGGGSGGTASGLDVLTDEEIRSHPAYLSYYYSNEHLNPRLPPPMVSKEDWRAAQWFQAVSGGIGDRRRRPAEVGSGNSLFSVQPGANEVGGEKALLSDRMERSGRNGLARQQSSEWLGRGSDGLIGLSDASALGSPRKSFADALQENISRPAVIAGHLSRSNSRNVLEGPTPIRSSDSRKPQLQNRSESMNGLRSGSTSPSLVRVQSLGSSMSHTFASAVGSSISRSTTPDPQLIRRTPSPCLPPVGVRMGSSDKKVEASVSSLNHDGADIVATLSSLSLSGNKMSNVENEVQTHAYQNFGDQADVLFNVPKEHRQFSPRNLTQKTDEDLLNAPEYAVFPNGGSNFSNLHASKVASHSNSKFPMQSPHGNANKKGSLMSSAGSVSQYQHLNGDSHDIDVSGWHTHTGGFTSSMLNNQLNPDGDYGNVLSNHGGSSYQGQPTETMYAQCLQANPDSPLGAAASMSPFQGRGFTGSGHLDSPGYQKAYLGSLFGQQKLQYGMPYLGNSGALNQNIYGNDSAFGIGMTYLTSPPSTPYISSPQGHVGQGNRLTRLPAVVRNTAGGSMGSWNSENGLMDNGYGSSLLEEFKSNKTRSFELLDIVGHVVEFSSDQYGSRFIQQKLETASTEQKNMIFPEILPQARTLMTDVFGNYVIQKFFEYGTETQTKQLATLLKGFVLQLSLQMYGCRVIQKALEVVEVEQQTQMALELDGSIMRCVRDQNGNHVIQKCIECIPQERIRFIISAFYGHVVELSMHPYGCRVIQRILEHCDDESTQNAMMEEIMQSVVTLTEDQYACPAIWETRRAFYYNCTTRWTDSEDEPAEICIQCC

SEQ ID NO: 178770 - protein, 988 aa, Zea Mays
MAPSQAAAAAGPTFEDLERDLQAVLMDQNHMSPVDDLGMFRSGSAPPTVEGSRTAIGALFSGPPLHANSLGAGGGSGGTASGLDVLTDEEIRSHPAYLSYYYSNEHLNPRLPPPMVSKEDWRAAQWFQAVSGGIGDRRRRPAEVGSGNSLFSVQPGANEVGGEKALLSDRMERSGRNGLARQQSSEWLGRGSDGLIGLSDASALGSPRKSFADALQENISRPAVIAGHLSRSNSRNVLEGPTPIRSSDSRKPQLQNRSESMNGLRSGSTSPSLVRVQSLGSSMSHTFASAVGSSISRSTTPDPQLIRRTPSPCLPPVGVRMGSSDKKVEASVSSLNHDGADIVATLSSLSLSGNKMSNVENEVQTHAYQNFGDQADVLFNVPKEHRQFSPRNLTQKTDEDLLNAPEYAVFPNGGSNFSNLHASKVASHSNSKFPMQSPHGNANKKGSLMSSAGSVSQYQHLNGDSHDIDVSGWHTHTGGFTSSMLNNQLNPDGDYGNVLSNHGGSSYQGQPTETMYAQCLQANPDSPLGAAASMSPFQGRGFTGSGHLDSPGYQKAYLGSLFGQQKLQYGMPYLGNSGALNQNIYGNDSAFGIGMTYLTSPPSTPYISSPQGHVGQGNRLTRLPAVVRNTAGGSMGSWNSENGLMDNGYGSSLLEEFKSNKTRSFELLDIVGHVVEFSSDQYGSRFIQQKLETASTEQKNMIFPEILPQARTLMTDVFGNYVIQKFFEYGTETQTKQLATLLKGFVLQLSLQMYGCRVIQKALEVVEVEQQTQMALELDGSIMRCVRDQNGNHVIQKCIECIPQERIRFIISAFYGHVVELSMHPYGCRVIQRILEHCDDESTQNAMMEEIMQSVVTLTEDQYGNYVIQHVLQYGKPEERSTIIAQLAGQIVKMSQQKFASNVVEKCLTFGSPEQRQILINEMLGTTDENEPLQVLETCDDQNRELILSRIKVHLNALKRYTYGKHIVTRVEKLIAAGERRIGALPSC

SEQ ID NO: 178771 - protein, 672 aa, Zea Mays
MAPSQAAAAAGPTFEDLERDLQAVLMDQNHMSPVDDLGMFRSGSAPPTVEGSRTAIGALFSGPPLHANSLGAGGGSGGTASGLDVLTDEEIRSHPAYLSYYYSNEHLNPRLPPPMVSKEDWRAAQWFQAVSGGIGDRRRRPAEVGSGNSLFSVQPGANEVGGEKALLSDRMERSGRNGLARQQSSEWLGRGSDGLIGLSDASALGSPRKSFADALQENISRPAVIAGHLSRSNSRNVLEGPTPIRSSDSRKPQLQNRSESMNGLRSGSTSPSLVRVQSLGSSMSHTFASAVGSSISRSTTPDPQLIRRTPSPCLPPVGVRMGSSDKKVEASVSSLNHDGADIVATLSSLSLSGNKMSNVENEVQTHAYQNFGDQADVLFNVPKEHRQFSPRNLTQKTDEDLLNAPEYAVFPNGGSNFSNLHASKVASHSNSKFPMQSPHGNANKKGSLMSSAGSVSQYQHLNGDSHDIDVSGWHTHTDGDYGNVLSNHGGSSYQGQPTETMYAQCLQANPDSPLGAAASMSPFQGRGFTGSGHLDSPGYQKAYLGSLFGQQKLQYGMPYLGNSGALNQNIYGNDSAFGIGMTYLTSPPSTPYISSPQGHVGQGNRLTRLPAVVRNTAGGSMGSWNSENGLMDNGYGSSLLEEFKSNKTRSFELLDIVGHVVEFRYYFLEILT

SEQ ID NO: 178772 - protein, 671 aa, Zea Mays
MAPSQAAAAAGPTFEDLERDLQAVLMDQNHMSPVDDLGMFRSGSAPPTVEGSRTAIGALFSGPPLHANSLGAGGGSGGTASGLDVLTDEEIRSHPAYLSYYYSNEHLNPRLPPPMVSKEDWRAAQWFQAVSGGIGDRRRRPAEVGSGNSLFSVQPGANEVGGEKALLSDRMERSGRNGLARQQSSEWLGRGSDGLIGLSDASALGSPRKSFADALQENISRPAVIAGHLSRSNSRNVLEGPTPIRSSDSRKPQLQNRSESMNGLRSGSTSPSLVRVQSLGSSMSHTFASAVGSSISRSTTPDPQLIRRTPSPCLPPVGVRMGSSDKKVEASVSSLNHDGADIVATLSSLSLSGNKMSNVENEVQTHAYQNFGDQADVLFNVPKEHRQFSPRNLTQKTDEDLLNAPEYAVFPNGGSNFSNLHASKVASHSNSKFPMQSPHGNANKKGSLMSSAGSVSQYQHLNGDSHDIDVSGWHTHTGGFTSSMLNNQLNPDGDYGNVLSNHGGSSYQGQPTETMYAQCLQANPDSPLGAAASMSPFQGRGFTGSGHLDSPGYQKAYLGSLFGQQKLQYGMPYLGNSGALNQNIYGNDSAFGIGMTYLTSPPSTPYISSPQGHVGQGNRLTRLPAVVRNTAGGSMGSWNSENGLMDNGYGSSLLEEFKIRISMGVALYSRN

SEQ ID NO: 178773 - protein, 89 aa, Zea Mays
MDAQPNWRGGPAATRISYKNATIVMCAFNLFVAALLLHNYYSSWTRIAGGNKLDSAQLRYIWESEELRRAMEPVDLIRRVCFRALCEGN

SEQ ID NO: 178774 - protein, 571 aa, Zea Mays
MIMEQGMWKEGMPDEEPLNVVARLMGLHDAPVQQSNFHLARQLDKEYQRGGFEENYRNLKPNKESKCHQNQKAGHTWNGSGDQPSRINSSRSKHQGNEPCCEKRMSLVREKFAEAKRLATDEKLLHSKEFQDALQFLSSNRDLFLEFLDEPNPLLSSNRYEFQPVAPPSQAKQITILKPSELAKRKGSILVGRQLFSDGDERGLNRYRRHQSLDVCPANSNLSEPTKIVLLKPGRLSKPHDSRIARSSLSSAENSEDESMTTVDETVCSRRLAKEVTWQTRMRLKDKQDEKSTLSCEYLDFYIGDDSFSKSEVEISKEMPGETSEELEFGTPTSGRSWDFLSRSGSPYSASCSSQASHRREPSVVREGKKKILERWSMVSSTVSSEEEMEGRRSTGTLGDILTIPKVKDQEGIGAETLGSPAPELEPEEPFSCLPRSRSLPLSLSCGVAESNGGVASGSTQEAERERIRKSSSFREKVSSLFSKNKKPVREKADLSVSNRLEVYGGAETTADVKKGLNRLALDNLQKQSTSRVNTDGKKNAAQGLVTSSCGTNDTANTTPAKVIQNLLLSC

SEQ ID NO: 178775 - protein, 324 aa, Zea Mays
MSSNCGEDEKELVCVTGAGGFIGSWVVNELLQRGYRVRGTARDPADSKNAHLLALEGAKERLTLCRADVLDRASLRAAFAGCHGVFHVASPVSNDPELVPVAVEGTRNVINAAADEGARRVVFTSSYGAVHMDPSRSPDAVLDETCWSDYDFCKRTDNLYCCAKMMAEVTAAAEADARGLQLAVVLPCMTTGPMLQQTLNFSTNHVARYLMGTKRSIPNAVAAYVDVRDVARAHVLAYERPGARGRYLCIGTVLHRADLVDMLRDLFPQYPVTAKCEEDGKPMAKPFKFSNQRLRDLGLEFTPLRKSLYETVLCLQQKGHLPAA

SEQ ID NO: 178776 - protein, 1021 aa, Zea Mays
MSSRLKDRGGGRATAAATRPLTPKPFSISSSARQTTAAAGKENTASKPSKPTSAVRWSTSSLPRASRIQSSVDSSKLASTLRAPVLPGRTSISKDPVVEAGLRRSVSGGIRASSVEKGRRSISVVGSRASEARRGSAGAGSDDTGRRARFDAKAKGSDEISRKRGDLDAKGKQTDEIGRKRESFDAKAKQIGGKRDSFCVNVLKQCDENKGKTNAFVTNMKKQCEDVGGQIKGSDSKVKAAEEINMKKEGPNKLMKEMNTKKADPGEAASKSVECCAIQKDDDIGKTSVIPVFTVHVVNSNDVPDPIRKQQKNNEEGRKQEEKVKLADRIGVFEKVAAGGEGGSAKPVSAMNRYPSKLHEKLAALEGRVQKIATDIKKTKEMLDENNPNEPKQILSNIQKEITAIEKAISHVKDDNKIQLGTADSSECESSHPETAEKCTITKPGNLKQAGKGLNADELEARFFPHHKLLRGRISSTSTQQELSVDAKKDCSGKTRPAASDPGDDENSIAMEFLASLDGEENDFFKDRRAKKLEKNKICEVADATSKTSSQGSTKNPVAPNHKDEVELLATEELEEFDDQENKSSMMLQEETEESCNSQLSGIGNKSSTGGWFVSEGEAVLLAHGDGTCSYYDIANHEFKSEYKPPSLVSNNTWGDCWLIRAPGVDGCSGRFVVAASAGNALEPGFCSWDYYTREVKSFHVEEEASQTFAPTSRAILGALSNVGSSRSSSALSNTERQQWWYKPCGPLLLSTASKQKMVTAYDIRDGDVVMKWEVSNLVMGMEYSSPLQWRSRGKVVIAGSESIGLWDVNSLNPQPLLSVASGKKVYCLHVNNTDAEVGGGVRQRVSSSEVEGNDGVFSTQESVNVFDFRVPAGIGLKIARHGGTANSIFSRGDSVFIGSTEGRLQIKGGSRSRVQQYSLRKGKLVATYELPEFNAHIHHSAITQVWGDSNLVLAACGMGLFAFDTFKEDTQPTYSFDRGNTIAAREAIGPDDLYCPTFDYSSSRVLLVSRDRPAHWSYAP

SEQ ID NO: 178777 - protein, 193 aa, Zea Mays
MNLISVAFGIKIKYGLGKDTLLVCKEITSSGVGLVIIEPSQLSYFSRDMLRGYPDDFERFSYFSRASLDYIVKSGKRPDIIHIHNWETAIVAPLFWEIFAHQGLGNTRILLTCQDLNSECLEEPNKLEMCGLDPRKLHRPDRLQDTNKTHLVNILKGGIVYSNKVVLMSSTHSKDALIQGSRHELQSTLAAHR

SEQ ID NO: 178778 - protein, 300 aa, Zea Mays
METPRLVVGAASRAPPPAPRSQRRRILRPCGGAHCSPSARAAPPVLLTRCSSYSSSREGNGDSHGKARRESSGSVRLDVEADSDQVPSLADEQREGDITELFNLAQRNILYINKQRLIAMEEMKKLHDENNLLLEEIQGLETEMQGIPLEAAQSSSFSELLLRIDTMVISGMISMTEASDLREKLVTNRSIIQSTFCDIHHKPNTELLSELQLFLRKPIEKPLHIVHICSEMYPVASCGPLSAYVASLSCEIQKKANLVEVILPKYTSINLDGIHGLRRSEAEYESYFGGLWHKNKIWTG

SEQ ID NO: 178779 - protein, 310 aa, Zea Mays
MPRLEFRSKYSCLEEPNKLEMCGLDPRKLHRPDRLQDTNKTHLVNILKGGIVYSNKVVLMSSTHSKDALIQGSRHELQSTLAAHREKILVASYGLDGELWDPFKDIYLPRRYSANDIEGKSICRQALRRRLRFNGDSSIIVGCICDDNSDVHSLKEAVHVALHRNTQVIIMETLGSVVNSILQALKGEIKGDKIAFVEAYDEALAHLIYAGSDIILCSSFQDPSLQIAMKAMKYGSVPVQLNFSSDESRESKGHECRNTVMSQYIISTYGDLSLSQALDDFIKDGMARGSSWDAKCYSLHWEAYSSITKL

SEQ ID NO: 178780 - protein, 294 aa, Zea Mays
METPRLVVGAASRAPPPAPRSQRRRILRPCGGAHCSPSARAAPPVLLTRCSSYSSSREGNGDSHGKARRESSGSVRLDVEADSDQVPSLADEQREGDITELFNLAQRNILYINKQRLIAMEEMKKLHDENNLLLEEIQGLETEMQAQSSSFSELLLRIDTMVISGMISMTEASDLREKLVTNRSIIQSTFCDIHHKPNTELLSELQLFLRKPIEKPLHIVHICSEMYPVASCGPLSAYVASLSCEIQKKANLVEVILPKYTSINLDGIHGLRRSEAEYESYFGGLWHKNKIWTG

SEQ ID NO: 178781 - protein, 320 aa, Zea Mays
MPRLEFRSKYSCLEEPNKLEMCGLDPRKLHRPDRLQDTNKTHLVNILKGGIVYSNKVVLMSSTHSKDALIQGSRHELQSTLAAHREKILVASYGLDGELWDPFKDIYLPRRYSANDIEGKSICRQALRRRLRFNGDSSIIVGCICDDNSDVHSLKEAVHVALHRNTQVIIMETLGSVVNSILQALKGEIKGDKIAFVEAYDEALAHLIYAGSDIILCSSFQDPSLQIAMKAMKYGSVPVQLNFSSDESRESKGHECRNTVMSQYIISTYGDLSLSQALDDFKNDPSHWDRQIKDGMARGSSWDAKCYSLHWEAYSSITKL

SEQ ID NO: 178782 - protein, 520 aa, Zea Mays
METPRLVVGAASRAPPPAPRSQRRRILRPCGGAHCSPSARAAPPVLLTRCSSYSSSREGNGDSHGKARRESSGSVRLDVEADSDQVPSLADEQREGDITELFNLAQRNILYINKQRLIAMEEMKKLHDENNLLLEEIQGLETEMQGIPLEAAQSSSFSELLLRIDTMVISGMISMTEASDLREKLVTNRSIIQSTFCDIHHKPNTELLSELQLFLRKPIEKPLHIVHICSEMYPVASCGPLSAYVASLSCEIQKKANLVEVILPKYTSINLDGIHGLRRSEAEYESYFGGLWHKNKIWTGTSSGVGLVIIEPSQLSYFSRDMLRGYPDDFERFSYFSRASLDYIVKSGKRPDIIHIHNWETAIVAPLFWEIFAHQGLGNTRILLTCQDLNSECLEEPNKLEMCGLDPRKLHRPDRLQDTNKTHLVNILKGGIVYSNKVVLMSSTHSKDALIQGSRHELQSTLAAHREKILVASYGLDGELWDPFKDIYLPRRYSANDIEGKSICRQALRRRLRFNGRMYL

SEQ ID NO: 178783 - protein, 436 aa, Zea Mays
MNLISVAFGIKIKYGLGKDTLLVCKEITSSGVGLVIIEPSQLSYFSRDMLRGYPDDFERFSYFSRASLDYIVKSGKRPDIIHIHNWETAIVAPLFWEIFAHQGLGNTRILLTCQDLNSECLEEPNKLEMCGLDPRKLHRPDRLQDTNKTHLVNILKGGIVYSNKVVLMSSTHSKDALIQGSRHELQSTLAAHREKILVASYGLDGELWDPFKDIYLPRRYSANDIEGKSICRQALRRRLRFNGDSSIIVGCICDDNSDVHSLKEAVHVALHRNTQVIIMETLGSVVNSILQALKGEIKGDKIAFVEAYDEALAHLIYAGSDIILCSSFQDPSLQIAMKAMKYGSVPVQLNFSSDESRESKGHECRNTVMSQYIISTYGDLSLSQALDDFVSLQSQGRISILSRAAHCAQSISLNRLNNVLNNNIGQSCNRKAQEDD

SEQ ID NO: 178784 - protein, 314 aa, Zea Mays
MNLISVAFGIKIKYGLGKDTLLVCKEITSSGVGLVIIEPSQLSYFSRDMLRGYPDDFERFSYFSRASLDYIVKSGKRPDIIHIHNWETAIVAPLFWEIFAHQGLGNTRILLTCQDLNSECLEEPNKLEMCGLDPRKLHRPDRLQDTNKTHLVNILKGGIVYSNKVVLMSSTHSKDALIQGSRHELQSTLAAHREKILVASYGLDGELWDPFKDIYLPRRYSANDIEGKSICRQALRRRLRFNGDSSIIVGCICDDNSDVHSLKEAVHVALHRNTQVIIMETLGSVVNSILQALKGEIKALISFFALPSKIHHCK

SEQ ID NO: 178785 - protein, 587 aa, Zea Mays
METPRLVVGAASRAPPPAPRSQRRRILRPCGGAHCSPSARAAPPVLLTRCSSYSSSREGNGDSHGKARRESSGSVRLDVEADSDQVPSLADEQREGDITELFNLAQRNILYINKQRLIAMEEMKKLHDENNLLLEEIQGLETEMQGIPLEAAQSSSFSELLLRIDTMVISGMISMTEASDLREKLVTNRSIIQSTFCDIHHKPNTELLSELQLFLRKPIEKPLHIVHICSEMYPVASCGPLSAYVASLSCEIQKKANLVEVILPKYTSINLDGIHGLRRSEAEYESYFGGLWHKNKIWTGTSSGVGLVIIEPSQLSYFSRDMLRGYPDDFERFSYFSRASLDYIVKSGKRPDIIHIHNWETAIVAPLFWEIFAHQGLGNTRILLTCQDLNSECLEEPNKLEMCGLDPRKLHRPDRLQDTNKTHLVNILKGGIVYSNKVVLMSSTHSKDALIQGSRHELQSTLAAHREKILVASYGLDGELWDPFKDIYLPRRYSANDIEGKSICRQALRRRLRFNGDSSIIVGCICDDNSDVHSLKEAVHVALHRNTQVIIMETLGSVVNSILQALKGEIKALISFFALPSKIHHCK

SEQ ID NO: 178786 - protein, 650 aa, Zea Mays
METPRLVVGAASRAPPPAPRSQRRRILRPCGGAHCSPSARAAPPVLLTRCSSYSSSREGNGDSHGKARRESSGSVRLDVEADSDQVPSLADEQREGDITELFNLAQRNILYINKQRLIAMEEMKKLHDENNLLLEEIQGLETEMQAQSSSFSELLLRIDTMVISGMISMTEASDLREKLVTNRSIIQSTFCDIHHKPNTELLSELQLFLRKPIEYTSINLDGIHGLRRSEAEYESYFGGLWHKNKIWTGTSSGVGLVIIEPSQLSYFSRDMLRGYPDDFERFSYFSRASLDYIVKSGKRPDIIHIHNWETAIVAPLFWEIFAHQGLGNTRILLTCQDLNSECLEEPNKLEMCGLDPRKLHRPDRLQDTNKTHLVNILKGGIVYSNKVVLMSSTHSKDALIQGSRHELQSTLAAHREKILVASYGLDGELWDPFKDIYLPRRYSANDIEGKSICRQALRRRLRFNGDSSIIVGCICDDNSDVHSLKEAVHVALHRNTQVIIMETLGSVVNSILQALKGEIKGDKIAFVEAYDEALAHLIYAGSDIILCSSFQDPSLQIAMKAMKYGSVPVQLNFSSDESRESKGHECRNTVMSQYIISTYGDLSLSQALDDFKNDPSHWDRQIKDGMARGSSWDAKCYSLHWEAYSSITKL

SEQ ID NO: 178787 - protein, 120 aa, Zea Mays
MDSSGGRIGCRKTDCASRRPRLLQSGWTRTPFHGCSRRRRRRLPRRCGTCSVLATTAHHDPRSRVFSGGPLRSAPAGGAPCSTARGMPRLESSLVRPCARACMPYCCCHAILWIPARAFL

SEQ ID NO: 178788 - protein, 70 aa, Zea Mays
MMTVSRCGLWDEGGGHRQAGRGGKRPNRTGRAAATQQASTNRCQTLVSENQTTDCRGDMDEGPKRDELLY

SEQ ID NO: 178789 - protein, 61 aa, Zea Mays
MSKKQGQAWLRVPVTNLCMSSSFFYVNNKHKQLTLYIIRSEALYVFRHLVNTSPIVQEPEF

SEQ ID NO: 178790 - protein, 160 aa, Zea Mays
MFESPNKIADFEMKLMDIDSEHLGIPDSEYQAIVRMPSAEFMRICKDLSSIGDTVVISVTKEGVKFSTSGEIGSANIVCRQNQTIDKPEEATIIEMQEPVSLTFALRYMNSFTKASSLSEQVTISLSSELPVVVEYKIAEMGYIRFYLAPKIDDDEEMKP

SEQ ID NO: 178791 - protein, 197 aa, Zea Mays
MLELRLVQGSLLKKVLEAIRELVTDANFDCSGTGFSLQAMDSSHVALVALLLRAEGFEHYRCDRNLSMGMNLNNMAKMLRCAGNEDIITIKADDGSDTVTFMFESPKQDKIADFEMKLMDIDSEHLGIPDSEYQAIVRMPSAEFMRICKDLSSIGDTVVISVTKEGVKFSTSGEIGSANIVCRQNQTIDKRCRSRFP

SEQ ID NO: 178792 - protein, 77 aa, Zea Mays
MIYEAGLAEESKLTYVEEQLGDAIVGESEQLQRPLGNPRLKEGTSLRISTAKLAKLKSNCISMIRQEVVYLRASDSS

SEQ ID NO: 178793 - protein, 181 aa, Zea Mays
MARRGLPPFVQGFGVCVVVFLLALCGPSGEVVHCVELNNNDSGRALYLGLPLPVLFRHYVSAPTRYAMIYEAGLAEESKLTYVEEQLGDAIVGESEQLQRPLGNPRLKEGSGVLAGLRLVVEHIRRRLELRPRHLHSPPSCRSPRFLASQAQTLLVPLANESKPVWAEFRFLRRLLSSIAS

SEQ ID NO: 178794 - protein, 364 aa, Zea Mays
MRCCQMKRRGRCMTNMVKLGLRVRLEARVELTQPTHLICLRHSLEAAWVVFLAWTRARLGQAGKILFYRVKTSEAIFGTEKYIILSHLETCDTCGGSGSKAGSKMRICSTCGGRGQVMRTEQTPFGLFSQVSICPTCAGEGEVISEYCRKCSGEGRIRVRKEIKVKIPPGVSKGSTLRVRGEGDAGSKGGPPGDLFVCLDIEEPSDIKRDGINLYSTVSISYLEAILGTIKKVRTVDGTNDLRIPPGTQPGDVIALAKQGVPSLNKPTIRGDHLFTVKVAIPKRISGRERELLEELASLSNGGFVRTDAKPKPAQPKRVHLEKEVGASQEDTDKSKAAGDWLKKLTHFAGSIANGAAKWLKENL

SEQ ID NO: 178795 - protein, 266 aa, Zea Mays
MALTSFPFAPSNTSLSYSSRASTAAAFAPRGVHFAAPGRSGGGQPLACAAPRCRGRAPRRRRGGGLLVWAAADYYATLGVPRAASNKDIKAAYRKLARQYHPDVNKEPGATEKFKEISAAYEVLSDEKKRTLYDQYGEAGVKSAVGGSGGAYTTNPFDLFETFFGGSMGGFSGMDQSTFRTSRQNTVLQGEDIRYDVVLGFTEAIFGTEKYIILSHLETCDTCGGSGSKAGSKMRICSTCGGRGQVMRTEQTPFGLFSQEIYVSFD

SEQ ID NO: 178796 - protein, 361 aa, Zea Mays
MTTGAMCLVALLKLSSRFPLTSERIKQIVAQNKGNVVLELQQRSIEFTSIIQRHQSIRSSLLERMPVLDEASYLVKRATATQSTISADKIAPTVTPGSLKLPNGVAKPTSAPLADLLDFSSDGAPASTVASTTTPNDFLQDLLGIGGVSSSTTGVTSTASTDILMDLLSIGSSPSQNGTPVTDFRHPGQAESKPVPGVPEAVDLLGSLSPAESKPTPVVPKDMDLLDGLSSNTSISGHENTTHPSITAFQSATLKITFDFKMKLGNPRETTIHATFTNLTSSTFTDFIFQAAVPKFIQLRLDPASGNTVPANGSGSVTQGLNITNNQQGQKPLAMRIRMSYKVNGEDRLEQGQVSNFPSGL

SEQ ID NO: 178797 - protein, 475 aa, Zea Mays
MIQMFSQEKLWYLDQMFNVLSLAGNHVKDDICHALIVVLSNTSELQGYSVRSLYKALQEYGKQGSLVRVAVWCIGEYGEMLVNNVGMLDGEEPIKVTESDAVDAVEVALNRYSADMTTGAMCLVALLKLSSRFPLTSERIKQIVAQNKGNVVLELQQRSIEFTSIIQRHQSIRSSLLERMPVLDEASYLVKRATATQSTISADKIAPTVTPGSLKLPNGVAKPTSAPLADLLDFSSDGAPASTVASTTTPNDFLQDLLGIGGVSSSTTGVTSTASTDILMDLLSIGSSPSQNGTPVTDFRHPGQESKPVPGVPEAVDLLGSLSPAESKPTPVVPKDMDLLDGLSSNTSISGHENTTHPSITAFQSATLKITFDFKMKLGNPRETTIHATFTNLTSSTFTDFIFQAAVPKFIQLRLDPASGNTVPANGSGSVTQGLNITNNQQGQKPLAMRIRMSYKVNGEDRLEQGQVSNFPSGL

SEQ ID NO: 178798 - protein, 749 aa, Zea Mays
MARDLSPEVERLMRSREVNTKKKAALCSIRIVRKVPDLAENFMGLAASLLKEKHHGVLISAIQLCTELCKASKDSLEYLRKNCIEGLARILRDVSNRSYAPEYDVSGIVDPFLHIRVLKLLRILGQGDADCSEYMNDILAQVATKTESNKNAGNAILYECVQTIMGIEATSGLRVLAINILGRFLSNRDNNIRYVALNMLMRAITVDALAVQRHRTTILECVKDADASIRKRALELVYLLVNDTNVKPLTKELIDYLNIADPDFIGDLTVNICSIVEKFSQEKLWYLDQMFNVLSLAGNHVKDDICHALIVVLSNTSELQGYSVRSLYKALQEYGKQGSLVRVAVWCIGEYGEMLVNNVGMLDGEEPIKVTESDAVDAVEVALNRYSADMTTGAMCLVALLKLSSRFPLTSERIKQIVAQNKGNVVLELQQRSIEFTSIIQRHQSIRSSLLERMPVLDEASYLVKRATATQSTISADKIAPTVTPGSLKLPNGVAKPTSAPLADLLDFSSDGAPASTVASTTTPNDFLQDLLGIGGVSSSTTGVTSTASTDILMDLLSIGSSPSQNGTPVTDFRHPGQESKPVPGVPEAVDLLGSLSPAESKPTPVVPKDMDLLDGLSSNTSISGHENTTHPSITAFQSATLKITFDFKMKLGNPRETTIHATFTNLTSSTFTDFIFQAAVPKFIQLRLDPASGNTVPANGSGSVTQGLNITNNQQGQKPLAMRIRMSYKVNGEDRLEQGQVSNFPSGL

SEQ ID NO: 178799 - protein, 460 aa, Zea Mays
MFNVLSLAGNHVKDDICHALIVVLSNTSELQGYSVRSLYKALQEYGKQGSLVRVAVWCIGEYGEMLVNNVGMLDGEEPIKVTESDAVDAVEVALNRYSADMTTGAMCLVALLKLSSRFPLTSERIKQIVAQNKGNVVLELQQRSIEFTSIIQRHQSIRSSLLERMPVLDEASYLVKRATATQSTISADKIAPTVTPGSLKLPNGVAKPTSAPLADLLDFSSDGAPASTVASTTTPNDFLQDLLGIGGVSSSTTGVTSTASTDILMDLLSIGSSPSQNGTPVTDFRHPGQESKPVPGVPEAVDLLGSLSPAESKPTPVVPKDMDLLDGLSSNTSISGHENTTHPSITAFQSATLKITFDFKMKLGNPRETTIHATFTNLTSSTFTDFIFQAAVPKFIQLRLDPASGNTVPANGSGSVTQGLNITNNQQGQKPLAMRIRMSYKVNGEDRLEQGQVSNFPSGL

SEQ ID NO: 178800 - protein, 785 aa, Zea Mays
MDTVEKIVEDFASDIAVSPFSSGTSLREMIRAIRACKTAAEERAVVRRECAAIRTAISENEPELRHRNMAKLMFIHMLGYPTHFAQMECLKLIAAAGFPEKRVGYLGLMLLLDERQEVLMLVTNSLKQDLNHTNQFIVGLALCALGNICSAEMARDLSPEVERLMRSREVNTKKKAALCSIRIVRKVPDLAENFMGLAASLLKEKHHGVLISAIQLCTELCKASKDSLEYLRKNCIEGLARILRDVSNRSYAPEYDVSGIVDPFLHIRVLKLLRILGQGDADCSEYMNDILAQVATKTESNKNAGNAILYECVQTIMGIEATSGLRVLAINILGRFLSNRDNNIRYVALNMLMRAITVDALAVQRHRTTILECVKDADASIRKRALELVYLLVNDTNVKPLTKELIDYLNIADPDFIGDLTVNICSIVEKFSQEKLWYLDQMFNVLSLAGNHVKDDICHALIVVLSNTSELQGYSVRSLYKALQEYGKQGSLVRVAVWCIGEYGEMLVNNVGMLDGEEPIKVTESDAVDAVEVALNRYSADMTTGAMCLVALLKLSSRFPLTSERIKQIVAQNKGNVVLELQQRSIEFTSIIQRHQSIRSSLLERMPVLDEASYLVKRATATQSTISADKIAPTVTPGSLKLPNGVAKPTSAPLADLLDFSSDGAPASTVASTTTPNDFLQDLLGIGGVSSSTTGVTSTASTDILMDLLSIGSSPSQNGTPVTDFRHPGQESKPVPGVPEAVDLLGSLSPAESKPTPVVPKDMDLLDGLSSNTSISVHPIETGSG

SEQ ID NO: 178801 - protein, 197 aa, Zea Mays
MMHAGVGPTNQTHEARPRPLQSPPPSLQIWASDLTRLLAHVMDGRCHCHGGPDVREREKASQPATSCWLLPAPGIIMEYGGFHCKQAKRSGCSSKESSKNSLESQGCRVQAWRHEGGNASPCMPSTAPETAPHTHTHYFLFVFLLASTCYYMSLFEVYIFLFYSKMFVLPVWVTRCSSMHMHPSISSARPYNTPRDM

SEQ ID NO: 178802 - protein, 531 aa, Zea Mays
MAGGGTGIRKYMGALKDTTTVSIAKVNSDYKELDIAIVKATNHVENPTKEKYVRDIFYHLSPGRPRADVAYCIRALGRRLSKTRNWAVAMKTLIVIHRALREVDPAFREELISYGRSSSHMLYLSYFKDDSSAEAWDYSAWVRNYALYLEEKLESFRVLNYDVEKDPLQIRDLDTNGLLDQLPALQQLLFRLLGCQPQGASSYNVIIQHALSMFFEMQRDDAIRALGMYRRAIEQAEQLSEFYEVCKSIHIGRGERFLKIEQPPASFLATMEEYVSNAPLASTVQRNQAVLAIEDSKKSEVEESQPTLPPPHSPAQESGPEPVQQVPPAADPTDLLGINEPTPATSEIDQKNAGALAMVPQDNAPKAPASTTSSGSVETSWELALVTAPSSNGTAVTPSKLAGGLDLLTLDSLYNEAHRRAQQNASYNPWETNPASGPVMQQQMYDPFYASNHPVAAARNVQMAAMEQQQQQQHAFVLQQQQQQQMIVMMMAQQQQQQASSNPLYTAAAAHTYGAGVQLHAGNAYSGAGMM

SEQ ID NO: 178803 - protein, 314 aa, Zea Mays
MAGGGTGIRKYMGALKDTTTVSIAKVNSDYKELDIAIVKATNHVENPTKEKYVRDIFYHLSPGRPRADVAYCIRALGRRLSKTRNWAVAMKTLIVIHRALREVDPAFREELISYGRSSSHMLYLSYFKDDSSAEAWDYSAWVRNYALYLEEKLESFRVLNYDVEKDPLQIRDLDTNGLLDQLPALQQLLFRLLGCQPQGASSYNVIIQHALSMVALESVRIQTAINDGILNLVDKFFEMQRDDAIRALGMYRRAIEQAEQLSEFYEVCKSIHIGRAACILLGDYGGICEQCSPCFNSSKKSGCTGHRGQQKIRS

SEQ ID NO: 178804 - protein, 665 aa, Zea Mays
MDPKMDSGIERSRYNSIDEAIEDGVAPIPLSLDRTLDVQRSIDVMDHLFSCEATWHKGHTLAQTVFTCIYLMRMERTSSHAVLNSFCRILRATCNAVISAVSTARTHEEEDLFTMSFGLPLRDEGDDKCLSILNSVEEIISRQLRACKAQALSKKKTLEGLESLQDNPDLEEDYCRALLCRLRFRKHFYHVIMCMRKPHGRGLELARKHVASCLTELNLMHKSRKFLKSQSSTMVQQSDGNCTTASGCQPVGFDVSLNSRLLSPTPPRAVKVLSWSNAIRYFERLLHDLDVICALSLNPVLDNVLHFIVQFQKTVPDLVPRAFLQTLLVQDGKLYGEYFFSDVISRALSLPDIIGDKEFQMNEFVVQLGQLVINLIKILCTNTAWQRRKLGKSLQDWSTISIQLELALKREFGETRNVLQNENMCMRVSKQLLIWTQEHAYWVAFRFLTLGFELDLYSPGEYSMVYWYMYVVLTKLIEKMQLRVLASSETSRRKGKKKKDHLKDSARDMAFSSSCLLPQCYLLLSEGLSMMLAVLRNESRSFQLPSIFNTEQERFMQHFDLLLKARVPEHISFYSFKESSSRAGMSDLVKYNFFKEIQKIVPSLRGSFASEPEKLAEVRRIEQVAEHNRIALNIISQVGAGDPSLRVSFEFTHHPHFAVAVVKRS

SEQ ID NO: 178805 - protein, 386 aa, Zea Mays
MYFERLLHDLDVICALSLNPVLDNVLHFIVQFQKTVPDLVPRAFLQTLLVQDGKLYGEYFFSDVISRALSLPDIIGDKEFQMNEFVVQLGQLVINLIKILCTNTAWQRRKLGKSLQDWSTISIQLELALKREFGETRNVLQNENMCMRVSKQLLIWTQEHAYWVAFRFLTLGFELDLYSPGEYSMVYWYMYVVLTKLIEKMQLRVLASSETSRRKGKKKKDHLKDSARDMAFSSSCLLPQCYLLLSEGLSMMLAVLRNESRSFQLPSIFNTEQERFMQHFDLLLKARVPEHISFYSFKESSSRAGMSDLVKYNFFKEIQKIVPSLRGSFASEPEKLAEVRRIEQVAEHNRIALNIISQVGAGDPSLRVSFEFTHHPHFAVAVVKRS

SEQ ID NO: 178806 - protein, 671 aa, Zea Mays
MSALEIMDPKMDSGIERSRYNSIDEAIEDGVAPIPLSLDRTLDVQRSIDVMDHLFSCEATWHKGHTLAQTVFTCIYLMRMERTSSHAVLNSFCRILRATCNAVISAVSTARTHEEEDLFTMSFGLPLRDEGDDKCLSILNSVEEIISRQLRACKAQALSKKKTLEGLESLQDNPDLEEDYCRALLCRLRFRKHFYHVIMCMRKPHGRGLELARKHVASCLTELNLMHKSRKFLKSQSSTMVQQSDGNCTTASGCQPVGFDVSLNSRLLSPTPPRAVKVLSWSNAIRYFERLLHDLDVICALSLNPVLDNVLHFIVQFQKTVPDLVPRAFLQTLLVQDGKLYGEYFFSDVISRALSLPDIIGDKEFQMNEFVVQLGQLVINLIKILCTNTAWQRRKLGKSLQDWSTISIQLELALKREFGETRNVLQNENMCMRVSKQLLIWTQEHAYWVAFRFLTLGFELDLYSPGEYSMVYWYMYVVLTKLIEKMQLRVLASSETSRRKGKKKKDHLKDSARDMAFSSSCLLPQCYLLLSEGLSMMLAVLRNESRSFQLPSIFNTEQERFMQHFDLLLKARVPEHISFYSFKESSSRAGMSDLVKYNFFKEIQKIVPSLRGSFASEPEKLAEVRRIEQVAEHNRIALNIISQVGAGDPSLRVSFEFTHHPHFAVAVVKRS

SEQ ID NO: 178807 - protein, 672 aa, Zea Mays
MEARSSSSAAAVPPPLSIPSSSDQCVWADASPLLAAACRDLEDGELVHGENFSLFAAMSALEIMDPKMDSGIERSRYNSIDEAIEDGVAPIPLSLDRTLDVQRSIDVMDHLFSCEEEDLFTMSFGLPLRDEGDDKCLSILNSVEEIISRQLRACKAQALSKKKTLEGLESLQDNPDLEEDYCRALLCRLRFRKHFYHVIMCMRKPHGRGLELARKHVASCLTELNLMHKSRKFLKSQSSTMVQQSDGNCTTASGCQPVGFDVSLNSRLLSPTPPRAVKVLSWSNAIRYFERLLHDLDVICALSLNPVLDNVLHFIVQFQKTVPDLVPRAFLQTLLVQDGKLYGEYFFSDVISRALSLPDIIGDKEFQMNEFVVQLGQLVINLIKILCTNTAWQRRKLGKSLQDWSTISIQLELALKREFGETRNVLQNENMCMRVSKQLLIWTQEHAYWVAFRFLTLGFELDLYSPGEYSMVYWYMYVVLTKLIEKMQLRVLASSETSRRKGKKKKDHLKDSARDMAFSSSCLLPQCYLLLSEGLSMMLAVLRNESRSFQLPSIFNTEQERFMQHFDLLLKARVPEHISFYSFKESSSRAGMSDLVKYNFFKEIQKIVPSLRGSFASEPEKLAEVRRIEQVAEHNRIALNIISQVGAGDPSLRVSFEFTHHPHFAVAVVKRS

SEQ ID NO: 178808 - protein, 241 aa, Zea Mays
MCMRKPHGRGLELARKHVASCLTELNLMHKSRKFLKSQSSTMVQQSDGNCTTASGCQPVGFDVSLNSRLLSPTPPRAVKVLSWSNAIRYFERLLHDLDVICALSLNPVLDNVLHFIVQFQKTVPDLVPRAFLQTLLVQDGKLYGEYFFSDVISRALSLPDIIGDKEFQMNEFVVQLGQLVINLIKILCTNTAWQRRKLGKSLQDWSTISIQLELALKREFGETRNVLQNEHEERGKRRRII

SEQ ID NO: 178809 - protein, 578 aa, Zea Mays
MILRATCNAVISAVSTARTHEEEDLFTMSFGLPLRDEGDDKCLSILNSVEEIISRQLRACKAQALSKKKTLEGLESLQDNPDLEEDYCRALLCRLRFRKHFYHVIMCMRKPHGRGLELARKHVASCLTELNLMHKSRKFLKSQSSTMVQQSDGNCTTASGCQPVGFDVSLNSRLLSPTPPRAVKVLSWSNAIRYFERLLHDLDVICALSLNPVLDNVLHFIVQFQKTVPDLVPRAFLQTLLVQDGKLYGEYFFSDVISRALSLPDIIGDKEFQMNEFVVQLGQLVINLIKILCTNTAWQRRKLGKSLQDWSTISIQLELALKREFGETRNVLQNENMCMRVSKQLLIWTQEHAYWVAFRFLTLGFELDLYSPGEYSMVYWYMYVVLTKLIEKMQLRVLASSETSRRKGKKKKDHLKDSARDMAFSSSCLLPQCYLLLSEGLSMMLAVLRNESRSFQLPSIFNTEQERFMQHFDLLLKARVPEHISFYSFKESSSRAGMSDLVKYNFFKEIQKIVPSLRGSFASEPEKLAEVRRIEQVAEHNRIALNIISQVGAGDPSLRVSFEFTHHPHFAVAVVKRS

SEQ ID NO: 178810 - protein, 311 aa, Zea Mays
MALRRITPRRRPVLPVPRAFSSSPPFPPPPPPANDPDPDAAQPPSSSPPPNSGAPRNPESSFFQDIKDRLRSSPTSPSPRRIPTTLPRPDPARGAPSSGPPIGDIRRMLQNFRLTGSTSDAPSTSAPGSNPSFMDLLKNHLDQGANARQAELGFNAIGESLKRPRPPKPFITPSSRNIFCRELERTSKALGARQEENGSAIELKGSYSYEELGKRLGELRPAGAGKDGKEWFSLKELQGRIAKLAEQESQLAGPFSEMRRGIRNLQKQGKPGRPVNIQALLNPVGQPTPDYMSGPPQVELLEKIICHPKRR

SEQ ID NO: 178811 - protein, 343 aa, Zea Mays
MALRRITPRRRPVLPVPRAFSSSPPFPPPPPPANDPDPDAAQPPSSSPPPNSGAPRNPESSFFQDIKDRLRSSPTSPSPRRIPTTLPRPDPARGAPSSGPPIGDIRRMLQNFRLTGSTSDAPSTSAPGSNPSFMDLLKNHLDQGANARQAELGFNAIGESLKRPRPPKPFITPSSRNIFCRELERTSKALGARQEENGSAIELKGSYSYEELGKRLGELRPAGAGKDGKEWFSLKELQGRIAKLAEQESQLAGPFSEMRRGIRNLQKQGKPGRPVNIQALLNPVGQPTPDYMSGPPQVELLEKYFHPDHMSSEEKMKLELQRVRDEFKMSENDCGSARVQLPS

SEQ ID NO: 178812 - protein, 428 aa, Zea Mays
MALRRITPRRRPVLPVPRAFSSSPPFPPPPPPANDPDPDAAQPPSSSPPPNSGAPRNPESSFFQDIKDRLRSSPTSPSPRRIPTTLPRPDPARGAPSSGPPIGDIRRMLQNFRLTGSTSDAPSTSAPGSNPSFMDLLKNHLDQGANARQAELGFNAIGESLKRPRPPKPFITPSSRNIFCRELERTSKALGARQEENGSAIELKGSYSYEELGKRLGELRPAGAGKDGKEWFSLKELQGRIAKLAEQESQLAGPFSEMRRGIRNLQKQGKPGRPVNIQALLNPVGQPTPDYMSGPPQVELLEKDHMSSEEKMKLELQRVRDEFKMSENDCGSARVQIAQLTLKIKHLSTVLHKKDKHSRKGLQEMVQRRKKYLKYLRRTDWDSYCLVLSKLGLRDVPEYKAPDYKSKATTKAKSKKSKSKGKKRKVKA

SEQ ID NO: 178813 - protein, 84 aa, Zea Mays
MGNASSMLTQYDIEEVQEHCSYLFSQQEIVSLYERFCQLDRSAKGFISEDEFLSIPEFSLNPLSKLYSRFMTSMAREKLPSRIC

SEQ ID NO: 178814 - protein, 272 aa, Zea Mays
MCVEGLDDAAGTLAFGDHENDRRDGAAMERVCENNFVPFIRSGEWSDIGGRDYMEDAHVCISDLAKNFGSNSVDDEVISFYGVFDGHNGKDAAHYVRDNLPRVIVEDADFPLELEKVVKRSFVQTDSKFAEKFSHHKGLCSGTTALTAMIFGRSLLVANAGDCRAVLSRRGTAIEMSKDHRPCCMNERKRVESLGGYVDDGYLNGQLAVTRALGDWHLEVMKGTGRAGGGGAGGGPLSAEPELKMVTLSKDDEFLIIGSDGVWDSFSSQNAV

SEQ ID NO: 178815 - protein, 100 aa, Zea Mays
MGKLSLDWTNTRKTGPQWEWRDGESIVYPPGKRLDGGVLSSRLAGTRSGLEKPGGELTYARVKCYICRVVGDPQLGINRFESPNFSDMKTGSSTLIIDNK

SEQ ID NO: 178816 - protein, 276 aa, Zea Mays
MAMPDLTATVIPKLGEADDESVEIREVWADNMEEEFALIRDIVDEYPFVAMDTEFPGIVCRPVGAFRSPADYNYATLKANVDMLHLIQLGLTFSGPRGELPVLGAGRRRCVWQFNFREFDDARDIFASDSIELLRRSGIDLRLNAERGVDARRFAELLMSSGVVLNDSVYWVTFHAGYDFGYLLKILTCNCLPDTQAGFFKLMKIYFPTVYDIKHLMKFCNSLHGGLNKLAELLDVERVGESHQAGSDSLVTSCAFWKLKDSFFTGSTEKYAEIGF

SEQ ID NO: 178817 - protein, 222 aa, Zea Mays
MQPSGREMQGGGGGGGQDDFLDQMLSTLPPAWPDLGYGKSSPWELPAGPDAAAAAAAAFDETALLASRLRHHQIGGVDEKPLMLHLSDLHGVAAGGGDDAGFMPLPLFTDRAAFKSPNAAGADQALYNGFGAAGMHAAAVHQPPFGQLRRERIAERMKALQELVPNANKTDKASMLDEIIDYVKFLQLQVKVLSMSRLGGAAAVGPLVASMASEYKRRAIHW

SEQ ID NO: 178818 - protein, 371 aa, Zea Mays
MQPSGREMQGGGGGGGQDDFLDQMLSTLPPAWPDLGYGKSSPWELPAGPDAAAAAAAAFDETALLASRLRHHQIGGVDEKPLMLHLSDLHGVAAGGGDDAGFMPLPLFTDRAAFKSPNAAGADQALYNGFGAAGMHAAAVHQPPFGQLRRERIAERMKALQELVPNANKTDKASMLDEIIDYVKFLQLQVKVLSMSRLGGAAAVGPLVASMASEGDDRAGNGTSDDGGDGATNGDNGGGGSSLRVTEQQVARLMEEDMGTAMQYLQGKGLCLMPISLASAISSSTSSSPPPSLLPRPSVGSVEGARGPLHDDSGGAGGDDGSRTINFSSLLNLSRSCRVCSLLGEEESKLLVQRDHIHITYQPEYTFYGMR

SEQ ID NO: 178819 - protein, 430 aa, Zea Mays
MQPSGREMQGGGGGGGQDDFLDQMLSTLPPAWPDLGYGKSSPWELPAGPDAAAAAAAAFDETALLASRLRHHQIGGVDEKPLMLHLSDLHGVAAGGGDDAGFMPLPLFTDRAAFKSPNAAGADQALYNGFGAAGMHAAAVHQPPFGQSGGSMPAAQSFGGGADAGGGAPAPAAGAASGGGGAAPPRQQRPRAKRGQATDPHSIAERLRRERIAERMKALQELVPNANKTDKASMLDEIIDYVKFLQLQVKVLSMSRLGGAAAVGPLVASMASEGDDRAGNGTSDDGGDGATNGDNGGGGSSLRVTEQQVARLMEEDMGTAMQYLQGKGLCLMPISLASAISSSTSSSPPPSLLPRPSVGSVEGARGPLHDDSGGAGGDDGSRTINFSSLLNLSRSCRVCSLLGEEESKLLVQRDHIHITYQPEYTFYGMR

SEQ ID NO: 178820 - protein, 296 aa, Zea Mays
MQPSGREMQGGGGGGGQDDFLDQMLSTLPPAWPDLGYGKSSPWELPAGPDAAAAAAAAFDETALLASRLRHHQIGGVDEKPLMLHLSDLHGVAAGGGDDAGFMPLPLFTDRAAFKSPNAAGADQALYNGFGAAGMHAAAVHQPPFGQSGGSMPAAQSFGGGADAGGGAPAPAAGAASGGGGAAPPRQQRPRAKRGQATDPHSIAERLRRERIAERMKALQELVPNANKTDKASMLDEIIDYVKFLQLQVKVLSMSRLGGAAAVGPLVASMASERHQRPRLIQLKLRGPNMMLNPYF

SEQ ID NO: 178821 - protein, 419 aa, Zea Mays
MDFAEEDKKPMTVPSRGMSPRRTARSESANIMSKIMDFADECNGPVSSMVPSRVFSTRRVLGPDGVNAMSRSMDLTDKTRQQISLTVQPSRVSPRKTPLAYNRRKGPEILSGDVESPGSADGNEGQEENASSSPDGPSNNSEKSTPPKQLARGSSSPSRVLIRPSSPSNASSSPSFASRRLPSPSRTRPSTPVSPCSSARSDSGSSILSYIVDATRGKKSPAHMEYVHQLRLLHNRNLQWRFTNSYVDEMLSIQKLSAETMLYSVWDANSRMCDNMVMKRSYVQRLRQEVKLGIVLKEQMDYLDHWAALQTEHSSSLSSATEAIKASTLRLPVSGGAKADVLTVKNAVSSAVDIMQAMGSSICHLLSKLQASHSLVTELSAVAAKESILLNEYRELLATAAALQVQESSLRTQLIQQTE

SEQ ID NO: 178822 - protein, 158 aa, Zea Mays
MLYSVWDANSRMCDNMVMKRSYVQRLRQEVKLGIVLKEQMDYLDHWAALQTEHSSSLSSATEAIKASTLRLPVSGGAKADVLTVKNAVSSAVDIMQAMGSSICHLLSKLQASHSLVTELSAVAAKESILLNEYRELLATAAALQPYYKMSSMRQAAIT

SEQ ID NO: 178823 - protein, 448 aa, Zea Mays
MPQPPPQPPPPEDLPFDVLDGPSPLGLRLRKSRSLVDLIQCKLFQDKSAHEQFDGHNNVSDTPMKKEVRSGAPTAGERMKASNFPANVLRIGSWEYISHYEGDLVAKCYFAKHKLVWEVLHNGLKSKIEIQWSDIIALKATCPENEQEGVLDLVLARPPLFFKETDPQPRKHTLWQAASDFTDGQASSKRRHILRCPSSLLSRNFEKLIQCDQRLRELSQQPAAILQNPGFEPKRSIFQNPNESKDCLDIGGLKFEHKATLPKFTAPLSTRVFSSLSNNVGRPINIGFGAGHFGGNVPEESKNCNQWNQLIVPGLEALQGDERSAGGPPLTTNDAISKKAWEDLVQHLFSDTPSLPALDDNNLTSRVDSLYSLLEKDTAPPAMRDPECSSDGGDIGAIQVDSDGFKGRLDPSPPGISRNDSLDELLLNLPKIASIPQFLFNRTEDSDE

SEQ ID NO: 178824 - protein, 753 aa, Zea Mays
MAAAPEERLDVLNAAGDKIGVSKPRSEVHRDGDYHRAVHVWIYSESTGELLLQRRADCKDSWPGQWDISSAGHISAGESSLFSAQRELEEELGINLPVDAFELIFVFLQECVINNGTYTNNEYNDVYLVTTLTPIPLEAFTLQESEVSAVRYMRCDEYKSCLAKESREYVPYDVNGQYGQLFSIIEERYKENTESQSLTLQKQMNRYVPIHLEPDLTSLSEGDREALGYILKAAIVIDDIFYEQVWNSNKMLRDWLKGHSEFSPFDKLKWAYYSINKSTWSCLDENKAFLSTADSAVQLLTEATKPVSGWKGIEYRAAFPLHKPPGANFYPPDMDKAEFELWKSKLTDKEQNDATGFFTVIKRHDSLSSSSLTQSDGSDQTKTKDDLFIVPYSKEYRPFLEKAAELLEKASACSDSPSLKNLLRTKANAFLSNDYYESDIAWMELATFEAFVGIRDDTATSQVKLFGDQLQDLEKNLPMDNIFKSDSISAAPIRVINLLYNAGDVKGPQTIAFNLPNDERIVNERGTSMVMLKNISEAKFKHILKPIADACIREEQKEYVDFEPYYTHIVCHECCHGIGPHSITLPSGKKTTVRRELQEFHSALEEAKADIVGLWALNFLIKKGLLPKSLSQSMYVSFLAGCFRSIRFGLEEAHGKGQALQFNWLYEKGAFVLQSDGKFSVDFTMVEDAVESLSREILTIQAKGDKPSAQSLLQSRATLTQPLRMALERIEHMQVPVDIAPVFSTANKLFADI

SEQ ID NO: 178825 - protein, 623 aa, Zea Mays
MAAAPEERLDVLNAAGDKIGVSKPRSEVHRDGDYHRAVHVWIYSESTGELLLQRRADCKDSWPGQWDISSAGHISAGESSLFSAQRELEEELGINLPVDAFELIFVFLQECVINNGTYTNNEYNDVYLVTTLTPIPLEAFTLQESEVSAVRYMRCDEYKSCLAKESREYVPYDVNGQYGQLFSIIEERYKENTESQSLTLQKQMNRYVPIHLEPDLTSLSEGDREALGYILKAAIVIDDIFYEQVWNSNKMLRDWLKGHSEFSPFDKLKWAYYSINKSTWSCLDENKAFLSTADSAVQLLTEATKPVSGWKGIEYRAAFPLHKPPGANFYPPDMDKAEFELWKSKLTDKEQNDATGFFTVIKRHDSLSSSSLTQSDGSDQTKTKDDLFIVPYSKEYRPFLEKAAELLEKASACSDSPSLKNLLRTKANAFLSNDYYESDIAWMELDSNLDLTIGPYETYEDSLFSYKATFEAFVGIRDDTATSQVKLFGDQLQDLEKNLPMDNIFKSDSISAAPIRVINLLYNAGDVKGPQTIAFNLPNDERIVNERGTSMVMLKNISEAKFKHILKPIADACIREEQKEYVDFEPYYTHIVCHECCHGIGPHSITLPSGTSRIPFSIGGGKS

SEQ ID NO: 178826 - protein, 623 aa, Zea Mays
MRCDEYKSCLAKESREYVPYDVNGQYGQLFSIIEERYKENTESQSLTLQKQMNRYVPIHLEPDLTSLSEGDREALGYILKAAIVIDDIFYEQVWNSNKMLRDWLKGHSEFSPFDKLKWAYYSINKSTWSCLDENKAFLSTADSAVQLLTEATKPVSGWKGIEYRAAFPLHKPPGANFYPPDMDKAEFELWKSKLTDKEQNDATGFFTVIKRHDSLSSSSLTQSDGSDQTKTKDDLFIVPYSKEYRPFLEKAAELLEKASACSDSPSLKNLLRTKANAFLSNDYYESDIAWMELDSNLDLTIGPYETYEDSLFSYKATFEAFVGIRDDTATSQVKLFGDQLQDLEKNLPMDNIFKSDSISAAPIRVINLLYNAGDVKGPQTIAFNLPNDERIVNERGTSMVMLKNISEAKFKHILKPIADACIREEQKEYVDFEPYYTHIVCHECCHGIGPHSITLPSGKKTTVRRELQEFHSALEEAKADIVGLWALNFLIKKGLLPKSLSQSMYVSFLAGCFRSIRFGLEEAHGKGQALQFNWLYEKGAFVLQSDGKFSVDFTMVEDAVESLSREILTIQAKGDKPSAQSLLQSRATLTQPLRMALERIEHMQVPVDIAPVFSTANKLFADI

SEQ ID NO: 178827 - protein, 502 aa, Zea Mays
MTYSMNRSCLDENKAFLSTADSAVQLLTEATKPVSGWKGIEYRAAFPLHKPPGANFYPPDMDKAEFELWKSKLTDKEQNDATGFFTVIKRHDSLSSSSLTQSDGSDQTKTKDDLFIVPYSKEYRPFLEKAAELLEKASACSDSPSLKNLLRTKANAFLSNDYYESDIAWMELDSNLDLTIGPYETYEDSLFSYKATFEAFVGIRDDTATSQVKLFGDQLQDLEKNLPMDNIFKSDSISAAPIRVINLLYNAGDVKGPQTIAFNLPNDERIVNERGTSMVMLKNISEAKFKHILKPIADACIREEQKEYVDFEPYYTHIVCHECCHGIGPHSITLPSGKKTTVRRELQEFHSALEEAKADIVGLWALNFLIKKGLLPKSLSQSMYVSFLAGCFRSIRFGLEEAHGKGQALQFNWLYEKGAFVLQSDGKFSVDFTMVEDAVESLSREILTIQAKGDKPSAQSLLQSRATLTQPLRMALERIEHMQVPVDIAPVFSTANKLFADI

SEQ ID NO: 178828 - protein, 110 aa, Zea Mays
MKLLAYRSGGYMLTTFACKIHGAMRLIYMLYGHVKLLKKLWRVIGCAVLNSTRKTSKHVLHYELMVPKKCLCQAVRKSTIDIILSCLISLSIDIILCYLVKLETMTLSFV

SEQ ID NO: 178829 - protein, 106 aa, Zea Mays
MMGSGGYMLTTFACKIHGAMRLIYMLYGHVKLLKKLWRVIGCAVLNSTRKTSKHVLHYELMVPKKCLCQAVRKSTIDIILSCLISLSIDIILCYLVKLETMTLSFV

SEQ ID NO: 178830 - protein, 123 aa, Zea Mays
MAALQEQQEEDRDEGEGGKDDDEESEDDGMQSSKRKETGGWSKRRKRPTACSQPFPSSSMPRAPSARGEIIGGPLVCSASLAIPTQPPRPALAACGGVTADADAGLAPPPRRLGWPWQPRPRW

SEQ ID NO: 178831 - protein, 213 aa, Zea Mays
MKVQLDNSTTYSSKQQTSIHNLDKCNGGHLHVSDETSSEAAPKTHKSAEDHDDRSKPPLIRGRFRVIPGHVDSKAQPPGLQKCHSMQTISRLPSLSIPSSAEVASTIIGGSFYMQLYSILQTNMLQRDQILNAMKQVSGCAMASPGVPSMASPCIPSTSRSTSPSGVPSVDRSMLEAAQEREKELLNEVLELQWRLLCTQDEVQKLKAKAAQI

SEQ ID NO: 178832 - protein, 204 aa, Zea Mays
MKVQLDNSTTYSSKQQTSIHNLDKCNGGHLHVSDETSSEAAPKTHKSAEDHDDRSKPPLIRGRFRVIPGHVDSKAQPPGLQKCHSMQTISRLPSLSIPSSAEVASTIIGGSFYMQLYSILQTNMLQRDQILNAMKQVSGCAMASPGVPSMASPCIPSTSRSTSPSGVPSVDRSMLEAAQEREKELLNEVLELQWRVLQVIVHTR

SEQ ID NO: 178833 - protein, 364 aa, Zea Mays
MAGPNEKAAAGGGGGERRKYPIHMEDYELYEEIGQGVSAIVYRALCKPLDEIVAVKVVDFERTNSDLNNIVREAQTMILIDHPNVVKAHCSFAKDQTLWVVMPYMAGGSCLHIMKSVHPTGFEEPIIATILREVLKGLEYLHHHGSIHRDVKAGNILVDSRGGIKLGDFGVSACLFDSGDRQRARNTFVGTPCWMAPEVMEQLHGYDFRADIWSFGITALELAHGHAPFSKYPPMKVLLMTLQNAPPGLDYERDKKFTRNFKQMVAMCLVKDPSKRPSAKKLLKQPFFKQARSTDFIARKLLEGLPGLGVRYQALKEKDQHLMAQKKMSDGKKEEISQDEYKRGISSWTFDMDDLRSQASLVLI

SEQ ID NO: 178834 - protein, 377 aa, Zea Mays
MMQEKDQHLMAQKKMSDGKKEEISQDEYKRGISSWTFDMDDLRSQASLGTECEDSTLCKDSDISFYDLDSLQDQAPEGSHLLRDFSTKYDADIENDMTTKDKSAVSSPDQPASLVRNASMRGMPINGSFRKDNSTESFDLECQEKHLDIVPTSSSPERKFSFSSCSSNGLLLSKESSKQQTSIHNLDKCNGGHLHVSDETSSEAAPKTHKSAEDHDDRSKPPLIRGRFRVIPGHVDSKAQPPGLQKCHSMQTISRLPSLSIPSSAEVASTIIGGSFYMQLYSILQTNMLQRDQILNAMKQVSGCAMASPGVPSMASPCIPSTSRSTSPSGVPSVDRSMLEAAQEREKELLNEVLELQWRLLCTQDEVQKLKAKAAQI

SEQ ID NO: 178835 - protein, 410 aa, Zea Mays
MAGPNEKAAAGGGGGERRKYPIHMEDYELYEEIGQGVSAIVYRALCKPLDEIVAVKVVDFERTNSDLNNIVREAQTMILIDHPNVVKAHCSFAKDQTLWVVMPYMAGGSCLHIMKSVHPTGFEEPIIATILREVLKGLEYLHHHGSIHRDVKAGNILVDSRGGIKLGDFGVSACLFDSGDRQRARNTFVGTPCWMAPEVMEQLHGYDFRADIWSFGITALELAHGHAPFSKYPPMKVLLMTLQNAPPGLDYERDKKFTRNFKQMVAMCLVKDPSKRPSAKKLLKQPFFKQARSTDFIARKLLEGLPGLGVRYQALKEKDQHLMAQKKMSDGKKEEISQDEYKRGISSWTFDMDDLRSQASLGTECEDSTLCKDSDISFYDLDSLQDQAPEGSHLLRDFSTKYDADILVGK

SEQ ID NO: 178836 - protein, 392 aa, Zea Mays
MAGPNEKAAAGGGGGERRKYPIHMEDYELYEEIGQGVSAIVYRALCKPLDEIVAVKVVDFERTNSDLNNIVREAQTMILIDHPNVVKAHCSFAKDQTLWVVMPYMAGGSCLHIMKSVHPTGFEEPIIATILREVLKGLEYLHHHGSIHRDVKAGNILVDSRGGIKLGDFGVSACLFDSGDRQRARNTFVGTPCWMAPEVMEQLHGYDFRADIWSFGITALELAHGHAPFSKYPPMKVLLMTLQNAPPGLDYERDKKFTRNFKQMVAMCLVKDPSKRPSAKKLLKQPFFKQARSTDFIARKLLEGLPGLGVRYQALKEKDQHLMAQKKMSDGKKEEISQDEYKRGISSWTFDMDDLRSQASLNVKTVPYAKIQIYLSMTWTVYRIKHQKGHTC

SEQ ID NO: 178837 - protein, 675 aa, Zea Mays
MSLDHKIFSASGRSPSAHPSHPSASDHQNRRRPPPGPDRLPIPGRRAPVRRGHLPGLLVTCGGTLCAATAFTRSRRCRPRSPIYIPAPSLSAGAHQAPAPPFLFILSSLAARTLSALPSPKETYPPFRRSIHPSVQGEQGIINQSASESVEGRRRAGVRPARRGLVVPCVSGSAPRRRLLWFLRCVEEAESATRRRRERRSSGCAASVARQDGGVEDAGAGGGPLPLHPGQGEDRAGGRHEPAAPPLLRVHQHHVPVGAVPRRHDGVLPQLPVLRRHLLQVLRRLLGRPALGEADPRVRRAEAAPRVSRRGRDVGARHGRRGLRGHPLLPRPPQARRRRGRRRQLQRLLRPVAEEGAQGAARLPRGVRRRGRHQRRPPPGQALRCRALHPRAPPRRAGRRALRHGEPGVVRALQRRRPRHAPRGLQGRRPAAGHRLGLLLLRLRPQRQGPLLGARPHRPAGLTLRGHQEGRRGDHAHVQPHLRTLHHRPPLLHRVRALGPPRHGLLLLHPQHPSGEAHHGLPRQGPRGPGPRLHLHRRYCQGLPRLPGNGRQEHRHRRQEARAGALQDLQPRQHLSRYGAQPGVHPGEAPPRQGQEERGRDARQRRRALHARQHLPSQGAARVQTHHQPGRRPQEVCQVVPVLLRLHQGRIQELATLIRCSSKKNPSLGVERLSE

SEQ ID NO: 178838 - protein, 304 aa, Zea Mays
MGFLSLVGNSFGCSASGERLVSAARDGDLQEARALLQYNPRLARYSTFGGRNSPLHYAAAQGHHEIVSLLLESGVEINLRNYRGQTALMQACQYGHWEVVQTLILFNANVHRTDYLNGGTALHFAALHGHARCLRLVLADYVPSVPNFCTLVNHKSSEEDSTADFDHDALVKMVNQKADGGLTPLHMAALNGHVECVQLLLDLGASVSEVTIEDGTTIDLIGAGSTPLHYAACGGNAVCCQLLIARGACIAVQNASGWTPLMVARSWQRNSVEEILSREPEGRIHTLPSPYLCLPLMSIMNIAR

SEQ ID NO: 178839 - protein, 100 aa, Zea Mays
MSFNAAIAKKTTQSTSKLVARDEACWWQKNRRRIWAYGACSVAGTVSPTQQRKEAAIGLGLQRRQESPLSQRFSTARPIYCSSQSALPEPESDDPVSNTI

SEQ ID NO: 178840 - protein, 965 aa, Zea Mays
MAPSAAAPGISEAEGAPRMAKFLCSFGGSILPRPLDGCLRYVGGETRIVILPRDISYADLAARMRDLYKDADTIKYQQPDEDLDALVSVVNHDDVVNMMEEYDKVTATGEAFTRLRIFLFSQQLDDNAASVAVHYNVDERETERRYVDALNSLGDVRSPSSPVSVEQLFGIGGNDSGIPDFAGLRHLNVPRPSHGQRYGEMDSPWSPAYVSPSQYRVHDPRDFPISPSSARFQVGAEDFDDRIPDDFVRQSPKYHYYEAQSPSHMDNLVWLPPGAVIQQNAGFPGDLSKHNKFLDGNSGCDHCGSLFHKGQGSVTDPIYMNPRWTRPVQQHFDQPSMINDYPGHHANSCPDYCRPGEHYAGGQDVRLENGVYVKEQNGGHTPMLYNESRPHDRVWYAHTNQSHQRYEDPRLHYPTNDRVIEPYIVDASSVNSAFAPNKVYEMHSASLGHSSSSHESPHYFHGSSELINDAYHNQQVGGSGSYVQPAGSEESPGQHYNHFSAYGADSFYQMQQNLPPIQSLRRRANSPVHTASPYDSPHLPIPNGSINMNSVRNTGDASPRIAGLIGYDRMPNPFTPPNGSILYRVGGHDVPAAMENTSAFGPRSNPTAAQYVQPFIAPESIQHQPGVPLREVYPERAYPEPMPSSYADGKVAVSALPLTDQLFRLDINTMKKLEGQDDGNSTRNVNETTLLHAVDEPSTLPHHVGSVHEVDPKQEKLTEKESRQKQHEAGATALQECEDISEDMLNFLPELIASVKKVTLEDAAETQIAQSDANAAVSPVPDDDDNGKKLDEATAGNTNANQDLDLQGSLDRQKSFKIESTTAEAEALSKGLQTIKNDDLEEIRELGSGTYGAVYHGKWRGCDVAIKRIKASCFAGRPSERERLITDFWKEALILSSLHHPNVVAFYGVVRDGPDGSLATVTEFMVNGSLKQFLRKKDRSPEESNISHGCCIWHGIFAREEYSPF

SEQ ID NO: 178841 - protein, 1081 aa, Zea Mays
MAPSAAAPGISEAEGAPRMAKFLCSFGGSILPRPLDGCLRYVGGETRIVILPRDISYADLAARMRDLYKDADTIKYQQPDEDLDALVSVVNHDDVVNMMEEYDKVTATGEAFTRLRIFLFSQQLDDNAASVAVHYNVDERETERRYVDALNSLGDVRSPSSPVSVEQLFGIGGNDSGIPDFAGLRHLNVPRPSHGQRYGEMDSPWSPAYVSPSQYRVHDPRDFPISPSSARFQVGAEDFDDRIPDDFVRQSPKYHYYEAQSPSHMDNLVWLPPGAVIQQNAGFPGDLSKHNKFLDGNSGCDHCGSLFHKGQGSVTDPIYMNPRWTRPVQQHFDQPSMINDYPGHHANSCPDYCRPGEHYAGGQDVRLENGVYVKEQNGGHTPMLYNESRPHDRVWYAHTNQSHQRYEDPRLHYPTNDRVIEPYIVDASSVNSAFAPNKVYEMHSASLGHSSSSHESPHYFHGSSELINDAYHNQQVGGSGSYVQPAGSEESPGQHYNHFSAYGADSFYQMQQNLPPIQSLRRRANSPVHTASPYDSPHLPIPNGSINMNSVRNTGDASPRIAGLIGYDRMPNPFTPPNGSILYRVGGHDVPAAMENTSAFGPRSNPTAAQYVQPFIAPESIQHQPGVPLREVYPERAYPEPMPSSYADGKVAVSALPLTDQLFRLDINTMKKLEGQDDGNSTRNVNETTLLHAVDEPSTLPHHVGSVHEVDPKQEKLTEKESRQKQHEAGATALQECEDISEDMLNFLPELIASVKKLDEATAGNTNANQDLDLQGSLDRQKSFKIESTTAEAEALSKGLQTIKNDDLEEIRELGSGTYGAVYHGKWRGCDVAIKRIKASCFAGRPSERERLITDFWKEALILSSLHHPNVVAFYGVVRDGPDGSLATVTEFMVNGSLKQFLRKKDRTIDRRKRVILAMDAAFGMEYLHGKNIVHFDLKCENLLVNMRDPQRPICKIGDLGLSKVKQHTLVSGGVRGTLPWMAPELLSGKNNMVSEKIDVYSFGIVMWELLTGEEPYSDMRAAEIIGAIVNDSLRPQIPSWCDPEWKGLMESCWSSDPAERPSFTDISQRLRKMAAAMNVK

SEQ ID NO: 178842 - protein, 580 aa, Zea Mays
MDVFQDYILVTYSPFDVHIYHVVVSGELSPASNPVLKLSTLRELSIMSPKSPPVSMRFIPEQNDKGALTEDTHGFSDLLSQQPSRCLILRTNGELSVLDMDDGHEHTLTNSIELFWVTCSQFEEKGSLIKEVSWLDYGHRGMQVWYPSHGADRFKQEDFLQLDPELEFDREVYPLGLLPNVGVVVGVSQRMSFSTAEFPCFEPSPQAQTILHCLLRHLLQRDKIEEALLLANLSAEKPHFSHCLEWLLFTVFDADISRPSASKNQASQKVDSPKKSLLEKTCDLLRNFPEYMDVVVSVARKTDGRHWADLFSAAGRSTEMFEECFQQRWYRTAACYILVIAKLEGPAVSQYCALRLLQATLDESLYELAGELVRFLLRSGRDFENATSDSEKLSPRFLGYFLFRSPYKRQSSDLKSNSTKELSPHIASVMNILERHASYLMSGKELSKLVAFVKGTQFDLVEYLQRERQGSARLENFASALELIGQKLQMDTLQSRLDAEFLLAHMCSVKFKEWIVVLATLLRRTEVLVDLFQHDLRLWKAYSITLQSHDVFREYLDLLNILEEQLSSVSDLTLQNGPLS

SEQ ID NO: 178843 - protein, 606 aa, Zea Mays
MCTSVASEQQILAVGCSRGVVELYDLAENTRHIRTISLYDWGYSVEDTGPVACISWTPDNCALAVGWKFRGLTVWSVSGCRLMCTIRQTGSNSASSPMVKPSALKFEPLMGGTSHIQWDDNGYKLFAVEESLSERVLAFSFAKCCPNRGLSGTTYSHQVLYGEDRILLVQPDDADELKILHLNVPNWPVLHVVASNDGMYLAVAGSHGLVLYDLRNKRWRFFGDVTQEQKIQCKGLLWMRKIVIVCNYVESSNTYELLFFPRYHLDYSSLLYRKQLLGRPIVMDVFQDYILVTYSPFDVHIYHVVVSGELSPASNPVLKLSTLRELSIMSPKSPPVSMRFIPEQNDKGALTEDTHGFSDLLSQQPSRCLILRTNGELSVLDMDDGHEHTLTNSIELFWVTCSQFEEKGSLIKEVSWLDYGHRGMQVWYPSHGADRFKQEDFLQLDPELEFDREVYPLGLLPNVGVVVGVSQRMSFSTAEFPCFEPSPQAQTILHCLLRHLLQRDKIEEALLLANLSAEKPHFSHCLEWLLFTVFDADISRPSASKNQASQKVDSPKKSLLEKTCDLLRNFPEYMDVVVSVARKTDGRHWADLFSAAGRSTDMTKLS

SEQ ID NO: 178844 - protein, 868 aa, Zea Mays
MYLAYGWPQSIPLDPDDSDRVVLLRVLGRLLLAVCPASLHLWSAAQHRVRLARSDRSPESLATHGHNAHAAWSPDARTVAVLTSSFYLYVYKVQHSGKQLIVGGKQVPGLCLASISLIITEKVPLANGVAITSNFVCDSKSMLLGLSNGHVQVVSWNAEFSDSFKLGCYVCSSEKPTAAVDALVFDPPSLRESSNARPAPCCTGNSSIVHVELSVKLRLLVALYSGCRIALCTIGKKGLRQPGSTRVERWLDTDDAMCTSVASEQQILAVGCSRGVVELYDLAENTRHIRTISLYDWGYSVEDTGPVACISWTPDNCALAVGWKFRGLTVWSVSGCRLMCTIRQTGSNSASSPMVKPSALKFEPLMGGTSHIQWDDNGYKLFAVEESLSERVLAFSFAKCCPNRGLSGTTYSHQVLYGEDRILLVQPDDADELKILHLNVPISYISQNWPVLHVVASNDGMYLAVAGSHGLVLYDLRNKRWRFFGDVTQEQKIQCKGLLWMRKIVIVCNYVESSNTYELLFFPRYHLDYSSLLYRKQLLGRPIVMDVFQDYILVTYSPFDVHIYHVVVSGELSPASNPVLKLSTLRELSIMSPKSPPVSMRFIPEQNDKGALTEDTHGFSDLLSQQPSRCLILRTNGELSVLDMDDGHEHTLTNSIELFWVTCSQFEEKGSLIKEVSWLDYGHRGMQVWYPSHGADRFKQEDFLQLDPELEFDREVYPLGLLPNVGVVVGVSQRMSFSTAEFPCFEPSPQAQTILHCLLRHLLQRDKIEEALLLANLSAEKPHFSHCLEWLLFTVFDADISRPSASKNQASQKVDSPKKSLLEKTCDLLRNFPEYMDVVVSVARKTDGRHWADLFSAAGRSTDMTKLS

SEQ ID NO: 178845 - protein, 745 aa, Zea Mays
MYLAYGWPQSIPLDPDDSDRVVLLRVLGRLLLAVCPASLHLWSAAQHRVRLARSDRSPESLATHGHNAHAAWSPDARTVAVLTSSFYLYVYKVQHSGKQLIVGGKQVPGLCLASISLIITEKVPLANGVAITSNFVCDSKSMLLGLSNGHVQVVSWNAEFSDSFKLGCYVCSSEKPTAAVDALVFDPPSLRESSNARPAPCCTGNSSIVHVELSVKLRLLVALYSGCRIALCTIGKKGLRQPGSTRVERWLDTDDAMCTSVASEQQILAVGCSRGVVELYDLAENTRHIRTISLYDWGYSVEDTGPVACISWTPDNCALAVGWKFRGLTVWSVSGCRLMCTIRQTGSNSASSPMVKPSALKFEPLMGGTSHIQWDDNGYKLFAVEESLSERVLAFSFAKCCPNRGLSGTTYSHQVLYGEDRILLVQPDDADELKILHLNVPNWPVLHVVASNDGMYLAVAGSHGLVLYDLRNKRWRFFGDVTQEQKIQCKGLLWMRKIVIVCNYVESSNTYELLFFPRYHLDYSSLLYRKQLLGRPIVMDVFQDYILVTYSPFDVHIYHVVVSGELSPASNPVLKLSTLRELSIMSPKSPPVSMRFIPEQNDKGALTEDTHGFSDLLSQQPSSLKRRVVLSRRFHGLITVIGVCRCGTHHMEQIVLSKRIFCSWTRSLSLIVRCILLVFFQMLVWLLVFLRECPSQLRSFHALSLHLKPKQYCIVYYDISFRGTRLKRLCSWQICPQKNLISLTV

SEQ ID NO: 178846 - protein, 838 aa, Zea Mays
MGMCRSCPGTLRYSVEDTGPVACISWTPDNCALAVGWKFRGLTVWSVSGCRLMCTIRQTGSNSASSPMVKPSALKFEPLMGGTSHIQWDDNGYKLFAVEESLSERVLAFSFAKCCPNRGLSGTTYSHQVLYGEDRILLVQPDDADELKILHLNVPISYISQNWPVLHVVASNDGMYLAVAGSHGLVLYDLRNKRWRFFGDVTQEQKIQCKGLLWMRKIVIVCNYVESSNTYELLFFPRYHLDYSSLLYRKQLLGRPIVMDVFQDYILVTYSPFDVHIYHVVVSGELSPASNPVLKLSTLRELSIMSPKSPPVSMRFIPEQNDKGALTEDTHGFSDLLSQQPSRCLILRTNGELSVLDMDDGHEHTLTNSIELFWVTCSQFEEKGSLIKEVSWLDYGHRGMQVWYPSHGADRFKQEDFLQLDPELEFDREVYPLGLLPNVGVVVGVSQRMSFSTAEFPCFEPSPQAQTILHCLLRHLLQRDKIEEALLLANLSAEKPHFSHCLEWLLFTVFDADISRPSASKNQASQKVDSPKKSLLEKTCDLLRNFPEYMDVVVSVARKTDGRHWADLFSAAGRSTEMFEECFQQRWYRTAACYILVIAKLEGPAVSQYCALRLLQATLDESLYELAGELVRFLLRSGRDFENATSDSEKLSPRFLGYFLFRSPYKRQSSDLKSNSTKELSPHIASVMNILERHASYLMSGKELSKLVAFVKGTQFDLVEYLQRERQGSARLENFASALELIGQKLQMDTLQSRLDAEFLLAHMCSVKFKEWIVVLATLLRRTEVLVDLFQHDLRLWKAYSITLQSHDVFREYLDLLNILEEQLSSVSDLTLQNGPLS

SEQ ID NO: 178847 - protein, 862 aa, Zea Mays
MCTSVASEQQILAVGCSRGVVELYDLAENTRHIRTISLYDWGYSVEDTGPVACISWTPDNCALAVGWKFRGLTVWSVSGCRLMCTIRQTGSNSASSPMVKPSALKFEPLMGGTSHIQWDDNGYKLFAVEESLSERVLAFSFAKCCPNRGLSGTTYSHQVLYGEDRILLVQPDDADELKILHLNVPNWPVLHVVASNDGMYLAVAGSHGLVLYDLRNKRWRFFGDVTQEQKIQCKGLLWMRKIVIVCNYVESSNTYELLFFPRYHLDYSSLLYRKQLLGRPIVMDVFQDYILVTYSPFDVHIYHVVVSGELSPASNPVLKLSTLRELSIMSPKSPPVSMRFIPEQNDKGALTEDTHGFSDLLSQQPSRCLILRTNGELSVLDMDDGHEHTLTNSIELFWVTCSQFEEKGSLIKEVSWLDYGHRGMQVWYPSHGADRFKQEDFLQLDPELEFDREVYPLGLLPNVGVVVGVSQRMSFSTAEFPCFEPSPQAQTILHCLLRHLLQRDKIEEALLLANLSAEKPHFSHCLEWLLFTVFDADISRPSASKNQASQKVDSPKKSLLEKTCDLLRNFPEYMDVVVSVARKTDGRHWADLFSAAGRSTEMFEECFQQRWYRTAACYILVIAKLEGPAVSQYCALRLLQATLDESLYELAGELVRFLLRSGRDFENATSDSEKLSPRFLGYFLFRSPYKRQSSDLKSNSTKELSPHIASVMNILERHASYLMSGKELSKLVAFVKGTQFDLVEYLQRERQGSARLENFASALELIGQKLQMDTLQSRLDAEFLLAHMCSVKFKEWIVVLATLLRRTEVLVDLFQHDLRLWKAYSITLQSHDVFREYLDLLNILEEQLSSVSDLTLQNGPLS

SEQ ID NO: 178848 - protein, 495 aa, Zea Mays
MCTSVASEQQILAVGCSRGVVELYDLAENTRHIRTISLYDWGYSVEDTGPVACISWTPDNCALAVGWKFRGLTVWSVSGCRLMCTIRQTGSNSASSPMVKPSALKFEPLMGGTSHIQWDDNGYKLFAVEESLSERVLAFSFAKCCPNRGLSGTTYSHQVLYGEDRILLVQPDDADELKILHLNVPISYISQNWPVLHVVASNDGMYLAVAGSHGLVLYDLRNKRWRFFGDVTQEQKIQCKGLLWMRKIVIVCNYVESSNTYELLFFPRYHLDYSSLLYRKQLLGRPIVMDVFQDYILVTYSPFDVHIYHVVVSGELSPASNPVLKLSTLRELSIMSPKSPPVSMRFIPEQNDKGALTEDTHGFSDLLSQQPSSLKRRVVLSRRFHGLITVIGVCRCGTHHMEQIVLSKRIFCSWTRSLSLIVRCILLVFFQMLVWLLVFLRECPSQLRSFHALSLHLKPKQYCIVYYDISFRGTRLKRLCSWQICPQKNLISLTV

SEQ ID NO: 178849 - protein, 620 aa, Zea Mays
MQLLFIFSDSFKLGCYVCSSEKPTAAVDALVFDPPSLRESSNARPAPCCTGNSSIVHVELSVKLRLLVALYSGCRIALCTIGKKGLRQPGSTRVERWLDTDDAMCTSVASEQQILAVGCSRGVVELYDLAENTRHIRTISLYDWGYSVEDTGPVACISWTPDNCALAVGWKFRGLTVWSVSGCRLMCTIRQTGSNSASSPMVKPSALKFEPLMGGTSHIQWDDNGYKLFAVEESLSERVLAFSFAKCCPNRGLSGTTYSHQVLYGEDRILLVQPDDADELKILHLNVPISYISQNWPVLHVVASNDGMYLAVAGSHGLVLYDLRNKRWRFFGDVTQEQKIQCKGLLWMRKIVIVCNYVESSNTYELLFFPRYHLDYSSLLYRKQLLGRPIVMDVFQDYILVTYSPFDVHIYHVVVSGELSPASNPVLKLSTLRELSIMSPKSPPVSMRFIPEQNDKGALTEDTHGFSDLLSQQPSRCLILRTNGELSVLDMDDGHEHTLTNSIELFWVTCSQFEEKGSLIKEVSWLDYGHRGMQVWYPSHGADRFKQEDFLQLDPELEFDREVYPLGLLPNVGVVVGVSQRMSFSTAEFPCFEPSPQAQTILHCLLRHLLQDEQGEKVVQ

SEQ ID NO: 178850 - protein, 297 aa, Zea Mays
MAEEQIEEASMAAAAATPFQLQFDKPIPFQIKMAEWNPEKDLLAMVTDDSKVLLHRFNWQRLWTISPGKCITSICWSPDGKIIALGTEDGLILLHDVENGKMLRTTKSHDVAIVSLNWAEDDPLSKSDKDEFLSYEDRTTRFFPPPPVMPRIGGLRSGDTGLADENEEAIPEFSSASCQRFNILCSGGKDGCVCFSVFGIFPVGKINITKIPINVGSSRKSYQLQDASVSKVSLSRNLQKFVILCFGKLVDTDNLSDSCENSGLHCLYLDTSIFFNRCPNKHQVFKIWLKLSVLLYL

SEQ ID NO: 178851 - protein, 264 aa, Zea Mays
MDTARHVEQLVVFGGFTDTQFLEKSLVNQFNELEDSLKEAFLMPFTAISSQIQCQGLLPLYPVTSSATLSSSCSPTSISFYKDEDSSHEESSYSLTDYVCLKIPDGSLNKVNCIGVIKGSGNCCTTLSMMSLSGFLLHIPDGYECVDLSLYKDNQVVLLLSETSCSDSPGKSWMVMLQIENFSFMPLSGTFPANIYSLQKLVALDLQLDTDYGKVRSIPHTVSTPFAVSASRGVACVFSSRRHALVYILDEDEEAEGDETSDME

SEQ ID NO: 178852 - protein, 477 aa, Zea Mays
MAEEQIEEASMAAAAATPFQLQFDKPIPFQIKMAEWNPEKDLLAMVTDDSKVLLHRFNWQRLWTISPGKCITSICWSPDGKIIALGTEDGLILLHDVENGKMLRTTKSHDVAIVSLNWAEDDPLSKSDKDEFLSYEDRTTRFFPPPPVMPRIGGLRSGDTGLADENEEAIPEFSSASCQRFNILCSGGKDGCVCFSVFGIFPVGKINITKIPINVGSSRKSYQLQDASVSKVSLSRNLQKFVILCFGKLVDTDNLSDSCENSGLHCLYLDTSIFFNRKNELHQVSQQASSIQDMVEVVRASVSLISKQWSNAMSLFHEKFSALPNLISTHGVESSSEDEFLSLLFGTRTSPALHHFLASSLGEARIAKAVDSAGRDIRGIITEHLQPAVEIISFRLAELRGLSRWRSRFQTIGLDGNLIDGVTESIGMLVVQVERFSRVAATVVYLFQNFFAWVLKSVRILLNEPTDQVPAANRSPL

SEQ ID NO: 178853 - protein, 806 aa, Zea Mays
MAEEQIEEASMAAAAATPFQLQFDKPIPFQIKMAEWNPEKDLLAMVTDDSKVLLHRFNWQRLWTISPGKCITSICWSPDGKIIALGTEDGLILLHDVENGKMLRTTKSHDVAIVSLNWAEDDPLSKSDKDEFLSYEDRTTRFFPPPPVMPRIGGLRSGDTGLADENEEAIPEFSSASCQRFNILCSGGKDGCVCFSVFGIFPVGKINITKIPINVGSSRKSYQLQDASVSKVSLSRNLQKFVILCFGKLVDTDNLSDSCENSGLHCLYLDTSIFFNRKNELHQVSQQASSIQDMVEVVRASVSLISKQWSNAMSLFHEKFSALPNLISTHGVESSSEDEFLSLLFGTRTSPALHHFLASSLGEAGLKRIAKAVDSAGRDIRGIITEHLQPAVEIISFRLAELRGLSRWRSRFQTIGLDGNLIDGVTESIGMLVVQVERFSRVAATVVYLFQNFFAWVLKSVRILLNEPTDQVPAANSELVVIFLKFLLDKDPIKQLLEADERIECDMDTARHVEQLVVFGGFTDTQFLEKSLVNQFNELEDSLKEAFLMPFTAISSQIQCQGLLPLYPVTSSATLSSSCSPTSISFYKVHVLFSDFDKCSALPASCTQNVYKDEDSSHEESSYSLTDYVCLKIPDGSLNKVNCIGVIKGSGNCCTTLSMMSLSGFLLHIPDGYECVDLSLYKDNQVVLLLSETSCSDSPGKSWMVMLQIENFSFMPLSGTFPANIYSLQKLVVTILISPMFDLLALDLQLDTDYGKVRSIPHTVSTPFAVSASRGVACVFSSRRHALVYILDEDEEAEGDETSDME

SEQ ID NO: 178854 - protein, 477 aa, Zea Mays
MVEVVRASVSLISKQWSNAMSLFHEKFSALPNLISTHGVESSSEDEFLSLLFGTRTSPALHHFLASSLGEAGLKRIAKAVDSAGRDIRGIITEHLQPAVEIISFRLAELRGLSRWRSRFQTIGLDGNLIDGVTESIGMLVVQVERFSRVAATVVYLFQNFFAWVLKSVRILLNEPTDQVPAANSELVVIFLKFLLDKDPIKQLLEADERIECDMDTARHVEQLVVFGGFTDTQFLEKSLVNQFNELEDSLKEAFLMPFTAISSQIQCQGLLPLYPVTSSATLSSSCSPTSISFYKDEDSSHEESSYSLTDYVCLKIPDGSLNKVNCIGVIKGSGNCCTTLSMMSLSGFLLHIPDGYECVDLSLYKDNQVVLLLSETSCSDSPGKSWMVMLQIENFSFMPLSGTFPANIYSLQKLVALDLQLDTDYGKVRSIPHTVSTPFAVSASRGVACVFSSRRHALVYILDEDEEAEGDETSDME

SEQ ID NO: 178855 - protein, 614 aa, Zea Mays
MRTKKLFQNFLVLPVSVLTFCAVVAKMVVFASAFLEYFLLERYFMPLKFQNITKIPINVGSSRKSYQLQDASVSKVSLSRNLQKFVILCFGKLVDTDNLSDSCENSGLHCLYLDTSIFFNRKNELHQVSQQASSIQDMVEVVRASVSLISKQWSNAMSLFHEKFSALPNLISTHGVESSSEDEFLSLLFGTRTSPALHHFLASSLGEAGLKRIAKAVDSAGRDIRGIITEHLQPAVEIISFRLAELRGLSRWRSRFQTIGLDGNLIDGVTESIGMLVVQVERFSRVAATVVYLFQNFFAWVLKSVRILLNEPTDQVPAANSELVVIFLKFLLDKDPIKQLLEADERIECDMDTARHVEQLVVFGGFTDTQFLEKSLVNQFNELEDSLKEAFLMPFTAISSQIQCQGLLPLYPVTSSATLSSSCSPTSISFYKDEDSSHEESSYSLTDYVCLKIPDGSLNKVNCIGVIKGSGNCCTTLSMMSLSGFLLHIPDGYECVDLSLYKDNQVVLLLSETSCSDSPGKSWMVMLQIENFSFMPLSGTFPANIYSLQKLVALDLQLDTDYGKVRSIPHTVSTPFAVSASRGVACVFSSRRHALVYILDEDEEAEGDETSDME

SEQ ID NO: 178856 - protein, 215 aa, Zea Mays
MVEVVRASVSLISKQWSNAMSLFHEKFSALPNLISTHGVESSSEDEFLSLLFGTRTSPALHHFLASSLGEAGLKRIAKAVDSAGRDIRGIITEHLQPAVEIISFRLAELRGLSRWRSRFQTIGLDGNLIDGVTESIGMLVVQVERFSRVAATVVYLFQNFFAWVLKSVRILLNEPTDQVPAANSELVVIFLKFLLDKDPIKQLLEADERIECDIF

SEQ ID NO: 178857 - protein, 59 aa, Zea Mays
MQTTGQSKSSSFTLMHSCTLLGGFSLDTKSEAAGLVAACDAETVQPGRSSPGCGVWSGG

SEQ ID NO: 178858 - protein, 106 aa, Zea Mays
MNISWLNGDIRSIIMRNRACPIANFMCSIIYIKLKKLEAFYMVLIMIIFVLKIGGPRPSLVVLSIWPHVYVNVNEQLYCLIICTNLLDDESPSNRASDNKGSSLGL

SEQ ID NO: 178859 - protein, 82 aa, Zea Mays
MLYWAVRVLQATDGVRVRVREPDGVDEPGGGRGLRGVEQRPRPALLRLRLMQGRRAGRLARAVAQGHHRAHLRLRRRLQRVP

SEQ ID NO: 178860 - protein, 605 aa, Zea Mays
MRNTMIDLAPAKTNPLPDKKYSTLVSLSGHLFDKFLINEALDIIETAGGSFHLVRCEVGQSTDDMSYSELEVGADDTATLDKIIDSLTSLANEHGGDHDAGQEIELALKIGKVNEYETDVTIDKGGPKILILGAGRVCRPAAEFLASYPDICTYGVDDHDADQIHVIVASLYQKDAEETVDGIENTTATQLDVADIGSLSDLVSQVEVVISLLPASFHAAIAGVCIELKKHMVTASYVDESMSNLSQAAKDAGVTILCEMGLDPGIDHLMSMKMIDEAHARKGKIKAFTSYCGGLPSPAAANNPLAYKFSWNPAGALRSGKNPAVYKFLGETIHVDGHNLYESAKRLRLRELPAFALEHLPNRNSLIYGDLYGISKEASTIYRATLRYEGFSEIMVTLSKTGFFDAANHPLLQDTSRPTYKGFLDELLNNISTINTDLDIEASGGYDDDLIARLLKLGCCKNKEIAVKTVKTIKFLGLHEETQIPKGCSSPFDVICQRMEQRMAYGHNEQDMVLLHHEVEVEYPDGQPAEKHQATLLEFGKVENGRSTTAMALTVGIPAAIGALLLLKNKVQTKGVIRPLQPEIYVPALEILESSGIKLVEKVET

SEQ ID NO: 178861 - protein, 963 aa, Zea Mays
MILSDRAYAFFSHTHKAQKENMPLLDKILEERVSLFDYELIVGDDGKRSLAFGKFAGRAGLIDFLHGLGQRYLSLGYSTPFLSLGQSHMYPSLAAAKAAVIVVAEEIATFGLPSGICPIVFVFTGVGNVSQGAQEIFKLLPHTFVDAEKLPEIFQARNLSKQSQSTKRVFQLYGCVVTSRDMVSHKDPTRQFDKGDYYAHPEHYTPVFHERIAPYASVIVNCMYWEKRFPPLLNMDQLQQLMETGCPLVGVCDITCDIGGSIEFINKSTSIERPFFRYDPSKNSYHDDMEGAGVVCLAVDILPTEFSKEASQHFGNILSRLVASLASVKQPAELPSYLRRACIAHAGRLTPLYEYIPRMRNTMIDLAPAKTNPLPDKKYSTLVSLSGHLFDKFLINEALDIIETAGGSFHLVRCEVGQSTDDMSYSELEVGADDTATLDKIIDSLTSLANEHGGDHDAGQEIELALKIGKVNEYETDVTIDKGGPKILILGAGRVCRPAAEFLASYPDICTYGVDDHDADQIHVIVASLYQKDAEETVDGIENTTATQLDVADIGSLSDLVSQVEVVISLLPASFHAAIAGVCIELKKHMVTASYVDESMSNLSQAAKDAGVTILCEMGLDPGIDHLMSMKMIDEAHARKGKIKAFTSYCGGLPSPAAANNPLAYKFSWNPAGALRSGKNPAVYKFLGETIHVDGHNLYESAKRLRLRELPAFALEHLPNRNSLIYGDLYGISKEASTIYRATLRYEGFSEIMVTLSKTGFFDAANHPLLQDTSRPTYKGFLDELLNNISTINTDLDIEASGGYDDDLIARLLKLGCCKNKEIAVKTVKTIKFLGLHEETQIPKGCSSPFDVICQRMEQRMAYGHNEQDMVLLHHEVEVEYPDGQPAEKHQATLLEFGKVENGRSTTAMALTVGIPAAIGALLLLKNKVQTKGVIRPLQPEIYVPALEILESSGIKLVEKVET

SEQ ID NO: 178862 - protein, 782 aa, Zea Mays
MVSHKDPTRQFDKGDYYAHPEHYTPVFHERIAPYASVIVNCMYWEKRFPPLLNMDQLQQLMETGCPLVGVCDITCDIGGSIEFINKSTSIERPFFRYDPSKNSYHDDMEGAGVVCLAVDILPTEFSKEASQHFGNILSRLVASLASVKQPAELPSYLRRACIAHAGRLTPLYEYIPRMRNTMIDLAPAKTNPLPDKKYSTLVSLSGHLFDKFLINEALDIIETAGGSFHLVRCEVGQSTDDMSYSELEVGADDTATLDKIIDSLTSLANEHGGDHDAGQEIELALKIGKVNEYETDVTIDKGGPKILILGAGRVCRPAAEFLASYPDICTYGVDDHDADQIHVIVASLYQKDAEETVDGIENTTATQLDVADIGSLSDLVSQVEVVISLLPASFHAAIAGVCIELKKHMVTASYVDESMSNLSQAAKDAGVTILCEMGLDPGIDHLMSMKMIDEAHARKGKIKAFTSYCGGLPSPAAANNPLAYKFSWNPAGALRSGKNPAVYKFLGETIHVDGHNLYESAKRLRLRELPAFALEHLPNRNSLIYGDLYGISKEASTIYRATLRYEGFSEIMVTLSKTGFFDAANHPLLQDTSRPTYKGFLDELLNNISTINTDLDIEASGGYDDDLIARLLKLGCCKNKEIAVKTVKTIKFLGLHEETQIPKGCSSPFDVICQRMEQRMAYGHNEQDMVLLHHEVEVEYPDGQPAEKHQATLLEFGKVENGRSTTAMALTVGIPAAIGALLLLKNKVQTKGVIRPLQPEIYVPALEILESSGIKLVEKVET

SEQ ID NO: 178863 - protein, 745 aa, Zea Mays
MLIQNTTPLFFMKELLHMHLSSQLMETGCPLVGVCDITCDIGGSIEFINKSTSIERPFFRYDPSKNSYHDDMEGAGVVCLAVDILPTEFSKEASQHFGNILSRLVASLASVKQPAELPSYLRRACIAHAGRLTPLYEYIPRMRNTMIDLAPAKTNPLPDKKYSTLVSLSGHLFDKFLINEALDIIETAGGSFHLVRCEVGQSTDDMSYSELEVGADDTATLDKIIDSLTSLANEHGGDHDAGQEIELALKIGKVNEYETDVTIDKGGPKILILGAGRVCRPAAEFLASYPDICTYGVDDHDADQIHVIVASLYQKDAEETVDGIENTTATQLDVADIGSLSDLVSQVEVVISLLPASFHAAIAGVCIELKKHMVTASYVDESMSNLSQAAKDAGVTILCEMGLDPGIDHLMSMKMIDEAHARKGKIKAFTSYCGGLPSPAAANNPLAYKFSWNPAGALRSGKNPAVYKFLGETIHVDGHNLYESAKRLRLRELPAFALEHLPNRNSLIYGDLYGISKEASTIYRATLRYEGFSEIMVTLSKTGFFDAANHPLLQDTSRPTYKGFLDELLNNISTINTDLDIEASGGYDDDLIARLLKLGCCKNKEIAVKTVKTIKFLGLHEETQIPKGCSSPFDVICQRMEQRMAYGHNEQDMVLLHHEVEVEYPDGQPAEKHQATLLEFGKVENGRSTTAMALTVGIPAAIGALLLLKNKVQTKGVIRPLQPEIYVPGVLRSFSCLSLWNYHDV

SEQ ID NO: 178864 - protein, 611 aa, Zea Mays
MLLSKLYSISCRDLAPAKTNPLPDKKYSTLVSLSGHLFDKFLINEALDIIETAGGSFHLVRCEVGQSTDDMSYSELEVGADDTATLDKIIDSLTSLANEHGGDHDAGQEIELALKIGKVNEYETDVTIDKGGPKILILGAGRVCRPAAEFLASYPDICTYGVDDHDADQIHVIVASLYQKDAEETVDGIENTTATQLDVADIGSLSDLVSQVEVVISLLPASFHAAIAGVCIELKKHMVTASYVDESMSNLSQAAKDAGVTILCEMGLDPGIDHLMSMKMIDEAHARKGKIKAFTSYCGGLPSPAAANNPLAYKFSWNPAGALRSGKNPAVYKFLGETIHVDGHNLYESAKRLRLRELPAFALEHLPNRNSLIYGDLYGISKEASTIYRATLRYEGFSEIMVTLSKTGFFDAANHPLLQDTSRPTYKGFLDELLNNISTINTDLDIEASGGYDDDLIARLLKLGCCKNKEIAVKTVKTIKFLGLHEETQIPKGCSSPFDVICQRMEQRMAYGHNEQDMVLLHHEVEVEYPDGQPAEKHQATLLEFGKVENGRSTTAMALTVGIPAAIGALLLLKNKVQTKGVIRPLQPEIYVPALEILESSGIKLVEKVET

SEQ ID NO: 178865 - protein, 1058 aa, Zea Mays
MGSAATEGNDTLLGNGVVGILAETCNMWERRAPLTPSHCARLLLGGGKNGPRVNRIIVQPSTRRIHHDAQYEDAGCEISEDLSECGLIIGIKQPKMILSDRAYAFFSHTHKAQKENMPLLDKILEERVSLFDYELIVGDDGKRSLAFGKFAGRAGLIDFLHGLGQRYLSLGYSTPFLSLGQSHMYPSLAAAKAAVIVVAEEIATFGLPSGICPIVFVFTGVGNVSQGAQEIFKLLPHTFVDAEKLPEIFQARNLSKQSQSTKRVFQLYGCVVTSRDMVSHKDPTRQFDKGDYYAHPEHYTPVFHERIAPYASVIVNCMYWEKRFPPLLNMDQLQQLMETGCPLVGVCDITCDIGGSIEFINKSTSIERPFFRYDPSKNSYHDDMEGAGVVCLAVDILPTEFSKEASQHFGNILSRLVASLASVKQPAELPSYLRRACIAHAGRLTPLYEYIPRMRNTMIDLAPAKTNPLPDKKYSTLVSLSGHLFDKFLINEALDIIETAGGSFHLVRCEVGQSTDDMSYSELEVGADDTATLDKIIDSLTSLANEHGGDHDAGQEIELALKIGKVNEYETDVTIDKGGPKILILGAGRVCRPAAEFLASYPDICTYGVDDHDADQIHVIVASLYQKDAEETVDGIENTTATQLDVADIGSLSDLVSQVEVVISLLPASFHAAIAGVCIELKKHMVTASYVDESMSNLSQAAKDAGVTILCEMGLDPGIDHLMSMKMIDEAHARKGKIKAFTSYCGGLPSPAAANNPLAYKFSWNPAGALRSGKNPAVYKFLGETIHVDGHNLYESAKRLRLRELPAFALEHLPNRNSLIYGDLYGISKEASTIYRATLRYEGFSEIMVTLSKTGFFDAANHPLLQDTSRPTYKGFLDELLNNISTINTDLDIEASGGYDDDLIARLLKLGCCKNKEIAVKTVKTIKFLGLHEETQIPKGCSSPFDVICQRMEQRMAYGHNEQDMVLLHHEVEVEYPDGQPAEKHQATLLEFGKVENGRSTTAMALTVGIPAAIGALLLLKNKVQTKGVIRPLQPEIYVPALEILESSGIKLVEKVET

SEQ ID NO: 178866 - protein, 1180 aa, Zea Mays
MARGGGGRSKKEDEEELRGAKRGYKEASAEGNREEEARWANVIGDIYKRRCEYVEALRWLRADYEVSVKHLPQRHLLPSCQSLGEVYLRLGRFSEALTYQKKHLQLAKESDDLVEQQRATTQLGRTYHEILLRSENDHSAIRNAKKYFKSSMKLARILKERSPSQKSDFLKELIDAYNNMGMLELELDNFEEAEKLLIQGLKICDDEEVDSYDDARTRLHHNLGNVYTELQNWKKARGHIEKDIEICRKIRHLQGEAKGFINLGELHYRVQKYDNAKLCYNKALEVARSLEDEDALIEQIHQNIETVTKAVEVFEQLKEDELKLKKLIRDTSNARGTSKERKLLLDQHAWLDSLIEKARMICAWQKHKEFSKGKKRVANELRDKEKLSDSLLSIGESYQKLRNFSKARKWYMKSWNIYRSIGNLEGQALAKVNIGNVLDSCGDWAGALQAYEEGYRIAVEADLPNVQLSALENMHYSHMVRFDNIEEAKKMQEKIDNLKQTLNQCEARDTVSDYCSETDTEGGCTSDNTLDAQNDHGQAANNYEEPDDDVTLASLVQRSGSSSKIKVPKIRNSSKKFDELCDVTEDIHNSSKKVDELGDMAEGTRAVLSRSRSDHSVGRKRVRVILSDDESDENHENVQFKKTSTSPADSMSVSDHGASSSRNQDTLQVNQTRDAPYPAEESICSFKSSSPIDHAFEGIGLGASSAGKGPTSKSAASFSKLSTPGSNSLNESQNAVGSQSKDADNHFWAFRIGGHLVYLDGRACVHEGAFSIDSLKVEVACVYYLQISDEKRAKGLLPIIGELKFRGKVLEDAVSIYYDDQLASEQKCVDVVIDDWVPKQLMKLYVDFCMKSLEAPNKKLLTKLYNLEVSEDEIIVSDCGLQDMSIVPFLDALRSHKTIAVLDLSHNLLGNQTVERLQHIFASSSHTYGGLTLDLHCNRLGPTALFQICECAVLTDRLEVLNLSGNRLTDACSSYLFTILKKCKALYSLNVEQCSITSRTVQKMTDALHEESVLSHLSLGKNNPISSNTMLNLLSKLASLTRFSELSLTGIKLNKLMVDKLCLLAQSSCLSGLLLGGTSIGPVETTRLTEALSCTSQDFLRLELSNCGLTTPDFTQICTNLSRINILELNLGGNPINLEGCDAVQRMLVNPQCSIRSLSLDKCNLGLAGIVRVIQSLPAN

SEQ ID NO: 178867 - protein, 1352 aa, Zea Mays
MARGGGGRSKKEDEEELRGAKRGYKEASAEGNREEEARWANVIGDIYKRRCEYVEALRWLRADYEVSVKHLPQRHLLPSCQSLGEVYLRLGRFSEALTYQKKHLQLAKESDDLVEQQRATTQLGRTYHEILLRSENDHSAIRNAKKYFKSSMKLARILKERSPSQKSDFLKELIDAYNNMGMLELELDNFEEAEKLLIQGLKICDDEEVDSYDDARTRLHHNLGNVYTELQNWKKARGHIEKDIEICRKIRHLQGEAKGFINLGELHYRVQKYDNAKLCYNKALEVARSLEDEDALIEQIHQNIETVTKAVEVFEQLKEDELKLKKLIRDTSNARGTSKERKLLLDQHAWLDSLIEKARMICAWQKHKEFSKGKKRVANELRDKEKLSDSLLSIGESYQKLRNFSKARKWYMKSWNIYRSIGNLEGQALAKVNIGNVLDSCGDWAGALQAYEEGYRIAVEADLPNVQLSALENMHYSHMVRFDNIEEAKKMQEKIDNLKQTLNQCEARDTVSDYCSETDTEGGCTSDNTLDAQNDHGQAANNYEEPDDDVTLASLVQRSGSSSKIKVPKIRNSSKKFDELCDVTEDIHNSSKKVDELGDMAEGTRAVLSRSRSDHSVGRKRVRVILSDDESDENHENVQFKKTSTSPADSMSVSDHGASSSRNQDTLQVNQTRDAPYPAEESICSFKSSSPIDHAFEGIGLGASSAGKGPTSKSAASFSKLSTPGSNSLNESQNAVGSQSKDADNHFWAFRIGGHLVYLDGRACVHEGAFSIDSLKVEVACVYYLQISDEKRAKGLLPIIGELKFRGKVLEDAVSIYYDDQLASEQKCVDVVIDDWVPKQLMKLYVDFCMKSLEAPNKKLLTKLYNLEVSEDEIIVSDCGLQDMSIVPFLDALRSHKTIAVLDLSHNLLGNQTVERLQHIFASSSHTYGGLTLDLHCNRLGPTALFQICECAVLTDRLEVLNLSGNRLTDACSSYLFTILKKCKALYSLNVEQCSITSRTVQKMTDALHEESVLSHLSLGKNNPISSNTMLNLLSKLASLTRFSELSLTGIKLNKLMVDKLCLLAQSSCLSGLLLGGTSIGPVETTRLTEALSCTSQDFLRLELSNCGLTTPDFTQICTNLSRINILELNLGGNPINLEGCDAVQRMLVNPQCSIRSLSLDKCNLGLAGIVRVIQSLPENSQLEELRVSKNTNLALETTTKYDEDMQEVSTASEQKQCNDPETTNDIAPGNIDFANMQVPDSEDEADNDAHRARSGSRRSCASSSQKNSYSSCQMIEELAKALISAKQLMVLDLSCNGLSEEAVQSLYSAWASVPRGDGMARKHVNKEVVHFSVDGMRCCGLKPCCRRDLQM

SEQ ID NO: 178868 - protein, 1266 aa, Zea Mays
MARGGGGRSKKEDEEELRGAKRGYKEASAEGNREEEARWANVIGDIYKRRCEYVEALRWLRADYEVSVKHLPQRHLLPSCQSLGEVYLRLGRFSEALTYQKKHLQLAKESDDLVEQQRATTQLGRTYHEILLRSENDHSAIRNAKKYFKSSMKLARILKERSPSQKSDFLKELIDAYNNMGMLELELDNFEEAEKLLIQGLKICDDEEVDSYDDARTRLHHNLGNVYTELQNWKKARGHIEKDIEICRKIRHLQGEAKGFINLGELHYRVQKYDNAKLCYNKALEVARSLEDEDALIEQIHQNIETVTKAVEVFEQLKEDELKLKKLIRDTSNARGTSKERKLLLDQHAWLDSLIEKARMICAWQKGQALAKVNIGNVLDSCGDWAGALQAYEEGYRIAVEADLPNVQLSALENMHYSHMVRFDNIEEAKKMQEKIDNLKQTLNQCEARDTVSDYCSETDTEGGCTSDNTLDAQNDHGQAANNYEEPDDDVTLASLVQRSGSSSKIKVDELGDMAEGTRAVLSRSRSDHSVGRKRVRVILSDDESDENHENVQFKKTSTSPADSMSVSDHGASSSRNQDTLQVNQTRDAPYPAEESICSFKSSSPIDHAFEGIGLGASSAGKGPTSKSAASFSKLSTPGSNSLNESQNAVGSQSKDADNHFWAFRIGGHLVYLDGRACVHEGAFSIDSLKVEVACVYYLQISDEKRAKGLLPIIGELKFRGKVLEDAVSIYYDDQLASEQKCVDVVIDDWVPKQLMKLYVDFCMKSLEAPNKKLLTKLYNLEVSEDEIIVSDCGLQDMSIVPFLDALRSHKTIAVLDLSHNLLGNQTVERLQHIFASSSHTYGGLTLDLHCNRLGPTALFQICECAVLTDRLEVLNLSGNRLTDACSSYLFTILKKCKALYSLNVEQCSITSRTVQKMTDALHEESVLSHLSLGKNNPISSNTMLNLLSKLASLTRFSELSLTGIKLNKLMVDKLCLLAQSSCLSGLLLGGTSIGPVETTRLTEALSCTSQDFLRLELSNCGLTTPDFTQICTNLSRINILELNLGGNPINLEGCDAVQRMLVNPQCSIRSLSLDKCNLGLAGIVRVIQSLPENSQLEELRVSKNTNLALETTTKYDEDMQEVSTASEQKQCNDPETTNDIAPGNIDFANMQVPDSEDEADNDAHRARSGSRRSCASSSQKNSYSSCQMIEELAKALISAKQLMVLDLSCNGLSEEAVQSLYSAWASVPRGDGMARKHVNKEVVHFSVDGMRCCGLKPCCRRDLQM

SEQ ID NO: 178869 - protein, 749 aa, Zea Mays
MARGGGGRSKKEDEEELRGAKRGYKEASAEGNREEEARWANVIGDIYKRRCEYVEALRWLRADYEVSVKHLPQRHLLPSCQSLGEVYLRLGRFSEALTYQKKHLQLAKESDDLVEQQRATTQLGRTYHEILLRSENDHSAIRNAKKYFKSSMKLARILKERSPSQKSDFLKELIDAYNNMGMLELELDNFEEAEKLLIQGLKICDDEEVDSYDDARTRLHHNLGNVYTELQNWKKARGHIEKDIEICRKIRHLQGEAKGFINLGELHYRVQKYDNAKLCYNKALEVARSLEDEDALIEQIHQNIETVTKAVEVFEQLKEDELKLKKLIRDTSNARGTSKERKLLLDQHAWLDSLIEKARMICAWQKHKEFSKGKKRVANELRDKEKLSDSLLSIGESYQKLRNFSKARKWYMKSWNIYRSIGNLEGQALAKVNIGNVLDSCGDWAGALQAYEEGYRIAVEADLPNVQLSALENMHYSHMVRFDNIEEAKKMQEKIDNLKQTLNQCEARDTVSDYCSETDTEGGCTSDNTLDAQNDHGQAANNYEEPDDDVTLASLVQRSGSSSKIKVPKIRNSSKKFDELCDVTEDIHNSSKKVDELGDMAEGTRAVLSRSRSDHSVGRKRVRVILSDDESDENHENVQFKKTSTSPADSMSVSDHGASSSRNQDTLQVNQTRDAPYPAEESICSFKSSSPIDHAFEGIGLGASSAGKGPTSKSAASFSKLSTPGSNSLNESQNAVGSQSKDADNEEHN

SEQ ID NO: 178870 - protein, 72 aa, Zea Mays
MSNKHISFVHRSIGSQLTSTTSFVGYSKKRTNMEHQRHPGEWQFKVLYTKGTVNKMTCDRSICSHAKLVMNS

SEQ ID NO: 178871 - protein, 50 aa, Zea Mays
MICRFMRLSSFHFNANPAGQHHVTKQIQFSLGVIESMKHEVRSTPRSSGL

SEQ ID NO: 178872 - protein, 54 aa, Zea Mays
MRLSSFHFNANPAGQHHVTKQRKRTRVVGKKKRIAKKKSEAAEYQKLLAQRLKE

SEQ ID NO: 178873 - protein, 92 aa, Zea Mays
MLNMNFSIFLLQIASIVASGIQPLHNLTLLRFIDQKVGAGESVLWTQQQIERGFTAIENLIQLKGCAGKYATGDEVQLLQNQVRLPRRARMT

SEQ ID NO: 178874 - protein, 88 aa, Zea Mays
MTTSPAATSSSTSNSGSDDEHNRSQKLSSRRPLRMPINALGVFASPPGPRPPQPFSAHMRSQSMLDVQDVTETDSAAMVTPRDKRMKK

SEQ ID NO: 178875 - protein, 181 aa, Zea Mays
MQPHGSDTWYCISKIFSWNVTASATPNCFLSPRKGVPKFYNGESGSTAKLQDLPEPETPSPRKRKGLLPFSFKWDKEVYPDGDAIKSPTNCRRMTTSPAATSSSTSNSGSDDEHNRSQKLSSRRPLRMPINALGVFASPPGPRPPQPFSAHMRSQSMLDVQDVTETDSAAMVTPRDKRMKK

SEQ ID NO: 178876 - protein, 171 aa, Zea Mays
MLGGKKVTVVFVLGGPGSGKGTQCANIVEHFGFTHLSAGDLLRAEIKSGSENGTMIENMIKEGKIVPSEVTIKLLQEAMIKSENDKFLIDGFPRNEENHMEKRLLGRNQGRVDDNIETIKKRFKTFVDSTLPVIEHYNSKDKVKKIDAAKPIPEVFEDVKAIFAPYSLKAE

SEQ ID NO: 178877 - protein, 645 aa, Zea Mays
MFANRRETAAAVIVQKYVRRWLLRRAHLQACLAALLIQSYIRGFIARRYFSVIREHKAATVIQSTWRRRKFVILFQNYRQATVAIQCSWRQKLARKELRKLKMAANEAGALREAKNKLEKKMDDLALRLTLERRLRASSEESKSVEILKRDKIIESLSAECAAAKSAAQNEHAKKLLLQKQLDDSLREITMLQSKKIMSAEAAEENSNLKNLVESLSTKNSILENELIVTRKSSDDTMEKLKEVEGKCNHLQQNLDKLQEKLTNLENENHVLRQKAFNMPTMNNLSVAPKTLSEKFSASIGLPNSEPKHIYESPTPTKYLASLPQTLSTSRRSRLPVERHEQNHEILLRCIKENLGYKDGKPVAACIIYKCLLHWRAFESERTAIFDHVIEAINDVLKGNEADGRLPYWLSNTSALLCLLQRNLRSNGLFTTPSRRSGGALGKIAQTLRSPSKFIGRSDTLPHVDARYPAILFKQQLTACVEKIFGQLRDNLKKEISPLLNVCIQAPKSTRGQSGKASKSSGVGAHPASNSNWDNIVNFLDLLMDTLRENYVPSFFIRKLITQLFSFINIQLFNSLLLRRECCTFSNGEYVKAGLSLLEKWITDVTDEFAGTSWHELNYIRQAVGFLVIDSASCPSFCFCSLFVF

SEQ ID NO: 178878 - protein, 269 aa, Zea Mays
MFANRRETAAAVIVQKYVRRWLLRRAHLQACLAALLIQSYIRGFIARRYFSVIREHKAATVIQSTWRRRKFVILFQNYRQATVAIQCSWRQKLARKELRKLKMAANEAGALREAKNKLEKKMDDLALRLTLERRLRASSEESKSVEILKRDKIIESLSAECAAAKSAAQNEHAKKLLLQKQLDDSLREITMLQSKKIMSAEAAEENSNLKNLVESLSTKNSILENELIVTRKSSDDTMEKLKEVEGKCNHLQQNLDKRNLQTWKMKIMS

SEQ ID NO: 178879 - protein, 833 aa, Zea Mays
MGYDEKMMTKGILEKMKLENFQLGKTKVFLRAGQIAILDMRRAEILDNAARHIQGRFRTFITRKEFVKTREASISIQAYCRGCLARKMFANRRETAAAVIVQKYVRRWLLRRAHLQACLAALLIQSYIRGFIARRYFSVIREHKAATVIQSTWRRRKFVILFQNYRQATVAIQCSWRQKLARKELRKLKMAANEAGALREAKNKLEKKMDDLALRLTLERRLRASSEESKSVEILKRDKIIESLSAECAAAKSAAQNEHAKKLLLQKQLDDSLREITMLQSKKIMSAEAAEENSNLKNLVESLSTKNSILENELIVTRKSSDDTMEKLKEVEGKCNHLQQNLDKLQEKLTNLENENHVLRQKAFNMPTMNNLSVAPKTLSEKFSASIGLPNSEPKHIYESPTPTKYLASLPQTLSTSRRSRLPVERHEQNHEILLRCIKENLGYKDGKPVAACIIYKCLLHWRAFESERTAIFDHVIEAINDVLKGNEADGRLPYWLSNTSALLCLLQRNLRSNGLFTTPSRRSGGALGKIAQTLRSPSKFIGRSDTLPHVDARYPAILFKQQLTACVEKIFGQLRDNLKKEISPLLNVCIQAPKSTRGQSGKASKSSGVGAHPASNSNWDNIVNFLDLLMDTLRENYVPSFFIRKLITQLFSFINIQLFNSLLLRRECCTFSNGEYVKAGLSLLEKWITDVTDEFAGTSWHELNYIRQAVGFLVIHQKRKKTLEEIKQDLCPSLSVRQIYRICSMYWDDKYGTQGISTEVVAAMREMVNKDTQNLVSNSFLLDDDLSIPFSTEDLSMAIPSIDYADVDLPESLQHYTSVQFLLRQQDPQPAQ

SEQ ID NO: 178880 - protein, 882 aa, Zea Mays
MWALHTLQPLIHPKGVLEAVRISLAGYPTRRTYAEFVDRFAVLVPELMIGSYDEKMMTKGILEKMKLENFQLGKTKVFLRAGQIAILDMRRAEILDNAARHIQGRFRTFITRKEFVKTREASISIQAYCRGCLARKMFANRRETAAAVIVQKYVRRWLLRRAHLQACLAALLIQSYIRGFIARRYFSVIREHKAATVIQSTWRRRKFVILFQNYRQATVAIQCSWRQKLARKELRKLKMAANEAGALREAKNKLEKKMDDLALRLTLERRLRASSEESKSVEILKRDKIIESLSAECAAAKSAAQNEHAKKLLLQKQLDDSLREITMLQSKKIMSAEAAEENSNLKNLVESLSTKNSILENELIVTRKSSDDTMEKLKEVEGKCNHLQQNLDKLQEKLTNLENENHVLRQKAFNMPTMNNLSVAPKTLSEKFSASIGLPNSEPKHIYESPTPTKYLASLPQTLSTSRRSRLPVERHEQNHEILLRCIKENLGYKDGKPVAACIIYKCLLHWRAFESERTAIFDHVIEAINDVLKGNEADGRLPYWLSNTSALLCLLQRNLRSNGLFTTPSRRSGGALGKIAQTLRSPSKFIGRSDTLPHVDARYPAILFKQQLTACVEKIFGQLRDNLKKEISPLLNVCIQAPKSTRGQSGKASKSSGVGAHPASNSNWDNIVNFLDLLMDTLRENYVPSFFIRKLITQLFSFINIQLFNSLLLRRECCTFSNGEYVKAGLSLLEKWITDVTDEFAGTSWHELNYIRQAVGFLVIHQKRKKTLEEIKQDLCPSLSVRQIYRICSMYWDDKYGTQGISTEVVAAMREMVNKDTQNLVSNSFLLDDDLSIPFSTEDLSMAIPSIDYADVDLPESLQHYTSVQFLLRQQDPQPAQ

SEQ ID NO: 178881 - protein, 999 aa, Zea Mays
MFRNFSSHLRLERTKFSETDFTISHYAGKVTYQTDSFLEKNRDYIVAEHCNLLSSSRCPFVSGLFTSLPEESIRSSYKFSSVASRFKLQLQALMETLNSTEPHYVRCVKPNSANRPQLFENQSVLHQLRCGGVLEAVRISLAGYPTRRTYAEFVDRFAVLVPELMIGSYDEKMMTKGILEKMKLENFQLGKTKVFLRAGQIAILDMRRAEILDNAARHIQGRFRTFITRKEFVKTREASISIQAYCRGCLARKMFANRRETAAAVIVQKYVRRWLLRRAHLQACLAALLIQSYIRGFIARRYFSVIREHKAATVIQSTWRRRKFVILFQNYRQATVAIQCSWRQKLARKELRKLKMAANEAGALREAKNKLEKKMDDLALRLTLERRLRASSEESKSVEILKRDKIIESLSAECAAAKSAAQNEHAKKLLLQKQLDDSLREITMLQSKKIMSAEAAEENSNLKNLVESLSTKNSILENELIVTRKSSDDTMEKLKEVEGKCNHLQQNLDKLQEKLTNLENENHVLRQKAFNMPTMNNLSVAPKTLSEKFSASIGLPNSEPKHIYESPTPTKYLASLPQTLSTSRRSRLPVERHEQNHEILLRCIKENLGYKDGKPVAACIIYKCLLHWRAFESERTAIFDHVIEAINDVLKGNEADGRLPYWLSNTSALLCLLQRNLRSNGLFTTPSRRSGGALGKIAQTLRSPSKFIGRSDTLPHVDARYPAILFKQQLTACVEKIFGQLRDNLKKEISPLLNVCIQAPKSTRGQSGKASKSSGVGAHPASNSNWDNIVNFLDLLMDTLRENYVPSFFIRKLITQLFSFINIQLFNSLLLRRECCTFSNGEYVKAGLSLLEKWITDVTDEFAGTSWHELNYIRQAVGFLVIHQKRKKTLEEIKQDLCPSLSVRQIYRICSMYWDDKYGTQGISTEVVAAMREMVNKDTQNLVSNSFLLDDDLSIPFSTEDLSMAIPSIDYADVDLPESLQHYTSVQFLLRQQDPQPAQ

SEQ ID NO: 178882 - protein, 1116 aa, Zea Mays
MSYRKGLKVWVEEKGEGWVEAEVVEAKERAVVVFSSQRKKITVSPEKLLPRDTDEDLGGGHVDDMTKLTYLNEPGVLYNLKKRYALNEIYTYTGSILIAVNPFTRLPHLYNEYMMEQYKGIRLGELSPHVFAVADASYRAMVNDSRSQSILVSGESGAGKTETTKLIMQYLTFVGGRAALDDRTVEQQVLESNPLLEAFGNAKTVRNDNSSRFGKFVEIQFDSSGRISGAAIRTYLLERSRVVQITDPERNFHCFYQLCASGKDAELYKLGHISSFHYLNQSNTHDLEGTNNEDEYWKTKRAMDIVGISREDQDAIFRTLAAILHLGNIEFVPGKDADSSKIKDSTSNFHLQTAAKLFMCDSDLLVSTLCSRSIHTREGIIVKALDCAAAAANRDALAKTVYARLFDWLVENINKSIGQDVDSKLQIGVLDIYGFESFKNNSFEQFCINFANEKLQQHFNEHVFKMEQEEYKSEEINWSYIEFIDNQDVLDLIEKKPIGIIALLDEACMFPKSTHETFATKMFRNFSSHLRLERTKFSETDFTISHYAGKVTYQTDSFLEKNRDYIVAEHCNLLSSSRCPFVSGLFTSLPEESIRSSYKFSSVASRFKLQLQALMETLNSTEPHYVRCVKPNSANRPQLFENQSVLHQLRCGGVLEAVRISLAGYPTRRTYAEFVDRFAVLVPELMIGSYDEKMMTKGILEKMKLENFQLGKTKVFLRAGQIAILDMRRAEILDNAARHIQGRFRTFITRKEFVKTREASISIQAYCRGCLARKMFANRRETAAAVIVQKYVRRWLLRRAHLQACLAALLIQSYIRGFIARRYFSVIREHKAATVIQSTWRRRKFVILFQNYRQATVAIQCSWRQKLARKELRKLKMAANEAGALREAKNKLEKKMDDLALRLTLERRLRASSEESKSVEILKRDKIIESLSAECAAAKSAAQNEHAKKLLLQKQLDDSLREITMLQSKKIMSAEAAEENSNLKNLVESLSTKNSILENELIVTRKSSDDTMEKLKEVEGKCNHLQQNLDKLQEKLTNLENENHVLRQKAFNMPTMNNLSVAPKTLSEKFSASIGLPNSEPKHIYRMKIVGKPNTYKISGFSSTDFEYIKEIEVAC

SEQ ID NO: 178883 - protein, 1419 aa, Zea Mays
MRYMLPHLYNEYMMEQYKGIRLGELSPHVFAVADASYRAMVNDSRSQSILVSGESGAGKTETTKLIMQYLTFVGGRAALDDRTVEQQVLESNPLLEAFGNAKTVRNDNSSRFGKFVEIQFDSSGRISGAAIRTYLLERSRVVQITDPERNFHCFYQLCASGKDAELYKLGHISSFHYLNQSNTHDLEGTNNEDEYWKTKRAMDIVGISREDQDAIFRTLAAILHLGNIEFVPGKDADSSKIKDSTSNFHLQTAAKLFMCDSDLLVSTLCSRSIHTREGIIVKALDCAAAAANRDALAKTVYARLFDWLVENINKSIGQDVDSKLQIGVLDIYGFESFKNNSFEQFCINFANEKLQQHFNEHVFKMEQEEYKSEEINWSYIEFIDNQDVLDLIEKKPIGIIALLDEACMFPKSTHETFATKMFRNFSSHLRLERTKFSETDFTISHYAGKVTYQTDSFLEKNRDYIVAEHCNLLSSSRCPFVSGLFTSLPEESIRSSYKFSSVASRFKLQLQALMETLNSTEPHYVRCVKPNSANRPQLFENQSVLHQLRCGGVLEAVRISLAGYPTRRTYAEFVDRFAVLVPELMIGSYDEKMMTKGILEKMKLENFQLGKTKVFLRAGQIAILDMRRAEILDNAARHIQGRFRTFITRKEFVKTREASISIQAYCRGCLARKMFANRRETAAAVIVQKYVRRWLLRRAHLQACLAALLIQSYIRGFIARRYFSVIREHKAATVIQSTWRRRKFVILFQNYRQATVAIQCSWRQKLARKELRKLKMAANEAGALREAKNKLEKKMDDLALRLTLERRLRASSEESKSVEILKRDKIIESLSAECAAAKSAAQNEHAKKLLLQKQLDDSLREITMLQSKKIMSAEAAEENSNLKNLVESLSTKNSILENELIVTRKSSDDTMEKLKEVEGKCNHLQQNLDKLQEKLTNLENENHVLRQKAFNMPTMNNLSVAPKTLSEKFSASIGLPNSEPKHIYESPTPTKYLASLPQTLSTSRRSRLPVERHEQNHEILLRCIKENLGYKDGKPVAACIIYKCLLHWRAFESERTAIFDHVIEAINDVLKGNEADGRLPYWLSNTSALLCLLQRNLRSNGLFTTPSRRSGGALGKIAQTLRSPSKFIGRSDTLPHVDARYPAILFKQQLTACVEKIFGQLRDNLKKEISPLLNVCIQAPKSTRGQSGKASKSSGVGAHPASNSNWDNIVNFLDLLMDTLRENYVPSFFIRKLITQLFSFINIQLFNSLLLRRECCTFSNGEYVKAGLSLLEKWITDVTDEFAGTSWHELNYIRQAVGFLVIHQKRKKTLEEIKQDLCPSLSVRQIYRICSMYWDDKYGTQGISTEVVAAMREMVNKDTQNLVSNSFLLDDDLSIPFSTEDLSMAIPSIDYADVDLPESLQHYTSVQFLLRQQDPQPAQ

SEQ ID NO: 178884 - protein, 131 aa, Zea Mays
MALLAPSPRALRVRETAAAALPHSSATAACSTVGGGAARRALWLWDNGGGTGTGRRKEHRERVRPEAYCWDVSRPVEMEEIDSIEKLDDALRWSVENNQPVVIDWMAGWCRKCIYLMPRMEKMAGEYPELV

SEQ ID NO: 178885 - protein, 197 aa, Zea Mays
MHETHSSLKLGRAGEDEAVASGREDQQRGASAQVLLPAPAAVAQRGEEEEEEAKATAVVPPPRFPATAPAAAPVQRQLQLQKAAEGAAATTTAPASACSSLLSLSGEDREKRGVGVLYPFAVVKPLGLDDGRMTTLSDVNHRILKRPARPVRHPVGPFACGPAVSAHGLGLSGKVVVSLTKIRTGGNGTITIIRTRG

SEQ ID NO: 178886 - protein, 248 aa, Zea Mays
MALDDACAYDCCALPPPLHCLDWDWDSELLHTHRHTTSAGGAAVQAEPPTFFVPATPGVQPSAASSGGYLHDAITHWSDDRRSKRQRMAAAVATTTTPPARRPATTVSEDLQCLLAGFWDSTSEAEGGADFRHDLNTTTPEPEPETTTEIRCSFASGEDREKRGVGVLYPFAVVKPLGLDDGRMTTLSDVNHRILKRPARPVRHPVGPFACGPAVSAHGLGLSGKVVVSLTKIRTGGNGTITIIRTRG

SEQ ID NO: 178887 - protein, 112 aa, Zea Mays
MRRHKTKRGTNGKGRWKGKTRPTMAPNCGVEIHLSPPHGHLELLQLLSDVRHIRRTHLVPERGQQLVHLLLFPCPRRRLHQSCPWRSPCSRRSHRRLGTHAVALQLGIWIQG

SEQ ID NO: 178888 - protein, 706 aa, Zea Mays
MDFGDDVMDGGSDAQRRKKRYHRHTPRQIQQLEAMFKECPHPDENQRMQLSRELGLEPRQIKFWFQNRRTQMKAQHERQDNCFLRAENDKIRCENIAMREALRSVICPTCGGPPVADDYFDEQKLRMENARLKEELDRVSSLTSKYLGRPITQLPPAQAALSMSSLDLSVGGLGSPSLDLDLLSGGSSGYPPFHLPMPVSEMERPMMAEMATRAMDELIRMAQAGEHLWVKAGGREVLNVDTYDSVFAKPGAASFRGPDVHVEGSRDSGLVFMSAVGLVDMFMDSSKWTEFFPAIVSKARTVDVLVNGMAGRSESLVLMYEELHVMSPVVPTREFCFLRYCRQIERGLWAIADISVDLQQHDARFGAPPSRSCRLPSGCLIADMADGSSKVTWVEHMEIEDRVPIHLLYRDLILSGAAFGAHRWLAALQRACERCACLVPAGMPHRDIAVAGVTPEGKRSMMKLSQRMVSSFCASLSASQLHRWTTLSGPSDVGVRVTVHRSTDPGQPSGVVLSAATSIWLPVPCDRVFAFVRDEHTRSQWDVLSHGNPVQEVSRIPNGSHPGNCISLLRGLNASQNSMLILQESCTDGTGSLVVYAPIDIPAANVVMSGEDPSAIPLLPSGFTILPDGRPGAPSSSSAGGPLVGSPAAAGSLVTVAFQILDLKLACRRGFARNGGVKNAPCSSHSSCCRHAHQLLIPFLFVSPLP

SEQ ID NO: 178889 - protein, 205 aa, Zea Mays
MKQFASEVQKLSEKVLDLLCENLGLEPGYLKAAFAGSDGGPTFGTKVSAYPPCPRPDLVAGLRAHTDAGGLILLLQDDQVSGLQLLRGGDGGEWVDVPPLRHAIVANVGDQLEVVTNGRYKSAVHRVLARPDGNRMSVASFYNPGADAVIFPAPALVGEEERAEKKATTYPRFVFEDYMNLYARHKFEAKEPRFEAMKSSAIATA

SEQ ID NO: 178890 - protein, 71 aa, Zea Mays
MSILSQAKSSKGTVYWMAPEVAKAKPHGPPADIWSLGCTVLEMLTGEVPYPDMEWVSDCASLISSVTVTFL

SEQ ID NO: 178891 - protein, 112 aa, Zea Mays
MSILSQAKSSKGTVYWMAPEVAKAKPHGPPADIWSLGCTVLEMLTGEVPYPDMEWALLKIGRGIPPEIPNTLSEDARDFIKKCVQANPNDRPCAAQLFEHPFVQRPLQQYGV

SEQ ID NO: 178892 - protein, 111 aa, Zea Mays
MSILSQAKSSKGTVYWMAPEAKPHGPPADIWSLGCTVLEMLTGEVPYPDMEWTQALLKIGRGIPPEIPNTLSEDARDFIKKCVQANPNDRPCAAQLFEHPFVQRPLQQYGV

SEQ ID NO: 178893 - protein, 543 aa, Zea Mays
MEAPQRPRPRQRPQLARINAMKHSSYPAEDEGDDDLAPVDLGSEFASQTSFRIRRGGAEVADLFRKLGLKGPEDFTIPPAIYAAGMAHIPNPSRSRRQSLQAPLLPAAGADGMAPAPQGPPDVSARDAALAARLDAAVQGEEQAVLAAKVVQPEPEVAQVSARSYKGSGTESSNRAVQLETGESSRRVIAAAVKEGTAHGVKGKGDVVKVDQLRVERTKAVVVEAPRETTAAVVQAVAESPSQSTEYLISPSPNRRFKRTITSWTKGHHLGSGSFGSVYEAISENSRVHKFAIIKCSQLAICDGFFFAVKEVSLVDQGLNGKQRILQLEHEISLLSRLEHENIVQYFGTHKEGGKLYIFLELVSQGSLAALYQKYHLQDSQVSAYTRQILNGLHYLHRRNVLHRDIKCANILVDASGLVKLADFGLAKEMSILSQAKSSKGTVYWMAPEVAKAKPHGPPADIWSLGCTVLEMLTGEVPYPDMEWTQALLKIGRGIPPEIPNTLSEDARDFIKKCVQANPNDRPCAAQLFEHPFVQRPLQQYGV

SEQ ID NO: 178894 - protein, 523 aa, Zea Mays
MEAPQRPRPRQRPQLARINAMKHSSYPAEDEGDDDLAPVDLGSEFASQTSFRIRRGGAEVADLFRKLGLKGPEDFTIPPAIYAAGMAHIPNPSRSRRQSLQAPLLPAAGADGMAPAPQGPPDVSARDAALAARLDAAVQGEEQAVLAAKVVQPEPEVAQVSARSYKGSGTESSNRAVQLETGESSRRVIAAAVKEGTAHGVKGKGDVVKVDQLRVERTKAVVVEAPRETTAAVVQAVAESPSQSTEYLISPSPNRRFKRTITSWTKGHHLGSGSFGSVYEAISDDGFFFAVKEVSLVDQGLNGKQRILQLEHEISLLSRLEHENIVQYFGTHKEGGKLYIFLELVSQGSLAALYQKYHLQDSQVSAYTRQILNGLHYLHRRNVLHRDIKCANILVDASGLVKLADFGLAKEMSILSQAKSSKGTVYWMAPEVAKAKPHGPPADIWSLGCTVLEMLTGEVPYPDMEWALLKIGRGIPPEIPNTLSEDARDFIKKCVQANPNDRPCAAQLFEHPFVQRPLQQYGV

SEQ ID NO: 178895 - protein, 63 aa, Zea Mays
MPPEDGAGAGAGAGAGAVGRTAGRDIWRVAAEEDRRPKASERRRSAARERERILNPKALAQQI

SEQ ID NO: 178896 - protein, 375 aa, Zea Mays
MKSGPFARIHHPPHEIVPKPFGPAVQTKHKLPAQRTAARRRPPSQFPHGSGTSQFRTTIPPAATADGDLTAEPLLSQPNCADPPPWRPSGSGSSSSSLSGRRPPASPSWVATTPPLASAPAKLASSPSSAPAFSSPPTQTAKDSALAQLSPASAMPADIVVIRLPGPRALRVLARSVLFAVALLFLPWLRPAEAPARGRAVDTCGAAAAQAELLLRDLHQEGLPVHGARAVVLVANGVCDSTAPKQDLRRMLMIGESSVDFLLDFGYFNEDADSLPQNYRTIYIHRFAEAFIGVKKVAPAEDNSHAGTSTRTELLSPPAFDLKEGVFYSRPDETTNCEFKNMARKLLLSDITGTPTAYSYKRKLLVQMLRKDQES

SEQ ID NO: 178897 - protein, 196 aa, Zea Mays
MEKQYADVLAPPKDCVAPKKFGLKVVQKLTKRNSTVPYTVPEDLGILLNTLKRLLDVLRPRIESHLKSWSSCIPNGGNSAAIGEKLSEVTVTLRAKFRNYMQAVVEKLSENTRMQNTTKLKKIIQDSKELVLESDIRTRMQALKDQLIQAINHVHKVSEVHVFVAICRGFWDRMGQDVLSFLENRKENKAWYKGIG

SEQ ID NO: 178898 - protein, 279 aa, Zea Mays
MHEESARPPKSTGPRRPPRSLPGGGAVGCRTNCPVLRSGVQRQRATSTLILRFAAHRDTSKPNQAGVQVSTERGEQREREIMELCVSTTASVRATAAPISFAPPRRGASASTALPLHRRIPTRGWCCASAAVPDPAPSEELASASYTVVVADKPDSPADDKVDEVSAAPSGSAEAPVAEPVSSEASPSPSTDDGGLDEILSKLNIEVTPILILTGSGAFVALWILSSVVSAVDSVPLLPKLLELVGTGYSIWFTARHLLFKESRDGMFAKFKDIKERII

SEQ ID NO: 178899 - protein, 332 aa, Zea Mays
MSTPHSSSTSSVPPHRASPPQIPQSLTLAPTASSASPSSSSASGMRDAAEDDSDSPPSQMSEDDPGGGGGDRWEPDLRGGNGGGGGGGRWAPPDQVLENVLETVLEFLTAARDRNAASLVCRSWYRAEAQTRRELFIGNCYAVSPRRAVERFGGLRAVVLKGKPRFADFSLVPYGWGAYVSPWVAALGPAYPRLQRICLKRMAVSDDDLALVASSFPFLRDLSLVCCDGFSTLGLAVIAERCRHLRVLDLIEDYVEDDDEELVDWISKFPESNTSLESLVFDCVSCPFNFEALEALVARSPALRRLRVNHHVSVEQLRRLMVSGLSIRFPGG

SEQ ID NO: 178900 - protein, 92 aa, Zea Mays
MRIGEEDLETRKAGRKTRLRTSVFVCSLILRYLLTILERAYKLPTSPTKYTTHSGPNTHVLPRLYRFVGVTPSVLLVSFSIFSAPSSVLVSF

SEQ ID NO: 178901 - protein, 75 aa, Zea Mays
MDTGSALAFEALIPSLLLSPEPGPCFFVLLMLISCTGCFLLVGEETILISFHVVDSFAISSKGVRDTEANCNSND

SEQ ID NO: 178902 - protein, 174 aa, Zea Mays
MEGPNDSPCPKILVGNTVEMKVGAASSRNDGRAGQLKYANSRETIASKYTSIREQNRQSGKAVKKEISSNSVSLLEERSSEQWSNTGIPPTGVSATWASMKIGFQNFKANLGSKKFLPLRQDPGFVLNLSVSSPESLDDIFQRLKRRPANVLVDYLDDDDNNNTRDMDVHFQDQ

SEQ ID NO: 178903 - protein, 391 aa, Zea Mays
MWVFYLISLPLTLGMVVVTLRYFAGPAVPRYVVATVGYAWFCSLSIIILVPADIWQTLTASAKGGIGFFWSWSYWSTFILTWAVVPTIQGYEDAGDFTVKERLKTSIHMNLLFYSIVGAIGLIGVILLLIMHRAWDGGIVGFAMACSNTFGLVTGAFLLGFGLSEIPRNIWKNAYWSHRQKVLSHRVAKMAVKLDNAHQEYSNAIVVAQATSNQMSKRDILRPYMDIIDNMLSQMLREDPSFKPSGGRFGENDMDYDTDDKSMATLRRQLRRAHEEYYRGKSEYMTCVMEALKLEDTIKNYERRDASGWKYVSSFRDRRSGTLGPILDTIEFIWQCILRKQLQKAFAVILGCMSAAILLAEATLLPSVDLSLFSILIKVVGKQEVLVQVRN

SEQ ID NO: 178904 - protein, 324 aa, Zea Mays
MNLLFYSIVGAIGLIGVILLLIMHRAWDGGIVGFAMACSNTFGLVTGAFLLGFGLSEIPRNIWKNAYWSHRQKVLSHRVAKMAVKLDNAHQEYSNAIVVAQATSNQMSKRDILRPYMDIIDNMLSQMLREDPSFKPSGGRFGENDMDYDTDDKSMATLRRQLRRAHEEYYRGKSEYMTCVMEALKLEDTIKNYERRDASGWKYVSSFRDRRSGTLGPILDTIEFIWQCILRKQLQKAFAVILGCMSAAILLAEATLLPSVDLSLFSILIKVVGKQEVLVQVAAFVPLMYMFICTYYSLFKIGMLMFYSLTPRQTSSVSLLMICS

SEQ ID NO: 178905 - protein, 670 aa, Zea Mays
MWVFYLISLPLTLGMVVVTLRYFAGPAVPRYVVATVGYAWFCSLSIIILVPADIWQTLTASAKGGIGFFWSWSYWSTFILTWAVVPTIQGYEDAGDFTVKERLKTSIHMNLLFYSIVGAIGLIGVILLLIMHRAWDGGIVGFAMACSNTFGLVTGAFLLGFGLSEIPRNIWKNAYWSHRQKVLSHRVAKMAVKLDNAHQEYSNAIVVAQATSNQMSKRDILRPYMDIIDNMLSQMLREDPSFKPSGGRFGENDMDYDTDDKSMATLRRQLRRAHEEYYRGKSEYMTCVMEALKLEDTIKNYERRDASGWKYVSSFRDRRSGTLGPILDTIGCCFCTLDVYVHLHILFIIQDWYVDVLFPDSKTNQLCQLAYDLMVARYAPPISYNFLNLIRLGGNAKTTFEKRMGNIDDAVPFFGRGFNKIYPLIMVVYTLLVASNFFGRVIDFLGSWKRFKLQQEEENIDGLDPSGMIIVQKERSWIEQGCKVGEHVIPLARNFNGVNTDIESQNVPLVGNTVEMKVGAASSRNDGRAGQLKYANSRETIASKYTSIREQNRQSGKAVKKEISSNSVSLLEERSSEQWSNTGIPPTGVSATWASMKIGFQNFKANLGSKKFLPLRQDPGFVLNLSVSSPESLDDIFQRLKRRPANVLVDYLDDDDNNNTRDMDVHFQDQ

SEQ ID NO: 178906 - protein, 430 aa, Zea Mays
MWVFYLISLPLTLGMVVVTLRYFAGPAVPRYVVATVGYAWFCSLSIIILVPADIWQTLTASAKGGIGFFWSWSYWSTFILTWAVVPTIQGYEDAGDFTVKERLKTSIHMNLLFYSIVGAIGLIGVILLLIMHRAWDGGIVGFAMACSNTFGLVTGAFLLGFGLSEIPRNIWKNAYWSHRQKVLSHRVAKMAVKLDNAHQEYSNAIVVAQATSNQMSKRDILRPYMDIIDNMLSQMLREDPSFKPSGGRFGENDMDYDTDDKSMATLRRQLRRAHEEYYRGKSEYMTCVMEALKLEDTIKNYERRDASGWKYVSSFRDRRSGTLGPILDTIEFIWQCILRKQLQKAFAVILGCMSAAILLAEATLLPSVDLSLFSILIKVVGKQEVLVQVAAFVPLMYMFICTYYSLFKIGMLMFYSLTPRQTSSVSLLMI

SEQ ID NO: 178907 - protein, 602 aa, Zea Mays
MWVFYLISLPLTLGMVVVTLRYFAGPAVPRYVVATVGYAWFCSLSIIILVPADIWQTLTASAKGGIGFFWSWSYWSTFILTWAVVPTIQGYEDAGDFTVKERLKTSIHMNLLFYSIVGAIGLIGVILLLIMHRAWDGGIVGFAMACSNTFGLVTGAFLLGFGLSEIPRNIWKNAYWSHRQKVLSHRVAKMAVKLDNAHQEYSNAIVVAQATSNQMSKRDILRPYMDIIDNMLSQMLREDPSFKPSGGRFGENDMDYDTDDKSMATLRRQLRRAHEEYYRGKSEYMTCVMEALKLEDTIKNYERRDASGWKYVSSFRDRRSGTLGPILDTIEFIWQCILRKQLQKAFAVILGCMSAAILLAEATLLPSVDLSLFSILIKVVGKQEVLVQVAAFVPLMYMFICTYYSLFKIGMLMFYSLTPRQTSSVSLLMICSMVARYAPPISYNFLNLIRLGGNAKTTFEKRMGNIDDAVPFFGRGFNKIYPLIMVVYTLLVASNFFGRVIDFLGSWKRFKLQQEEENIDGLDPSGMIIVQKERSWIEQGCKVGEHVIPLARNFNGVNTDIESQNVPLRISENCMHDLFYPLVMEGPNDNPCPCPKILSCVD

SEQ ID NO: 178908 - protein, 190 aa, Zea Mays
MASIVASRRAVPLVRALEKLIAASSAPGTGSALRPVAVAGGLRGYNTGAPLRRYEGAESEDDSVREYDGRHGGRDYAVPSLFSGRAVRRGWNAKEDEEALHLRVDMPGLGKEHVKVWAEQNSLVIKGEGEKEDSEDEAAPPPRYSGRIELAPEVYRMDKIKAEMKNGVLKVVVPKVKEQQRKDVFQVNVE

SEQ ID NO: 178909 - protein, 286 aa, Zea Mays
MKNWFTRFPTILQGCESIIENLRGQYAHSVGCFDEAAFHFLEAKKLTESKSMQSMCETYAAVSYICKGDAESSSQALELVGPAYRTMDSFVGVREKTCIIFVYGLLLMRQHNPQEARNRLASGLKIAHQQLGNIQLVSQYLTILGTLALQLHDAAQAKEILKSSLTLAKTLFDIPTQIWILSVFTELYRELEEKENEMENSEYEGKKEDDLQRRLSEAYSHSFHHELVEKSRIQPLHMSSKQPEMAVPSANGDLDIPESVGLSAPQPFLKRLVEAEPMRRSTRRRR

SEQ ID NO: 178910 - protein, 401 aa, Zea Mays
MSIAAVSADGLLALADEAERRYDFSAAAACLESALRPPYAAALLPLTEARARLRLASLLLAPRGSSRVPRAGAPAAAKTHLERALLILSPLPSAPPRLKLLAHSHLAGAYAVLGAIASQKHVLHRGLGLLDSASASGLLQREPALLWTCNFQAQLGSVFTNDGDAASALSALSVGASAAAELGSPQLELFFAASELHVHLLCWEDSAAVENAVTRASLLWDALTAEQMEHWVGLFFYTQLLQTFYLLRICDYKAASQHVERLDTAVKSEMQRGRQITALANDLSTLERTLGQSGLKEREMLALSHKQRQLKGQLRALCGYDSLNDVLDYGDKLLLAPPLMHGEWLPRTAVFVLVDLMVVMVGRPKGIFKECGKRINSGLRLIHDELVKLGIVDGVMGIYFL

SEQ ID NO: 178911 - protein, 253 aa, Zea Mays
MLMEETDTDDSISFVTSVKSACSMSLGLGESTISASSVLAMPMVSSRTTGFRGIENDRPKILKMMHTIASHTSENRMTASAVATCMAPLLLRPLLAGESEMDEVFDMDGDDSAQLLAAANAANSAQGIVATLLEEYEGIFHDEHLRCSLSPESQIEDSGIEASTVDGNLEAKGNGFHDVDQELDDDNGVERILSGKLSESSGYAGSDLYDYKNGNIMIDEKTNVLTIIKMAIGVPKKRNDKWMANQLLKLHLE

SEQ ID NO: 178912 - protein, 149 aa, Zea Mays
MIGGGKSLWSCQNYIDGFIAQDVLTIKAKLQVIREKIDRPFRCLDGQYRRELIRVYLSNVEQIYRRFIDEKRRTFSRLIEDKLGWSRDLNSLSTFSRPTKERSPSNYLPMNLCIEGGRAACVLVERGSLVESDVSPYLYKVKEEQLGFL

SEQ ID NO: 178913 - protein, 149 aa, Zea Mays
MTVQIATCMAPLLLRPLLAGESEMDEVFDMDGDDSAQLLAAANAANSAQGIVATLLEEYEGIFHDEHLRCSLSPESQIEDSGIEASTVDGNLEAKGNGFHDVDQELDDDNGVERILSGKLSESSGYAGSDLYDYKSREPDYCIGEQVLR

SEQ ID NO: 178914 - protein, 264 aa, Zea Mays
MLMEETDTDDSISFVTSVKVNAKRVLSKAKSACSMSLGLGESTISASSVLAMPMVSSRTTGFRGIENDRPKILKMMHTIASHTSENRMTASAVATCMAPLLLRPLLAGESEMDEVFDMDGDDSAQLLAAANAANSAQGIVATLLEEYEGIFHDEHLRCSLSPESQIEDSGIEASTVDGNLEAKGNGFHDVDQELDDDNGVERILSGKLSESSGYAGSDLYDYKNGNIMIDEKTNVLTIIKMAIGVPKKRNDKWMANQLLKLHLE

SEQ ID NO: 178915 - protein, 237 aa, Zea Mays
MLMEETDTDDSISFVTSVKVNAKRVLSKAKSACSMSLGLGESTISASSVLAMPMVSSRTTGFRGIENDRPKILKMMHTIASHTSENRMTASAVATCMAPLLLRPLLAGESEMDEVFDMDGDDSAQLLAAANAANSAQGIVATLLEEYEGIFHDEHLRCSLSPESQIEDSGIEASTVDGNLEAKGNGFHDVDQELDDDNGVERILSGKLSESSGYAGSDLYDYKSREPDYCIGEQVLR

SEQ ID NO: 178916 - protein, 151 aa, Zea Mays
MTVQIATCMAPLLLRPLLAGESEMDEVFDMDGDDSAQLLAAANAANSAQGIVATLLEEYEGIFHDEHLRCSLSPESQIEDSGIEASTVDGNLEAKGNGFHDVDQELDDDNGVERILSGKLSESSGYAGSDLYDYKNGNIMIDEKTNVLTII

SEQ ID NO: 178917 - protein, 178 aa, Zea Mays
MARLNEGLSLFDAILIVPMFQITWTFFSICIGFVYFQEYQVFDTLRIIMFVLGMTFVFVGISLLAPDDSKGDTKDGSSTAEDSIIDIDINGKMLMEETDTDDSISFVTSVKVNAKRVLSKAKSACSMSLGLGESTISASSVLAMPMVSSRTTGFRGIENDRPNCYLYGASSVASTSSW

SEQ ID NO: 178918 - protein, 239 aa, Zea Mays
MLMEETDTDDSISFVTSVKVNAKRVLSKAKSACSMSLGLGESTISASSVLAMPMVSSRTTGFRGIENDRPKILKMMHTIASHTSENRMTASAVATCMAPLLLRPLLAGESEMDEVFDMDGDDSAQLLAAANAANSAQGIVATLLEEYEGIFHDEHLRCSLSPESQIEDSGIEASTVDGNLEAKGNGFHDVDQELDDDNGVERILSGKLSESSGYAGSDLYDYKNGNIMIDEKTNVLTII

SEQ ID NO: 178919 - protein, 116 aa, Zea Mays
MIGGGKSLWSCQNYIDGFIAQDVLTIKAKLQVIREKIDRPFRCLDGQYRRELIRVYLSNVEQIYRRFIDEKRRTFSRLIEDKLGWSRDLNSLSTFSRPTKERSPSNYLPMNLCIVP

SEQ ID NO: 178920 - protein, 175 aa, Zea Mays
MARLNEGLSLFDAILIVPMFQITWTFFSICIGFVYFQEYQVFDTLRIIMFVLGMTFVFVGISLLAPDDSKGDTKDGSSTAEDSIIDIDINGKMLMEETDTDDSISFVTSVKVNAKRVLSKAKSACSMSLGLGESTISASSVLAMPMVSSRTTGFRGIENDRPKYVPLRTTDWSNL

SEQ ID NO: 178921 - protein, 157 aa, Zea Mays
MVCCLNVSLFCFKKKKNAPSLGMGMMIKWRVLGLLGSVEARYLPTPLSGPPAGTHARPTSLKMARLNEGLSLFDAILIVPMFQITWTFFSICIGFVYFQEYQVFDTLRIIMFVLGMTFVFVGISLLAPDDSKGDTKDGSSTAEDSIIDIDMFYSTNL

SEQ ID NO: 178922 - protein, 145 aa, Zea Mays
MGGKQQLSMCILLWYWYPPDYSYQQVLQHYYPQMYGPASHSVPPYQYMGYMPSGPSPSAGFSPMQQPMRPAFFQQPTAQMDGSFPPGHSLPPNFRLQLPSHAVSKESDDASGYQSAQPTSTPDTIANNQEDSRPVVSDSDTNTPN

SEQ ID NO: 178923 - protein, 192 aa, Zea Mays
MHACIRLLCSALFWRGGGGGAVREPHGPDQPPQGSPYSYRLPSQMTPPQAAAVFYSPQYGGYWYPPDYSYQQVLQHYYPQMYGPASHSVPPYQYMGYMPSGPSPSAGFSPMQQPMRPAFFQQPTAQMDGSFPPGHSLPPNFRLQLPSHAVSKESDDASGYQSAQPTSTPDTIANNQEDSRPVVSDSDTNTPN

SEQ ID NO: 178924 - protein, 179 aa, Zea Mays
MATSSSSSGPGGPYHHHRSRFGDTTLTKVFVGGLAWETPSEGLRHHFEAYGDILEAVVITDRETGRSKGYGFVIFRDPGAAALAVQNPNPVIAGRRANCNIAAFGPPRTAQPRGRGGGGGAVREPHGPDQPPQGSPYSYRLPSQMTPPQAAAVFYSPQYGGYWYPPDYSYQQASNSVSI

SEQ ID NO: 178925 - protein, 306 aa, Zea Mays
MGYLPSLSSKAAHFVSDLTTVILSPVSERETSHLPEVDEVLENLDDDKDSEHNSDSLDGPDTSSFRAFLISFLSSSSSNNDSMEIIPEQNGDMGYPTLTPMGKGSKGRTGLLSRGKHSIGKIINKAARISGFKQTTAEPKIDREAVTHTEPDAPVLEHQEPKEVASFGSLPTMSEPSVLLSELMQRILYASLPALAQGRNWVLLYSTWRHGISLSTLYRRSMLCPGFSLLVVGDKKGTVFGGLVEAPLQPSSSKKGPIIPLFSLIYTIALSSIDRQVQITTLRCALPTIWLWGEEVISHFILTQTF

SEQ ID NO: 178926 - protein, 245 aa, Zea Mays
MGYLPSLSSKAAHFVSDLTTVILSPVSERETSHLPEVDEVLENLDDDKDSEHNSDSLDGPDTSSFRAFLISFLSSSSSNNDSMEIIPEQNGDMGYPTLTPMGKGSKGRTGLLSRGKHSIGKIINKAARISGFKQTTAEPKIDREAVTHTEPDAPVLEHQEPKEVASFGSLPTMSEPSVLLSELMQRILYASLPALAQGRNWVLLYSCAVHGGMAYLYLLYIEGACFALVSHSWLLGIKKAQFLVV

SEQ ID NO: 178927 - protein, 64 aa, Zea Mays
MVSAIILIPCLCVMIGEERISRFIGLSRVRAELPEEVDIKEKFAPLPEYPLVRFHLTGDLVEEF

SEQ ID NO: 178928 - protein, 50 aa, Zea Mays
MGAARRPKAAGMALCTGAVSCAGTGSAGSAHDGRVAREPGAGASRPCGPR

SEQ ID NO: 178929 - protein, 426 aa, Zea Mays
MLGRLLPPFWLHWILVVTFSGFPVTVSSVLPCLATVEIWCSIINGASIMQDRDLRIYRPAESTTSRHLPCSHELCQSVPGCTNPKQPCPYNIDYFSENTTSSGLLIEDTLHLNYREDHVPVNASVIIGCGQKQSGDYLDGIAPDGLLGLGMADISVPSFLARAGLVQNSFSMCFKEDSSGRIFFGDQGVPSQQSTPFVPLYGKLQTYAVNVDKSCIGHKCLEGTSFKALVDSGTSFTSLPFDVYKAFTMEFDKQMNATRVPYEDTTWKYCYSASPLEMPDVPTITLTFAADKSLQAVNPILPFNDKQGALAGFCLAVLPSTEPIGIIAQNFLVGYHVVFDRESMKLGWYRSECRYVEDSTTVPLGPSQHDSPEDPLPSNEQQTSPAVTPATAGTAPLSCATTNLQMLLASSYPLLLLTMSSVFFVS

SEQ ID NO: 178930 - protein, 318 aa, Zea Mays
MTASVKSPGPKAQAQRRRTIIRFLSTSSHHWPHVSGHATPSSPTVVRSVGHPIPYVRPLPPQVPNPLSPLRPGPFQVSNQSEAALPASPPLRPHDGCAAPRLLHPPPRRCRGLRLLRRDPSRVRLRLRLLHPRGAGAALPPPGPAPPPRGPRQAPRRGRGRGGELRVRAVGGGRRERHPRADGLRPGEAGEGLRGRGRRRVLRQPHRPARGEGRAHRRDRQIVAEFENVYNSLTGTEVATVTSVVQLESQDLAQIAQHVQKMTGAQNVRIKTQLDPELIAGFTVQYGRDGSSLIDMSVRKQIEEIASEFELPAVPLEV

SEQ ID NO: 178931 - protein, 560 aa, Zea Mays
MDQQLFTGLIDIAHDHDTESDDWHIALEALCEVLPSLQPIIVYFPDSSQWLSRAVSKSDRREFVQRVEKMFDRLTGPVVLICGQNLLAAAPKDKEQPSPLKRLVGGLKGERYSRSSDISKLFTNSLTVPLPEEDEQLQLFNNQIEEDRKIMISRHNLVKLHKVLEEHDLSCVELLDVKLDGIVLTKQKAEKAVGWARNHYLSSTTLPSIKGDRLIIPRESLDISIERLKEQGITAKKSSQNLKVLAKDEYERNFISAVVPPNEIGVKFDDIGALEDVKRTLDELVTLPMRRPELFSRGNLLRPCKGVLLFGPPGTGKTLLAKALATEAGANFISITGSTLTSKWFGDAEKLTKALFSFATRLAPVIIFVDEVDSLLGARGGAFEHEATRRMRNEFMAAWDGLRSKENQRILILGATNRPFDLDDAVIRRLPRRIYVDLPDAQNRMKILKILLAKEKLESDFKFDELANATEGYSGSDLKNLCVAAAYRPVHELLEEEKKGRVSNENSYLRPLCLDDFIQAKAKVSSSVSYDATSMNELRKWNEQYGEGGSRTKSPFGFGN

SEQ ID NO: 178932 - protein, 505 aa, Zea Mays
MFDRLTGPVVLICGQNLLAAAPKDKEQPALMFHNLSRLSSLPSPLKRLVGGLKGERYSRSSDISKLFTNSLTVPLPEEDEQLQLFNNQIEEDRKIMISRHNLVKLHKVLEEHDLSCVELLDVKLDGIVLTKQKAEKAVGWARNHYLSSTTLPSIKGDRLIIPRESLDISIERLKEQGITAKKSSQNLKVLAKDEYERNFISAVVPPNEIGVKFDDIGALEDVKRTLDELVTLPMRRPELFSRGNLLRPCKGVLLFGPPGTGKTLLAKALATEAGANFISITGSTLTSKWFGDAEKLTKALFSFATRLAPVIIFVDEVDSLLGARGGAFEHEATRRMRNEFMAAWDGLRSKENQRILILGATNRPFDLDDAVIRRLPRRIYVDLPDAQNRMKILKILLAKEKLESDFKFDELANATEGYSGSDLKNLCVAAAYRPVHELLEEEKKGRVSNENSYLRPLCLDDFIQAKAKVSSSVSYDATSMNELRKWNEQYGEGGSRTKSPFGFGN

SEQ ID NO: 178933 - protein, 464 aa, Zea Mays
MFDRLTGPVVLICGQNLLAAAPKDKEQPALMFHNLSRLSSLPSPLKRLVGGLKGERYSRSSDISKLFTNSLTVPLPEEDEQLQLFNNQIEEDRKIMISRHNLVKLHKVLEEHDLSCVELLDVKLDGIVLTKQKAEKAVGWARNHYLSSTTLPSIKGDRLIIPRESLDISIERLKEQGITAKKSSQNLKVLAKDEYERNFISAVVPPNEIGVKFDDIGALEDVKRTLDELVTLPMRRPELFSRGNLLRWFGDAEKLTKALFSFATRLAPVIIFVDEVDSLLGARGGAFEHEATRRMRNEFMAAWDGLRSKENQRILILGATNRPFDLDDAVIRRLPRRIYVDLPDAQNRMKILKILLAKEKLESDFKFDELANATEGYSGSDLKNLCVAAAYRPVHELLEEEKKGRVSNENSYLRPLCLDDFIQAKAKVSSSVSYDATSMNELRKWNEQYGEGGSRTKSPFGFGN

SEQ ID NO: 178934 - protein, 737 aa, Zea Mays
MEDDGDEDWTSNNGKSGESDDEDALKSVEDLKKSVDDLKKLVPCTIEEFAKRIAGAEESTASESSETPESPEEEKRPFQRGDRVKYVGTSAVVEADQRIILGKIPTQDGSRSAYTFISGRGLSNGQRGEVYEVNGDQVAVIFDPSIEKSHNAHEDVTNKEENGSATVYWVDSQDIAHDHDTESDDWHIALEALCEVLPSLQPIIVYFPDSSQWLSRAVSKSDRREFVQRVEKMFDRLTGPVVLICGQNLLAAAPKDKEQPALMFHNLSRLSSLPSPLKRLVGGLKGERYSRSSDISKLFTNSLTVPLPEEDEQLQLFNNQIEEDRKIMISRHNLVKLHKVLEEHDLSCVELLDVKLDGIVLTKQKAEKAVGWARNHYLSSTTLPSIKGDRLIIPRESLDISIERLKEQGITAKKSSQNLKVLAKDEYERNFISAVVPPNEIGVKFDDIGALEDVKRTLDELVTLPMRRPELFSRGNLLRPCKGVLLFGPPGTGKTLLAKALATEAGANFISITGSTLTSKWFGDAEKLTKALFSFATRLAPVIIFVDEVDSLLGARGGAFEHEATRRMRNEFMAAWDGLRSKENQRILILGATNRPFDLDDAVIRRLPRRIYVDLPDAQNRMKILKILLAKEKLESDFKFDELANATEGYSGSDLKNLCVAAAYRPVHELLEEEKKGRVSNENSYLRPLCLDDFIQAKAKVSSSVSYDATSMNELRKWNEQYGEGGSRTKSPFGFGN

SEQ ID NO: 178935 - protein, 986 aa, Zea Mays
MYHAMRLRCLLLHPPMWSNSSSLGISASGVSRGSFVRRFSALGAPRPPGPARRLCRFYGSKGGVGSAEARGAAASPAAAGSSGRCFEQEHARLGERDQQEWLSGERFLTGCKRRESTFLTRRERFRREFLRRVVPWEKGSLSWQNFPYYVNDNARQLLSECVASHLRHKSVTSEYGSRLESSGGRILLQSSPGTELYRERFVRALAHELQVPLLVLDSSVLAPYDYGEDYSESEEEDEHAESEDEGSESEMEDDGDEDWTSNNGKSGESDDEDALKSVEDLKKSVDDLKKLVPCTIEEFAKRIAGAEESTASESSETPESPEEEKRPFQRGDRVKYVGTSAVVEADQRKVKHKVKMNHWMRIILGKIPTQDGSRSAYTFISGRGLSNGQRGEVYEVNGDQVAVIFDPSIEKSHNAHEDVTNKEENGSATVYWVDSQDIAHDHDTESDDWHIALEALCEVLPSLQPIIVYFPDSSQWLSRAVSKSDRREFVQRVEKMFDRLTGPVVLICGQNLLAAAPKDKEQPSPLKRLVGGLKGERYSRSSDISKLFTNSLTVPLPEEDEQLQLFNNQIEEDRKIMISRHNLVKLHKVLEEHDLSCVELLDVKLDGIVLTKQKAEKAVGWARNHYLSSTTLPSIKGDRLIIPRESLDISIERLKEQGITAKKSSQNLKVLAKDEYERNFISAVVPPNEIGVKFDDIGALEDVKRTLDELVTLPMRRPELFSRGNLLRPCKGVLLFGPPGTGKTLLAKALATEAGANFISITGSTLTSKWFGDAEKLTKALFSFATRLAPVIIFVDEVDSLLGARGGAFEHEATRRMRNEFMAAWDGLRSKENQRILILGATNRPFDLDDAVIRRLPRRIYVDLPDAQNRMKILKILLAKEKLESDFKFDELANATEGYSGSDLKNLCVAAAYRPVHELLEEEKKGRVSNENSYLRPLCLDDFIQAKAKVSSSVSYDATSMNELRKWNEQYGEGGSRTKSPFGFGN

SEQ ID NO: 178936 - protein, 946 aa, Zea Mays
MYHAMRLRCLLLHPPMWSNSSSLGISASGVSRGSFVRRFSALGAPRPPGPARRLCRFYGSKGGVGSAEARGAAASPAAAGSSGRCFEQEHARLGERDQQEWLSGERFLTGCKRRESTFLTRRERFRREFLRRVVPWEKGSLSWQNFPYYVNDNARQLLSECVASHLRHKSVTSEYGSRLESSGGRILLQSSPGTELYRERFVRALAHELQVPLLVLDSSVLAPYDYGEDYSESEEEDEHAESEDEGSESEMEDDGDEDWTSNNGKSGESDDEDALKSVEDLKKSVDDLKKLVPCTIEEFAKRIAGAEESTASESSETPESPEEEKRPFQRGDRVKYVGTSAVVEADQRIILGKIPTQDGSRSAYTFISGRGLSNGQRGEVYEVNGDQVAVIFDPSIEKSHNAHEDVTNKEENGSATVYWVDSQDIAHDHDTESDDWHIALEALCEVLPSLQPIIVYFPDSSQWLSRAVSKSDRREFVQRVEKMFDRLTGPVVLICGQNLLAAAPKDKEQPALMFHNLSRLSSLPSPLKRLVGGLKGERYSRSSDISKLFTNSLTVPLPEEDEQLQLFNNQIEEDRKIMISRHNLVKLHKVLEEHDLSCVELLDVKLDGIVLTKQKAEKAVGWARNHYLSSTTLPSIKGDRLIIPRESLDISIERLKEQGITAKKSSQNLKVLAKDEYERNFISAVVPPNEIGVKFDDIGALEDVKRTLDELVTLPMRRPELFSRGNLLRWFGDAEKLTKALFSFATRLAPVIIFVDEVDSLLGARGGAFEHEATRRMRNEFMAAWDGLRSKENQRILILGATNRPFDLDDAVIRRLPRRIYVDLPDAQNRMKILKILLAKEKLESDFKFDELANATEGYSGSDLKNLCVAAAYRPVHELLEEEKKGRVSNENSYLRPLCLDDFIQAKAKVSSSVSYDATSMNELRKWNEQYGEGGSRTKSPFGFGN

SEQ ID NO: 178937 - protein, 1176 aa, Zea Mays
MDYVAYTYTSSCSAKIDARDASSAPSKPEGIPRRGDLLRDLGVGGQGQLGGKWASLGTTIFLGKIEIPWEIGVPKLALKEPKEIHTSRRLKWSWAVMQIPDPIHGLGMSKQFFSGDARKKRPLIMTANSIKADSPLGIRHGLLVLVSNWGPTPQPSAGVARREKRITRNLERSGGALASPSSPSPAGVRHHLRRAARHPEPPEMYHAMRLRCLLLHPPMWSNSSSLGISASGVSRGSFVRRFSALGAPRPPGPARRLCRFYGSKGGVGSAEARGAAASPAAAGSSGRCFEQEHARLGERDQQEWLSGERFLTGCKRRESTFLTRRERFRREFLRRVVPWEKGSLSWQNFPYYVNDNARQLLSECVASHLRHKSVTSEYGSRLESSGGRILLQSSPGTELYRERFVRALAHELQVPLLVLDSSVLAPYDYGEDYSESEEEDEHAESEDEGSESEMEDDGDEDWTSNNGKSGESDDEDALKSVEDLKKSVDDLKKLVPCTIEEFAKRIAGAEESTASESSETPESPEEEKRPFQRGDRVKYVGTSAVVEADQRIILGKIPTQDGSRSAYTFISGRGLSNGQRGEVYEVNGDQVAVIFDPSIEKSHNAHEDVTNKEENGSATVYWVDSQDIAHDHDTESDDWHIALEALCEVLPSLQPIIVYFPDSSQWLSRAVSKSDRREFVQRVEKMFDRLTGPVVLICGQNLLAAAPKDKEQPSPLKRLVGGLKGERYSRSSDISKLFTNSLTVPLPEEDEQLQLFNNQIEEDRKIMISRHNLVKLHKVLEEHDLSCVELLDVKLDGIVLTKQKAEKAVGWARNHYLSSTTLPSIKGDRLIIPRESLDISIERLKEQGITAKKSSQNLKVLAKDEYERNFISAVVPPNEIGVKFDDIGALEDVKRTLDELVTLPMRRPELFSRGNLLRPCKGVLLFGPPGTGKTLLAKALATEAGANFISITGSTLTSKWFGDAEKLTKALFSFATRLAPVIIFVDEVDSLLGARGGAFEHEATRRMRNEFMAAWDGLRSKENQRILILGATNRPFDLDDAVIRRLPRRIYVDLPDAQNRMKILKILLAKEKLESDFKFDELANATEGYSGSDLKNLCVAAAYRPVHELLEEEKKGRVSNENSYLRPLCLDDFIQAKAKVSSSVSYDATSMNELRKWNEQYGEGGSRTKSPFGFGN

SEQ ID NO: 178938 - protein, 1113 aa, Zea Mays
MDYVAYTYTSSCSAKIDARDASSAPSKPEGIPRRGDLLRDLGVGGQGQLGGKWASLGTTIFLGKIEIPWEIGVPKLALKEPKEIHTSRRLKWSWAVMQIPDPIHGLGMSKQFFSGDARKKRPLIMTANSIKADSPLEPPEMYHAMRLRCLLLHPPMWSNSSSLGISASGVSRGSFVRRFSALGAPRPPGPARRLCRFYGSKGGVGSAEARGAAASPAAAGSSGRCFEQEHARLGERDQQEWLSGERFLTGCKRRESTFLTRRERFRREFLRRVVPWEKGSLSWQNFPYYVNDNARQLLSECVASHLRHKSVTSEYGSRLESSGGRILLQSSPGTELYRERFVRALAHELQVPLLVLDSSVLAPYDYGEDYSESEEEDEHAESEDEGSESEMEDDGDEDWTSNNGKSGESDDEDALKSVEDLKKSVDDLKKLVPCTIEEFAKRIAGAEESTASESSETPESPEEEKRPFQRGDRVKYVGTSAVVEADQRIILGKIPTQDGSRSAYTFISGRGLSNGQRGEVYEVNGDQVAVIFDPSIEKSHNAHEDVTNKEENGSATVYWVDSQDIAHDHDTESDDWHIALEALCEVLPSLQPIIVYFPDSSQWLSRAVSKSDRREFVQRVEKMFDRLTGPVVLICGQNLLAAAPKDKEQPSPLKRLVGGLKGERYSRSSDISKLFTNSLTVPLPEEDEQLQLFNNQIEEDRKIMISRHNLVKLHKVLEEHDLSCVELLDVKLDGIVLTKQKAEKAVGWARNHYLSSTTLPSIKGDRLIIPRESLDISIERLKEQGITAKKSSQNLKVLAKDEYERNFISAVVPPNEIGVKFDDIGALEDVKRTLDELVTLPMRRPELFSRGNLLRPCKGVLLFGPPGTGKTLLAKALATEAGANFISITGSTLTSKWFGDAEKLTKALFSFATRLAPVIIFVDEVDSLLGARGGAFEHEATRRMRNEFMAAWDGLRSKENQRILILGATNRPFDLDDAVIRRLPRRIYVDLPDAQNRMKILKILLAKEKLESDFKFDELANATEGYSGSDLKNLCVAAAYRPVHELLEEEKKGRVSNENSYLRPLCLDDFIQAKAKVSSSVSYDATSMNELRKWNEQYGEGGSRTKSPFGFGN

SEQ ID NO: 178939 - protein, 723 aa, Zea Mays
MEDDGDEDWTSNNGKSGESDDEDALKSVEDLKKSVDDLKKLVPCTIEEFAKRIAGAEESTASESSETPESPEEEKRPFQRGDRVKYVGTSAVVEADQRIILGKIPTQDGSRSAYTFISGRGLSNGQRGEVYEVNGDQVAVIFDPSIEKSHNAHEDVTNKEENGSATVYWVDSQDIAHDHDTESDDWHIALEALCEVLPSLQPIIVYFPDSSQWLSRAVSKSDRREFVQRVEKMFDRLTGPVVLICGQNLLAAAPKDKEQPSPLKRLVGGLKGERYSRSSDISKLFTNSLTVPLPEEDEQLQLFNNQIEEDRKIMISRHNLVKLHKVLEEHDLSCVELLDVKLDGIVLTKQKAEKAVGWARNHYLSSTTLPSIKGDRLIIPRESLDISIERLKEQGITAKKSSQNLKVLAKDEYERNFISAVVPPNEIGVKFDDIGALEDVKRTLDELVTLPMRRPELFSRGNLLRPCKGVLLFGPPGTGKTLLAKALATEAGANFISITGSTLTSKWFGDAEKLTKALFSFATRLAPVIIFVDEVDSLLGARGGAFEHEATRRMRNEFMAAWDGLRSKENQRILILGATNRPFDLDDAVIRRLPRRIYVDLPDAQNRMKILKILLAKEKLESDFKFDELANATEGYSGSDLKNLCVAAAYRPVHELLEEEKKGRVSNENSYLRPLCLDDFIQAKAKVSSSVSYDATSMNELRKWNEQYGEGGSRTKSPFGFGN

SEQ ID NO: 178940 - protein, 888 aa, Zea Mays
MDYVAYTYTSSCSAKIDARDASSAPSKPEGIPRRGDLLRDLGVGGQGQLGGKWASLGTTIFLGKIEIPWEIGVPKLALKEPKEIHTSRRLKWSWAVMQIPDPIHGLGMSKQFFSGDARKKRPLIMTANSIKADSPLEPPEMYHAMRLRCLLLHPPMWSNSSSLGISASGVSRGSFVRRFSALGAPRPPGPARRLCRFYGSKGGVGSAEARGAAASPAAAGSSGRCFEQEHARLGERDQQEWLSGERFLTGCKRRESTFLTRRERFRREFLRRVVPWEKGSLSWQNFPYYVNDNARQLLSECVASHLRHKSVTSEYGSRLESSGGRILLQSSPGTELYRERFVRALAHELQVPLLVLDSSVLAPYDYGEDYSESEEEDEHAESEDEGSESEMEDDGDEDWTSNNGKSGESDDEDALKSVEDLKKSVDDLKKLVPCTIEEFAKRIAGAEESTASESSETPESPEEEKRPFQRGDRVKYVGTSAVVEADQRIILGKIPTQDGSRSAYTFISGRGLSNGQRGEVYEVNGDQVAVIFDPSIEKSHNAHEDVTNKEENGSATVYWVDSQDIAHDHDTESDDWHIALEALCEVLPSLQPIIVYFPDSSQWLSRAVSKSDRREFVQRVEKMFDRLTGPVVLICGQNLLAAAPKDKEQPALMFHNLSRLSSLPSPLKRLVGGLKGERYSRSSDISKLFTNSLTVPLPEEDEQLQLFNNQIEEDRKIMISRHNLVKLHKVLEEHDLSCVELLDVKLDGIVLTKQKAEKAVGWARNHYLSSTTLPSIKGDRLIIPRESLDISIERLKEQGITAKKSSQNLKVLAKDEYERNFISAVVPPNEIGVKFDDIGALEDVKRTLDELVTLPMRRPELFSRGNLLREKHSWQKPLQQKLEQILSV

SEQ ID NO: 178941 - protein, 874 aa, Zea Mays
MDYVAYTYTSSCSAKIDARDASSAPSKPEGIPRRGDLLRDLGVGGQGQLGGKWASLGTTIFLGKIEIPWEIGVPKLALKEPKEIHTSRRLKWSWAVMQIPDPIHGLGMSKQFFSGDARKKRPLIMTANSIKADSPLEPPEMYHAMRLRCLLLHPPMWSNSSSLGISASGVSRGSFVRRFSALGAPRPPGPARRLCRFYGSKGGVGSAEARGAAASPAAAGSSGRCFEQEHARLGERDQQEWLSGERFLTGCKRRESTFLTRRERFRREFLRRVVPWEKGSLSWQNFPYYVNDNARQLLSECVASHLRHKSVTSEYGSRLESSGGRILLQSSPGTELYRERFVRALAHELQVPLLVLDSSVLAPYDYGEDYSESEEEDEHAESEDEGSESEMEDDGDEDWTSNNGKSGESDDEDALKSVEDLKKSVDDLKKLVPCTIEEFAKRIAGAEESTASESSETPESPEEEKRPFQRGDRVKYVGTSAVVEADQRIILGKIPTQDGSRSAYTFISGRWITKRNISNSNNHRGLSNGQRGEVYEVNGDQVAVIFDPSIEKSHNAHEDVTNKEENGSATVYWVDSQDIAHDHDTESDDWHIALEALCEVLPSLQPIIVYFPDSSQWLSRAVSKSDRREFVQRVEKMFDRLTGPVVLICGQNLLAAAPKDKEQPSPLKRLVGGLKGERYSRSSDISKLFTNSLTVPLPEEDEQLQLFNNQIEEDRKIMISRHNLVKLHKVLEEHDLSCVELLDVKLDGIVLTKQKAEKAVGWARNHYLSSTTLPSIKGDRLIIPRESLDISIERLKEQGITAKKSSQNLKVLAKDEYERNFISAVVPPNEIGVKFDDIGALEDVKRTLDELVTLPMRRPELFSRGNLLRVWLFC

SEQ ID NO: 178942 - protein, 141 aa, Zea Mays
MELAEAPAPVPDEDGLDERGVALHLPRLLAGVVSGALTGIFALAGALTGAVTGAVAGRASDSGGVLRGAGLGAVAGAVLSIEVLEASRAYWCSSDRLGSHGGASSMADFIEQLLRARFVQEQFTASGYASYRWQHIIFWSG

SEQ ID NO: 178943 - protein, 230 aa, Zea Mays
MELAEAPAPVPDEDGLDERGVALHLPRLLAGVVSGALTGIFALAGALTGAVTGAVAGRASDSGGVLRGAGLGAVAGAVLSIEVLEASRAYWCSSDRLGSHGGASSMADFIEQLLRARFVQEQFTASGYASYRWQLSISYFGQDDLYDIFGDISSEGLSQESLKKLPHHVVSDHQTRDLLGEILCCPICLQDIVAGETARRLPGCSHAFHQPCVDRWLVGHGSCPVCRQRV

SEQ ID NO: 178944 - protein, 239 aa, Zea Mays
MHKLGRGSRDKVQQFMAITGASEKAALQALKASDWHLEGAFDVFYSQPQIAVANTRHLEELYNRYKEPDADMIMVEGISQICNDLQVDPQDIVMLVISWHMKASTMCEFTRQEFIGGLQSIGVDSIEKLQAKLPSLRAELKDDQKFHEIYNFAFAWAREKGQKSLALETAIGMWQLLFAERSWPLIDYWCQFLQVRHNKAISRDTWAQLLEFVKVDDPLKPVSRSWNLPHHGTEHSEHW

SEQ ID NO: 178945 - protein, 139 aa, Zea Mays
MCVSLCQVDPQDIVMLVISWHMKASTMCEFTRQEFIGGLQSIGVDSIEKLQAKLPSLRAELKDDQKFHEIYNFAFAWAREKGQKSLALETAIGMWQLLFAERSWPLIDYWCQFLQVRHNKAISRDTWAQLLEFVKVTSP

SEQ ID NO: 178946 - protein, 147 aa, Zea Mays
MIMVEGISQICNDLQVDPQDIVMLVISWHMKASTMCEFTRQEFIGGLQSIGVDSIEKLQAKLPSLRAELKDDQKFHEIYNFAFAWAREKGQKSLALETAIGMWQLLFAERSWPLIDYWCQFLQVRHNKAISRDTWAQLLEFVKVTSP

SEQ ID NO: 178947 - protein, 97 aa, Zea Mays
MQYAMLVTQFTRFFFYITMYRSISCKVMSAALVITIPKGLPEKLSKIKTAENPSFQRKEQHQPHPHILDLTQDGYYLETGTFHALCFFTQIWNDHKK

SEQ ID NO: 178948 - protein, 65 aa, Zea Mays
MSDLKLCVEHYQKHTSEVNLRLGQRIKYTLSFWGDTNTNSLSFNLCLPTFTRGMTSELAESTIIA

SEQ ID NO: 178949 - protein, 444 aa, Zea Mays
MAPPISTSDPALPNTTTTTSSAPKSSSRPFLAPLAASARSLLASARRSPVTTLAAAFFLLALVMYGEDARTIAELSIDDYLYPDADLYNVSGLPPLALPPLTCDLSRGRWVFDNVSVPAYREKDCTFLTKQVSCLANGRPDDMWQYWRWQPNECSLPTFDARRFMEAMRGKRLMFVGDSLNRNQWESLVCLVQPILSKGRKKIVKRGSLNTFYAKDIKEWIISPERIEAHTKHWKDVDYLIFNTYIWWMNTADIKVRRSNSRYWSENDEVPRIEAYGRVFKTWSDWLNDNIDPARTSVFFMTISPPHLSPQNWGNPDGIKCVGETLPYQNYSQPLDLYHDMRLYDLVVKVASSMEKVPVTVIDITRMSDYRKDAHTSLYTIRQGKLLTPKQKADPEKFADCIHWCLPGVPDVWNQILYTRILSKSSWHSNFSPPLFQSLPLPPQ

SEQ ID NO: 178950 - protein, 351 aa, Zea Mays
MAPPISTSDPALPNTTTTTSSAPKSSSRPFLAPLAASARSLLASARRSPVTTLAAAFFLLALVMYGEDARTIAELSIDDYLYPDADLYNVSGLPPLALPPLTCDLSRGRWVFDNVSVPAYREKDCTFLTKQVSCLANGRPDDMWQYWRWQPNECSLPTFDARRFMEAMRGKRLMFVGDSLNRNQWESLVCLVQPILSKGRKKIVKRGSLNTFYAKDPQNWGNPDGIKCVGETLPYQNYSQPLDLYHDMRLYDLVVKVASSMEKVPVTVIDITRMSDYRKDAHTSLYTIRQGKLLTPKQKADPEKFADCIHWCLPGVPDVWNQILYTRILSKSSWHSNFSPPLFQSLPLPPQ

SEQ ID NO: 178951 - protein, 407 aa, Zea Mays
MCETGEGPTSPWISFRVLFAVIQDNISSVARELIFHHYEELKESIITREEMVKKMIIVVGEKVLLEALKKLHYCPSLWYRPSVEAVSSDSVMAAPGKLSLDKAVLSTKGCETLAADMVPNGQDCPAPSGVPETSSSAVAMRGASTSVEPKRRDPPVQIVPPGSSATPCAKNQDSFVGRVTPIARDGLLRTICGSSSSPGGYASLAQANTSQTNGVSAPGVTPRGYESAVPSLSLGNSESTGVKQVNSAPRMTPEGQKFLSLGIAPRSPALRDLVKCQASSTLVAMPPAGLGKSRSMKIEGHDSLAPSVKEPKGNGGLAPSKTPKLHEPVIADMSIKSCDSLALGIAPNGHTHDGPASGSGEAKKEQAALVTGSQSKSSVPSLDASSHVTGAASALVALSTLREKGGR

SEQ ID NO: 178952 - protein, 438 aa, Zea Mays
MASPQESNSLCLKRKLVDDCLSKDCKSRRVKSENEPSSDSFAKRCNCCCTRPNLANDCVNFLKSGAPNRVMYYKKGSWHNFPEQIMNSLIDEFKGNKSSVVSVMDDEPILVDFLSMTLVNLKTRKQRSVAWFDDTGKRFFPSLFFDEESDEMPKQDSGNVNNTAQGIMLDKVTSSPPEVVKQVVLESSPPVPQKPSTVDVLRKKITSVERGSEGFLFVQDLFLSGMNPFATPNNILHVHRYSPNDITAQCRFEAFERQMKSTKEARGDANVKYGWLGSRKSDIVRILINGLGTTANPVEKAGLSAGVYLSPENRAFTSVGLCDVDEKGVQYMLLCRMILGNVEAVEPGSQESFPSSEIYDSGVDDCSNPKCYVMWPSHLSTHIRLEYLVSFKLAPKVRNYLLDLKGLWFNPSLKELGTDICTLQPVSQPESCYPPGNV

SEQ ID NO: 178953 - protein, 611 aa, Zea Mays
MPVVSSPFHLIRICLELEARVLMASPQESNSLCLKRKLVDDCLSKDCKSRRVKSENEPSSDSFAKRCNCCCTRPNLANDCVNFLKSGAPNRVMYYKKGSWHNFPEQIMNSLIDEFKGNKSSVVSVMDDEPILVDFLSMTLVNLKTRKQRSVAWFDDTGKRFFPSLFFDEESDEMPKQDSGNVNNTAQGIMLDKVTSSPPEVVKQVVLESSPPVPQKPSTVDVLRKKITSVERGSEGFLFVQDLFLSGMNPFATPNNILHVHRYSPNDITAQCRFEAFERQMKSTKEARGDANVKYGWLGSRKSDIVRILINGLGTTANPVEKAGLSAGVYLSPENRAFTSVGLCDVDEKGVQYMLLCRMILGNVEAVEPGSQESFPSSEIYDSGVDDCSNPKCYVMWPSHLSTHIRLEYLVSFKLAPKVRNYLLDLKGLWFNPSLKELGTDICTLQPVMCETGEGPTSPWISFRVLFAVIQDNISSVARELIFHHYEELKESIITREEMVKKMIIVVGEKVLLEALKKLHYCPSLWYRPSVEAVSSDSVMAAPGKLSLDKRIWCPMVKIVRHQVVCQKHLVLLLPCVGLLQVWNPSAEILLYRLCHLEALQPHVPKIKILL

SEQ ID NO: 178954 - protein, 589 aa, Zea Mays
MASPQESNSLCLKRKLVDDCLSKDCKSRRVKSENEPSSDSFAKRCNCCCTRPNLANDCVNFLKSGAPNRVMYYKKGSWHNFPEQIMNSLIDEFKGNKSSVVSVMDDEPILVDFLSMTLVNLKTRKQRSVAWFDDTGKRFFPSLFFDEESDEMPKQDSGNVNNTAQGIMLDKVTSSPPEVVKQVVLESSPPVPQKPSTVDVLRKKITSVERGSEGFLFVQDLFLSGMNPFATPNNILHVHRYSPNDITAQCRFEAFERQMKSTKEARGDANVKYGWLGSRKSDIVRILINGLGTTANPVEKAGLSAGVYLSPENRAFTSVGLCDVDEKGVQYMLLCRMILGNVEAVEPGSQESFPSSEIYDSGVDDCSNPKCYVMWPSHLSTHIRLEYLVSFKLAPKVRNYLLDLKGLWFNPSLKELGTDICTLQPVMCETGEGPTSPWISFRVLFAVIQDNISSVARELIFHHYEELKESIITREEMVKKMIIVVGEKVLLEALKKLHYCPSLWYRPSVEAVSSDSVMAAPGKLSLDKRIWCPMVKIVRHQVVCQKHLVLLLPCVGLLQVWNPSAEILLYRLCHLEALQPHVPKIKILL

SEQ ID NO: 178955 - protein, 401 aa, Zea Mays
MASPQESNSLCLKRKLVDDCLSKDCKSRRVKSENEPSSDSFAKRCNCCCTRPNLANDCVNFLKSGAPNRVMYYKKGSWHNFPEQIMNSLIDEFKGNKSSVVSVMDDEPILVDFLSMTLVNLKTRKQRSVAWFDDTGKRFFPSLFFDEESDEMPKQDSGNVNNTAQGIMLDKVTSSPPEVVKQVVLESSPPVPQKPSTVDVLRKKITSVERGSEGFLFVQDLFLSGMNPFATPNNILHVHRYSPNDITAQCRFEAFERQMKSTKEARGDANVKYGWLGSRKSDIVRILINGLGTTANPVEKAGLSAGVYLSPENRAFTSVGLCDVDEKGVQYMLLCRMILGNVEAVEPGSQESFPSSEIYDSGVDDCSNPKCYVMWPSHLSTHIRLEYLVSFKLAPKVRSNV

SEQ ID NO: 178956 - protein, 305 aa, Zea Mays
MLGIWRPSGKKVADMMNQVLSVKRKFDQCEVSLVGASQVSHVVKLARDSLAAEITKARSANAREEKRESCAICLEDTDATKIHAVEVCAHRFCFSCMKEHVKVKLLNGTLPGCPQEGCATKLSVEGSRVFLSPRLVEIMVQRMREGQIPPSQKVYCPYPRCSALMSLGEVIHPMQESSSRHTAADAATLRKCVKCRGSFCLSCKVPWHDGMGCFEYKMWYPLAHPGDAKLQNLARQRLWRQCVKCKHMIELAEGCYHMICVCGYEFCYTCGKEWKNKKASCSCPLWDERNIIRDEDDDDDEDDLY

SEQ ID NO: 178957 - protein, 336 aa, Zea Mays
MASPAAVLVSNGGISPHAPPSAAAFLVSTPGAYTTAPGTLLWWTRHLRRLAESATLLARSRPNLLGLPLPRSRALDLDLLSIHSLVNPSVRVAIREMRTRLPMTKDEDLALTALVRGADPISGGGGAGLDVFVHVGTYSPPIFGESGARLAAAGRGRDAAAAKYASWARIRKSLEKMRPPGVTELLLTNDGDHILEGAVTNFFVVCQQEECESNGKFSNQTMATKFEVQTAPLSDGVLPGIMRQIVIEVCHDIGIPVREVSPSWSMNEFWKEAFVTSSLRFIQHVESVQVPLFWEDIQSKTWSDVPWAVKKFQGVGCITTQIQRARSDKYGVNGLL

SEQ ID NO: 178958 - protein, 959 aa, Zea Mays
MTCGNPDCLYLHDVGSQEDSFTKDEIISAYTRTRVPQMASSVSQRRTGNMLPPPGDDFSYSAVVSAKHTFKNATLNTTNQPRPSPPNSSSGRSTLPPAASWGQRDVNARTTATGVTSSQSHTKPKSESQSNPFSSSSVISSTKTPSSWNDDTSTAAKMSEGQQVSEKESKTLQLYKPGISMATQATSSLELSLNIDFSTIPSAWNDDEIVVSDGMSKGSDENQVANENGELTHPASKPLVLSKKDITMKSTSTSKSPPNIVSSLAISKSDVNTSDGDHSLTNISLTSNAVVCQSNHVAGAKILEDIRSRDTDMEKLSVHISSVKLGGNDEIQIMAGNQRPDVMPCTSVDAPMNQNFDRDQSHLNLNEPLLPSENKDTVLSCQYSSDKRLDWSSEMQNGSVTPSNNIVDSTMLTGKLHSILLDVSEQPSYARFPSSLDTSLCNDTESNTAATIDTTISHMQTEFSSINNMYALLNGGQDGLGTVNTHGNVSEQHPGMGNHQCRAMGSVRTEAMGSVRTDSIGSFEKTISINKDESRIISDMLSSEFNPWDDSYSTANNFVRMLRESENNDVHFAVPSWKSGTGNKESRFSFARQDNQGNLLDSSLRNCGTGTEQNFSLLPQNSRGNIYQNGLAFQSLENDFSNSNSLGVLDMLTTGTSRSKISAPPGFSAPARVPPPGFSTALPSQEFPSGISSHDGSIALPRFPWAFSSQISAQELSKPPSRLPSPFSSGFSSLDGPNSSSRFPSAFPSGFSSQNGPNPSSGFPFSSGFSSQDGSNQSYGSTNPENLLRNTVLGGSSNHYQSQFGRHSSDMEFDDPAILAVGKGLMPGIGDSGLEMKNTPAFQAQLQPASSDPRFHLHIQPNVQSHQNMGFADHMQDGLNHMNDNRFLGQNHGPLSPYVQIPQQPRNSQVTNGHWDGWSDSRQGNSTPMSDMSRILYPSEVNKLHMLGSNDIYNRAFGM

SEQ ID NO: 178959 - protein, 960 aa, Zea Mays
MLWYYEVLPCMAEKHGSQEDSFTKDEIISAYTRTRVPQMASSVSQRRTGNMLPPPGDDFSYSAVVSAKHTFKNATLNTTNQPRPSPPNSSSGRSTLPPAASWGQRDVNARTTATGVTSSQSHTKPKSESQSNPFSSSSVISSTKTPSSWNDDTSTAAKMSEGQQVSEKESKTLQLYKPGISMATQATSSLELSLNIDFSTIPSAWNDDEIVVSDGMSKGSDENQVANENGELTHPASKPLVLSKKDITMKSTSTSKSPPNIVSSLAISKSDVNTSDGDHSLTNISLTSNAVVCQSNHVAGAKILEDIRSRDTDMEKLSVHISSVKLGGNDEIQIMAGNQRPDVMPCTSVDAPMNQNFDRDQSHLNLNEPLLPSENKDTVLSCQYSSDKRLDWSSEMQNGSVTPSNNIVDSTMLTGKLHSILLDVSEQPSYARFPSSLDTSLCNDTESNTAATIDTTISHMQTEFSSINNMYALLNGGQDGLGTVNTHGNVSEQHPGMGNHQCRAMGSVRTEAMGSVRTDSIGSFEKTISINKDESRIISDMLSSEFNPWDDSYSTANNFVRMLRESENNDVHFAVPSWKSGTGNKESRFSFARQDNQGNLLDSSLRNCGTGTEQNFSLLPQNSRGNIYQNGLAFQSLENDFSNSNSLGVLDMLTTGTSRSKISAPPGFSAPARVPPPGFSTALPSQEFPSGISSHDGSIALPRFPWAFSSQISAQELSKPPSRLPSPFSSGFSSLDGPNSSSRFPSAFPSGFSSQNGPNPSSGFPFSSGFSSQDGSNQSYGSTNPENLLRNTVLGGSSNHYQSQFGRHSSDMEFDDPAILAVGKGLMPGIGDSGLEMKNTPAFQAQLQPASSDPRFHLHIQPNVQSHQNMGFADHMQDGLNHMNDNRFLGQNHGPLSPYVQIPQQPRNSQVTNGHWDGWSDSRQGNSTPMSDMSRILYPSEVNKLHMLGSNDIYNRAFGM

SEQ ID NO: 178960 - protein, 194 aa, Zea Mays
MHNTTLGWSFLLTLADFQSTRTTMSDDGDRTCPLCAEEMDITDQQLKPCKCGYDICVWCWHHIIDMAEKEETEGRCPACRTRYDKDRIVKMAATCDRTVADKNAEKKQKAQRVKPKAAPTATTTSTVESKKHLATVRVIQRNLVYIIGLPAHLCNESVLERREYFGQYGKVLKVSVSRPTGPPSQQASANSSIS

SEQ ID NO: 178961 - protein, 96 aa, Zea Mays
MTTMSDDGDRTCPLCAEEMDITDQQLKPCKCGYDTWLRRRKQRAAALPAAHAMTRIGSSRWPPLVTGQWQIKMRRRSKRPKGLSQRQHQQQQQHQP

SEQ ID NO: 178962 - protein, 174 aa, Zea Mays
MTRHGDRRELLKGPLYYACAITLTTIVFWRTSPISIAVICNLCAGDGVADIAGRRFGHVKLPHNPEKSYAGSIAMFLAGFIASVLFMCYFNIFGFVEKSWTMVAAFGVISLAAAVVESLPISTRLDDNLTVSVASVLVGALVFYSIGARNLCCMSSEVRRSIPATVGMVFAGSS

SEQ ID NO: 178963 - protein, 120 aa, Zea Mays
MCGVKQNMEGRQANRGQLSCSIPSNSRTSEGVPPPRESGPCGRAARCSGTLAPPCSREWARLPCSASGKRSPTAPCWTRSRFSFVFFPSFCAPYKIRYLLLALTSTVVIEVLVSIRSKLP

SEQ ID NO: 178964 - protein, 200 aa, Zea Mays
MPQAMADAATLSALALFASRLSCRRFGDEDLRVLEAALSAGADVPALLATRSAARRLLRSSAAEALAFTAAGASLDGGDERRSLAVADFFSRAFALVGDVESCLAMRYEALLLRDAKYCNDLHLQVSRQEWLTFATDCLDNGFYTIASKAFANALVHIHPSHTGHLDSANSIEEKDKIIEIKGLQNLAKSLSAQHCDKVC

SEQ ID NO: 178965 - protein, 94 aa, Zea Mays
MAAEPYLTIEAHRGSLTALAVHRHAPVVASSAKQMIKVFSLEGEQLRIIRYLPSFMGQRTGSVNCLSFHPYKSLLAAGAGHNALVSIYAEENYK

SEQ ID NO: 178966 - protein, 552 aa, Zea Mays
MPLPKIHYNMTGGLIFLLLFYFAYISFLQVLLSQSHRFRALVLLGRFLDMGPWAVDLALSVGIFPYVLKLLPTNTIELRQILVFIWTKILSLDKSCQVDLVKDGGHTYFIRFLDSLDAFPEQRAMAAFVIAVIVDGHRMGQEACMNAGLIDVCLRHLQPENLHAQTEPLLLQWLCLCLGKLWEDFPEAQLLGLQTNAPETVICLLSEPRPEVRAAAVFALGNLTTLSNCPDDDSDDDEKVKAEINVVRSLLQISSDGSPLVRSEVAIALTHFALGHNKNLKSVAAEYWKPQSKSLLKSLPSLANINNPSNVYSPNNILQGSIGPVLRVGSDSGAAGRDGHISTSSPIAASSIMHGSPQSDDSSQHSDSGILLRENASNGGLSYTRSRPVDNVIYSQFISTMCSVSKDPDPRIATIGWRALTLIGVEQVAMKSTRFNSGGLHRGETSASTFGMAHSSSWRDMNSGPSNAELKKLPESTIYNWSCGHFSRPLLTASDDNEETNARREERERIALDFITKCQRSCTWMYICLHYIIVVGFLDCLPAVFLGGSTWE

SEQ ID NO: 178967 - protein, 904 aa, Zea Mays
MPLPKIHYNMTGGLIFLLLFYFAYISFLQVLLSQSHRFRALVLLGRFLDMGPWAVDLALSVGIFPYVLKLLPTNTIELRQILVFIWTKILSLDKSCQVDLVKDGGHTYFIRFLDSLDAFPEQRAMAAFVIAVIVDGHRMGQEACMNAGLIDVCLRHLQPENLHAQTEPLLLQWLCLCLGKLWEDFPEAQLLGLQTNAPETVICLLSEPRPEVRAAAVFALGNLTTLSNCPDDDSDDDEKVKAEINVVRSLLQISSDGSPLVRSEVAIALTHFALGHNKNLKSVAAEYWKPQSKSLLKSLPSLANINNPSNVYSPNNILQGSIGPVLRVGSDSGAAGRDGHISTSSPIAASSIMHGSPQSDDSSQHSDSGILLRENASNGGLSYTRSRPVDNVIYSQFISTMCSVSKDPDPRIATIGWRALTLIGVEQVAMKSTRFNSGGLHRGETSASTFGMAHSSSWRDMNSGSNSMKFMTPPVSPPQHDYLLLGLRRVCSMEFGQHPINSPDGFANLLLSSATGPSNAELKKLPESTIYNWSCGHFSRPLLTASDDNEETNARREERERIALDFITKCQRSSCKITSQIASWDTRFELGTKAALLLPFSPIVVAADENEKISVWNYDDAQPVNSFHNHKLSDRGLSKLLLINELDECLLLAASSDGNVRIWKNFACKGGQKLVTAFSSVQGHRAAGRSIVIDWQQQSCYLYASGDMSSILVWDLDKEQLLNTIPSSADSAISALSASQVRSGYFAAGFADGSVRIYDVCSPDSRPVYVARPHAPRTEKVVGIGFQPGFDPYEIVSASQAGDIQFLDVRMAAEPYLTIEAHRGSLTALAVHRHAPVVASSAKQMIKVFSLEGEQLRIIRYLPSFMGQRTGSVNCLSFHPYKSLLAAGAGHNALVSIYAEENYK

SEQ ID NO: 178968 - protein, 575 aa, Zea Mays
MGPWAVDLALSVGIFPYVLKLLPTNTIELRQILVFIWTKILSLDKSCQVDLVKDGGHTYFIRFLDSLDAFPEQRAMAAFVIAVIVDGHRMGQEACMNAGLIDVCLRHLQPENLHAQTEPLLLQWLCLCLGKLWEDFPEAQLLGLQTNAPETVICLLSEPRPEVRAAAVFALGNLTTLSNCPDDDSDDDEKVKAEINVVRSLLQISSDGSPLVRSEVAIALTHFALGHNKNLKSVAAEYWKPQSKSLLKSLPSLANINNPSNVYSPNNILQGSIGPVLRVGSDSGAAGRDGHISTSSPIAASSIMHGSPQSDDSSQHSDSGILLRENASNGGLSYTRSRPVDNVIYSQFISTMCSVSKDPDPRIATIGWRALTLIGVEQVAMKSTRFNSGGLHRGETSASTFGMAHSSSWRDMNSGSNSMKFMTPPVSPPQHDYLLLGLRRVCSMEFGQHPINSPDGFANLLLSSATGPSNAELKKLPESTIYNWSCGHFSRPLLTASDDNEETNARREERERIALDFITKCQRSSACKITSQIASWDTRFELGTKAALLLPFSPIVVAADENEKISSVSCQCVEL

SEQ ID NO: 178969 - protein, 803 aa, Zea Mays
MGPWAVDLALSVGIFPYVLKLLPTNTIELRQILVFIWTKILSLDKSCQVDLVKDGGHTYFIRFLDSLDAFPEQRAMAAFVIAVIVDGHRMGQEACMNAGLIDVCLRHLQPENLHAQTEPLLLQWLCLCLGKLWEDFPEAQLLGLQTNAPETVICLLSEPRPEVRAAAVFALGNLTTLSNCPDDDSDDDEKVKAEINVVRSLLQISSDGSPLVRSEVAIALTHFALGHNKNLKSVAAEYWKPQSKSLLKSLPSLANINNPSNVYSPNNILQGSIGPVLRVGSDSGAAGRDGHISTSSPIAASSIMHGSPQSDDSSQHSDSGILLRENASNGGLSYTRSRPVDNVIYSQFISTMCSVSKDPDPRIATIGWRALTLIGVEQVAMKSTRFNSGGLHRGETSASTFGMAHSSSWRDMNSGPSNAELKKLPESTIYNWSCGHFSRPLLTASDDNEETNARREERERIALDFITKCQRSSCKITSQIASWDTRFELGTKAALLLPFSPIVVAADENEKISVWNYDDAQPVNSFHNHKLSDRGLSKLLLINELDECLLLAASSDGNVRIWKNFACKGGQKLVTAFSSVQGHRAAGRSIVIDWQQQSCYLYASGDMSSILVWDLDKEQLLNTIPSSADSAISALSASQVRSGYFAAGFADGSVRIYDVCSPDSRPVYVARPHAPRTEKVVGIGFQPGFDPYEIVSASQAGDIQFLDVRMAAEPYLTIEAHRGSLTALAVHRHAPVVASSAKQMIKVFSLEGEQLRIIRYLPSFMGQRTGSVNCLSFHPYKSLLAAGAGHNALVSIYAEENYK

SEQ ID NO: 178970 - protein, 903 aa, Zea Mays
MRMHMHPIFLNQGLDNEEPSGSFYQSQVLLSQSHRFRALVLLGRFLDMGPWAVDLALSVGIFPYVLKLLPTNTIELRQILVFIWTKILSLDKSCQVDLVKDGGHTYFIRFLDSLDAFPEQRAMAAFVIAVIVDGHRMGQEACMNAGLIDVCLRHLQPENLHAQTEPLLLQWLCLCLGKLWEDFPEAQLLGLQTNAPETVICLLSEPRPEVRAAAVFALGNLTTLSNCPDDDSDDDEKVKAEINVVRSLLQISSDGSPLVRSEVAIALTHFALGHNKNLKSVAAEYWKPQSKSLLKSLPSLANINNPSNVYSPNNILQGSIGPVLRVGSDSGAAGRDGHISTSSPIAASSIMHGSPQSDDSSQHSDSGILLRENASNGGLSYTRSRPVDNVIYSQFISTMCSVSKDPDPRIATIGWRALTLIGVEQVAMKSTRFNSGGLHRGETSASTFGMAHSSSWRDMNSGSNSMKFMTPPVSPPQHDYLLLGLRRVCSMEFGQHPINSPDGFANLLLSSATGPSNAELKKLPESTIYNWSCGHFSRPLLTASDDNEETNARREERERIALDFITKCQRSSACKITSQIASWDTRFELGTKAALLLPFSPIVVAADENEKISVWNYDDAQPVNSFHNHKLSDRGLSKLLLINELDECLLLAASSDGNVRIWKNFACKGGQKLVTAFSSVQGHRAAGRSIVIDWQQQSCYLYASGDMSSILVWDLDKEQLLNTIPSSADSAISALSASQVRSGYFAAGFADGSVRIYDVCSPDSRPVYVARPHAPRTEKVVGIGFQPGFDPYEIVSASQAGDIQFLDVRMAAEPYLTIEAHRGSLTALAVHRHAPVVASSAKQMIKVFSLEGEQLRIIRYLPSFMGQRTGSVNCLSFHPYKSLLAAGAGHNALVSIYAEENYK

SEQ ID NO: 178971 - protein, 773 aa, Zea Mays
MGPWAVDLALSVGIFPYVLKLLPTNTIELRQILVFIWTKILSLDKSCQVDLVKDGGHTYFIRFLDSLDAFPEQRAMAAFVIAVIVDGHRMGQEACMNAGLIDVCLRHLQPENLHAQTEPLLLQWLCLCLGKLWEDFPEAQLLGLQTNAPETVICLLSEPRPEVRAAAVFALGNLTTLSNCPDDDSDDDEKVKAEINVVRSLLQISSDGSPLVRSEVAIALTHFALGHNKNLKSVAAEYWKPQSKSLLKSLPSLANINNPSNVYSPNNILQGSIGPVLRVGSDSGAAGRDGHISTSSPIAASSIMHGSPQSDDSSQHSDSGILLRENASNGGLSYTRSRPVDNVIYSQFISTMCSVSKDPDPRIATIGWRALTLIGVEQVAMKSTRFNSGGLHRGETSASTFGMAHSSSWRDMNSGSNSMKFMTPPVSPPQHDYLLLGLRRVCSMEFGQHPINSPDGFANLLLSSATGPSNAELKKLPESTIYNWSCGHFSRPLLTASDDNEETNARREERERIALDFITKCQRSCDGNVRIWKNFACKGGQKLVTAFSSVQGHRAAGRSIVIDWQQQSCYLYASGDMSSILVWDLDKEQLLNTIPSSADSAISALSASQVRSGYFAAGFADGSVRIYDVCSPDSRPVYVARPHAPRTEKVVGIGFQPGFDPYEIVSASQAGDIQFLDVRMAAEPYLTIEAHRGSLTALAVHRHAPVVASSAKQMIKVFSLEGEQLRIIRYLPSFMGQRTGSVNCLSFHPYKSLLAAGAGHNALVSIYAEENYK

SEQ ID NO: 178972 - protein, 854 aa, Zea Mays
MGPWAVDLALSVGIFPYVLKLLPTNTIELRQILVFIWTKILSLDKSCQVDLVKDGGHTYFIRFLDSLDAFPEQRAMAAFVIAVIVDGHRMGQEACMNAGLIDVCLRHLQPENLHAQTEPLLLQWLCLCLGKLWEDFPEAQLLGLQTNAPETVICLLSEPRPEVRAAAVFALGNLTTLSNCPDDDSDDDEKVKAEINVVRSLLQISSDGSPLVRSEVAIALTHFALGHNKNLKSVAAEYWKPQSKSLLKSLPSLANINNPSNVYSPNNILQGSIGPVLRVGSDSGAAGRDGHISTSSPIAASSIMHGSPQSDDSSQHSDSGILLRENASNGGLSYTRSRPVDNVIYSQFISTMCSVSKDPDPRIATIGWRALTLIGVEQVAMKSTRFNSGGLHRGETSASTFGMAHSSSWRDMNSGSNSMKFMTPPVSPPQHDYLLLGLRRVCSMEFGQHPINSPDGFANLLLSSATGPSNAELKKLPESTIYNWSCGHFSRPLLTASDDNEETNARREERERIALDFITKCQRSSCKITSQIASWDTRFELGTKAALLLPFSPIVVAADENEKISVWNYDDAQPVNSFHNHKLSDRGLSKLLLINELDECLLLAASSDGNVRIWKNFACKGGQKLVTAFSSVQGHRAAGRSIVIDWQQQSCYLYASGDMSSILVWDLDKEQLLNTIPSSADSAISALSASQVRSGYFAAGFADGSVRIYDVCSPDRPVYVARPHAPRTEKVVGIGFQPGFDPYEIVSASQAGDIQFLDVRMAAEPYLTIEAHRGSLTALAVHRHAPVVASSAKQMIKVFSLEGEQLRIIRYLPSFMGQRTGSVNCLSFHPYKSLLAAGAGHNALVSIYAEENYK

SEQ ID NO: 178973 - protein, 439 aa, Zea Mays
MQVMVVSATLGVEQVAMKSTRFNSGGLHRGETSASTFGMAHSSSWRDMNSGPSNAELKKLPESTIYNWSCGHFSRPLLTASDDNEETNARREERERIALDFITKCQRSSCKITSQIASWDTRFELGTKAALLLPFSPIVVAADENEKISVWNYDDAQPVNSFHNHKLSDRGLSKLLLINELDECLLLAASSDGNVRIWKNFACKGGQKLVTAFSSVQGHRAAGRSIVIDWQQQSCYLYASGDMSSILVWDLDKEQLLNTIPSSADSAISALSASQVRSGYFAAGFADGSVRIYDVCSPDSRPVYVARPHAPRTEKVVGIGFQPGFDPYEIVSASQAGDIQFLDVRMAAEPYLTIEAHRGSLTALAVHRHAPVVASSAKQMIKVFSLEGEQLRIIRYLPSFMGQRTGSVNCLSFHPYKSLLAAGAGHNALVSIYAEENYK

SEQ ID NO: 178974 - protein, 623 aa, Zea Mays
MPLPKIHYNMTGGLIFLLLFYFAYISFLQVLLSQSHRFRALVLLGRFLDMGPWAVDLALSVGIFPYVLKLLPTNTIELRQILVFIWTKILSLDKSCQVDLVKDGGHTYFIRFLDSLDAFPEQRAMAAFVIAVIVDGHRMGQEACMNAGLIDVCLRHLQPENLHAQTEPLLLQWLCLCLGKLWEDFPEAQLLGLQTNAPETVICLLSEPRPEVRAAAVFALGNLTTLSNCPDDDSDDDEKVKAEINVVRSLLQISSDGSPLVRSEVAIALTHFALGHNKNLKSVAAEYWKPQSKSLLKSLPSLANINNPSNVYSPNNILQGSIGPVLRVGSDSGAAGRDGHISTSSPIAASSIMHGSPQSDDSSQHSDSGILLRENASNGGLSYTRSRPVDNVIYSQFISTMCSVSKDPDPRIATIGWRALTLIGVEQVAMKSTRFNSGGLHRGETSASTFGMAHSSSWRDMNSGSNSMKFMTPPVSPPQHDYLLLGLRRVCSMEFGQHPINSPDGFANLLLSSATGPSNAELKKLPESTIYNWSCGHFSRPLLTASDDNEETNARREERERIALDFITKCQRSSCKITSQIASWDTRFELGTKAALLLPFSPIVVAADENEKISSVSCQCVEL

SEQ ID NO: 178975 - protein, 853 aa, Zea Mays
MPLPKIHYNMTGGLIFLLLFYFAYISFLQVLLSQSHRFRALVLLGRFLDMGPWAVDLALSVGIFPYVLKLLPTNTIELRQILVFIWTKILSLDKSCQVDLVKDGGHTYFIRFLDSLDAFPEQRAMAAFVIAVIVDGHRMGQEACMNAGLIDVCLRHLQPENLHAQTEPLLLQWLCLCLGKLWEDFPEAQLLGLQTNAPETVICLLSEPRPEVRAAAVFALGNLTTLSNCPDDDSDDDEKVKAEINVVRSLLQISSDGSPLVRSEVAIALTHFALGHNKNLKSVAAEYWKPQSKSLLKSLPSLANINNPSNVYSPNNILQGSIGPVLRVGSDSGAAGRDGHISTSSPIAASSIMHGSPQSDDSSQHSDSGILLRENASNGGLSYTRSRPVDNVIYSQFISTMCSVSKDPDPRIATIGWRALTLIGVEQVAMKSTRFNSGGLHRGETSASTFGMAHSSSWRDMNSGPSNAELKKLPESTIYNWSCGHFSRPLLTASDDNEETNARREERERIALDFITKCQRSSACKITSQIASWDTRFELGTKAALLLPFSPIVVAADENEKISVWNYDDAQPVNSFHNHKLSDRGLSKLLLINELDECLLLAASSDGNVRIWKNFACKGGQKLVTAFSSVQGHRAAGRSIVIDWQQQSCYLYASGDMSSILVWDLDKEQLLNTIPSSADSAISALSASQVRSGYFAAGFADGSVRIYDVCSPDSRPVYVARPHAPRTEKVVGIGFQPGFDPYEIVSASQAGDIQFLDVRMAAEPYLTIEAHRGSLTALAVHRHAPVVASSAKQMIKVFSLEGEQLRIIRYLPSFMGQRTGSVNCLSFHPYKSLLAAGAGHNALVSIYAEENYK

SEQ ID NO: 178976 - protein, 275 aa, Zea Mays
MHGSPQSDDSSQHSDSGILLRENASNGGLSYTRSRPVDNVIYSQFISTMCSVSKDPDPRIATIGWRALTLIGVEQVAMKSTRFNSGGLHRGETSASTFGMAHSSSWRDMNSGPSNAELKKLPESTIYNWSCGHFSRPLLTASDDNEETNARREERERIALDFITKCQRSSCKITSQIASWDTRFELGTKAALLLPFSPIVVAADENEKISVWNYDDAQPVNSFHNHKLSDRGLSKLLLINELDECLLLAASRRAETCNCFFISSGTSSCWSQYCD

SEQ ID NO: 178977 - protein, 630 aa, Zea Mays
MGPWAVDLALSVGIFPYVLKLLPTNTIELRQILVFIWTKILSLDKSCQVDLVKDGGHTYFIRFLDSLDAFPEQRAMAAFVIAVIVDGHRMGQEACMNAGLIDVCLRHLQPENLHAQTEPLLLQWLCLCLGKLWEDFPEAQLLGLQTNAPETVICLLSEPRPEVRAAAVFALGNLTTLSNCPDDDSDDDEKVKAEINVVRSLLQISSDGSPLVRSEVAIALTHFALGHNKNLKSVAAEYWKPQSKSLLKSLPSLANINNPSNVYSPNNILQGSIGPVLRVGSDSGAAGRDGHISTSSPIAASSIMHGSPQSDDSSQHSDSGILLRENASNGGLSYTRSRPVDNVIYSQFISTMCSVSKDPDPRIATIGWRALTLIGVEQVAMKSTRFNSGGLHRGETSASTFGMAHSSSWRDMNSGSNSMKFMTPPVSPPQHDYLLLGLRRVCSMEFGQHPINSPDGFANLLLSSATGPSNAELKKLPESTIYNWSCGHFSRPLLTASDDNEETNARREERERIALDFITKCQRSSCKITSQIASWDTRFELGTKAALLLPFSPIVVAADENEKISVWNYDDAQPVNSFHNHKLSDRGLSKLLLINELDECLLLAASRRAETCNCFFISSGTSSCWSQYCD

SEQ ID NO: 178978 - protein, 181 aa, Zea Mays
MALGDPMTFRLGHSSSSPSSAAAPVPPLPHHHHSHQNHIADDLPVANGPEPRNELEVAEVEKPAPAAYLSQVVVLCDQRHEGIDEATAAASAASTSGLVSKWRPKERMKTGCVALVLCLNISVDPPDVIKISPCARLECWIDPFSMTPLKALESIGKTLHSQYERWQPKWHLQARYKLQLD

SEQ ID NO: 178979 - protein, 109 aa, Zea Mays
MALGDPMTFRLGHSSSSPSSAAAPVPPLPHHHHSHQNHIADDLPVANGPEPRNELEVAEVEKPAPAAYLSQVVVLCDQRHEGIDEATAAASAASTSGLVSKWRPKERCR

SEQ ID NO: 178980 - protein, 179 aa, Zea Mays
MALGDPMTFRLGHSSSSPSSAAAPVPPLPHHHHSHQNHIADDLPVANGPEPRNELEVAEVEKPAPAAYLSQVVVLCDQRHEGIDEATAAASAASTSGLVSKWRPKERTGCVALVLCLNISVDPPDVIKISPCARLECWIDPFSMTPLKALESIGKTLHSQYERWQPKWHLQARYKLQLD

SEQ ID NO: 178981 - protein, 111 aa, Zea Mays
MALGDPMTFRLGHSSSSPSSAAAPVPPLPHHHHSHQNHIADDLPVANGPEPRNELEVAEVEKPAPAAYLSQVVVLCDQRHEGIDEATAAASAASTSGLVSKWRPKERTLSL

SEQ ID NO: 178982 - protein, 106 aa, Zea Mays
MERMSSSVQSWVEEHKLSSIGCKVPLKPQPTYRWSIHDDPSLHPFYITYPCNHISKSLYPSLIIGVLMTGKWLYCPSSQVYIFYYYGRKMFHPYAHSYIRLLQIEN

SEQ ID NO: 178983 - protein, 467 aa, Zea Mays
MKSVYRGFDEERGVEVAWNQASLADVLRSPDAVQRMYSEVQLLSELRHDGIIGFHASWVDVPGRSFNFITELFSSGTLRSYRLRYPRVNLRAVRSWARQLLGGLAYLHARDPPVIHRDLKCDNIFVNGHQGHVKIGDLGLAAVLRRGGAAHSVIGTPEFMAPEMYDEEYDERVDVYAFGMCMLEMLTVEYPYSECTNPAQIYKKVTAGRLPDAFYRVDDDDARRFIGRCLVPAANRPSAAELLLDPFLLHHHHHAAAAAGTVPVPSPLPTTAVAAGAPPPSTCSSSAADDDVVSALDDDDEVDVPPRNDMTITGKLNAEEDTIFLKVQIADEASGHARNIYFPFDMASDTAAEVAQEMVKELDITDRHASEIAAMIQQEIGRLLPGRAQQHEYTYASRGGDYDDEERPPPFYYLSSSPASSHGSHCGVGPYAFGGFSGPCGSAWTKGKPNHHIHLHINLFYLIWCLF

SEQ ID NO: 178984 - protein, 513 aa, Zea Mays
MSAARRCGGVRRRLDRAAAGDNANGYVETDPTGRYGRFDELLGKGAMKSVYRGFDEERGVEVAWNQASLADVLRSPDAVQRMYSEVQLLSELRHDGIIGFHASWVDVPGRSFNFITELFSSGTLRSYRLRYPRVNLRAVRSWARQLLGGLAYLHARDPPVIHRDLKCDNIFVNGHQGHVKIGDLGLAAVLRRGGAAHSVIGTPEFMAPEMYDEEYDERVDVYAFGMCMLEMLTVEYPYSECTNPAQIYKKVTAGRLPDAFYRVDDDDARRFIGRCLVPAANRPSAAELLLDPFLLHHHHHAAAAAGTVPVPSPLPTTAVAAGAPPPSTCSSSAADDDVVSALDDDDEVDVPPRNDMTITGKLNAEEDTIFLKVQIADEASGHARNIYFPFDMASDTAAEVAQEMVKELDITDRHASEIAAMIQQEIGRLLPGRAQQHEYTYASRGGDYDDEERPPPFYYLSSSPASSHGSHCGVGPYAFGGFSGPCGSAWTKGKPNHHIHLHINLFYLIWCLF

SEQ ID NO: 178985 - protein, 403 aa, Zea Mays
MADHKETKSVSLGLLDSDATNHATTDSLSIRGGGNFSEASPVPSETSTLQSETGKKVDVRNDTTPSYYGVSAKQFTGRSHHYIEDTKHNAYPYSTGLVDGLGTSNSVLTSDTQPGGNNNDTVPNLTGDFDTNLHNLLYARGFHQDNPMTQLYYPMPMPPPLQYQNMHPSNGHGRKNPYGYAGRNGVVPGHVYPPSYFVYRPLYQADDHMTLRTRGTGTYFPDPNLRKDRPPTGRGERGRNHSHQNNYHKFHHHTRPDMPVDMIPLEELRHELPLQTYAPNANGHGIPSPMNIPISSPSSQSPRDPLNVPMHSPSSHVRKDNFHGNGFMLPQDSKLEFGTLGALPSEVASKDHANRSGSVSNNQASGPVSPMSVAKNTGMGSNGMRNVQPYRLKDSGDFPPLSS

SEQ ID NO: 178986 - protein, 385 aa, Zea Mays
MADHKETKSVSLGLLDSDATNHATTDSLSIRGGGNFSEASPVPSETSTLQSETGKKVDVRNDTTPSYYGVSAKQFTGRSHHYIEDTKHNAYPYSTGLVDGLGTSNSVLTSDTQPGGNNNDTVPNLTGDFDTNLHNLLYARGFHQDNPMTQLYYPMPMPPPLQYQNMHPSNGHGRKNPYGYAGRNGVVPGHVYPPSYFVYRPLYQADDHMTLRTRGTGTYFPDPNLRKDRPPTGRGERGRNHSHQNNYHKFHHHTRPDMPVDMIPLEELRHELPLQTYAPNANGHGIPSPMNIPISSPSSQSPRDPLNVPMHSPSSHVRKDNFHGNGFMLPQDSKLEFGTLGALPSEVASKDHANRSGSVSNNQASGPVSPMSVAKNTGMGSNGMR

SEQ ID NO: 178987 - protein, 385 aa, Zea Mays
MSIIYTATSHPLPRTVGTKMTTPPRRSPPLRGRGHAGLRALAPMVNIHERSPVPACVPAHPDPSSSISPDDWRRLEGATFSVMCKIHPTVSSQHLRARVIDYVQRLFRLHHDGYQVISFGSVPLKTYLPDGDIDLTLLCAAISDENLENEVCAILKSEEQRKDSEFEVKDVKYVPAEVKLVKCKVQNIAVDISVNQIGGPNKVYFLEKVDQNLGKNNLLRRSIMLIKHWCYYESCILGAQRGLVSTYALETLVLYIFHVFHKSLDGPLAVLYRFLDYYSKFDWDNKGISLFGPISLSSLPELVTEPPYTRDDGFLSREAFLKDCAKAFSVPPINSEENPQVFSKKFVNIVDPLKQSNNLGRSISKGTIFLSNTAASCCRFFCGKA

SEQ ID NO: 178988 - protein, 332 aa, Zea Mays
MDNPEEGGNTDYLENITIPSALITKSFGDRLKKAIDSGDMVNVNLDWREALPHPDERVEYEFWTNSNDECGPKCDSQIDFVKSFKGAAQVLEKKGYTEFTPHYITWYCPEAFILSKQCKSQCINHGRYCAPDPEQDFSKGYDGKDVVVQNLRQVCVFKVAKEHKKPWLWWDYVTDFAIRCPMKEKKYTKECADGVIKSLGLDHKAIDKCIGDPDADEENHVLKAEQDAQIGKGSRGDVTILPTLVINNRQYRGKLDKGAVLKALCAGFRETTEPAVCLSDDIQTNECLENNGGCWQDKAANITACKVLPVVLFFFYLEILVYQIFVLISLCM

SEQ ID NO: 178989 - protein, 493 aa, Zea Mays
MDNPEEGGNTDYLENITIPSALITKSFGDRLKKAIDSGDMVNVNLDWREALPHPDERVEYEFWTNSNDECGPKCDSQIDFVKSFKGAAQVLEKKGYTEFTPHYITWYCPEAFILSKQCKSQCINHGRYCAPDPEQDFSKGYDGKDVVVQNLRQVCVFKVAKEHKKPWLWWDYVTDFAIRCPMKEKKYTKECADGVIKSLGLDHKAIDKCIGDPDADEENHVLKAEQDAQIGKGSRGDVTILPTLVINNRQYRGKLDKGAVLKALCAGFRETTEPAVCLSDDIQTNECLENNGGCWQDKAANITACKDTFRGRVCECPVVKGVKFVGDGYTHCEASGSGRCEINNGGCWKDTKNGRTYSACTVSDDGCRCPDGFKGDGKHKCEDVDECKERTVCQCEECRCKNTWGSYECGCSGGLLYMKEHDTCISKNGASEAGWGFLWVVVFGLVAAGIAGYAVYKYRIRRYMDSEIRAIMAQYMPLDSQGDVQSHAHHIEM

SEQ ID NO: 178990 - protein, 385 aa, Zea Mays
MGSRSAGAALRLWLLALLLGCCQGRFVVEKNSLKVTAPDGLKGTYECAIGNFGVPQYGGTMVGFVAYPKANRKACKSFDDFDISYKAKPGAFPTFLLVDRGDCYFAKKAWNAQKAGAAAILVADDKDEPLITMDNPEEGGNTDYLENITIPSALITKSFGDRLKKAIDSGDMVNVNLDWREALPHPDERVEYEFWTNSNDECGPKCDSQIDFVKSFKGAAQVLEKKGYTEFTPHYITWYCPEAFILSKQCKSQCINHGRYCAPDPEQDFSKGYDGKDVVVQNLRQVCVFKVAKEHKKPWLWWDYVTDFAIRCPMKEKKYTKECADGVIKSLGLDHKAIDKCIGDPDADEENHVLKAEQDAQIGKGSRGDVTILPTLVINNRQYRA

SEQ ID NO: 178991 - protein, 636 aa, Zea Mays
MGSRSAGAALRLWLLALLLGCCQGRFVVEKNSLKVTAPDGLKGTYECAIGNFGVPQYGGTMVGFVAYPKANRKACKSFDDFDISYKAKPGAFPTFLLVDRGDCYFAKKAWNAQKAGAAAILVADDKDEPLITMDNPEEGGNTDYLENITIPSALITKSFGDRLKKAIDSGDMVNVNLDWREALPHPDERVEYEFWTNSNDECGPKCDSQIDFVKSFKGAAQVLEKKGYTEFTPHYITWYCPEAFILSKQCKSQCINHGRYCAPDPEQDFSKGYDGKDVVVQNLRQVCVFKVAKEHKKPWLWWDYVTDFAIRCPMKEKKYTKECADGVIKSLGLDHKAIDKCIGDPDADEENHVLKAEQDAQIGKGSRGDVTILPTLVINNRQYRGKLDKGAVLKALCAGFRETTEPAVCLSDDIQTNECLENNGGCWQDKAANITACKDTFRGRVCECPVVKGVKFVGDGYTHCEASGSGRCEINNGGCWKDTKNGRTYSACTDDGCRCPDGFKGDGKHKCEDVDECKERTVCQCEECRCKNTWGSYECGCSGGLLYMKEHDTCISKNGASEAGWGFLWVVVFGLVAAGIAGGTWTRRSAPSWPSTCLWTAKEMSRATRTILRCEDACRLDERRRRLGLAYIIHQN

SEQ ID NO: 178992 - protein, 552 aa, Zea Mays
MGSRSAGAALRLWLLALLLGCCQGRFVVEKNSLKVTAPDGLKGTYECAIGNFGVPQYGGTMVGFVAYPKANRKACKSFDDFDISYKAKPGAFPTFLLVDRGDCYFAKKAWNAQKAGAAAILVADDKDEPLITMDNPEEGGNTDYLENITIPSALITKSFGDRLKKAIDSGDMVNVNLDWREALPHPDERVEYEFWTNSNDECGPKCDSQIDFVKSFKGAAQDFSKGYDGKDVVVQNLRQVCVFKEKKYTKECADGVIKSLGLDHKAIDKCIGDPDADEENHVLKAEQDAQIGKGSRGDVTILPTLVINNRQYRGKLDKGAVLKALCAGFRETTEPAVCLSDDIQTNECLENNGGCWQDKAANITACKDTFRGRVCECPVVKGVKFVGDGYTHCEASGSGRCEINNGGCWKDTKNGRTYSACTDDGCRCPDGFKGDGKHKCEDVDECKERTVCQCEECRCKNTWGSYECGCSGGLLYMKEHDTCISKNGASEAGWGFLWVVVFGLVAAGIAGYAVYKYRIRRYMDSEIRAIMAQYMPLDSQGDVQSHAHHIEM

SEQ ID NO: 178993 - protein, 629 aa, Zea Mays
MGSRSAGAALRLWLLALLLGCCQGRFVVEKNSLKVTAPDGLKGTYECAIGNFGVPQYGGTMVGFVAYPKANRKACKSFDDFDISYKAKPGAFPTFLLVDRGDCYFAKKAWNAQKAGAAAILVADDKDEPLITMDNPEEGGNTDYLENITIPSALITKSFGDRLKKAIDSGDMVNVNLDWREALPHPDERVEYEFWTNSNDECGPKCDSQIDFVKSFKGAAQVLEKKGYTEFTPHYITWYCPEAFILSKQCKSQCINHGRYCAPDPEQDFSKGYDGKDVVVQNLRQVCVFKVAKEHKKPWLWWDYVTDFAIRCPMKEKKYTKECADGVIKSLGLDHKAIDKCIGDPDADEENHVLKAEQDAQIGKGSRGDVTILPTLVINNRQYRGKLDKGAVLKALCAGFRETTEPAVCLSDDIQTNECLENNGGCWQDKAANITACKDTFRGRVCECPVVKGVKFVGDGYTHCEASGSGRCEINNGGCWKDTKNGRTYSACTDDGCRCPDGFKGDGKHKCEDVDECKERTVCQCEECRCKNTWGSYECGCSGGLLYMKEHDTCIMCLSYSGKNGASEAGWGFLWVVVFGLVAAGIAGYAVYKYRIRRYMDSEIRAIMAQYMPLDSQGDVQSHAHHIEM

SEQ ID NO: 178994 - protein, 72 aa, Zea Mays
MHIICAGSCVEVRWTVQPTTKNFAGACGLSVKTCTLCLMIADAADKAASVNLIATSKAEAGWLAVDRLVQHP

SEQ ID NO: 178995 - protein, 1095 aa, Zea Mays
MEPHSLRFVRCPKCHQLLVEYPSIPVYKCGGCGTVLRAKHRAAPAARAGSESGEHSTGSPCSLNGSPSQSSGSICSGEQRAGSSVDRPHEATAHGSMSSAANNIDSCDGTVHERTMSAADSGVTHAEHPEEGKCSLADDGNIQKSGVMVKEKETHGQNAGASLDLTERVENVDTGEKASGGKIGDIGTSQLSMTLYEKSQAAHREERPRRYEGVHVESHKALIEELERSLSFSSEDDYFSDEAESSGLSDALRNQMGSRRFMLGGRVNDAPRSDPHGRLIEELEMSFSDAEEPLEQHAMGSERVHGNVLDKDPQILSDKSAHPCEESLSSFESGHLKSEQTPHQESRAIGAIGNGNQGNERIEDNNNTADSVHGSEHIVIDDDKIADIFHEKEHDKDCQLANTESAYPSEGSTSAVDDCSIEVQQSFQPNDLTAVDECSIEVQQSFQPNDLTADVNQEMEDDKITNDNIVPADSHEKEHENDNLIHAPADEDISERVGVNEELTADGTQEMEDGFMEDDNMINCVHDKDNSVLADENIAEKVHMHEDLKTDGTQEMEEGCMEDSNMSNCIHVSDNLVFADEGIADRVHGNEETADGAGENEQSLMENENVNVAVAAEFIAKKIHENEHGRDQRSLEDGSAQLYEGVITPFSARYVESEQSFQQDEPIPDATEEKEDDFMEDGNMANCIEESMAAVARFSSLPNKRNQSKLASFNKNKEQMTYRSRGSQLRQGRSLDSEDFGSIQNFMESQMDGTSSSLSSGSPSRGDPVHRTANKFNNNCRHERLKKMDELRDQLSRLSSQKSSERSYQKRGLEYQQQSNGYDVEHHIQSVDGDSAPSSCALESYYGHGRPPRYPPPQNPFSPTHTYAHCHFGHAETRLPHSYDPWEFNSYYQSSYAESTILDQESLRSSYKEQKRVVRKHILRPLSGASPFTICNGCFNLVQMPSDVYISKAMVGKMQCGKCSKVLALSFRAAYNANAKSSVDVAQESYNLDDSVVAKNEDIASYYAECLTGGPVSISEDYGASHTRSMPARAESSSLAAAQSGKKVSDSALHRLMGYDSASQLLRHSRVFEDGYESFESMVPVSSRVSRRKNK

SEQ ID NO: 178996 - protein, 1121 aa, Zea Mays
MPPAPRRVPLHSCLQVWRLWHGSQRYQLSPPSFISMFMETNKQSDRYMWFVTGAAKHRAAPAARAGSESGEHSTGSPCSLNGSPSQSSGSICSGEQRAGSSVDRPHEATAHGSMSSAANNIDSCDGTVHERTMSAADSGVTHAEHPEEGKCSLADDGNIQKSGVMVKEKETHGQNAGASLDLTERVENVDTGEKASGGKIGDIGTSQLSMTLYEKSQAAHREERPRRYEGVHVESHKALIEELERSLSFSSEDDYFSDEAESSGLSDALRNQMGSRRFMLGGRVNDAPRSDPHGRLIEELEMSFSDAEEPLEQHAMGSERVHGNVLDKDPQILSDKSAHPCEESLSSFESGHLKSEQTPHQESRAIGAIGNGNQGNERIEDNNNTADSVHGSEHIVIDDDKIADIFHEKEHDKDCQLANTESAYPSEGSTSAVDDCSIEVQQSFQPNDLTAVDECSIEVQQSFQPNDLTADVNQEMEDDKITNDNIVPADSHEKEHENDNLIHAPADEDISERVGVNEELTADGTQEMEDGFMEDDNMINCVHDKDNSVLADENIAEKVHMHEDLKTDGTQEMEEGCMEDSNMSNCIHVSDNLVFADEGIADRVHGNEETADGAGENEQSLMENENVNVAVAAEFIAKKIHENEHGRDQRSLEDGSAQLYEGVITPFSARYVESEQSFQQDEPIPDATEEKEDDFMEDGNMANCIEESMAAVARFSSLPNKRNQSKLASFNKNKEQMTYRSRGSQLRQGRSLDSEDFGSIQNFMESQMDGTSSSLSSGSPSRGDPVHRTANKFNNNCRHERLKKMDELRDQLSRLSSQKSSERSYQKRGLEYQQQSNGYDVEHHIQSVDGDSAPSSCALESYYGHGRPPRYPPPQNPFSPTHTYAHCHFGHAETRLPHSYDPWEFNSYYQSSYAESTILDQESLRSSYKEQKRVVRKHILRPLSGASPFTICNGCFNLVQMPSDVYISKAMVGKMQCGKCSKVLALSFRAAYNANAKSSVDVAQESYNLDDSVVAKNEDIASYYAECLTGGPVSISEDYGASHTRSMPARAESSSLAAAQSGKKVSDSALHRLMGYDSASQLLRHSRVFEDGYESFESMVPVSSRVSRRKNKADSGMLTDR

SEQ ID NO: 178997 - protein, 112 aa, Zea Mays
MVVGGSSAPAPSVNSISFSGKEGLCGLKRWQTNSSKTLHRSYLHRLEIQTAALWRPRKMLDRSCQQIHALHGSHSALQRHVRSESPRTRPENGLAYIWTAPGTGVWKNTSDY

SEQ ID NO: 178998 - protein, 68 aa, Zea Mays
MIVSEFPCSYVLLHFSSIIKALRFAPICICLFDVYSIFFYHLLGGSMWFKKMANKFFKNITSFLSSSA

SEQ ID NO: 178999 - protein, 54 aa, Zea Mays
MLDRSCQQIHALHGSHSALQRHVRSESPRTRPENGLAYIWTAPGTGVWKNTSDY

SEQ ID NO: 179000 - protein, 69 aa, Zea Mays
MREEGAVICIYDQNLTGWPLFDHGVLLLRIQHVVALHLYESSFDSVQSLIISFEACCTDSCCRPRTHQH

SEQ ID NO: 179001 - protein, 433 aa, Zea Mays
MRGWATPGTSRRKNPSNRATGRRRRWATAAHGRRMPSSLRTRKQLHLLQQPSKNANADRKHTCMSSDISDPSTPRKVEDAKNISIYNDVIAFTLFELETITKSFRVDYVLGEGGFGTVYKGYIDENVRVGLKSLPVAVKVLNKDGHQGHREWLTEVNCLGQLRHPNLVKLIGYCCEDDHRLLVYEFMFRGSLENHLFRKTATPLPWGTRMSIALGAAKGLACLHNAQRPVIYRDFKTSNILLDSDYTAKLSDFGLAKDGPEGDQTHVSTRVMGTYGYAAPEYVMTGHLTARSDVYSFGVVLLELLTGRKSIDKSRPSREQSLVDWALPKLNDKRRLLQIIDPRLEGQYSARAAHKSCSLAFYCLSQNPKARPLMSDVVETLAPLQQGGGGGSDASSGLPDCRGRRRLTGNSVVHFRAIPNPKCTPVVPACRVR

SEQ ID NO: 179002 - protein, 299 aa, Zea Mays
MDAGNGCSARALAACVVGGIVLGASVLALHLAGGPAAIPPLPLPPPIGALLRRRRRPVRVYMDGCFDMMHYGHCNALRQARALGDELVVGVISDDEIKANKGPPVTPLHERMVMVRAVKWVDDIIPDAPYAITEEFMNKLFNEYNIDYIIHGDDPCLLPDGTDAYALAKKAGRYKQIKRTEGVSTTDIVGRMLLCVRERSSDAHNHSSLQRQFSSGHGQKVDDTGSGTGTRVSHFLPTSRRIVQFSNSKGPGPDSRIVYIDGAFDLFHAGHVEFLPCRSYDLLENLEIFCLWGFTQIRP

SEQ ID NO: 179003 - protein, 120 aa, Zea Mays
MTVTPFSHSVIIVLPLGTRNLLPWKVGHDDRNFQLHPPSDDQNTSTNQMRAKYYLLWFWDQQRPWRILSLPVLQYSIVSKALPRFNLFKPRKLVGHNDKLFELQKRGFFTRKPLKIIFLD

SEQ ID NO: 179004 - protein, 61 aa, Zea Mays
MLSSSCPWQRYCWRWTIELPGMAWERPQGPVGTRHTHTEQKQVKARRPSASMQYTAKTGPL

SEQ ID NO: 179005 - protein, 198 aa, Zea Mays
MAFPYVSTTVDERLEDSLLSSFAENCNNGFGRNRITYTDTCTGQDLKKYHNMDAINDLVVSGVASRRANHPSGQTDVIVFCSGGFENPGTAKSEGELLSQLVDSLDLSGAKYTVLYASQPSGLLESPSGLPLGRHLAEKKTNGTKAVQGEKCDGECLVKSSLLEGTFVGIVLLIILISGLMCMMGIDTPSRFEAPQES

SEQ ID NO: 179006 - protein, 752 aa, Zea Mays
MQNARHLRSITMESMFVATIPNAIFQAKHLKYLEISRLRCEVLPEAISNFWTLQALHLASSDLLDLPESFGKLTRLRTLNLSKSEKFKRLPDSIGDCQMMSTIDLCGCNSLTVLPDTIGRIERLRVLRLSYTKIERLPSNIITLRNLECLDLCTCQELVELPEGIGNLDRLQVLNLKGCKSLGGMPVGVGRLSRLQKLGLFVVGDSEKFAGISELANVPRISEELSIRGIPHGMDPDDAQMACLQQKTSLQSLDLEWMAHKACEVDLEWMAHEAGEANMDLERMAHDAGEVDLDLERMALEAGEVDLDSEWMPLEAGEVDTELEQAVLDGLEPPSQIKELKINGYSGSQHACWMQNQVSGRRGPQELVHFPFLRVVKLSDFPNLKHLDGLVELPCLEDLELRAMPCLESMSGGPFPSLSRLELDTLPSLGEVWLVAETTILPSGEGAGHNVHDTGTPGSGRQVRVGGRLSYLFIQDCPRLRLRPHMPSSLESLHLSESSEQLLQLPADQCLGSSSSYSNFSHLKKLGLWGMTGLGSGRRWELLQHMTALESLEINSSLVLRELPEGLRSLTCLQSLIVFACSDLLVLPEWIGELASLQQLCIWTCDVLSSLPQSLGQLTSLQMLSIEACYELHRLPERIGELCSLRKLRIRDCPRLACLPQMSGLTSLQELLISDCPGLTSLPQGMMSGLASLEKLIVSDCPGIKFLPQDIKGLTTLMELRIRRCPDLERRCETGKGEDWHLISHIPNLRIW

SEQ ID NO: 179007 - protein, 738 aa, Zea Mays
MQNARHLRSITMESMFVATIPNAIFQAKHLKYLEISRLRCEVLPEAISNFWTLQALHLASSDLLDLPESFGKLTRLRTLNLSKSEKFKRLPDSIGDCQMMSTIDLCGCNSLTVLPDTIGRIERLRVLRLSYTKIERLPSNIITLRNLECLDLCTCQELVELPEGIGNLDRLQVLNLKGCKSLGGMPVGVGRLSRLQKLGLFVVGDSEKFAGISELANVPRISEELSIRGIPHGMDPDDAQMACLQQKTSLQSLDLEWMAHKACEVDLEWMAHDAGEVDLDLERMALEAGEVDLDSEWMPLEAGEVDTELEQAVLDGLEPPSQIKELKINGYSGSQHACWMQNQVSGRRGPQELVHFPFLRVVKLSDFPNLKHLDGLVELPCLEDLELRAMPCLESMSGGPFPSLSRLELDTLPSLGEVWLVAETTILPSGEGAGHNVHDTGTPGSGRQVRVGGRLSYLFIQDCPRLRLRPHMPSSLESLHLSESSEQLLQLPADQCLGSSSSYSNFSHLKKLGLWGMTGLGSGRRWELLQHMTALESLEINSSLVLRELPEGLRSLTCLQSLIVFACSDLLVLPEWIGELASLQQLCIWTCDVLSSLPQSLGQLTSLQMLSIEACYELHRLPERIGELCSLRKLRIRDCPRLACLPQMSGLTSLQELLISDCPGLTSLPQGMMSGLASLEKLIVSDCPGIKFLPQDIKGLTTLMELRIRRCPDLERRCETGKGEDWHLISHIPNLRIW

SEQ ID NO: 179008 - protein, 83 aa, Zea Mays
MAIPRSSLQICSDTDIMSLKCGSELYSRAKRTLPKPASFSDGQSCVSKTISKRINESQPIAVSNPSCMRVSGPRKGSFVSGLL

SEQ ID NO: 179009 - protein, 211 aa, Zea Mays
MSKLPFLSAHSDKSSVSADTQEEAAKAYDLAAIEYRGANAVTNFDISCYLDHPLFLAQLQQEQPQVVPALDQEPQADQREPETTAQEPVSSQAKTPADDNAEPDDIAEPLITVDNSVEESLWSPCMDYELDTMSRSNFGSSINLSEWFTDADFDSDLGCLFDGRSAVDGGSKGGVGVADFSLFEAGDGQLKDVLSDMEEGIQPPTIISVCN

SEQ ID NO: 179010 - protein, 353 aa, Zea Mays
MVFSFFQKCTEILKADILIRLCISLSSSSFLSSAAISVGVPLRRDGDLAIYCCWLHRPSTVYLGAYDGEEAAARAYDLAALKYWGPEALLNFPVEDYSSEMPEMEAASREEYLASLRRRSSGFSRGVSKYRGVARHHHNGRWEARIGRVLGNKYLYLGTFDTQEEAAKAYDLAAIEYRGANAVTNFDISCYLDHPLFLAQLQQEQPQVVPALDQEPQADQREPETTAQEPVSSQAKTPADDNAEPDDIAEPLITVDNSVEESLWSPCMDYELDTMSRSNFGSSINLSEWFTDADFDSDLGCLFDGRSAVDGGSKGGVGVADFSLFEAGDGQLKDVLSDMEEGIQPPTIISVCN

SEQ ID NO: 179011 - protein, 255 aa, Zea Mays
MITPPEQTSAIMQGSEVRSTHPQSQPLNPAASLPPTVSAVGDESKRTAAAMADKLASLSAPVQVLTSILSSFAAEQAASINGGSSSGEFSGGPPGFHIDKRPRLEKTGQASDMGAPPPFFGQAAQVQQQIGGTHPPAPAPGSFPPPPPPLPSLLPPLLQQFGQNTGGMIGMGGPFGMMAGSMPPPPPLSNILPAGFPRPSGPPPPPPLPPAQSQPQQQSPQAAQQSPTSTGFFQSSGMGFFPPAQVQQSPSAQRQ

SEQ ID NO: 179012 - protein, 546 aa, Zea Mays
MSAYLFPSLSRWCIFHRKKAKRVVDTWEKQFTSAREDKKISFLYLSNDILQNSKRKGADYVDEFWRVLPRSLKHVYEKGGGEGKNQVARLISIWDDRKVFGTRIESMKNGILGDNPPILDNNGNSLNPSSNPTSNSKAARKDSGTIVKKLTVGGMPEKIVSAYQLVLDQHFDEDTALNKCKTTLGLLERINKDINDSIINGNQPALSLISDLQEQEMTLKHCIKQLESVDMARISLVNQLKEALNEQESKSLVLRDQLQVAQTEAQRVIQLRKQLGGALVTSVTHSTSSPLMITPPEQTSAIMQGSEVRSTHPQSQPLNPAASLPPTVSAVGDESKRTAAAMADKLASLSAPVQVLTSILSSFAAEQAASINGGSSSGEFSGGPPGFHIDKRPRLEKTGQASDMGAPPPFFGQAAQVQQQIGGTHPPAPAPGSFPPPPPPLPSLLPPLLQQFGQNTGGMIGMGGPFGMMAGSMPPPPPLSNILPAGFPRPSGPPPPPPLPPAQSQPQQQSPQAAQQSPTSTGFFQSSGMGFFPPAQVQQSPSAQRQ

SEQ ID NO: 179013 - protein, 575 aa, Zea Mays
MAGAKADVDAETGDGGSFSEQRLIDKLKRLNNSAASIQTLSRWCIFHRKKAKRVVDTWEKQFTSAREDKKISFLYLSNDILQNSKRKGADYVDEFWRVLPRSLKHVYEKGGGEGKNQVARLISIWDDRKVFGTRIESMKNGILGDNPPILDNNGNSLNPSSNPTSNSKAARKDSGTIVKKLTVGGMPEKIVSAYQLVLDQHFDEDTALNKCKTTLGLLERINKDINDSIINEPALSLISDLQEQEMTLKHCIKQLESVDMARISLVNQLKEALNEQESKSLVLRDQLQVAQTEAQRVIQLRKQLGGALVTSVTHSTSSPLMITPPEQTSAIMQGSEVRSTHPQSQPLNPAASLPPTVSAVGDESKRTAAAMADKLASLSAPVQVLTSILSSFAAEQAASINGGSSSGEFSGGPPGFHIDKRPRLEKTGQASDMGAPPPFFGQAAQVQQQIGGTHPPAPAPGSFPPPPPPLPSLLPPLLQQFGQNTGGMIGMGGPFGMMAGSMPPPPPLSNILPAGFPRPSGPPPPPPLPPAQSQPQQQSPQAAQQSPTSTGFFQSSGMGFFPPAQVQQSPSAQRQ

SEQ ID NO: 179014 - protein, 440 aa, Zea Mays
MKNGILGDNPPILDNNGNSLNPSSNPTSNSKAARKDSGTIVKKLTVGGMPEKIVSAYQLVLDQHFDEDTALNKCKTTLGLLERINKDINDSIINGNQPALSLISDLQEQEMTLKHCIKQLESVDMARISLVNQLKEALNEQESKSLVLRDQLQVAQTEAQRVIQLRKQLGGALVTSVTHSTSSPLMITPPEQTSAIMQGSEVRSTHPQSQPLNPAASLPPTVSAVGDESKRTAAAMADKLASLSAPVQVLTSILSSFAAEQAASINGGSSSGEFSGGPPGFHIDKRPRLEKTGQASDMGAPPPFFGQAAQVQQQIGGTHPPAPAPGSFPPPPPPLPSLLPPLLQQFGQNTGGMIGMGGPFGMMAGSMPPPPPLSNILPAGFPRPSGPPPPPPLPPAQSQPQQQSPQAAQQSPTSTGFFQSSGMGFFPPAQVQQSPSAQRQ

SEQ ID NO: 179015 - protein, 515 aa, Zea Mays
MAGAKADVDAETGDGGSFSEQRLIDKLKRLNNSAASIQTLSRWCIFHRKKAKRVVDTWEKQFTSAREDKKISFLYLSNDILQNSKRKGADYVDEFWRVLPRSLKHVYEKGGGEGKNQVARLISIWDDRKVFGTRIESMKNGILGDNPPILDNNGNSLNPSSNPTSNSKAARKDSGTIVKKLTVGGMPEKIVSAYQLVLDQHFDEDTALNKCKTTLGLLERINKDINDSIINGNQPALSLISDLQEQEMTLKHCIKQLESVDMARISLVNQLKEALNEQESKSLVLRDQLQVAQTEAQRVIQLRKQLGGALVTSVTHSTSSPLMITPPEQTSAIMQGSEVRSTHPQSQPLNPAASLPPTVSAVGDESKRTAAAMADKLASLSAPVQVQQQIGGTHPPAPAPGSFPPPPPPLPSLLPPLLQQFGQNTGGMIGMGGPFGMMAGSMPPPPPLSNILPAGFPRPSGPPPPPPLPPAQSQPQQQSPQAAQQSPTSTGFFQSSGMGFFPPAQVQQSPSAQRQ

SEQ ID NO: 179016 - protein, 573 aa, Zea Mays
MAGAKADVDAETGDGGSFSEQRLIDKLKRLNNSAASIQTLSRWCIFHRKKAKRVVDTWEKQFTSAREDKKISFLYLSNDILQNSKRKGADYVDEFWRVLPRSLKHVYEKGGGEGKNQISIWDDRKVFGTRIESMKNGILGDNPPILDNNGNSLNPSSNPTSNSKAARKDSGTIVKKLTVGGMPEKIVSAYQLVLDQHFDEDTALNKCKTTLGLLERINKDINDSIINGNQPALSLISDLQEQEMTLKHCIKQLESVDMARISLVNQLKEALNEQESKSLVLRDQLQVAQTEAQRVIQLRKQLGGALVTSVTHSTSSPLMITPPEQTSAIMQGSEVRSTHPQSQPLNPAASLPPTVSAVGDESKRTAAAMADKLASLSAPVQVLTSILSSFAAEQAASINGGSSSGEFSGGPPGFHIDKRPRLEKTGQASDMGAPPPFFGQAAQVQQQIGGTHPPAPAPGSFPPPPPPLPSLLPPLLQQFGQNTGGMIGMGGPFGMMAGSMPPPPPLSNILPAGFPRPSGPPPPPPLPPAQSQPQQQSPQAAQQSPTSTGFFQSSGMGFFPPAQVQQSPSAQRQ

SEQ ID NO: 179017 - protein, 238 aa, Zea Mays
MSALKKSDKKAALDFAAWSFNVTTSVGLIMVNKALMATYGFSFATTLTGLHFVTTTLMTIVFRWLGLSQPSHLPLADLVKFVIFSNLSIVGMNVSLMWNSVGFYQIAKLCMIPASCLLEVVFDHVHYSRDTKLSIMVVLIGVAVCTVTDVSVNARGLIAAVIAVWSTALQQYYVHFLQRKYSLNSFNLLGHTAPAQAGSLLLVGPFADYLLTGKRVDHFSFSSLALVPDGSGQEPDCD

SEQ ID NO: 179018 - protein, 427 aa, Zea Mays
MSTTKVKRRVGKYELGRTIGEGTFAKVRFARDTVTGEAVAIKILDKEKVLRHKMVEQIKREISTMKLIKHPNVVRIYEVMGSKTKIYIVLEFATGGELFDTIVNHGRMREDEARRYFQQLINAVDYCHSRGVYHRDLKVSDFGLSALSQQIKDDGLLHTTCGTPNYVAPEVLEDQGYDGAMADLWSCGVILFVLLAGYLPFEDSNLMTLYKKISNAEFTFPPWTSFPAKRLLTRILDPNPMTRITIPEILEDEWFKKGYKRPEFDEQYDTTLDDVDAVFNDSEEHHVTEKKEEEPVALNAFELISMSAGLNLGNLFDSEQEFKRETRFTSKCPPKEIVRKIEEAAKPLGFDVQKKNYKLRLEKVKAGRKGNLNVATEILQVAPSLHMVEVRKAKGDTLEFHKFYKNLSKTLKDVVWKSDDLQTQHAS

SEQ ID NO: 179019 - protein, 244 aa, Zea Mays
MSTTKVKRRVGKYELGRTIGEGTFAKVRFARDTVTGEAVAIKILDKEKVLRHKMVEQIKREISTMKLIKHPNVVRIYEVMGSKTKIYIVLEFATGGELFDTIVNHGRMREDEARRYFQQLINAVDYCHSRGVYHRDLKPENLLLDSYGNLKVSDFGLSALSQQIKDDGLLHTTCGTPNYVAPEVLEDQGYDGAMADLWSCGVILFVLLAGYLPFEDSNLMTLYKKISNAEFTFPPWTSFPAKRE

SEQ ID NO: 179020 - protein, 153 aa, Zea Mays
MWNPDAIVFNSWQHYGTPSYWMQTLFRESSGAMFHPTTISSSYSGSLAASAITWQDSENSFLRVKVINFGSDAVTLTISTSGLQASINALGSTATVLTSADVMDENSFSNPTKVVPVKSDLSNAAEQMQVTLAPRSFSSFDLALAQSKLVAEM

SEQ ID NO: 179021 - protein, 294 aa, Zea Mays
MMLGFSFTFTFTWTLRGCLAFIDLGNYLKFYNAIRQAYPDIQMISNCDGSSTPLDHPADLYDFHVYNDSKTLFNMKSTFDRTSRSGPKAFVSEYAVWRGDAGRGSLLASLAEAAFLTGLEKNSDIVSMASYAPLFVNDNDQTWNPDAIVFNSWQHYGTPSYWMQTLFRESSGAMFHPTTISSSYSGSLAASAITWQDSENSFLRVKVINFGSDAVTLTISTSGLQASINALGSTATVLTSADVMDENSFSNPTKVVPVKSDLSNAAEQMQVTLAPRSFSSFDLALAQSKLVAEM

SEQ ID NO: 179022 - protein, 295 aa, Zea Mays
MGHPEPFPVKYVAIGNEDCGKKFYRGNYLKFYNAIRQAYPDIQMISNCDGSSTPLDHPADLYDFHVYNDSKTLFNMKSTFDRTSRSGPKAFVSEYAVWRGDAGRGSLLASLAEAAFLTGLEKNSDIVSMASYAPLFVNDNDQTWNPDAIVFNSWQHYGTPSYWMQTLFRESSGAMFHPTTISSSYSGSLAASAITWQDSENSFLRVKVINFGSDAVTLTISTSGLQASINALGSTATVLTSADVMDENSFSNPTKVVPVKSDLSNAAEQMQVTLAPRSFSSFDLALAQSKLVAEM

SEQ ID NO: 179023 - protein, 496 aa, Zea Mays
MGITSNDAAPRAVLLRFLFLLCIGCKCLASEVEATQTATLAVDASPQLARKIPDTLFGIFFEINHAGAGGIWAELVSNRGFEAGGLHTPSNIDPWSIIGDDSSVFVETDRTSCFSRNIVALRMEVLCDNCPTGGVGVYNPGFWGMNIEEGKVYNLVMFVKSPETTDLTVSLTSSNGLQNLASATVTVSGESNWIKVEQKLVAKGTNRTSRLQITTNKKGVVWFDQVSLMPEDTYKGHGFRTELISMILDLKPRFLRFPGGCFVEGGWLRNAFRWRESIGPWEERPGHFGDVWHYWTDDGLGYYEFLQLAEDLGTEPIWVFNNGVSHNDEVDTVAIAPFVKLLHYVVFLQDVLDSIEFARGSANSTWGSVRAAMGHPEPFPVKYVAIGNEDCGKKFYRGNYLKFYNAIRQAYPDIQMISNCDGSSTPLDHPADLYDFHVYNDSKTLFNMKSTFDRTSRSGPKAFVSEYAVWRGDAGRGSLLASLAEAAFLTGLEKNR

SEQ ID NO: 179024 - protein, 135 aa, Zea Mays
MPAHATGRPRHGHPRHRPPRRAHPRPQPRPPRPPHPRPRSLRPQRPGPPLAPLLSGAGQYRNFQHPDPYIVPWAPGGTKFTRNPPPPQGVKQFTKGLAKRASYVMRKENLVFKGTSFSLSRRELPCGGIDHHSSL

SEQ ID NO: 179025 - protein, 311 aa, Zea Mays
MGNRSHYWSCSWRLPCTENFPTVFSPDSIFGRFPYFLPCLCTSIFAAVVLISCIWMPETLHKHKVHENRSRNIEALEARLIDSNEKVEESGSLDSKKSLFRNWPLMSSIIVYCVFSFHDMAYTEVFSLWAESDKKYGGLSLSSEDVGQVLAVTGASLLVYQLFLYPSINKVLGPIKSSRVAAILCIPILFAYPYMTYLSEPGLSIVLNIASVIKNNLGVTIITGTFILQNNAVPQDQRGAANGLSMTGMSFFKALAPAGAGIVFSWAQKRQHAFFFPGDQMVFFLLNAVELVGLLLTFKPFLAVPEQYDTR

SEQ ID NO: 179026 - protein, 355 aa, Zea Mays
MAIATRFLLGALNGLLGPIKAYAIEVCRPEHEALALSLVSTAWGIGLIIGPALGGYLALPAENFPTVFSPDSIFGRFPYFLPCLCTSIFAAVVLISCIWMPETLHKHKVHENRSRNIEALEARLIDSNEKVEESGSLDSKKSLFRNWPLMSSIIVYCVFSFHDMAYTEVFSLWAESDKKYGGLSLSSEDVGQVLAVTGASLLVYQLFLYPSINKVLGPIKSSRVAAILCIPILFAYPYMTYLSEPGLSIVLNIASVIKNNLGVTIITGTFILQNNAVPQDQRGAANGLSMTGMSFFKALAPAGAGIVFSWAQKRQHAFFFPGDQMVFFLLNAVELVGLLLTFKPFLAVPEQYDTR

SEQ ID NO: 179027 - protein, 170 aa, Zea Mays
MLWAEGRKEWMPLSSISELHSAVAAKDQSEQDAPDVDDDFEKFQKEVIEAETEVKALKGNDVDQQDDERPATPPDGEEEFTDDDGTIYKWDRTLRAWVPQNDASGSKEDYAVEEMTFAVEEEIFQAPDILGPALEEINNLPESKNKGSDKAEMRGDKKRKSYENPAEKKV

SEQ ID NO: 179028 - protein, 405 aa, Zea Mays
METSSAPAAATEAGWYVLGPNQEGVGPYALAELREHFANGYFNESTMLWAEGRKEWMPLSSISELHSAVAAKDQSEQDAPDVDDDFEKFQKEVIEAETEVKALKGNDVDQQDDERPATPPDGEEEFTDDDGTIYKWDRTLRAWVPQNDASGSKEDYAVEEMTFAVEEEIFQAPDILGPALEEINNLPESKNKGSDKAEMRGDKKRKSYENPAEKKEANKPPDSWFDLKVNTHVYVTGLPDDVTVEEIVEVFSKCGIIKEDPETKKPRVKIYTDRETGRKKGDALVTYFKEPSVALAVQLLDGTPFRPGGKTHMSVSPAKFEQKGDVFVSKKTDKQKKRKIKKVEDKMLGWGGHDDKKLMIPATVILRLMKSFFLSLRLMLERNASSLVRWIMSRFVKIIHKVSYW

SEQ ID NO: 179029 - protein, 300 aa, Zea Mays
MTFAVEEEIFQAPDILGPALEEINNLPESKNKGSDKAEMRGDKKRKSYENPAEKKEANKPPDSWFDLKVNTHVYVTGLPDDVTVEEIVEVFSKCGIIKEDPETKKPRVKIYTDRETGRKKGDALVTYFKEPSVALAVQLLDGTPFRPGGDVFVSKKTDKQKKRKIKKVEDKMLGWGGHDDKKLMIPATVILRHMFTPAELRADEELLPELEADVREECIKFGPVDNVKVCENHPQGVILVRFKDRKDGAKCIEKMNGRWFAGRQIHASEDDGSVNHALIRDYDAEVSRLDRFGQELEEST

SEQ ID NO: 179030 - protein, 181 aa, Zea Mays
MLWAEGRKEWMPLSSISELHSAVAAKDQSEQDAPDVDDDFEKFQKEVIEAETEVKALKGNDVDQQDDERPATPPDGEEEFTDDDGTIYKWDRTLRAWVPQNDASGSKEDYAVEEMTFAVEEEIFQAPDILGPALEEINNLPESKNKGSDKAEMRGDKKRKSYENPAEKKLTNLRTVGLISK

SEQ ID NO: 179031 - protein, 227 aa, Zea Mays
METSSAPAAATEAGWYVLGPNQEGVGPYALAELREHFANGYFNESTMLWAEGRKEWMPLSSISELHSAVAAKDQSEQDAPDVDDDFEKFQKEVIEAETEVKALKGNDVDQQDDERPATPPDGEEEFTDDDGTIYKWDRTLRAWVPQNDASGSKEDYAVEEMTFAVEEEIFQAPDILGPALEEINNLPESKNKGSDKAEMRGDKKRKSYENPAEKKLTNLRTVGLISK

SEQ ID NO: 179032 - protein, 313 aa, Zea Mays
MSLSSWAGKRKSAKAIKKLCDVLGEPLSAHYQNILKSLLKELPGRFWEGKDAILDALASLCACCHVAITAEDSCLPSVILNCVCAACSRKSKLYREAAFLCLHKVITAFRDPGFFNSVFPMLFEVSNQSAISKTKGSAELDESEGASVSLDKVLNCATSCISVAFPQDIINQKKNVVELILNSLLPEESWQVKLSSFLCIKELCLKFDNSGDSNTWPQDTAYLVEELFHLVSPKLVDSIRLVKIAQVHVAASECLLDLSKLYRDFPLSNRTEAKFEDELTELCESEKSEQAKAILKECLAILKALPGVTMTTD

SEQ ID NO: 179033 - protein, 613 aa, Zea Mays
MDDIKETVRTAGDSLCRAVSSLTIRLCDISLTSTSEANETMNIVLPYLLSEGILSKVSSVQKAAISLVMKLAKGAGPALRPHLPELVSCMLECLSSLEDQRLNYVEMHAGNAGIKTDKLETLRIAVAKDSPMWETLDICIKVVDKNSLDLLVPRLAQMIRSAVGLNTRVGVASFITLLVQKVMVDIKPFAAVLMKLLHSAVLEERSSAAKKAFASSCATVLKYASPPQAQKLIEDTTSLHSGGKNDQLSGAILIKAYLSNASDILGGYNAVVIPVIFVSRFDDDKDTSALYEELWEDIPSSERVTLTLYLPEIVSLLCDGMSLSSWAGKRKSAKAIKKLCDVLGEPLSAHYQNILKSLLKELPGRFWEGKDAILDALASLCACCHVAITAEDSCLPSVILNCVCAACSRKSKLYREAAFLCLHKVITAFRDPGFFNSVFPMLFEVSNQSAISKTKGSAELDESEGASVSLDKVLNCATSCISVAFPQDIINQKKNVVELILNSLLPEESWQVKLSSFLCIKELCLKFDNSGDSNTWPQDTAYLVEEVHVAASECLLDLSKLYRDFPLSNRTEAKFEDELTELCESEKSEQAKAILKECLAILKALPGVTMTTD

SEQ ID NO: 179034 - protein, 428 aa, Zea Mays
MDDIKETVRTAGDSLCRAVSSLTIRLCDISLTSTSEANETMNIVLPYLLSEGILSKVSSVQKAAISLVMKLAKGAGPALRPHLPELVSCMLECLSSLEDQRLNYVEMHAGNAGIKTDKLETLRIAVAKDSPMWETLDICIKVVDKNSLDLLVPRLAQMIRSAVGLNTRVGVASFITLLVQKVMVDIKPFAAVLMKLLHSAVLEERSSAAKKAFASSCATVLKYASPPQAQKLIEDTTSLHSGGKNDQLSGAILIKAYLSNASDILGGYNAVVIPVIFVSRFDDDKDTSALYEELWEDIPSSERVTLTLYLPEIVSLLCDGMSLSSWAGKRKSAKAIKKLCDVLGEPLSAHYQNILKSLLKELPGRFWEGKDAILDALASLCACCHVAITAEDSCLPSVILNCVCAACSRKSKLYREAAFLCLHKKCTF

SEQ ID NO: 179035 - protein, 502 aa, Zea Mays
MWETLDICIKVVDKNSLDLLVPRLAQMIRSAVGLNTRVGVASFITLLVQKVMVDIKPFAAVLMKLLHSAVLEERSSAAKKAFASSCATVLKYASPPQAQKLIEDTTSLHSGGKNDQLSGAILIKAYLSNASDILGGYNAVVIPVIFVSRFDDDKDTSALYEELWEDIPSSERVTLTLYLPEIVSLLCDGMSLSSWAGKRKSAKAIKKLCDVLGEPLSAHYQNILKSLLKELPGRFWEGKDAILDALASLCACCHVAITAEDSCLPSVILNCVCAACSRKSKLYREAAFLCLHKVITAFRDPGFFNSVFPMLFEVSNQSAISKTKGSAELDESEGASVSLDKVLNCATSCISVAFPQDIINQKKNVVELILNSLLPEESWQVKLSSFLCIKELCLKFDNSGDSNTWPQDTAYLVEELFHLVSPKLVDSIRLVKIAQVHVAASECLLDLSKLYRDFPLSNRTEAKFEDELTELCESEKSEQAKAILKECLAILKALPGVTMTTD

SEQ ID NO: 179036 - protein, 1415 aa, Zea Mays
MDALDRMLTRLALADDAHLAPVLARVLPYAVTSLASPAPAVRKLVMEILSHINKRVKHRPEISLPMLELWKIYTEPTSSTMVRNFCILYIEMAFERLPTEEKGNIAPDLLINISNIPPQHQGIILRLVTKAIGECNTHKVDETIASKYRVITESSDGLLFADFCFHTLLYQAPPQGSGCPAGLSVVQSERVTGKQPLKIDVLASRKLGILNVIEAMNFTPEIVYPLYLSASSDSQDAVSKKGDEFLKRKASTVNLEDPDLIKRLFTLFNGTVGAENIAAELKVSPAHASLRMRLMSVFCRSVAAANAFPHTLQCIFGCIYGSGTTSRLKQLGMEFTVWVFKHAVTDQLKLIGPVILSGILRSLDGSSTAETDSTGRDTKIFAYQAIGLLASRMPNLFSDKTDMAIRLFTALRLEDQSLRLTIQEAATSLATSYKRASTIVLKDLESLLLENCEAEQSEVRFSAIRWATTLYDTRHCSSRYICMIGASDVKLDIREMALAGLNLMNDGRQSSAGSVDFSYPDIKEMINYICCQRPQLLHSDEQTNGKLLFPSKTFVSMIKFLMKCFESSDNLKLLQEDPSHSAVAKMCVILEHAMSYEGSSELHALALKSLVDLSSREPKLVSLRYAERINWLRSLLGHVDSDAREAVSRLLGIASSALSTSSALNLLSELTSTLSQNRPSRFENYHGVLCAIGYLTAGALKQSCITEDMVKNVVDILVKVVTSEGSALASVAMESLGHIGLRCALPSINQNSSTGTLLSVLRERLTKLLSENDTKAQQKILVSLGHISWNEMSFPHLNDALDLIFSLSRSKVEDVLFAAGEALSFIWGEVPVTADVILETNFVSLSQATNYLTGDASLVSSNSYEKSGCEEAHSIAREEIIKKLFETLIYSSRKEERCAGTVWLVSLTMYCGRHKKILELLPQIQEALSHLLGDPNELTQDLASQGMSIVYELGDASMKEELVHALVNTLTGAARKKKAIKLMEDSEVFQEGTIGNNPTGGKLSTYKELCSLANEMGQPDLIYKFMDLANYQAALNSKRGAAFGFSKIAKQAGEALQPYLNTLIPRLVRYQHDPDKNIQACYGRFMLLGLPKVCKHLRNIWTTTFRAMDDIKETVRTAGDSLCRAVSSLTIRLCDISLTSTSEANETMNIVLPYLLSEGILSKVSSVQKAAISLVMKLAKGAGPALRPHLPELVSCMLECLSSLEDQRLNYVEMHAGNAGIKTDKLETLRIAVAKDSPMWETLDICIKVVDKNSLDLLVPRLAQMIRSAVGLNTRVGVASFITLLVQKVMVDIKPFAAVLMKLLHSAVLEERSSAAKKAFASSCATVLKYASPPQAQKLIEDTTSLHSGGKNDQLSGAILIKAYLSNASDILGGYNAVVIPVIFVSRNSVSDLMMIKTPVLYMKNFGRIFLVVKE

SEQ ID NO: 179037 - protein, 755 aa, Zea Mays
MDALDRMLTRLALADDAHLAPVLARVLPYAVTSLASPAPAVRKLVMEILSHINKRVKHRPEISLPMLELWKIYTEPTSSTMVRNFCILYIEMAFERLPTEEKGNIAPDLLINISNIPPQHQGIILRLVTKAIGECNTHKVDETIASKYRVITESSDGLLFADFCFHTLLYQAPPQGSGCPAGLSVVQSERVTGKQPLKIDVLASRKLGILNVIEAMNFTPEIVYPLYLSASSDSQDAVSKKGDEFLKRKASTVNLEDPDLIKRLFTLFNGTVGAENIAAELKVSPAHASLRMRLMSVFCRSVAAANAFPHTLQCIFGCIYGSGTTSRLKQLGMEFTVWVFKHAVTDQLKLIGPVILSGILRSLDGSSTAETDSTGRDTKIFAYQAIGLLASRMPNLFSDKTDMAIRLFTALRLEDQSLRLTIQEAATSLATSYKRASTIVLKDLESLLLENCEAEQSEVRFSAIRWATTLYDTRHCSSRYICMIGASDVKLDIREMALAGLNLMNDGRQSSAGSVDFSYPDIKEMINYICCQRPQLLHSDEQTNGKLLFPSKTFVSMIKFLMKCFESSDNLKLLQEDPSHSAVAKMCVILEHAMSYEGSSELHALALKSLVDLSSREPKLVSLRYAERINWLRSLLGHVDSDAREAVSRLLGIASSALSTSSALNLLSELTSTLSQNRPSRFENYHGVLCAIGYLTAGALKQSCITEDMVKNVVDILVKVVTSEGSALASVAMESLGHIGLRCALPSINQNSSTG

SEQ ID NO: 179038 - protein, 1416 aa, Zea Mays
MYLRLHLRKWNYFKAKAVRNGVHCLGFQTFILSGILRSLDGSSTAETDSTGRDTKIFAYQAIGLLASRMPNLFSDKTDMAIRLFTALRLEDQSLRLTIQEAATSLATSYKRASTIVLKDLESLLLENCEAEQSEVRFSAIRWATTLYDTRHCSSRYICMIGASDVKLDIREMALAGLNLMNDGRQSSAGSVDFSYPDIKEMINYICCQRPQLLHSDEQTNGKLLFPSKTFVSMIKFLMKCFESSDNLKLLQEDPSHSAVAKMCVILEHAMSYEGSSELHALALKSLVDLSSREPKLVSLRYAERINWLRSLLGHVDSDAREAVSRLLGIASSALSTSSALNLLSELTSTLSQNRPSRFENYHGVLCAIGYLTAGALKQSCITEDMVKNVVDILVKVVTSEGSALASVAMESLGHIGLRCALPSINQNSSTGTLLSVLRERLTKLLSENDTKAQQKILVSLGHISWNEMSFPHLNDALDLIFSLSRSKVEDVLFAAGEALSFIWGEVPVTADVILETNFVSLSQATNYLTGDASLVSSNSYEKSGCEEAHSIAREEIIKKLFETLIYSSRKEERCAGTVWLVSLTMYCGRHKKILELLPQIQEALSHLLGDPNELTQDLASQGMSIVYELGDASMKEELVHALVNTLTGAARKKKAIKLMEDSEVFQEGTIGNNPTGGKLSTYKELCSLANEMGQPDLIYKFMDLANYQAALNSKRGAAFGFSKIAKQAGEALQPYLNTLIPRLVRYQHDPDKNIQACYGRFMLLGLPKVCKHLRNIWTTTFRAMDDIKETVRTAGDSLCRAVSSLTIRLCDISLTSTSEANETMNIVLPYLLSEGILSKVSSVQKAAISLVMKLAKGAGPALRPHLPELVSCMLECLSSLEDQRLNYVEMHAGNAGIKTDKLETLRIAVAKDSPMWETLDICIKVVDKNSLDLLVPRLAQMIRSAVGLNTRVGVASFITLLVQKVMVDIKPFAAVLMKLLHSAVLEERSSAAKKAFASSCATVLKYASPPQAQKLIEDTTSLHSGGKNDQLSGAILIKAYLSNASDILGGYNAVVIPVIFVSRFDDDKDTSALYEELWEDIPSSERVTLTLYLPEIVSLLCDGMSLSSWAGKRKSAKAIKKLCDVLGEPLSAHYQNILKSLLKELPGRFWEGKDAILDALASLCACCHVAITAEDSCLPSVILNCVCAACSRKSKLYREAAFLCLHKVITAFRDPGFFNSVFPMLFEVSNQSAISKTKGSAELDESEGASVSLDKVLNCATSCISVAFPQDIINQKKNVVELILNSLLPEESWQVKLSSFLCIKELCLKFDNSGDSNTWPQDTAYLVEELFHLVSPKLVDSIRLVKIAQVHVAASECLLDLSKLYRDFPLSNRTEAKFEDELTELCESEKSEQAKAILKECLAILKALPGVTMTTD

SEQ ID NO: 179039 - protein, 1426 aa, Zea Mays
MYLRLHLRKWNYFKAKAVRNGVHCLGFQTLTDQLKLIGPVILSGILRSLDGSSTAETDSTGRDTKIFAYQAIGLLASRMPNLFSDKTDMAIRLFTALRLEDQSLRLTIQEAATSLATSYKRASTIVLKDLESLLLENCEAEQSEVRFSAIRWATTLYDTRHCSSRYICMIGASDVKLDIREMALAGLNLMNDGRQSSAGSVDFSYPDIKEMINYICCQRPQLLHSDEQTNGKLLFPSKTFVSMIKFLMKCFESSDNLKLLQEDPSHSAVAKMCVILEHAMSYEGSSELHALALKSLVDLSSREPKLVSLRYAERINWLRSLLGHVDSDAREAVSRLLGIASSALSTSSALNLLSELTSTLSQNRPSRFENYHGVLCAIGYLTAGALKQSCITEDMVKNVVDILVKVVTSEGSALASVAMESLGHIGLRCALPSINQNSSTGTLLSVLRERLTKLLSENDTKAQQKILVSLGHISWNEMSFPHLNDALDLIFSLSRSKVEDVLFAAGEALSFIWGEVPVTADVILETNFVSLSQATNYLTGDASLVSSNSYEKSGCEEAHSIAREEIIKKLFETLIYSSRKEERCAGTVWLVSLTMYCGRHKKILELLPQIQEALSHLLGDPNELTQDLASQGMSIVYELGDASMKEELVHALVNTLTGAARKKKAIKLMEDSEVFQEGTIGNNPTGGKLSTYKELCSLANEMGQPDLIYKFMDLANYQAALNSKRGAAFGFSKIAKQAGEALQPYLNTLIPRLVRYQHDPDKNIQACYGRFMLLGLPKVCKHLRNIWTTTFRAMDDIKETVRTAGDSLCRAVSSLTIRLCDISLTSTSEANETMNIVLPYLLSEGILSKVSSVQKAAISLVMKLAKGAGPALRPHLPELVSCMLECLSSLEDQRLNYVEMHAGNAGIKTDKLETLRIAVAKDSPMWETLDICIKVVDKNSLDLLVPRLAQMIRSAVGLNTRVGVASFITLLVQKVMVDIKPFAAVLMKLLHSAVLEERSSAAKKAFASSCATVLKYASPPQAQKLIEDTTSLHSGGKNDQLSGAILIKAYLSNASDILGGYNAVVIPVIFVSRFDDDKDTSALYEELWEDIPSSERVTLTLYLPEIVSLLCDGMSLSSWAGKRKSAKAIKKLCDVLGEPLSAHYQNILKSLLKELPGRFWEGKDAILDALASLCACCHVAITAEDSCLPSVILNCVCAACSRKSKLYREAAFLCLHKVITAFRDPGFFNSVFPMLFEVSNQSAISKTKGSAELDESEGASVSLDKVLNCATSCISVAFPQDIINQKKNVVELILNSLLPEESWQVKLSSFLCIKELCLKFDNSGDSNTWPQDTAYLVEELFHLVSPKLVDSIRLVKIAQVHVAASECLLDLSKLYRDFPLSNRTEAKFEDELTELCESEKSEQAKAILKECLAILKALPGVTMTTD

SEQ ID NO: 179040 - protein, 124 aa, Zea Mays
MLISVSALSGPKEFTSVFYSLQNWRAIFERFDRDRSGRIDMSELRDALLSLGYSVSPTVLDLLVSKFDKTGGKSKAIEYDNFIECCLTVKGLTEKFKEKDTAYSGSATFTYEAFMLTVLPFLIA

SEQ ID NO: 179041 - protein, 261 aa, Zea Mays
MDGPSEADHASQHRHARTSNHPRRQASVPVHIRDPHARALDGSPESPSIGDSTPRVAPPPRTQAPACAFSATPSPVQRVCHGLPRPAARIRHHPSQLLPPEIVAVPIYASGLRPPRLPSSSPTANRDDYAPIHAPLPQFSIKVGCLAKQLPQHFLKSLQTKKPLMKKLIGCFTRSLFFNHTVTCVLFYDVVAITKWRFMELKEHMQGDFGAENEAYERYTQNVRLLEETWCPMEDADVEPEAEAAFLQRKEGWTCWFRRQM

SEQ ID NO: 179042 - protein, 497 aa, Zea Mays
MDAGGPPPLFLLGAVLAAALGWLLVVWRAAAGRRRSASARLPPGSTGLPLIGETLRLIAAYKSPNPEPFIDERVARHGSGVFTTHVFGERTVFSADPAFNRLLLAAEGRAVSCSYPSSIATLLGPRSLLLTSGPAHKRLHSLTLTRLGRPASPPLLAHIDRLVLATMRGWDRPGAGAMRLLDEAKKITFNLTVWQLVSIEPGPWTESVRREYVKLVDGFFSIPFPFASLLPFTVYGQALKARKKVAGALREVVRKRMDDKAEDDCGASKKNGEKKDMVEELLEAEGGSFSVEEMVDFCLSLLVAGYETTSVLMTLAVKFLTETPTALAQLKEEHDSIRGVKGKGQALEWSDYKSMPFTQCVISETLRVANLISGVFRRANTDIHFKGYVIPKGCKIFASFRAVHLSLDHYENARTFDPWRWQQSAEGASLFTPFGGGPRLCPGYELARVVVSVFLHHLVTRFSWEEAEEDRIVFFPTTRTLKGYPIILRRRPDCDDL

SEQ ID NO: 179043 - protein, 106 aa, Zea Mays
MRRSHCHLLGCFDRALCLLSLSFRRLRGVAMFPAQRKRPPRSRSSCFVPHLGYHRFRRSHGSCGGAADEGDLLLDEGREDPLEGHNEVASHVVIRVSAHYIVRDAR

SEQ ID NO: 179044 - protein, 400 aa, Zea Mays
MTYGEASTSRTAIGSGLIYHGISEGARIGLYFINRPEWIILDHACAAYSYVSVPLYDTLGPDAVQFIVNHATVEVIFCVPQTLSAILSFITQMPCVRLIVVVGGDDSNMPSAPATTECKIMTYNRLHNEGKMSPQTFRPPKPEDIATICYTSGTTGTPKGAVLSHENLIANVAGSSLGIKFYPSDVYISYLPLAHIYERANQVALLHYGVAIGFYQGDNLKLMDDLAVLRPTIFASVPRLYNKIYAAITNAVKESGGLRERLYHTAYNAKRHAMINGRNPSPMWDKLVFNKIKARLGGRMRLMTSGASPLSPDVMEFLRICFGEVLEGYGMTETSCVISTMNIGDRSIGHVGSPNPSCEVKLVDVPEMNYTSEDQPYPRGEICVRGPIIFCGYYKDEVQT

SEQ ID NO: 179045 - protein, 618 aa, Zea Mays
MIILYMQLKLSEIVDIWVQESAQTGQLEINKYCSYKWMTYGEASTSRTAIGSGLIYHGISEGARIGLYFINRPEWIILDHACAAYSYVSVPLYDTLGPDAVQFIVNHATVEVIFCVPQTLSAILSFITQMPCVRLIVVVGGDDSNMPSAPATTECKIMTYNRLHNEGKMSPQTFRPPKPEDIATICYTSGTTGTPKGAVLSHENLIANVAGSSLGIKFYPSDVYISYLPLAHIYERANQVALLHYGVAIGFYQGDNLKLMDDLAVLRPTIFASVPRLYNKIYAAITNAVKESGGLRERLYHTAYNAKRHAMINGRNPSPMWDKLVFNKIKARLGGRMRLMTSGASPLSPDVMEFLRICFGEVLEGYGMTETSCVISTMNIGDRSIGHVGSPNPSCEVKLVDVPEMNYTSEDQPYPRGEICVRGPIIFCGYYKDEVQTREVIDEDGWLHTGDIGLWLPGGRLKIIDRKKNIFKLAQGEYIAPEKIENVYAKCKFIAQCFIYGDSFNSSLVAIVAVEPDVLKAWAASEGIQYEDLRQLCADPRATAAVLADMDSIAKEAQLRGFEFAKAVTLVAEPFTLDNGLLTPTFKVKRPQAKAYFAKEISDMYARLLETELARSKL

SEQ ID NO: 179046 - protein, 581 aa, Zea Mays
MTYGEASTSRTAIGSGLIYHGISEGARIGLYFINRPEWIILDHACAAYSYVSVPLYDTLGPDAVQFIVNHATVEVIFCVPQTLSAILSFITQMPCVRLIVVVGGDDSNMPSAPATTECKIMTYNRLHNEGKMSPQTFRPPKPEDIATICYTSGTTGTPKGAVLSHENLIANVAGSSLGIKFYPSDVYISYLPLAHIYERANQVALLHYGVAIGFYQGDNLKLMDDLAVLRPTIFASVPRLYNKIYAAITNAVKESGGLRERLYHTAYNAKRHAMINGRNPSPMWDKLVFNKIKARLGGRMRLMTSGASPLSPDVMEFLRICFGEVLEGYGMTETSCVISTMNIGDRSIGHVGSPNPSCEVKLVDVPEMNYTSEDQPYPRGEICVRGPIIFCGYYKDEVQTREVIDEDGWLHTGDIGLWLPGGRLKIIDRKKNIFKLAQGEYIAPEKIENVYAKCKFIAQCFIYGDSFNSSLVAIVAVEPDVLKAWAASEGIQYEDLRQLCADPRATAAVLADMDSIAKEAQLRGFEFAKAVTLVAEPFTLDNGLLTPTFKVKRPQAKAYFAKEISDMYARLLETELARSKL

SEQ ID NO: 179047 - protein, 661 aa, Zea Mays
MSFYSTEQGYSVVLPEKLHTGKWNVYRSAHSPLRLINKFPDNPEIGTLHDNFVYAVETFRDCRYLGTRIRPDGTVGDYKWMTYGEASTSRTAIGSGLIYHGISEGARIGLYFINRPEWIILDHACAAYSYVSVPLYDTLGPDAVQFIVNHATVEVIFCVPQTLSAILSFITQMPCVRLIVVVGGDDSNMPSAPATTECKIMTYNRLHNEGKMSPQTFRPPKPEDIATICYTSGTTGTPKGAVLSHENLIANVAGSSLGIKFYPSDVYISYLPLAHIYERANQVALLHYGVAIGFYQGDNLKLMDDLAVLRPTIFASVPRLYNKIYAAITNAVKESGGLRERLYHTAYNAKRHAMINGRNPSPMWDKLVFNKIKARLGGRMRLMTSGASPLSPDVMEFLRICFGEVLEGYGMTETSCVISTMNIGDRSIGHVGSPNPSCEVKLVDVPEMNYTSEDQPYPRGEICVRGPIIFCGYYKDEVQTREVIDEDGWLHTGDIGLWLPGGRLKIIDRKKNIFKLAQGEYIAPEKIENVYAKCKFIAQCFIYGDSFNSSLVAIVAVEPDVLKAWAASEGIQYEDLRQLCADPRATAAVLADMDSIAKEAQLRGFEFAKAVTLVAEPFTLDNGLLTPTFKVKRPQAKAYFAKEISDMYARLLETELARSKL

SEQ ID NO: 179048 - protein, 513 aa, Zea Mays
MLVRHTHMYLCRFMILSILSFITQMPCVRLIVVVGGDDSNMPSAPATTECKIMTYNRLHNEGKMSPQTFRPPKPEDIATICYTSGTTGTPKGAVLSHENLIANVAGSSLGIKFYPSDVYISYLPLAHIYERANQVALLHYGVAIGFYQGDNLKLMDDLAVLRPTIFASVPRLYNKIYAAITNAVKESGGLRERLYHTAYNAKRHAMINGRNPSPMWDKLVFNKIKARLGGRMRLMTSGASPLSPDVMEFLRICFGEVLEGYGMTETSCVISTMNIGDRSIGHVGSPNPSCEVKLVDVPEMNYTSEDQPYPRGEICVRGPIIFCGYYKDEVQTREVIDEDGWLHTGDIGLWLPGGRLKIIDRKKNIFKLAQGEYIAPEKIENVYAKCKFIAQCFIYGDSFNSSLVAIVAVEPDVLKAWAASEGIQYEDLRQLCADPRATAAVLADMDSIAKEAQLRGFEFAKAVTLVAEPFTLDNGLLTPTFKVKRPQAKAYFAKEISDMYARLLETELARSKL

SEQ ID NO: 179049 - protein, 410 aa, Zea Mays
MSVAAGVSDAAIAVRDKLRGKIGQTKVKRYWPGKAPEWADDVDEDVDLRTARVSLDKAFPRDEDGDVPAKDDRRLRRLAETRAENKEELRADHRRIRQAEIVSTAEEENERQEADADEEDEEAQEERRRRIRARQLLREQEELLPQEEEEPVEAEESEEESEYETDSEDEQMGMAMVKPVFIPKSQRDTIAERERLEEEERQLEELVKKRLEARKIETRQIVVEEIRKEEHIEKALNEEANIEDVDTDDELNEAEEYESWKNREIARIKRDREERDARLKEKEEIEKVRNMTEEERREWERKNPKPLRQTKQKWKFMQKYYHKGAFFQEGADDVIQSAGKEDIYTRDFSEPTGEDKMDKSILPKVMQVKHFGRSGRTKWTHLVNEDTTDWNAHGQQMGLCEQSIMQKWQA

SEQ ID NO: 179050 - protein, 452 aa, Zea Mays
MDRKELEGRNKEGRARTEREILEAVDHPFLPRLYGVAEGDRWSCLLTEFCPGGDLHVLRQRQPHRRFSEAAVRFYAAEVVAALEYIHMMDIVYRDLKPENVLVRGDGHIMLTDFDLSLKCDPTAPTPAHVISDPLSLAGRSGGAASSTSSCAISSSCIVPAASCFQLFPGRGRGRRRRRPRWLRAGKKPSPNNNGGLELELVAEPVELRSTSFVGTHEYLAPEIVAGEGHGSAVDWWTLGVFVFELLYGATPFKGHDNEMTLANIVARALEFPRDRDPPASPAARDLVTALLAKDPARRLGATVGAAAIKRHPFFAGVNWALLRCAPPPYVPPPFSIAKAAAAAGGGGGKDDDDDDVSDDSCPWLQHACHNLAAAVPLAPAPVLPWSVQPPCLCSLLVLIYYYVIRGRGAAWNAGIVRGEHLVFQAGPHKSELVSYVGVVTCVVYRVHRCLQ

SEQ ID NO: 179051 - protein, 594 aa, Zea Mays
MPPDREDAAGAGADVAADELQSVSFGSSSDRSRSRSASTASTATASCSTSSSGPLHQHLSLPAPRRNPSPSPAPTPTLPTQIPRLGAVSLSDIRFLRRLGAGDIGSVYLAEVRRPTPTAGAAGKEKHTSTLAAAAVVVAAKVMDRKELEGRNKEGRARTEREILEAVDHPFLPRLYGVAEGDRWSCLLTEFCPGGDLHVLRQRQPHRRFSEAAVRFYAAEVVAALEYIHMMDIVYRDLKPENVLVRGDGHIMLTDFDLSLKCDPTAPTPAHVISDPLSLAGRSGGAASSTSSCAISSSCIVPAASCFQLFPGRGRGRRRRRPRWLRAGKKPSPNNNGGLELELVAEPVELRSTSFVGTHEYLAPEIVAGEGHGSAVDWWTLGVFVFELLYGATPFKGHDNEMTLANIVARALEFPRDRDPPASPAARDLVTALLAKDPARRLGATVGAAAIKRHPFFAGVNWALLRCAPPPYVPPPFSIAKAAAAAGGGGGKDDDDDDVSDDSCPWLQHACHNLAAAVPLAPAPVLPWSVQPPCLCSLLVLIYYYVIRGRGAAWNAGIVRGEHLVFQAGPHKSELVSYVGVVTCVVYRVHRCLQ

SEQ ID NO: 179052 - protein, 240 aa, Zea Mays
MFDVEYARWLDNHSRRLAELNGALHAHLADGDLRAIVDDALTHHDELFQLKAMAAKSDVFHLITGVWTTPAERCFLWMGGFRPSDLLKTLLPQLDPLTEQQVVGICSLQQSSQQAEEALSQGLEQLHQSLADTMAGGSLTDDANMSFMSQMALALGKLANLEGFVIQADNLRQQTLHQMHRILTVRQAARCLLAIGEYHNRLRALSSLWASRPREILVTDEGNCEISIAAQPSQNQFSTF

SEQ ID NO: 179053 - protein, 394 aa, Zea Mays
MGGEVSDIVFAKSGPTVILLAGLQGVGKTTVCAKLAFYLKKLGKSCMLVAADIYRPAAIDQLTILGKQVGVPVYSEGTEAKPTQITKNAMEEAKSKNIDAIVVDTAGRLQIDRSMMDELKEVKKAVNPTEVLLVVDAMTGQEAAALVTTFNIEIGITGAILTKLDGDSRGGAALSVKEVSGRPIKFVGRGERLEDLELFYPDRMAQRVLGMGDVLSFVEKTQEVMRQEEAIELQKKIMSAKFDFNDFLKQSQNVAKMGSMSRIIGMMPGMNKITPAQIREAEKRLAFVESMINAMTAEEREKPELLAESRERRIRVAEESGKTEQEVSQLVAQLFQMRAQMQKLMGMVQGQEAIAGMGDLMDSLKSEEKAPPGTARRKRRNNTSKQRDLDAVLS

SEQ ID NO: 179054 - protein, 254 aa, Zea Mays
MFGQLTTGLESAWNKLRGVGVLTKENIAEPMRDIRRALLEADVSSLHFQVSLPVVRRFVSSVSDKALGANAIRGVRPDQQLVKIVHDELVQLMGGEVSDIVFAKSGPTVILLAGLQGVGKTTVCAKLAFYLKKLGKSCMLVAADIYRPAAIDQLTILGKQVGVPVYSEGTEAKPTQITKNAMEEAKSKNIDAIVVDTAGRLQIDRSMMDELKEVKKAVNPTEVLLVVDAMTGQEAAGLWEAHKICWAWGAIRGP

SEQ ID NO: 179055 - protein, 348 aa, Zea Mays
MLVAADIYRPAAIDQLTILGKQVGVPVYSEGTEAKPTQITKNAMEEAKSKNIDAIVVDTAGRLQIDRSMMDELKEVKKAVNPTEVLLVVDAMTGQEAAALVTTFNIEIGITGAILTKLDGDSRGGAALSVKEVSGRPIKFVGRGERLEDLELFYPDRMAQRVLGMGDVLSFVEKTQEVMRQEEAIELQKKIMSAKFDFNDFLKQSQNVAKMGSMSRIIGMMPGMNKITPAQIREAEKRLAFVESMINAMTAEEREKPELLAESRERRIRVAEESGKTEQEVSQLVAQLFQMRAQMQKLMGMVQGQEAIAGMGDLMDSLKSEEKAPPGTARRKRRNNTSKQRDLDAVLS

SEQ ID NO: 179056 - protein, 479 aa, Zea Mays
MFGQLTTGLESAWNKLRGVGVLTKENIAEPMRDIRRALLEADVSLPVVRRFVSSVSDKALGANAIRGVRPDQQLVKIVHDELVQLMGGEVSDIVFAKSGPTVILLAGLQGVGKTTVCAKLAFYLKKLGKSCMLVAADIYRPAAIDQLTILGKQVGVPVYSEGTEAKPTQITKNAMEEAKSKNIDAIVVDTAGRLQIDRSMMDELKEVKKAVNPTEVLLVVDAMTGQEAAALVTTFNIEIGITGAILTKLDGDSRGGAALSVKEVSGRPIKFVGRGERLEDLELFYPDRMAQRVLGMGDVLSFVEKTQEVMRQEEAIELQKKIMSAKFDFNDFLKQSQNVAKMGSMSRIIGMMPGMNKITPAQIREAEKRLAFVESMINAMTAEEREKPELLAESRERRIRVAEESGKTEQEVSQLVAQLFQMRAQMQKLMGMVQGQEAIAGMGDLMDSLKSEEKAPPGTARRKRRNNTSKQRDLDAVLS

SEQ ID NO: 179057 - protein, 236 aa, Zea Mays
MLVAADIYRPAAIDQLTILGKQVGVPVYSEGTEAKPTQITKNAMEEAKSKNIDAIVVDTAGRLQIDRSMMDELKEVKKAVNPTEVLLVVDAMTGQEAAALVTTFNIEIGITGAILTKLDGDSRGGAALSVKEVSGRPIKFVGRGERLEDLELFYPDRMAQRVLGMGDVLSFVEKTQEVMRQEEAIELQKKIMSAKFDFNDFLKQSQNVAKMGSMSRIIGMMPGMNKLRKDLHSWSQ

SEQ ID NO: 179058 - protein, 191 aa, Zea Mays
MAQRVLGMGDVLSFVEKTQEVMRQEEAIELQKKIMSAKFDFNDFLKQSQNVAKMGSMSRIIGMMPGMNKITPAQIREAEKRLAFVESMINAMTAEEREKPELLAESRERRIRVAEESGKTEQEVSQLVAQLFQMRAQMQKLMGMVQGQEAIAGMGDLMDSLKSEEKAPPGTARRKRRNNTSKQRDLDAVLS

SEQ ID NO: 179059 - protein, 500 aa, Zea Mays
MIRLPTYAAFSLLATASAAYYAFSSREQFYPAMVYLSTSKICFVLLLNTGLVAMCVAWQLARRLFLGSLREAEVERLNEQSWREVIEILFAVTIFRQDFSVSFLAMVAALLLVKALHWLAQKRVEYIETTPSVPLLSHIRIVSFMVFLLTVDCLFLSNSLRSLIQKQEASVAIFFSFEYMILATSTVSTFVKYIFYVSDMLMEGQWEKKAVYTFYLELISDLVHLSLYMLFFIAIFLNYGVPLHLIRELYETFRNFRIRIADYVRYRKITSNMNERFPDATSEELDVSDATCIICREEMTTAKKLLCGHLFHVHCLRSWLERQHTCPTCRAPIIPADNGHAVSARQHGAQAGVQPGTATPSSEGAPGENMSRHQAKLEAAAAAASLYGRSFVYPPANTLKSRSVPPQPASSTPQSEASSSNHQSQKDQEMQSRNSSDGLVPLPLNADGAVGSGTSTRDLENSLQKAQENFIKSQIEIQLQMVQRGAAGPPSNENTEHTEE

SEQ ID NO: 179060 - protein, 502 aa, Zea Mays
MIRLPTYAAFSLLATASAAYYAFSSREQFYPAMVYLSTSKICFVLLLNTGLVAMCVAWQLARRLFLGSLREAEVERLNEQSWREVIEILFAVTIFRQDFSVSFLAMVAALLLVKALHWLAQKRVEYIETTPSVPLLSHIRIVSFMVFLLTVDCLFLSNSLRSLIQKQEASVAIFFSFEYMILATSTVSTFVKYIFYVSDMLMEGQWEKKAVYTFYLELISDLVHLSLYMLFFIAIFLNYGVPLHLIRELYETFRNFRIRIADYVRYRKITSNMNERFPDATSEELDVSDATCIICREEMTTAKKLLCGHLFHVHCLRSWLERQHTCPTCRAPIIPADNGHAVSARQHGAQAGVQPGTATPSSEGAPGENMSRHQAKLEAAAAAASLYGRSFVYPPANTLKRSVPPQPASSTPQSEASSSNHQSQKDQEMQSRNSSDGLVPLPLNADGAVGSGTSTRDLENSLQKAQENFIKSQIEMLQIQLQMVQRGAAGPPSNENTEHTEE

SEQ ID NO: 179061 - protein, 224 aa, Zea Mays
MILATSTVSTFVKYIFYVSDMLMEGQWEKKAVYTFYLELISDLVHLSLYMLFFIAIFLNYGVPLHLIRELYETFRNFRIRIADYVRYRKITSNMNERFPDATSEELDVSDATCIICREEMTTAKKLLCGHLFHVHCLRSWLERQHTCPTCRAPIIPADNGHAVSARQHGAQAGVQPAAGTATPSSEGAPGENMSRHQAKLEAAAAAASLYGRSFVYPPANTLKS

SEQ ID NO: 179062 - protein, 66 aa, Zea Mays
MPRDLSRSRSPPRRRWRSPSPARYRGRRGRRDRSPSPIRSRSPYRSSYSFYSVLYCCGMLHPCNSV

SEQ ID NO: 179063 - protein, 129 aa, Zea Mays
MPRDLSRSRSPPRRRWRSPSPARYRGRRGRRDRSPSPIRSRSPYRSSYRRRSPLPSPRRHKSRSPSPRRRKSPSPSQKRYRRKRSPSVTSSPVAASQSSHLGLAENKNVIDTQRLEEEKKRLYRRELLL

SEQ ID NO: 179064 - protein, 143 aa, Zea Mays
MPRDLSRSRSPPRRRWRSPSPARYRGRRGRRDRSPSPIRSRSPYRSSYRRRSPLPSPRRHKSRSPSPRRRKSPSPSQKRYRRKRSPSVTSSPVAASQSSHLGLAENKNVIDTQRLEEEKKREHASVELMKEIKEGLYRRELLL

SEQ ID NO: 179065 - protein, 508 aa, Zea Mays
MAVTLLRGMRTPIPFRSNSGFFSTVLRPRLSRFTTRAESAQATEPKAAPRSIQLATKEAAEQKTQGFEAIIGIETHVQLSTVTKAFCSCPYSYGSQPNSTICPTCMGHPGTLPVLNEKVVECAVKLGLALNCEISMTSKFDRKQYFYPDLPKGYQISQFDIPIAKKGCVDLDLPVEFGGGHRKFGVTRVHMEEDAGKLLHSESSSYSQVDLNRAGVPLLEIVSEPDMRTGIEAAEYGAELQRIVRYLGVSNGNMQEGSLRCDVNVSVRPVGQSEFGTKVEIKNMNSFSAINRAIDYEISRQILLHKEGQADQIVQETRLWDESSQKTFTMRKKEGLADYRYFPEPDLPEVVITSDYINEISKSMPELPEAKRRRYENMGLSMQDVLFLANDDNIGHFFDSTLEHGADAKLAANWIMGDIAAYLKDEKVSIDEIKLTPLELSELIASIKNGTISGKIGKEILAELIAKGGTVKAVIEEKDLVQIADPAAIEAMVDKVIADNPKQLEQYR

SEQ ID NO: 179066 - protein, 217 aa, Zea Mays
MRKKEGLADYRYFPEPDLPEVVITSDYINEISKSMPELPEAKRRRYENMGLSMQDVLFLANDDNIGHFFDSTLEHGADAKLAANWIMGDIAAYLKDEKVSIDEIKLTPLELSELIASIKNGTISGKIGKEILAELIAKGGTVKAVIEEKDLVQIADPAAIEAMVDKVIADNPKQLEQYRAGKTKLQGFFAGQVMKASKGKANPVLLNKILGEKLNAK

SEQ ID NO: 179067 - protein, 81 aa, Zea Mays
MASFLYISDNDITFSASGDNILPFIHGGGAPPTPSGNDNFLPHISDNNIAFRHLPVVTSPLLHMASMTLSLHPTMVFPLDG

SEQ ID NO: 179068 - protein, 160 aa, Zea Mays
MKKGFGRPNEEFRPNIVEEIPFSEEVACGGYHTCVVTDSGDLYSWGSNENGCLGLGGTDMVRSPEILKSSLFKLPVSKVSCGWKHTAVVSGDDIYTWGWGGANGTFFEEGHSSGGQLGHGNDVDYFEPMMVPFGTNARAVHVSCGFNHTGAIYECSEDFD

SEQ ID NO: 179069 - protein, 158 aa, Zea Mays
MGFGRPNEEFRPNIVEEIPFSEEVACGGYHTCVVTDSGDLYSWGSNENGCLGLGGTDMVRSPEILKSSLFKLPVSKVSCGWKHTAVVSGDDIYTWGWGGANGTFFEEGHSSGGQLGHGNDVDYFEPMMVPFGTNARAVHVSCGFNHTGAIYECSEDFD

SEQ ID NO: 179070 - protein, 416 aa, Zea Mays
MWRATRRSPPFLRWLSSDAASSKAPRQRVAALWGNGDYGRLGLGSLESRWSPTVCPFFLARAADPPASLACGGAHTLFLTQNGRVFATGLNDFGQLGIGTSVTHMLEPVEISGFHERVVEVSAGNHHSCAVTADGKLFVWGRNSGGQLGLGKGKVVSTPTKVDCLTDLRVKTVALGSEHSIAVTEEGEVLSWGAAGSGRLGHGRQSSILGFSLTSTEYTPRLIKNFDGIKIKKIAAGMLHSACIDEKGTLFIFGQKTEKGFGRPNEEFRPNIVEEIPFSEEVACGGYHTCVVTDSGDLYSWGSNENGCLGLGGTDMVRSPEILKSSLFKLPVSKVSCGWKHTAVVSGDDIYTWGWGGANGTFFEEGHSSGGQLGHGNDVDYFEPMMVPFGTNARAVHVSCGFNHTGAIYECSEDFD

SEQ ID NO: 179071 - protein, 271 aa, Zea Mays
MWRATRRSPPFLRWLSSDAASSKAPRQRVAALWGNGDYGRLGLGSLESRWSPTVCPFFLARAADPPASLACGGAHTLFLTQNGRVFATGLNDFGQLGIGTSVTHMLEPVEISGFHERVVEVSAGNHHSCAVTADGKLFVWGRNSGGQLGLGKGAGKVVSTPTKVDCLTDLRVKTVALGSEHSIAVTEEGEVLSWGAAGSGRLGHGRQSSILGFSLTSTEYTPRLIKNFDGIKIKKIAAGMLHSACIDEKGTLFIFGQKTEKTERRIQTKYC

SEQ ID NO: 179072 - protein, 327 aa, Zea Mays
MWRATRRSPPFLRWLSSDAASSKAPRQRVAALWGNGDYGRLGLGSLESRWSPTVCPFFLARAADPPASLACGGAHTLFLTQNGRVFATGLNDFGQLGIGTSVTHMLEPVEISGFHERVVEVSAGNHHSCAVTADGKLFVWGRNSGGQLGLGKGAGKVVSTPTKVDCLTDLRVKTVALGSEHSIAVTEEGEVLSWGAAGSGRLGHGRQSSILGFSLTSTEYTPRLIKNFDGIKIKKIAAGMLHSACIDEKGTLFIFGQKTEKGFGRPNEEFRPNIVEEIPFSEEVACGGYHTCVVTDSGDLYSWGSNENGCLGLGGILWLEAHSCSFR

SEQ ID NO: 179073 - protein, 307 aa, Zea Mays
MRVFAPPTRPIAILPASEPVSSPCCPRGLAVAASSTFLSSAPSAMWRATRRSPPFLRWLSSDAASSKAPRQRVAALWGNGDYGRLGLGSLESRWSPTVCPFFLARAADPPASLACGGAHTLFLTQNGRVFATGLNDFGQLGIGTSVTHMLEPVEISGFHERVVEVSAGNHHSCAVTADGKLFVWGRNSGGQLGLGKGAGKVVSTPTKVDCLTDLRVKTVALGSEHSIAVTEEGEVLSWGAAGSGRLGHGRQSSILGFSLTSTEYTPRLIKNFDGIKIKKIAAGMLHSACIDEKGIWKTERRIQTKYC

SEQ ID NO: 179074 - protein, 404 aa, Zea Mays
MRVFAPPTRPIAILPASEPVSSPCCPRGLAVAASSTFLSSAPSAMWRATRRSPPFLRWLSSDAASSKAPRQRVAALWGNGDYGRLGLGSLESRWSPTVCPFFLARAADPPASLACGGAHTLFLTQNGRVFATGLNDFGQLGIGTSVTHMLEPVEISGFHERVVEVSAGNHHSCAVTADGKLFVWGRNSGGQLGLGKGAGKVVSTPTKVDCLTDLRVKTVALGSEHSIAVTEEGEVLSWGAAGSGRLGHGRQSSILGFSLTSTEYTPRLIKNFDGIKIKKIAAGMLHSACIDEKGTLFIFGQKTEKGFGRPNEEFRPNIVEEIPFSEEVACGGYHTCVVTDSGDLYSWGSNENGCLGLGGTDMVRSPEILKSSLFKLPVSKVSCGWKHTAVVSAIRYRCALSTSK

SEQ ID NO: 179075 - protein, 137 aa, Zea Mays
MMQGRRVGAGPHGRAAGEGEVPPVRGDLRGGAAGRRRAGPPDRRRVSPNNRRGEQQGDGDDLHARRRRCARADHPAGVPLPHRRERRYLLRGRQRGRAAGEHHGGGQDRGDASDFLPCFIHLMTLSVCDTLVICRCC

SEQ ID NO: 179076 - protein, 322 aa, Zea Mays
MLPAAATAAAPDPSCSTFPSSRRAPPVASRHSFVVATRATGSSGLFSLRCHGRLPCHSRCRCRCRAWWNNERARRVSGASRGRHCRAVASAPDHMDEQPARGRYHPFEEISEAVQLDDGEPAHLTDAESARTIVEVNNKATVMISTLVGDGVHERIILPEFPYLTDENGDIYFEVDNEDALLESIMGEDKIAHVIIGLDNTQVFADLDLVSASATEFAQEDDNGDEDDDGSDDDEESDFDEDFNDVEGVFSVDEDDEDDREEEEEEDDDDDDEDLPSWSNLETVNSCHPLYFARMIVEVTRQRKIQRRVVPPFSRSRSSASS

SEQ ID NO: 179077 - protein, 283 aa, Zea Mays
MLPAAATAAAPDPSCSTFPSSRRAPPVASRHSFVVATRATGSSGLFSLRCHGRLPCHSRCRCRCRAWWNNERARRVSGASRGRHCRAVASAPDHMDEQPARGRYHPFEEISEAVQLDDGEPAHLTDAESARTIVEVNNKATVMISTLVGDGVHERIILPEFPYLTDENGDIYFEVDNEDALLESIMGEDKIATLSSDWTTHRSSPTWISSRPPPQSLRKKTTTAMRTMTAPTMMRKATLTRTSTTWRVCFRLMRTTKMTERKRRRRTTTTMTRTYQAGPTLRP

SEQ ID NO: 179078 - protein, 204 aa, Zea Mays
MRVRALIQNQVMVMLVDSGSSTSFVSQRIVDKLALQTEPAAPDRVKVANGEFMLSTRRVAALEWWADGHTYISDMRVLDLEAYDAILGYDWLKGRSPMQCDWDNKILLFKDRGVEVQLKGDGMESKEVLQVSAAQLQRWMKGNQVWVLVLLESMQEEVVERHQEPLQLILKEFEDVFATPTGLPPAVLLECMITIYLCCQVPYL

SEQ ID NO: 179079 - protein, 105 aa, Zea Mays
MYVCMCPRGHTYAPDRTLSVSLQTHDDEPDTQQYHTIHTLQAALDQAACRPNASSSDVAVAGALGRHGGAVAVAIGAVVVDGVAAPDLGQAAVLRGVEVPELRLQ

SEQ ID NO: 179080 - protein, 155 aa, Zea Mays
MEWLQRNKYFHVVVKGVERDGWKFVLLARFSPLPSYIINYALSATDVGFFRDFLFPTVIGCLPMILQNVSIVSLAGAAVASTTGSNKSHIYSYLFPAIGIVSSVLISWRIKQYSSALAVPEELQSSPTNGDHNGDAKLASAPSKNTGSGKTRKRR

SEQ ID NO: 179081 - protein, 148 aa, Zea Mays
MRRKHTKSIKSKFNDLMSTHPPLNEAYSDVCVFSTHAAFSLRSSICYIDLSNLPAELKKLKHKKCLVQSPQLLHGPIRLWHRNPILDSIEGLQCRHRHSWKSSTDGHRAPRWAVLSTAARTACVGSILTPAPTSAPAAQHSDDTSSSL

SEQ ID NO: 179082 - protein, 73 aa, Zea Mays
MRRKHTKSIKSKFNDLMSTHPPLNEAYSDVCVFSTHAAFSLRSSICYIDLSNLPAELKKLKHKKCLVQSPQLL

SEQ ID NO: 179083 - protein, 78 aa, Zea Mays
MKFGGSSLASAERMQEAGEKAVSCGGGGASEIPELAVIRELNLRTIDELGLDKSIVSGMLLFAPLCSWNASAVPLALS

SEQ ID NO: 179084 - protein, 381 aa, Zea Mays
MSSTTADTSPESVGSCRPPTPPTSLPPHSAPAAALRGAPVRRQLDFADADADSCAGAGGDLDDYDDFLIRAVDDIERGYNEAKRRAPPCVCGRGYCAVQRDDQSGGWMYVCSSQPKCKHVAMCKEVDQNPQSPPVVRSDPKTSNRCAFNVPRTPVNDARTQINNVTLEGAGATTPINVSPQAAVAATPFSYTSKGVGAMTPVHVSPQVHVSPQGAHATAAVKCTAGKCKILRVGNEDWYVCPIPKGQGACSYKVPVTDAVGAGDNDDANGSANPAQPNDDEWPFDVINDEIVPTPRAVAQQKSPSTPHHQRSGTARTPAPSPVTPFGSRGAMTGRPNDTCFGCGEKGHWISACPKPSPRSRCFRCGVVGHRPANCPQPRGS

SEQ ID NO: 179085 - protein, 451 aa, Zea Mays
MSSTTADTSPESVGSCRPPTPPTSLPPHSAPAAALRGAPVRRQLDFADADADSCAGAGGDLDDYDDFLIRAVDDIERGYNEAKRRAPPCVCGRGYCAVQRDDQSGGWMYVCSSQPKCKHVAMCKEVDQNPQSPPVVRSDPKTSNRCAFNVPRTPVNDARTQINNVTLEGAGATTPINVSPQAAVAATPFSYTSKGVGAMTPVHVSPQGAGATTPINVSPQAAVAATPFSYTLKGVGAMTPVHVSPQGVGARTPVHVSPQGAHATAAVKVSPQWNRSNDGRWNRSNDGRPICQCTAGKCKILRVGNEDWYVCPIPKGQGACSYKVPVTDAVGAGDNDDANGSANPAQPNDDEWPFDVINDEIVPTPRAVAQQKSPSTPHHQRSGTARTPAPSPVTPFGSRGAMTGRPNDTCFGCGEKGHWISACPKPSPRSRCFRCGVVGHRPANCPQPRGS

SEQ ID NO: 179086 - protein, 296 aa, Zea Mays
MSSTTADTSPESVGSCRPPTPPTSLPPHSAPAAALRGAPVRRQLDFADADADSCAGAGGDLDDYDDFLIRAVDDIERGYNEAKRRAPPCVCGRGYCAVQRDDQSGGWMYVCSSQPKCKHVAMCKEVDQNPQSPPVVRSDPKTSNRCAFNVPRTPVNDARTQINNVTLEGAGATTPINVSPQAAVAATPFSYTSKGVGAMTPVHVSPQGAGATTPINVSPQAAVAATPFSYTLKGVGAMTPVHVSPQGLQFMLVHKVHTLQQQLKLVPNGIDLMMDDGIDLMMDGQFASVLQGSVKY

SEQ ID NO: 179087 - protein, 214 aa, Zea Mays
MWRHPDGEFPIHICSRASPYHSAPLSRQAAAQATMVAALLRRALHLRRVLPSPAVTAAASQRLIPAFSTTPTPTPTTSQQNAATTTIDLSSDESRRRLLNRLVYRSKQRGFLELDLVLGTWVEQHVHAMDEANIRALLQVLDLENPDLWKWLTSQEQPPEDLNSNPVFAAIKSKVTDNLTKHASPETRSTPGQPWVRGWDDIKKGKDGPKYGNQ

SEQ ID NO: 179088 - protein, 290 aa, Zea Mays
MKFLDKLYNKKQIPWVNLVWNTYYSDGKTPHASKFMGSFWWRDVLKLCDLFRGISNCKVGDGKTVLFWHDLWNDNIRRNKFPRLFTFAKNQSISVASFLTQENLTDNFHLPLTEQANTELQQLLDEVQQIQESVIEPEEKDSWSYIWGNSTYSSTKLYHYTFKNVNPPKPFVWIWESRCSNKLKVFTWLLLMDRLNTRNILKRKNFKVQGDNYSCALCQLQREETAFHLFFNCPFSQDCWRHLNIQWNHQIDFFATFQQARDLHGSPFFMDRDGNLIRGFGYPSDIRPDG

SEQ ID NO: 179089 - protein, 449 aa, Zea Mays
MPIVKNQSSTQEVKHIACSQCLAPGHLVSDCRNQLLCWFCARYGHKRRSCLQWKCGRHIKWAEKAAMPSMEPRARQSDGMEAEPALSPSICHAPAAQHAGNNNSTSGASSIISEASSNAEERYSPANGLDMQVNLPGLNTITAQMPAQPTREMQPNSVAEQAQLVNQGTQEVQLNQHHRENTVLTPITSFHNSNIVPNVEVTWLSAAIPELHSSLQCLMNEFKFKINYLNTGPDQAPKLTIDILPRVETTYEMPTLFGNDHLLTFQNHATDPSSAAETMITMHNRIVTKFYTRRPIHLRKRNVHSPQPPIFSAPQTTEVSNTGKRVTSDVSDNKLRRSTRIKLANDGCKTQTGTPRCSCCKEAPHHKGKARTKRGQSSFNIPLPNLISDVTFSSLDEIDKSTNFPPLPVLELQRVATKMCGLAPAEVATELLLSEEEPADAQNKEVING

SEQ ID NO: 179090 - protein, 63 aa, Zea Mays
MCLGSFPMTSVADDFHNLREGLAQARSAIIQLRDLLATKVESDRRLATATRLQATARGFLALA

SEQ ID NO: 179091 - protein, 883 aa, Zea Mays
MPQFCIKVAHILTGLYGSDWEKRLELKELQANVVHLSLLSRHYKRAYQELFLPNDGKCSDSSSESNNQEVSDYYRFGWLLFLVLRIQTFSRFKDLVTSTNELVSVLAVLIIHIPVRLRNFDIKDSSYFGKKSDRGVSLIASLCEKYHTSEDELSKALEKTNTLILDILKKKPWTATSACQQDNLTFIDPEGLTVFKDLLQGGSLKSSLLILEKEYENAINTRGELDERMFANDEDSLLGSGSLSGGAINLPGTKRKYDVMASPAKSISSPNPMSPPRFCLSPKGNSFCNSKMAPITPVSTAMTTAKWLRSTVSPLPSKPSGELLRFFSACDKDVTDDIVHRAGIILGAIFTSSSFGEQICTNMRSANRMDAIWTEQRKMEALKLYYRVLESMCRAESQILSGNNLTLLLSNERFHRCMIACSAELVLATHKTVTLMFPAVLEKTGITAFDLSKVIEGFVRHEDTLPRELKRHLNSLEERLLESMSWEKGSSMYNSLIVARPVLSIEINRLGLLAEPMPSLDAIAAHHNISMGGLPPLPFQKQERLQDKDEIRSPKRACTERRHVPVDSNSFRSQVKDSIKLKLPPPLQSAFASPTRPNPAAGGETCAETGIAVFFSKISKLAAIRIRSLCERLQLSQQVLERVYSLVQQILSQQTGLFFNRHIDQIILCSIYGVAKISQLQLSFKEIVFGYRKQPQCKPQVFRSVYVHWPPTSHNGKTGEDHVDIITFYNEVFIPAVKPLLVEVGPGASPKRKEEGKGPYPESPRLARFPNLPDMSPKKVSATHNVYVSPLRSSKMDTLLSPSPKSYYACVGESTYAFQSPSKDLKAINNRLNSWKKVSGRLNFDIVSDLVVASSLNGVQNAKPAATEVVPTKTPVKCEPSES

SEQ ID NO: 179092 - protein, 945 aa, Zea Mays
MDGVAKPSTSSGSGVTDSASAAAASIDERFADLCESKLGLDDSMTRQAMQLFNETKNIKSSMSSLGGGSPEEVERFWSACVMYCVSRLSKARRSKESGSVSLCQILRASKLNIVDFFKEMPQFCIKVAHILTGLYGSDWEKRLELKELQANVVHLSLLSRHYKRAYQELFLPNDGKCSDSSSESNNQEVSDYYRFGWLLFLVLRIQTFSRFKDLVTSTNELVSVLAVLIIHIPVRLRNFDIKDSSYFGKKSDRGVSLIASLCEKYHTSEDELSKALEKTNTLILDILKKKPWTATSACQQDNLTFIDPEGLTVFKDLLQGGSLKSSLLILEKEYENAINTRGELDERMFANDEDSLLGSGSLSGGAINLPGTKRKYDVMASPAKSISSPNPMSPPRFCLSPKGNSFCNSKMAPITPVSTAMTTAKWLRSTVSPLPSKPSGELLRFFSACDKDVTDDIVHRAGIILGAIFTSSSFGEQICTNMRSANRMDAIWTEQRKMEALKLYYRVLESMCRAESQILSGNNLTLLLSNERFHRCMIACSAELVLATHKTVTLMFPAVLEKTGITAFDLSKVIEGFVRHEDTLPRELKRHLNSLEERLLESMSWEKGSSMYNSLIVARPVLSIEINRLGLLAEPMPSLDAIAAHHNISMGGLPPLPFQKQERLQDKDEIRSPKRACTERRHVPVDSNSFRSQVKDSIKLKLPPPLQSAFASPTRPNPAAGGETCAETGIAVFFSKISKLAAIRIRSLCERLQLSQQVLERVYSLVQQILSQQTGLFFNRHIDQIILCSIYGVAKISQLQLSFKEIVFGYRKQPQCKPQVFRSVYVHWPPTSHNGKTGEDHVDIITFYNEVFIPAVKPLLVEVGPGASPKRKEEGKVGPYPESPRLARFPNLPDMSPKKVSATHNVYVSPLRSSKPKELLCMCRREYLCVPKPLQGPEGYQQPPK

SEQ ID NO: 179093 - protein, 655 aa, Zea Mays
MFANDEDSLLGSGSLSGGAINLPGTKRKYDVMASPAKSISSPNPMSPPRFCLSPKGNSFCNSKMAPITPVSTAMTTAKWLRSTVSPLPSKPSGELLRFFSACDKDVTDDIVHRAGIILGAIFTSSSFGEQICTNMRSANRMDAIWTEQRKMEALKLYYRVLESMCRAESQILSGNNLTLLLSNERFHRCMIACSAELVLATHKTVTLMFPAVLEKTGITAFDLSKVIEGFVRHEDTLPRELKRHLNSLEERLLESMSWEKGSSMYNSLIVARPVLSIEINRLGLLAEPMPSLDAIAAHHNISMGGLPPLPFQKQERLQDKDEIRSPKRACTERRHVPVDSNSFRSQVKDSIKLKLPPPLQSAFASPTRPNPAAGGETCAETGIAVFFSKISKLAAIRIRSLCERLQLSQQVLERVYSLVQQILSQQTGLFFNRHIDQIILCSIYGVAKISQLQLSFKEIVFGYRKQPQCKPQVFRSVYVHWPPTSHNGKTGEDHVDIITFYNEVFIPAVKPLLVEVGPGASPKRKEEGKGPYPESPRLARFPNLPDMSPKKVSATHNVYVSPLRSSKMDTLLSPSPKSYYACVGESTYAFQSPSKDLKAINNRLNSWKKVSGRLNFDIVSDLVVASSLNGVQNAKPAATEVVPTKTPVKCEPSES

SEQ ID NO: 179094 - protein, 828 aa, Zea Mays
MRPRTSSPACLPWAVDRIVDFFKEMPQFCIKVAHILTGLYGSDWEKRLELKELQANVVHLSLLSRHYKRAYQELFLPNDGKCSDSSSESNNQEVSDYYRFGWLLFLVLRIQTFSRFKDLVTSTNELVSVLAVLIIHIPVRLRNFDIKDSSYFGKKSDRGVSLIASLCEKYHTSEDELSKALEKTNTLILDILKKKPWTATSACQQDNLTFIDPEGLTVFKDLLQGGSLKSSLLILEKEYENAINTRGELDERMFANDEDSLLGSGSLSGGAINLPGTKRKYDVMASPAKSISSPNPMSPPRFCLSPKGNSFCNSKMAPITPVSTAMTTAKWLRSTVSPLPSKPSGELLRFFSACDKDVTDDIVHRAGIILGAIFTSSSFGEQICTNMRSANRMDAIWTEQRKMEALKLYYRVLESMCRAESQILSGNNLTLLLSNERFHRCMIACSAELVLATHKTVTLMFPAVLEKTGITAFDLSKVIEGFVRHEDTLPRELKRHLNSLEERLLESMSWEKGSSMYNSLIVARPVLSIEINRLGLLAEPMPSLDAIAAHHNISMGGLPPLPFQKQERLQDKDEIRSPKRACTERRHVPVDSNSFRSQVKDSIKLKLPPPLQSAFASPTRPNPAAGGETCAETGIAVFFSKISKLAAIRIRSLCERLQLSQQVLERVYSLVQQILSQQTGLFFNRHIDQIILCSIYGVAKISQLQLSFKEIVFGYRKQPQCKPQVFRSVYVHWPPTSHNGKTGEDHVDIITFYNEVFIPAVKPLLVEVGPGASPKRKEEGKGPYPESPRLARFPNLPDMSPKKVSATHNVYVSPLRSSKVRYLTEIFS

SEQ ID NO: 179095 - protein, 884 aa, Zea Mays
MPQFCIKVAHILTGLYGSDWEKRLELKELQANVVHLSLLSRHYKRAYQELFLPNDGKCSDSSSESNNQEVSDYYRFGWLLFLVLRIQTFSRFKDLVTSTNELVSVLAVLIIHIPVRLRNFDIKDSSYFGKKSDRGVSLIASLCEKYHTSEDELSKALEKTNTLILDILKKKPWTATSACQQDNLTFIDPEGLTVFKDLLQGGSLKSSLLILEKEYENAINTRGELDERMFANDEDSLLGSGSLSGGAINLPGTKRKYDVMASPAKSISSPNPMSPPRFCLSPKGNSFCNSKMAPITPVSTAMTTAKWLRSTVSPLPSKPSGELLRFFSACDKDVTDDIVHRAGIILGAIFTSSSFGEQICTNMRSANRMDAIWTEQRKMEALKLYYRVLESMCRAESQILSGNNLTLLLSNERFHRCMIACSAELVLATHKTVTLMFPAVLEKTGITAFDLSKVIEGFVRHEDTLPRELKRHLNSLEERLLESMSWEKGSSMYNSLIVARPVLSIEINRLGLLAEPMPSLDAIAAHHNISMGGLPPLPFQKQERLQDKDEIRSPKRACTERRHVPVDSNSFRSQVKDSIKLKLPPPLQSAFASPTRPNPAAGGETCAETGIAVFFSKISKLAAIRIRSLCERLQLSQQVLERVYSLVQQILSQQTGLFFNRHIDQIILCSIYGVAKISQLQLSFKEIVFGYRKQPQCKPQVFRSVYVHWPPTSHNGKTGEDHVDIITFYNEVFIPAVKPLLVEVGPGASPKRKEEGKVGPYPESPRLARFPNLPDMSPKKVSATHNVYVSPLRSSKMDTLLSPSPKSYYACVGESTYAFQSPSKDLKAINNRLNSWKKVSGRLNFDIVSDLVVASSLNGVQNAKPAATEVVPTKTPVKCEPSES

SEQ ID NO: 179096 - protein, 446 aa, Zea Mays
MTLDSYSLNIAFYATARLPSVSVGAQLHSLSVKLGLVSDTFVLNSLINMYSSCSYPTTARQVLDSAPQGACDTVSWNTIISGYLRCGMPNKALQAFGQMVKEPVRLDDVTLLNALVASAKAGKAKVGRLCHSLVVVNGAGINCYMGSSLISMYAKCGLVEDARKVFHGMHERNVVCWTSMISGYTQLGKFKKAVDLFRDMQITGMKADDGTIATVVSSCAQMGALDLGRYVHAYCDVHGLGKELSVKNSLIDMYSKCGDITKAHEIFCGLTKRDVFSWTAMIMGFTVNGLCNEALDLFAQMEGEGKVMPNEVTFLGVLTSCSHGGLVEQGFHHFQRMSMVYNLAPRIEHYGCMVDLLGRAKLLTEAEQFINGMPIAPDVVVWRSLLFACRACGEVGLAEFVAERILELEPKKCAGHVLLSNVYAATSRWVDVNKLRTSMDSCRMTL

SEQ ID NO: 179097 - protein, 435 aa, Zea Mays
MTLDSYSLNIAFYATARLPSVSVGAQLHSLSVKLGLVSDTFVLNSLINMYSSCSYPTTARQVLDSAPQGACDTVSWNTIISGYLRCGMPNKALQAFGQMVKEPVRLDDVTLLNALVASAKAGKAKVGRLCHSLVVVNGAGINCYMGSSLISMYAKCGLVEDARKVFHGMHERNVVCWTSMISGYTQLGKFKKAVDLFRDMQITGMKADDGTIATVVSSCAQMGALDLGRYVHAYCDVHGLGKELSVKNSLIDMYSKCGDITKAHEIFCGLTKRDVFSWTAMIMGFTVNGLCNEALDLFAQMEGEGKVMPNEVTFLGVLTSCSHGGLVEQGFHHFQRMSMVYNLAPRIEHYGCMVDLLGRAKLLTEAEQFINGMPIAPDVVVWRSLLFACRACGEVGLAEFVAERILELEPKKCAGHVLLSNVYAATSSFMIKQEL

SEQ ID NO: 179098 - protein, 640 aa, Zea Mays
MTLDSYSLNIAFYATARLPSVSVGAQLHSLSVKLGLVSDTFVLNSLINMYSSCSYPTTARQVLDSAPQGACDTVSWNTIISGYLRCGMPNKALQAFGQMVKEPVRLDDVTLLNALVASAKAGKAKVGRLCHSLVVVNGAGINCYMGSSLISMYAKCGLVEDARKVFHGMHERNVVCWTSMISGYTQLGKFKKAVDLFRDMQITGMKADDGTIATVVSSCAQMGALDLGRYVHAYCDVHGLGKELSVKNSLIDMYSKCGDITKAHEIFCGLTKRDVFSWTAMIMGFTVNGLCNEALDLFAQMEGEGKVMPNEVTFLGVLTSCSHGGLVEQGFHHFQRMSMVYNLAPRIEHYGCMVDLLGRAKLLTEAEQFINGMPIAPDVVVWRSLLFACRACGEVGLAEFVAERILELEPKKCAGHVLLSNVYAATSRWVDVNKLRTSMDSCRMSQIAQVVVEFLEVAISCIVFLKGFYPPRAFERRRYMNVVVQKALHPELTSYIHSVTFGLLPFIQKGLVERVVVIFYDKGHVPTEKFVFKLAVNQSYRSKLEEANLEFALRAFLIKLTVAEPVTRPLPPDGSWEVTAYFRSLPGDGDREAQLWIPTDAELWMQPPQITPIKSVSCDPLTMQLYLEHPSVTEPKEPPA

SEQ ID NO: 179099 - protein, 233 aa, Zea Mays
MHALSSAKRNYRFFFMFVSSTTVLCIYVFAFCWVNLRRIMDTHQCKIGRALLKSPISGLLILYTFIAVWFVGGLTSFHIYLISTNQTTYENFRYRYDRRTNPYNLGVGQNFIDVLFSRIPSSKHDFRAKVKADSSTFASSLSMGRVLSPPKTSVDLEMGMKRQAVAAEDFEDLHSQIGSAMGLERCGTEPPHFVGRKGCSEMSPDIEAFAEEFGMEGGLSERKKIERRTNDDS

SEQ ID NO: 179100 - protein, 291 aa, Zea Mays
MSSTAKLEVGWHLWLSSLQHIFLLFYLSHLAVILELFLETLIPQSLKTSMNPPTYQIARVVNKVRQRNYRFFFMFVSSTTVLCIYVFAFCWVNLRRIMDTHQCKIGRALLKSPISGLLILYTFIAVWFVGGLTSFHIYLISTNQTTYENFRYRYDRRTNPYNLGVGQNFIDVLFSRIPSSKHDFRAKVKADSSTFASSLSMGRVLSPPKTSVDLEMGMKRQAVAAEDFEDLHSQIGSAMGLERCGTEPPHFVGRKGCSEMSPDIEAFAEEFGMEGGLSERKKIERRTNDDS

SEQ ID NO: 179101 - protein, 384 aa, Zea Mays
MQGKAQLSDSNRRIMELDAPPRRVYQAWKGSNLFFLGGRLIFGPDVRSLVLTVCLIVVPVIFFAATVCPQLGHEFHSQIGEPEDIDESSNLPDCPGGQQGSTGLPPTRDVLVNGVSVKVKYCHTCMLYRPPRCSHCSICNNCVERFDHHCPWVGQCIGKRNYRFFFMFVSSTTVLCIYVFAFCWVNLRRIMDTHQCKIGRALLKSPISGLLILYTFIAVWFVGGLTSFHIYLISTNQTTYENFRYRYDRRTNPYNLGVGQNFIDVLFSRIPSSKHDFRAKVKADSSTFASSLSMGRVLSPPKTSVDLEMGMKRQAVAAEDFEDLHSQIGSAMGLERCGTEPPHFVGRKGCSEMSPDIEAFAEEFGMEGGLSERKKIERRTNDDS

SEQ ID NO: 179102 - protein, 229 aa, Zea Mays
MLLDCWSIPCVILLTWVFLKTKYGARKFLGVGVCVLGLILVVFSDVHASDRAKGPNPLKGDLFVILGSMLYACSNVTEEFVIKKSNRVELMAMLGLFGALISAIQISVLEREELHSITWTSGAVLPFLGFAVAMFLFYSAVPVILKLCGATMLNLSLLTSDMWAVLIRIFAYHEKVDWIYFVAFAATAGGIVLYSYSGSNEVEETAQVAGASDEHGKGRDEEAGTRNPA

SEQ ID NO: 179103 - protein, 75 aa, Zea Mays
MPKQIYEIKDFLLTARRKDARSVKIKRSKDVVKFKVRCSKYLYTLCVFDAEKANKLKQSLPPGSVPLKKILFDHR

SEQ ID NO: 179104 - protein, 341 aa, Zea Mays
MAPSPPRRAALLLATVLLLAAAGSTPGATAAGIFQVRRKFTAGVGGGAGANISALRAHDGTRHGRLLAAADLPLGGLGLPTDTGLYYTEIKLGTPPKHYYVQVDTGSDILWVNCITCEQCPHKSGLGLDLTLYDPKASSTGSMVMCDQAFCAATFGGKLPKCGANVPCEYSVTYGDGSSTIGSFVTDALQFDQVTRDGQTQPANASVIFGCGAQQGGDLGSSNQALDGILGFGEANTSMLSQLTTAGKVKKIFAHCLDTIKGGGIFSIGDVVQPKVKTTPLVADKPHYNVNLKTIDVGGTTLQLPAHIFEPGEKKGTIIDSGTTLTYLPELVFKEVMLACR

SEQ ID NO: 179105 - protein, 363 aa, Zea Mays
MAPSPPRRAALLLATVLLLAAAGSTPGATAAGIFQVRRKFTAGVGGGAGANISALRAHDGTRHGRLLAAADLPLGGLGLPTDTGLYYTEIKLGTPPKHYYVQVDTGSDILWVNCITCEQCPHKSGLGLDLTLYDPKASSTGSMVMCDQAFCAATFGGKLPKCGANVPCEYSVTYGDGSSTIGSFVTDALQFDQVTRDGQTQPANASVIFGCGAQQGGDLGSSNQALDGILGFGEANTSMLSQLTTAGKVKKIFAHCLDTIKGGGIFSIGDVVQPKVKTTPLVADKPHYNVNLKTIDVGGTTLQLPAHIFEPGEKKGTIIDSGTTLTYLPELVFKEVMLAVFNKHQDITFHDVQGFLCFQYPGR

SEQ ID NO: 179106 - protein, 62 aa, Zea Mays
MAEDASHGASSSTVIPADGPESTIEINIKTLDSQVHKLRVDKNGDASNPGPSAQWKGFSPLR

SEQ ID NO: 179107 - protein, 780 aa, Zea Mays
MEPAGARKEWRAVPDSSLRSNGAEDAAEHGKLGQSEERAIYEEGAGGLGDFCTITIDGSGGLSEDILQQRLQSVARQREELQQVEIELRAQAIAHPQIIEAQQSFQAAAKEHAAAVAKIKEQLHEREQYILELEMKLNDKDRELNALKIDHQTVWANQDLLREQTKELASVRRERDNSEAERAQHLKQIHDLQELLREKESQFIAIEEQHRAAQENILYKDEQLREAHAWVSQVREMDALQSQSLQVELRERMEQFNQYWISSQQQYAEMQRSLLHTIQQLQQELAEARERSGAQKDGPHVSREGSAESSLVQSIANSVTSNGSATADGSQQLLKNNGSVDVSLKGNNASAVPVPSLLGIGGPAAHIAAMHSFMIHPQGIPQPLASPNSGIPQFGSFQTQPMIQPNSHWPNQQEVQIVSQPQDETNYQTSQSGQTALQQDTINTDELSPKASEGGHPDHLNAQGKQQQSPASAPTESTHELTVVETNIAEHVPYDEQQKTLKEQDSLSNIKSHVGRVEPQEQNAESKVERAASDKQSEPQSRQHKPSNFPPTTQLNLKNSATENPNVVNQVDTMKSVTGGFGSQLPRVPKEPALLDERSLLACIVRAVPAGPEGGIRISSTLPNRLGKMLAPLHWHDYKKQYGKLDDFVASRPELFVIEGDFIHLREGAQQIISATTAAAKIAAATASSAPYSSLLPSVAVTPVAQSTRQKRGPAVDSRSSNAILSGNGFTDQFNIIQGPSVLTAAANGARHDKGTNNVIQGYGGKQQGRSTGMAYLSRR

SEQ ID NO: 179108 - protein, 60 aa, Zea Mays
MGHREKLTFKLTKCESLSLLFMLHFVNQTAPKASLIMVMCCVLCGLRCFLLLRGNRNLKV

SEQ ID NO: 179109 - protein, 74 aa, Zea Mays
MSSNNSNVSGGGCNKEITIVRSIKWAICWRNFMISNAVELSRPVDISSIKKHLARPTSISPALNNFTLAYANLG

SEQ ID NO: 179110 - protein, 230 aa, Zea Mays
MLDSDIIQHSKSPFASSVILVKKKDGTHRFCVDYRHLNAIMAKAKFHVPIIDEFLDELHGAAWFSTLDLRARFHQIRMAPPDLYKTTFQTYHGHFEFRFMAFGLTGALATFQGAMNCTLKPLLRQRALLLLQDHWQVKLTKCTFAKQEIAYLDHIISKVGVATGPAKVEAVVSWPTPTNSKELRGFLGLTGYYRKFVQNFGVIAKPLTALLKKHVVFFYEHRIMLLLLPC

SEQ ID NO: 179111 - protein, 279 aa, Zea Mays
MAAEHATAAVGEPPPATSQPAEGVTAAAGQRSVPTPFLSKTYQLVDDPAVDDIISWNDDGSAFIVWRPAEFARDLLPKYFKHNNFSSFVRQLNTYEDRAGQVGVRERLLPPRGEAAALRHTPPEGVAGHGGGHGGRRRCGHPDGAARGLSGVLRRGAGAVKLVPGAPVAAAAPAGAVRVGLRRGGLGRRGRGERAVAAGERAAGARARTDEEALQQHPPPHVQVRRHSAAGRRQGGGRRELHRRVVGCRRGASAPFDPGAPTLVPRRPRARCSRNGSRG

SEQ ID NO: 179112 - protein, 370 aa, Zea Mays
MAAEHATAAVGEPPPATSQPAEGVTAAAGQRSVPTPFLSKTYQLVDDPAVDDIISWNDDGSAFIVWRPAEFARDLLPKYFKHNNFSSFVRQLNTYGFRKIVPDRWEFANDCFRRGEKRLLCDIHRRKVSPATGAVTVAAAAAAIPMALPVGSPVYSGEEQVLSSSSPEPPSLQQHPPAPSGSGSGGVVSGDVGEENERLRRENARLARELGQMKKLCNNILLLMSKYAATQQPDAAKEAAAGNCTGESSDAAAAPPLPSILELLPSCRADPAPAAAGTDHEDDEKAGARLFGVSIGRKRMRDESDHHAGVCAAEVKAEPVDARPDQQRQRNATEPQSWPIYRPRPVYHPLRACNGSGSAGSDHDGSNDSS

SEQ ID NO: 179113 - protein, 147 aa, Zea Mays
MHLLRHGFGDYDVFENNCEDFALYCKTGLLLLPAAAAGGGVGIGRSGQAAAALGVPLAALFSTPFKLVAAGPLGMAAVTAGVYCAGRYVTDIGVRTDVVKVEVKDLSAHLGWRRARAQEKKKKQQQEEAPAAAKSLLPLKRKRETCV

SEQ ID NO: 179114 - protein, 154 aa, Zea Mays
MPGYYDIDDILMEDEPISVVFQVTANGVGLLDPGAESNCVEKGAKVDLPFWLAHGLLSLEQAVSINPPPCFTQKTWKEIQADAACVDLRVRCPYFYELGCKIVPLVSDKSIGLFLRYAFTSRYKEVLSKSHSSSMMTVPKFVPRLTKEETRENR

SEQ ID NO: 179115 - protein, 172 aa, Zea Mays
MPGYYDIDDILMEDEPISVVFQVTANGVGLLDPGAESNCVEKGAKVDLPFWLAHGLLSLEQAVSINPPPCFTQKTWKEIQADAACVDLRVRCPYFYELGCKIVPLVSDKSIGLFLRYAFTSRYKEVLSKSHSSSMMTVPKFVPRLTKEETRGGMRLQKASILGRKRKTKLPE

SEQ ID NO: 179116 - protein, 388 aa, Zea Mays
MSNGSPSTRGRMLLGGMSVMGAYVWASEASFKATSPAVLSQVIRAICQACYGSASGVRLLVHISYSPRRWACRICEVASGSLRPCDFKYSKLLASLQTFRCTYNFEIRLTSVQAEPFKKIILKAISHLTEEVQNARALVDGQLFSEEMNISTEDPHQVDFLVPFKNAVPVEECSLEGVAGLIRFIGSVSALAYLGPKESISEAISDLKADIVTSLKSRLDIILDEADDGPATAEVEKSPSQKATQVIFHELREPYSFSFPRRVLIPWLSGTYVCDYLQQPETAEDAVDRFKEVIGALETAVERSSILEPESAAAACSVLESFWDMVPGSGSGGQGGSSKLKDSHSIQKDDSSKGQGGLHFSIVAALIVLLVALIAGLFFTGSAGYPVT

SEQ ID NO: 179117 - protein, 265 aa, Zea Mays
MVKAVLGDEEHLKAFEETLASPSSPPCQAQVGLVVGKLSSSSDRALVYALLPTPLTDAAAPACSLRAAPKSKPSKGGGKAPSSSDASLDFDVEWISEHARQVSRMLLGGMSVMGAYVWASEASFKATSPAVLSQVIRAICQACYGSASGVRLLVHISYSPRRWACRICEVASGSLRPCDFKYSKLLASLQTFRCTYNFEIRLTSVQAEPFKKIILKAISHLTEEVQNARALVDGQLFSEEMNISTEDPHQVDFLVPFKNAVPVEV

SEQ ID NO: 179118 - protein, 138 aa, Zea Mays
MDFHLSPPSFATVATLLLSGWVALNSFLKSSLEEINRRCNETRIHQEGEEQRRMRECACRAASAAYMKRKKAVGERLRLASLLPPPLAEDFLRSALATSTVFSTTCASSVILIFSSRLQLCMSMRTTGTSLLQASLHA

SEQ ID NO: 179119 - protein, 131 aa, Zea Mays
MSLCFTGESRNEDSRTLQFNYGSFKHKALDKSLTKKFIVLVLKLQRKYLLRDGFSLKVRALHKNNVNTSALTQSEMRDIILGAELLHHHSNSRETAQLAAVITRIANVHGDELIITTTSPYEQQAFASKTD

SEQ ID NO: 179120 - protein, 120 aa, Zea Mays
MCPLARESGEESVGSFRIGSSMLLGHGVTIRVLLFSSMWHLRGRAYAAISRVRSATLPVAASWLRFKNTHVLLMVVLFALFLRKLSGADLPRCLQCCLCDALPDATSCSQGPKGRKCSCC

SEQ ID NO: 179121 - protein, 72 aa, Zea Mays
MGSGSSKATVMGSGRRQAVLLHLRRRARTFPFIPSVPFPPPSPDQAGLLLPITGGSAPPPPPHLPGHLEAEE

SEQ ID NO: 179122 - protein, 491 aa, Zea Mays
MTVAALQAMDALSRRATMLRDSLRRSQGNTDGMVTILGSFDHRLSALEAAMRPTQVRTHAIRTAHENIDRTIKAADGILSQFDLARRAEATILRGPHEDLESYLEAVDVLKGISRFFSSNKNFKSSEGVLNHVNNLLAKSTLKIEEEFKQLMSTYSKPIEPDRLFDCLPKSLRPTKGDHETDGGSHHPSKGLEAAVYRTPTLIPPRILPLMNDIAQQLVQAGNQQTCYKIYRDYRASALEVSLRKLGVEKLTKDDVQKMQWEALEAKIGNWIHFMRIAVKLLLAGERKICDQIFDGVNFNKGHCFAELTANSIITLFSFGDAVAKSKRSPEKLFVLLDMYEVMRELQPEIDEIFEGKPCTEMREAASSLTKRLAQTAQETFADFEEAVEKDASKTIVQDGTVHPLTSYVINYVKFLFDYQSTLKLLFQEFDSGTEAESQLAAVTTRIMQALQNNLDGKSKQYKDPALTHLFLMNNIHYMVRSVRRSKRYTW

SEQ ID NO: 179123 - protein, 67 aa, Zea Mays
MHGYLSVGQSFQLVYPSVSRTGPDLLYGHKSNVAYIFSQYLSVEHEHVIFSNKHDARMPVLVTSMCY

SEQ ID NO: 179124 - protein, 369 aa, Zea Mays
MERTINSLMYKGSIPDAINQSRREKKLFVVYISGEDEASSSLEQSSLIDENVVEVIGRCCILLHLKQGNVDASQFSAIYPQKSVPSISVIGLNGVLLWNHDGYINSENLKESIEKAWAALHLQETAATLLTASLATRNSEPVNSATTVLPAQGGSSTLENPSDLSSQSPDVSGASEVAHSTDLVSQIPNSTALYEPLEINEKEGSKSNSDDKTVEKLGSTNSKGEDITPSAKRKNKDDGSHTSIPLEDTPSTLTNKGVSSQSRVEQDKATSFVSVKSDDIQLSIRMPSGNRLEIKLTKQDVLRKVKNFVDENQGNGLGSYDLSLVYPKRVFFEQDMEATLSELGIQNRHAMIVVPHRQSGQVRGDTLVT

SEQ ID NO: 179125 - protein, 366 aa, Zea Mays
MERTINSLMYKGSIPDAINQSRREKKLFVVYISGEDEASSSLEQSSLIDENVVEVIGRCCILLHLKQGNVDASQFSAIYPQKSVPSISVIGLNGVLLWNHDGYINSENLKESIEKAWAALHLQETAATLLTASLATRNSEPVNSATTVLPAQGGSSTLENPSDLSSQSPDVSGASEVAHSTDLVSQIPNSTALYEPLEINEKEGSKSNSDDKTVEKLDSKGEDITPSAKRKNKDDGSHTSIPLEDTPSTLTNKGVSSQSRVEQDKATSFVSVKSDDIQLSIRMPSGNRLEIKLTKQDVLRKVKNFVDENQGNGLGSYDLSLVYPKRVFFEQDMEATLSELGIQNRHAMIVVPHRQSGQVRGDTLVT

SEQ ID NO: 179126 - protein, 571 aa, Zea Mays
MGLHMLPLRRPASLAARRLLRDNQRISALARAGDVAAARRVFDAMTHRDVVSWNALLTALWRAGRHHLPAARRLFDEAMPSRDVVSWNSIIAGCLAHGDLDAASAYFAGAPERNVATWNAMLAGLVRLGRVVDAQRLFDEMPERNVVSYTTMVDWLARRGEVERAREVFDSMPDRNLVSWAAMISGCVENGMFVEARELFEAMPEKNVVACTAMITGHCKQGDVDSARRLFDGIRAKDVISWNAMIAGYVHNGHGEEAMRLHALMFREGVKPDHATLIAVLTACSALALLRQGKSTHAIAIKAMLESGISFSNALMTMYSKCGNVGESELVFINLRTKDIVSWNTIIAAYAQHGKYQKVIALFHEMEVTGLIPDDITFLSVLSACGHVGMVDASLKLFDLMSSKYAISPRAEHYACIVDILSRAGQLEKASSYIKHMPLKAEKNVWGSLLGACQIHGNVQLGELAAKMLVQSDSQSSGPYVILSNIYAAAGMWGQVNQIRGQMKERGVKKQPGYSWTEIGNEVHMFVGGDASHPEMRKIISELRKISFHMRMVTNEAHIMVELAQECGHFS

SEQ ID NO: 179127 - protein, 294 aa, Zea Mays
MVYMWEMVNRYMELAHRVDEALGFMSAAGLPLDHPIMTTAEFWTSHECLLLPYEQALTREDSTTGLYYDCSAHFLWVGERTRQLDGAHVEFLRGIANPLGIKVSDKMDPAELVRLIDILNPENRAGRITIITRMGPENMRVKLPHLIRAVRGAGQIVTWVTDPMHGNTMKAPCGLKTRSFDRILHGRYGHRRLRHHQPARRPGHPVPVEHRARVLPLHGRSRAGRHHLQAHRARRLPAYQAFSGESVEVIAISVRRGQARVCILQRHPDLVLQHLAHGPWAKYNSLWGIDLSDS

SEQ ID NO: 179128 - protein, 131 aa, Zea Mays
MRCCLLCGRALGCSPDITRAPAPSECITVHDSLVVQGEVRAFFDVHEQEGSHPGGVHLEMTGQNVTECIGGSRTVTFDDLGSRYHTHCDPRLNASQSLEMAFIIAERLRKRRMASSPLYTNQLGSIPSMGL

SEQ ID NO: 179129 - protein, 268 aa, Zea Mays
MELAHRVDEALGFMSAAGLPLDHPIMTTAEFWTSHECLLLPYEQALTREDSTTGLYYDCSAHFLWVGERTRQLDGAHVEFLRGIANPLGIKVSDKMDPAELVRLIDILNPENRAGRITIITRMGPENMRVKLPHLIRAVRGAGQIVTWVTDPMHGNTMKAPCGLKTRSFDRILGEVRAFFDVHEQEGSHPGGVHLEMTGQNVTECIGGSRTVTFDDLGSRYHTHCDPRLNASQSLEMAFIIAERLRKRRMASSPLYTNQLGSIPSMGL

SEQ ID NO: 179130 - protein, 280 aa, Zea Mays
MSHFGRSGPPDIRDTFSLLVLNISFRTTADDLFPLFERYGKVVDVFIPRDRRTGDSRGFAFVRYKYADEAQKAIDRLDGRDVDGRNIMVQFAKYGPNAEPIRKGRVKEGVEKSQDRSRSRSPRPRHRDRDHRSQSRSRSRERHVRDRDRGYRRRSRSRSRSLSSSPDNRSHHRARDDDKRKSMSKSRSRSRSTSRSRSYYSASPARHSASPRKSPPPQRSPTPAKHANGKVAPLSRCVSPLPKRATSRSPGSDGKLADLVMPRKQPSHGVTGLQNLEKVD

SEQ ID NO: 179131 - protein, 542 aa, Zea Mays
MDPDGDPAFHRNEAISAVQDVDQYYGDDDDFDDLYNDVNVGDGFLHASHQAPPPLPPPPPTQQAPPPQKHQLPPPSQQLPPPQQHPPAHVLPPPPPQHHHIQQDGINRPGGNIAGGPIVVGNGGPAGGGDGPGGTTLFVGELHWWTTDADLESELSKYGPVKEVRFFDEKASGKSKGYCQVDFYDPGAAAACKEGMNGHTFNGRPCVVAFATPNSVRRMGEAQVKNQQAMAAQTSNMQPKVGRGSGGAAGPQAGGNYGGGRGGPVGPGAGGGAGGGGGNWGRGGGGMGNRGPIGNMRNRMGPAGGGRGIMGNGGMVAPPPPMMPPGGMLGQGFDPTGYGAMGRMGGGFGGFPGGPGAMPFPGLMQPFPPVVAPHVNPAFFGRGGMGAGGMWPDPNMGAWGGEEQSSYGDDAASDQQYGEGGSHGKERPPEREWSGAPERRQRDERDMDRERNRDYDRDREKDRDRERDRDRDRERDRDRERERERERERERHRDDRDRYGDYHRHRDRDSERNEDWDRGRSSGIRGRSREADHSKRRRMTPQ

SEQ ID NO: 179132 - protein, 237 aa, Zea Mays
MFDHETKRSRGFGFIVFASEQVVDDLLANGNMVDLAGSKVEIKKAEPKKSSNAPPPPVHVRNARSAYDSGSRDHPSADNYGGMASAYGNYRGGGFGPYRSDTGFGARLSSYGGVGDFGGAYGRYYAGLGGGYGAASSFGYPGRFGLYGGGFGGSYAGADLSGYRRGGGDESFGAPGGNPGFGGDAEESFGGPSSSGFSGTAYGGAYDPTLGGYGSASTPDMNRGSFTGGYGRYHPYG

SEQ ID NO: 179133 - protein, 78 aa, Zea Mays
MDTLQEAPSTPLEATAALYTIQFAVYFFFSEEDERISSTLFSTSRRMNILRNQKDPLSSTTQRLHLGNQRKVKVPCQS

SEQ ID NO: 179134 - protein, 703 aa, Zea Mays
MLEATSKMDDWMLPSPSPRTLMPSFFSEEFISTPFSNIFADDRGSKPQDENEDSNTCIGSGAHETSQDVKCHRPQIESNIFGVNQKPTSPGGLAERIAARAGFGVLKIDISRVGSSGAAIRSPVTIPSGVSPRELLESPVFLPNAISQPSPTTGKLPFLMPNNFKSTMLCGPEKSEDHLHEDSAFSFQPFLRSKPPTLWTAKKGPSVVHETGSLSKDSQEELNLHANPAAATEHETEESLVIRPKACDSMFDNGHPSSPDEGPEQSEENQNREDCSAPVTAPGEDGYNWRKYGQKQVKNSEHPRSYYKCTHPSCPVKKKVERSVEGHVTEIVYRGSHTHPLPLPSRRSSVPPTQLECGSQSDGLENLSSKPGPAYHSAASQSQGIAPDGQFQDVHREALETKLSGSLTTTEIADRPVMDVSSTLSSNENGDRAVPPTNGRNEDETESKRRKMEASAATNTTTNTGIDMAAMASRASREPRIVVQTTSEVDILDDGYRWRKYGQKVVKGNPNPRSYYKCTYAGCSVRKHVERASNDLKSVITTYEGKHNHEVPAARNSGNGHPSSGSTPAPPQGSGGLHRRLEPPQVSIPRLSAAAAAAAAAAAYGSLSLRFPPQLSAAPGGFSFGMLRPTGMAPSLGGFLPAQMPGRGLPMQGCAGLVLPRGEAKVVSPEQQSGLPVANGNAAATYQQQQQQLMARWAQGHQM

SEQ ID NO: 179135 - protein, 544 aa, Zea Mays
MPNNFKSTMLCGPEKSEDHLHEDSAFSFQPFLRSKPPTLWTAKKGPSVVHETGSLSKDSQEELNLHANPAAATEHETEESLVIRPKACDSMFDNGHPSSPDEGPEQSEENQNREDCSAPVTAPGEDGYNWRKYGQKQVKNSEHPRSYYKCTHPSCPVKKKVERSVEGHVTEIVYRGSHTHPLPLPSRRSSVPPTQLECGSQSDGLENLSSKPGPAYHSAASQSQGIAPDGQFQDVHREALETKLSGSLTTTEIADRPVMDVSSTLSSNENGDRAVPPTNGRNEDETESKRRKMEASAATNTTTNTGIDMAAMASRASREPRIVVQTTSEVDILDDGYRWRKYGQKVVKGNPNPRSYYKCTYAGCSVRKHVERASNDLKSVITTYEGKHNHEVPAARNSGNGHPSSGSTPAPPQGSGGLHRRLEPPQVSIPRLSAAAAAAAAAAAYGSLSLRFPPQLSAAPGGFSFGMLRPTGMAPSLGGFLPAQMPGRGLPMQGCAGLVLPRGEAKVVSPEQQSGLPVANGNAAATYQQQQQQLMARWAQGHQM

SEQ ID NO: 179136 - protein, 696 aa, Zea Mays
MDDWMLPSPSPRTLMPSFFSEEFISTPFSNIFADDRGSKPQDENEDSNTCIGSGAHETSQDVKCHRPQIESNIFGVNQKPTSPGGLAERIAARAGFGVLKIDISRVGSSGAAIRSPVTIPSGVSPRELLESPVFLPNAISQPSPTTGKLPFLMPNNFKSTMLCGPEKSEDHLHEDSAFSFQPFLRSKPPTLWTAKKGPSVVHETGSLSKDSQEELNLHANPAAATEHETEESLVIRPKACDSMFDNGHPSSPDEGPEQSEENQNREDCSAPVTAPGEDGYNWRKYGQKQVKNSEHPRSYYKCTHPSCPVKKKVERSVEGHVTEIVYRGSHTHPLPLPSRRSSVPPTQLECGSQSDGLENLSSKPGPAYHSAASQSQGIAPDGQFQDVHREALETKLSGSLTTTEIADRPVMDVSSTLSSNENGDRAVPPTNGRNEDETESKRRKMEASAATNTTTNTGIDMAAMASRASREPRIVVQTTSEVDILDDGYRWRKYGQKVVKGNPNPRSYYKCTYAGCSVRKHVERASNDLKSVITTYEGKHNHEVPAARNSGNGHPSSGSTPAPPQGSGGLHRRLEPPQVSIPRLSAAAAAAAAAAAYGSLSLRFPPQLSAAPGGFSFGMLRPTGMAPSLGGFLPAQMPGRGLPMQGCAGLVLPRGEAKVVSPEQQSGLPVANGNAAATYQQQQQQLMARWAQGHQM

SEQ ID NO: 179137 - protein, 373 aa, Zea Mays
MVTDELVMLITSNVHKLSELCLEDEPDTQPNLPEDLTNVGLQALGLCHNLKHLSLTRRSYDFRRVNDFGILMLADGCKQLRTIRLGGFSKVSDAGYAALLHSGKDLKKFEVSNGWCLSDLACLDLDKAAPNITEVRLLNCALLTSDTAISLAPCTNLKVLDLSGCKSIADSGLVSISQLPNLTLLDLAGADITDVGLSALGNGRCLISSLCLRGCRRISSNGIASLLCGAGTINKTLVSLDIGNVPRISCRAVTVIAKNCEQISSLCLRNCLLITDSSLEVLGSMGCDSSKCPLRMLDLAYCSKLSRNFLRHFEPPLFRGLRWLGIGKNVAQRRGCSLTIAEVLERKPGLTICCNACDMGCRNKCHPDIRFLQ

SEQ ID NO: 179138 - protein, 171 aa, Zea Mays
MEVTIAEKKPRAAGDGGGLVERLPEALLVEVLARVDVDGACSAAASCRSLYAAANAVLPALTSIDLSAFAPSNAILSRILAGNGAVRSLTVNCSLLDDSAASVIARGSLRDLSLLKCSFSMSFFVALGGACHDLRSLKLEMAVCPYTLYPCLAPVYVGCVHLEEMISSIQA

SEQ ID NO: 179139 - protein, 202 aa, Zea Mays
MRKPEEITKEEYAAFYKSLTNDWEEHLAVKHFSVEGQLEFKAVLFVPKRAPFDLFDTRKKQNNIKLYVRRVFIMDNCEELIPEWLSFVKGIVDSEDLPLNISRETLQQNKILKVIRKNLVKKCVELFFEIAENKEDYNKFYEAFSKNLKLGIHEDSTNRTKIAELLRYHSTKSGDELTSLKDYVTRMKEGQNDIFYITAEGV

SEQ ID NO: 179140 - protein, 471 aa, Zea Mays
MASETETFAFQAEINQLLSLIINTFYSNKEIFLRELISNSSDALDKIRFESLTDKTKLDAQPELFIHIVPDKANNTLTIIDSGIGMTKSDLVNNLGTIARSGTKEFMEALAAGADVSMIGQFGVGFYSAYLVAERVVVTTKHNDDEQYVWESQAGGSFTVARDTSGEQLGRGTKMTLYLKDDQLEYLEERRLKDLIKKHSEFISYPISLWIEKTTEKEISDDEDEEDKKDEEGKVEDVDDEKEEKEKKKKKIKEVSHEWQLVNKQKPIWMRKPEEITKEEYAAFYKSLTNDWEEHLAVKHFSVEGQLEFKAVLFVPKRAPFDLFDTRKKQNNIKLYVRRVFIMDNCEELIPEWLSFVKGIVDSEDLPLNISRETLQQNKILKVIRKNLVKKCVELFFEIAENKEDYNKFYEAFSKNLKLGIHEDSTNRTKIAELLRYHSTKSGDELTSLKDYVTRMKEGQNDIFYITAEGV

SEQ ID NO: 179141 - protein, 811 aa, Zea Mays
MRRKFLSARIVFPCASSTCGHFYHAMCVTQLLFPENEAKATEYTAKIASGAKFACPLHKCGICKHGENKEDRELQFAVCRRCPKSYHRRCLPREIVFEDFTENGQHVFQRAWDDLLPNNRILIYCLKHDINPEYRTATRNHIKFPKDPTALKKPLNCVNGMNTKTLKIRRLEELPSAPLSNVKRFSYSVKSSTLSNLRNKRRKVIVPEEKPVVMTKLPEIDSDTEMRMYEFAQKASAGITMDDVKKKLVVPSTYAPNLQNADNITLENVEIYVEAVKGALHMLENGASIADAKSVCPPNVLFQLVKWKNKLSVVLAPFLHGMRYTSYGRHFTKLDKLQLIVDKLQWYIQSGDTVVDFCCGSNDFSLLLREILESSGKNCFYKNYDLIQPKNDFNFERRDWMTVQPDELPTGCRLVMGLNPPFGTKASLANQFINKALTFKPKLIILIVPKETERLDKKYPPYELIWQDSDQLSGKSFYLPGSLDADNKVMEQWNVSPPPLSLWSRSDWAERHSEIAKSMGHISNEIGDLQRDLAASIHTTEHVEADDAGVAGMSPCLLDQLLSDTFHDPTTSPGDCWNDTSGRSRQPCNYETAGQGRGDPTYNHTTESCSDMSISLSESDVQRKDQALPMPEHGGTGSDMSISLSESDVRRKGQAWDAVGSASAGKPTADADYDEVTSACGPYHFSGVAGKQAAGVEYWMIQDSPVLEEGELSDAPAAAGRPASGTRHKPTEHTPAAATPEAASWWSGQLDHHSRSVAARHNARTLPPRNTFPGLRLRQGCNTSRKFLPQGMGYDAIHEGPSNGWIEEEDY

SEQ ID NO: 179142 - protein, 137 aa, Zea Mays
MDLLTKKGLGKDTISYLMKTFLLKNKLQKMIKKSKDLDAIGEMKSHVTWIDKQLKYHPPKNVESEILCEHIKKEREATKARKRPCYLKKPELHERKLMNKYNELKEAGKLDAFMEKRRRKNASKDHRFMSYQRSGDA

SEQ ID NO: 179143 - protein, 252 aa, Zea Mays
MDSTLLLPRLPPPPLPSSLRRRHRQPHCLPPHRRPKTVPRHGRMPPAAREGRADAGTKFRARGLFGGGGGGDRLRAVMRMVKLNSAIQNRSVRELLELLGDECLYFLGNLRSVDVPRLGKDMFLLLHALMVRHHVSFVLKPSPDDEAGFDLGVKWSLEWKGKKLPWDLDCNVSTTHVYRGLLLISQVNKTCVPLLQRILGIMQQNLDAVVLAVVHKVLPEGTLDEKQRSTMVFCAVIGLLVMLLFYALLKNL

SEQ ID NO: 179144 - protein, 184 aa, Zea Mays
MFLLLHALMVRHHVSFVLKPSPDDEAGFDLGVKWSLEWKGKKLPWDLDCNVSTTHVYRGLLLIRYLLLAAFACLHVQQKNDRLNNRLVSPSPSHRTQPSEQDLRAAAPEDSWDHAAEPGRGSPGRRAQGAARRHPRREAEEHDGFLRRHRPPRHAAVLRIAQELVASSSPSPPAAPPGGQGASI

SEQ ID NO: 179145 - protein, 214 aa, Zea Mays
MIMLLILDGSHWQLVCINFLHREINYFDSLGSDFCAAESLLANFIELLKIHKCIKFDVNSFEKVRVKCPKQSNNIDCGFFTILYMIAWNGKHLRLDDKIKASEIVACRMKLTHMLIKSKQNSADPCYVVKKLDANIKKYGINSRKVITSKNLTMLMGLIDQEIEEINAEKRKRSGHPAGGQPELKDDDGQLRANSVKARDAELRCERAVKLRRL

SEQ ID NO: 179146 - protein, 250 aa, Zea Mays
MHRAGDMSNTLMSVIVEYFNSISGALFDTVSRPSTISKYVICPFLLKVKKGCNFKVKDSLLKTLEETQKRDMIMLLILDGSHWQLVCINFLHREINYFDSLGSDFCAAESLLANFIELLKIHKCIKFDVNSFEKIKASEIVACRMKLTHMLIKSKQNSADPCYVVKKLDANIKKYGINSRKVITSKNLTMLMGLIDQEIEEINAEKRKRSGHPAGGQPELKDDDGQLRANSVKARDAELRCERAVKLRRL

SEQ ID NO: 179147 - protein, 194 aa, Zea Mays
MDTDVNPNSASICKGSSNSTSFCEGGSREGGHEQKNPNTFVRESSFPKMQKRGLSACGNWRCSVDYSLFLTSMHRAGDMSNTLMSVIVEYFNSISGALFDTVSRPSTISKYVICPFLLKKVKKGCNFKVKDSLLKTLEETQKRDMIMLLILDGSHWQLVCINFLHREINYFDSLGSDFCAAESLNETHTYADQI

SEQ ID NO: 179148 - protein, 251 aa, Zea Mays
MHRAGDMSNTLMSVIVEYFNSISGALFDTVSRPSTISKYVICPFLLKKVKKGCNFKVKDSLLKTLEETQKRDMIMLLILDGSHWQLVCINFLHREINYFDSLGSDFCAAESLLANFIELLKIHKCIKFDVNSFEKIKASEIVACRMKLTHMLIKSKQNSADPCYVVKKLDANIKKYGINSRKVITSKNLTMLMGLIDQEIEEINAEKRKRSGHPAGGQPELKDDDGQLRANSVKARDAELRCERAVKLRRL

SEQ ID NO: 179149 - protein, 130 aa, Zea Mays
MIAWNGKHLRLDDKIKASEIVACRMKLTHMLIKSKQNSADPCYVVKKLDANIKKYGINSRKVITSKNLTMLMGLIDQEIEEINAEKRKRSGHPAGGQPELKDDDGQLRANSVKARDAELRCERAVKLRRL

SEQ ID NO: 179150 - protein, 156 aa, Zea Mays
MHRAGDMSNTLMSVIVEYFNSISGALFDTVSRPSTISKYVICPFLLKKVKKGCNFKVKDSLLKTLEETQKRDMIMLLILDGSHWQLVCINFLHREINYFDSLGSDFCAAESLLANFIELLKIHKCIKFDVNSFEKVRVKCPKQSNKYGCFTSHTFH

SEQ ID NO: 179151 - protein, 214 aa, Zea Mays
MDTDVNPNSASICKGSSNSTSFCEGGSREGGHEQKNPNTFVRESSFPKMQKRGLSACGNWRCSVDYSLFLTSMHRAGDMSNTLMSVIVEYFNSISGALFDTVSRPSTISKYVICPFLLKKVKKGCNFKVKDSLLKTLEETQKRDMIMLLILDGSHWQLVCINFLHREINYFDSLGSDFCAAESLVRPDSLGSDFCAAKSLMRPFKSCYKYSCFA

SEQ ID NO: 179152 - protein, 515 aa, Zea Mays
MMYDEEPLGGTNCIRQDNRSLSENWSGVGLDHDGLEDDEVAFSDFDNHNTFSSSNSELHLSSSNEHLRNRRACRNHPSFLQPTALAADGLIRSTSRMTDLTEFKVVTTCNTCKPATINRGDDAKSLKNLDCTVPLSNYHPTVAAFPRTRHKGPQHILSWLLPKSKRKPRPDVSPTTVECENMSQLLKDWGVFSLDSLKKEVVEANEHRDAALQEVSEMKLSLGELTTKIASLEAYCSELKKALKQATSAKSMQSHHSKRSSTRSVSGSPLPVSHEVMVEGFVQVVSEARLSVKQFCKALIQQVEEDADNGLSEKLNLLLQPYQITLGDRRPKLVLYHLEALMNQAMYQDFENCAFQKNGPRRCLDPRQERQESFASFVALRNLSWSEVLRKGTRHHCKELSRFCDQKMGCVASALMNWSRPCWAEPLLQCFFVACKCVWLLHLLAFSFSPPLAILRVEEGRAFEQTYMEDVLLDMQRSQDHEPPPSARVKLMVVPGFYVQDRLLKCRVLCSYISG

SEQ ID NO: 179153 - protein, 514 aa, Zea Mays
MYDEEPLGGTNCIRQDNRSLSENWSGVGLDHDGLEDDEVAFSDFDNHNTFSSSNSELHLSSSNEHLRNRRACRNHPSFLQPTALAADGLIRSTSRMTDLTEFKVVTTCNTCKPATINRGDDAKSLKNLDCTVPLSNYHPTVAAFPRTRHKGPQHILSWLLPKSKRKPRPDVSPTTVECENMSQLLKDWGVFSLDSLKKEVVEANEHRDAALQEVSEMKLSLGELTTKIASLEAYCSELKKALKQATSAKSMQSHHSKRSSTRSVSGSPLPVSHEVMVEGFVQVVSEARLSVKQFCKALIQQVEEDADNGLSEKLNLLLQPYQITLGDRRPKLVLYHLEALMNQAMYQDFENCAFQKNGPRRCLDPRQERQESFASFVALRNLSWSEVLRKGTRHHCKELSRFCDQKMGCVASALMNWSRPCWAEPLLQCFFVACKCVWLLHLLAFSFSPPLAILRVEEGRAFEQTYMEDVLLDMQRSQDHEPPPSARVKLMVVPGFYVQDRLLKCRVLCSYISG

SEQ ID NO: 179154 - protein, 199 aa, Zea Mays
MVLQLLPVNSLSCKQIERRSCISLEAFIRDYFLCESPVILSGCIDHWPARKKWKDIKYLESVAGDRTIPVQVGKNYACTELKQELITFSQFLERMWSSDSANLAYIAQHQLFDQIKELHEDIAVPEYCSAGGGKLQSLNAWFGPHGTITPLHHDPHHNLFAQVLGRKYVRLYPASTSVGLYPNTESMLSNTSEIFSWTP

SEQ ID NO: 179155 - protein, 221 aa, Zea Mays
MVLQLLPVNSLSCKQIERRSCISLEAFIRDYFLCESPVILSGCIDHWPARKKWKDIKYLESVAGDRTIPVQVGKNYACTELKQELITFSQFLERMWSSDSANLAYIAQHQLFDQIKELHEDIAVPEYCSAGGGKLQSLNAWFGPHGTITPLHHDPHHNLFAQVDLDNTDGKEYPETAALEFVDCVLEEGDLLYIPPKWWRYVRSLSISFSVSFRWRTSQLP

SEQ ID NO: 179156 - protein, 142 aa, Zea Mays
MVPQVGKNYACTELKQELITFSQFLERMWSSDSANLAYIAQHQLFDQIKELHEDIAVPEYCSAGGGKLQSLNAWFGPHGTITPLHHDPHHNLFAQATVATAAIVPGVAAVIADAATRTTFALAQSAATAAAAASARCRRSPL

SEQ ID NO: 179157 - protein, 407 aa, Zea Mays
MEAGGASGGDDGDGQLHGLKFGKKIYFEDAGGSSSSGGSGSASATAPPATQQPSPPAASPRAAPGGGRRGRAAAGGAGPSLPPAPPRCLVDGCNADLTDAKTYYCRHKVCEMHSKEPRVVVNGLELRFCQQCSRFHNLAEFDQQKKSCRKRLAGHNERRRRPPPGPLASRYGRLAAPLGEPGGRFRSFMLDFSYPRVPSAMRDGFPAVRPGGERVPGSNIQWQAASLDPPPPHHQSAAAGYGAHSYGSPGSSSSSRPPVFPAGPELPPGGGCLAGVPTDSSCALSLLSTQPWDAAGHSAGHGHGHAASLPATAGFDGNPVAMASSYIAPPSPWTDSRAHEGGRRNVPQLPPDVPLGDVHSGPGTHHGQFSGELELALQGNRPAPAPRNGQGSAGAFDQAGSTTEWSL

SEQ ID NO: 179158 - protein, 137 aa, Zea Mays
MSFSQHGTHGVCVLSANGSISNVTLRQTATSGRTVTYEGQFEILSLSGSFFLAEDGVQRSRNGSLSVSLAGPDGRLLGGGVAGLLVAASPVQYWEASILEAERSHKSRLLQNPHRLHRGLLRQPGWEDPAALLQEAH

SEQ ID NO: 179159 - protein, 1055 aa, Zea Mays
MPSNVSTTPTLHFRSPIQARAQAHAYAPDPSLGSLPRQKNKLPRSGVLLLAILNEVTKIANSTAASQDKRNCILTLTCFQRMIRKITRRFSISTDRAGFQFRPEGDDGSTSEGIVDITRWFEEIHTDQTAAQLRPEDEDGDISKVRIGEIIRRFEEITGDRAALHLGQEDGERNTWSGRDSTWESRVTSHLLDESCVFGRTKEKEHVVKLVKSYSKCPGIHVLPIVGMGGIGKTTVAQMVYREVQESYDLLSWVHVPETFDLRKLAIAITESLSRQPCTYNNFSVVHDVLQQTVLNKRVFLVLDDLWNERQICWQDFLCSLKFADTMTILVTTRSKEVAQLLQTIPHFELGLLPEDHCWQLFQCYAFGHRNIHEESALVQVGRKIMEKCSCLPLAIKSIGCLLRSKMDMQTWMEISDSEFWEYSDNNEEILSALRLSFHRLPGRLKPCFLLCALYPKGEPFTKDDMIHLWTAHGYVQPSGCKTLEKVAGEYFDELNERSLIEMDTYYLVSREGHNYLKKSRVRSPVEISSGEIFDTDVSFYELHIRSLVENFHKGTTESSLPFQLFRLHDMIWDLAKSLSSCLFSAVAVDEGNLYMQNEVQHLFLWLGRGRSKQNTQRGHSELIPISKSRDLFISWINNSLGLESEPFRWRHRSTPRPSHRPQVSDFELLGLSSTALLGIALEAMIQARPDPVQDPMSSARLLAYLPENKHEYILSTQSRRSQLFKIDYLRTLILKQCTFYNIGIYTYLRALILYSCKDSGCIAAIQYLKLLRYLNIRNCDSLTGKNLNHLTQSICHLYSLEKLIVSTCWKEFSIQSCHLFSLRYLQLSVQFNDWSQHPLCHFHNLDTLCLQNCHSIAELPTGIGNLMNLRCLKLIGISEIKKLNHDSLLCQCNNNKCQLMKAIFPALMELELDSLCELQDWCKFQDSDCPKMQSITVRNCNKLRRIPYFGSVRSLMIINSALIGLQLSASNEPSQLQTLDISYCENLESLLGLENLCSLGSLYIAHCPKLFVLRQEKLLFRPQNILIDDCPGLIEWCDEQELYYHLPLIVKIIR

SEQ ID NO: 179160 - protein, 594 aa, Zea Mays
MPSNVSTTPTLHFRSPIQARAQAHAYAPDPSLGSLPRQKNKLPRSGVLLLAILNEVTKIANSTAASQDKRNCILTLTCFQRMIRKITRRFSISTDRAGFQFRPEGDDGSTSEGIVDITRWFEEIHTDQTAAQLRPEDEDGDISKVRIGEIIRRFEEITGDRAALHLGQEDGERNTWSGRDSTWESRVTSHLLDESCVFGRTKEKEHVVKLVKSYSKCPGIHVLPIVGMGGIGKTTVAQMVYREVQESYDLLSWVHVPETFDLRKLAIAITESLSRQPCTYNNFSVVHDVLQQTVLNKRVFLVLDDLWNERQICWQDFLCSLKFADTMTILVTTRSKEVAQLLQTIPHFELGLLPEDHCWQLFQCYAFGHRNIHEESALVQVGRKIMEKCSCLPLAIKSIGCLLRSKMDMQTWMEISDSEFWEYSDNNEEILSALRLSFHRLPGRLKPCFLLCALYPKGEPFTKDDMIHLWTAHGYVQPSGCKTLEKVAGEYFDELNERSLIEMDTYYLVSREGHNYLKKSRVRSPVEISSGEIFDTDVSFYELHIRSLVENFHKGTTESSLPFQLFRLHDMIWDLAKSLSSCLFSAVAVDEELP

SEQ ID NO: 179161 - protein, 495 aa, Zea Mays
MAERWRSRARRDPDLDEDASPPSRQPRHSGGDEEDDELGNEDLSLEIVARAQRKRRGESAGGVPVFADLLSVSSADEEGAVVELDEADEPRRKQKKKQRRKQRKKHRKETTEAAAGAAVEVDENAVCSTEEGPIGTAESVLTENGADAPASDNMVLRKLLRIPRYFDPGETLLETCFNCSEEGHVAANCPLEKRKKPCFVCGLFGHNAKQCTQGQDCFICKKGGHMAKDCPDKHRRNDHQSTLCLKCGEIGHDMFGCTNDYPPDDIEKGHLCCSDFSDDCPKQISCYNCAQSGHSGLGCAKRRETSAVTTPTLCFKCGEEGHFARGCTKNAKIQRKEKWKKASSSARSAPYDARKTSKRKSPHLEERVGTPRHKPKSRGGWTGGDDLPLKKYKSNGWGSPSTPKKSYANHQFLSGCDYLTPQPSRRHNYHGTMSSPNHQFLSGCDYFTPESSRGHSHGTMSPNWNYSPSARKHGFSSSRFAAAAASNTHVRFGRN

SEQ ID NO: 179162 - protein, 504 aa, Zea Mays
MAERWRSRARRDPDLDEDASPPSRQPRHSGGDEEDDELGNEDLSLEIVARAQRKRRGESAGGVPVFADLLSVSSADEEGAVVELDEADEPRRKQKKKQRRKQRKKHRKETTEAAAGAAVEVDENAVCSTEEGPIGTAESVLTENGADAPASDNMVLRKLLRIPRYFDPGETLLETCFNCSEEGHVAANCPLEKRKKPCFVCGLFGHNAKQCTQGQDCFICKKGGHMAKDCPDKHRRNDHQSTLCLKCGEIGHDMFGCTNDYPPDDIEKIRCYVCNQKGHLCCSDFSDDCPKQISCYNCAQSGHSGLGCAKRRETSAVTTPTLCFKCGEEGHFARGCTKNAKIQRKEKWKKASSSARSAPYDARKTSKRKSPHLEERVGTPRHKPKSRGGWTGGDDLPLKKYKSNGWGSPSTPKKSYANHQFLSGCDYLTPQPSRRHNYHGTMSSPNHQFLSGCDYFTPESSRGHSHGTMSPNWNYSPSARKHGFSSSRFAAAAASNTHVRFGRN

SEQ ID NO: 179163 - protein, 323 aa, Zea Mays
MQSSARRLVPLSPRDYHSVTWGQDCFICKKGGHMAKDCPDKHRRNDHQSTLCLKCGEIGHDMFGCTNDYPPDDIEKIRCYVCNQKGHLCCSDFSDDCPKQISCYNCAQSGHSGLGCAKRRETSAVTTPTLCFKCGEEGHFARGCTKNAKSDRSKGKSSSHIQRKEKWKKASSSARSAPYDARKTSKRKSPHLEERVGTPRHKPKSRGGWTGGDDLPLKKYKSNGWGSPSTPKKSYANHQFLSGCDYLTPQPSRRHNYHGTMSSPNHQFLSGCDYFTPESSRGHSHGTMSPNWNYSPSARKHGFSSSRFAAAAASNTHVRFGRN

SEQ ID NO: 179164 - protein, 492 aa, Zea Mays
MAERWRSRARRDPDLDEDASPPSRQPRHSGGDEEDDELGNEDLSLEIVARAQRKRRGESAGGVPVFADLLSVSSADEEGAVVELDEADEPRRKQKKKQRRKQRKKHRKETTEAAAGAAVEVDENAVCSTEEGPIGTAESVLTENGADAPASDNMVLRKLLRIPRYFDPGETLLETCFNCSEEGHVAANCPLEKRKKPCFVCGLFGHNAKQCTQGQDCFICKKGGHMAKDCPDKHRRNDHQSTLCLKCGEIGHDMFGCTNDYPPDDIEKIRCYVCNQKGHLCCSDFSDDCPKQISCYNCAQSGHSGLGCAKRRETSAVTTPTLCFKCGEEGHFARGCTKNAKSDRSKGKSSSHIQRKEKWKKASSSARSAPYDARKTSKRKSPHLEERVGTPRHKPKSRGGWTGGDDLPLKKYKSNGWGSPSTPKKSYANHQFLSGCDYLTPQPSRRHNYHAPGSMGSRHQDSPRLPPATPMSGSGEISWMHAPDIVVRFSHR

SEQ ID NO: 179165 - protein, 252 aa, Zea Mays
MASPSSGNNGNYDPKTEKTRKASSNDSGWKYGYWANLKNRDQVTCNLCDTTVSRGIKRLKQHLEGGYEDTKICSKTTTAIIKEMRDYWKSNRRKRAIFLDDNEQQEEEEDVMVVDATAESVQVQQDAPIESQGSKVQPSPGTAANQRRATYLYKTPTSIKTKANQASKQNSIVEMLRKSPKDVVDERRKGCSQPTIPAKMKSKEEKDYVDMQWALWFYECGVPFNAAAATQFHVAVEAEREMCSWAISIMFW

SEQ ID NO: 179166 - protein, 245 aa, Zea Mays
MALHFCERYKLMVLKISSKFELRRFCRTTGAVAILKLSQPNADELGYADSVSVEEIGGTRVTVVKNEDGGNSVATVVLRGSTDSILDDLERAVDDGVNTYRSMCRDSRIIPGAAATEVELAKRLKEFSLKETGLDQYAIAKFAESFEMVPRTLAENAGLSAMEIISSLYAEHASGNAKVGIDLEEGACKDISTLKIWDLYVTKFFALKYSADAACTVLRVDQIIMAKPAGGPRRDAQPGGGMDED

SEQ ID NO: 179167 - protein, 312 aa, Zea Mays
MVGLGSMAGYGIQSMLKEGHRHLSGLEEAVLKNIDACRELSAITRTSLGPNGMNKMVINHLDKLFVTNDAATIVNELEVQHPAAKILVLAAKAQQEEIGDGANLTISFAGELLEKAEELIRMGLHPSEIIIGYTKAINKTIEILEDLVEKGSENMDVRNKEDVVLRMRSAVASKQFGQEDMLCPLVADACIQVCPKNPANFNVDNVRVAKLLGGGLHNSSVVRGMVLKNDAVGSIKRAEKAKIVVFAGGVDTSATETKGTVLIHSAEQKIMLRLRKLRWRSLSKLSLTLVPRLLSVELQWVTWHFISVNVIS

SEQ ID NO: 179168 - protein, 387 aa, Zea Mays
MGSSRCSRKAVLKNIDACRELSAITRTSLGPNGMNKMVINHLDKLFVTNDAATIVNELEVQHPAAKILVLAAKAQQEEIGDGANLTISFAGELLEKAEELIRMGLHPSEIIIGYTKAINKTIEILEDLVEKGSENMDVRNKEDVVLRMRSAVASKQFGQEDMLCPLVADACIQVCPKNPANFNVDNVRVAKLLGGGLHNSSVVRGMVLKNDAVGSIKRAEKAKIVVFAGGVDTSATETKGTVLIHSAEQLENYAKTEEAKVEELIKAVADSGAKVIVSGAAVGDMALHFCERYKLMVLKISSKFELRRFCRTTGAVAILKLSQPNADELGYADSVSVEEIGGTRVTVVKNEDGGNSVATVVLRGSTDSILDDLERAVDDGVNTYRGQ

SEQ ID NO: 179169 - protein, 406 aa, Zea Mays
MVGLGSMAGYGIQSMLKEGHRHLSGLEEAVLKNIDACRELSAITRTSLGPNGMNKMVINHLDKLFVTNDAATIVNELEVQHPAAKILVLAAKAQQEEIGDGANLTISFAGELLEKAEELIRMGLHPSEIIIGYTKAINKTIEILEDLVEKGSENMDVRNKEDVVLRMRSAVASKQFGQEDMLCPLVADACIQVCPKNPANFNVDNVRVAKLLGGGLHNSSVVRGMVLKNDAVGSIKRAEKAKIVVFAGGVDTSATETKGTVLIHSAEQLENYAKTEEAKVEELIKAVADSGAKVIVSGAAVGDMALHFCERYKLMVLKISSKFELRRFCRTTGAVAILKLSQPNADELGYADSVSVEEIGGTRVTVVKNEDGGNSVATVVLRGSTDSILDDLERAVDDGVNTYRGQ

SEQ ID NO: 179170 - protein, 71 aa, Zea Mays
MTRSYCPLLYRLSLALGMLFNIDQLKPIFQFILLLKHIIHAINNSNLFGYTNICKVLLFLIYKNGSQINSM

SEQ ID NO: 179171 - protein, 709 aa, Zea Mays
MGESQSSEDASRFRALGNGVSGAGQGSAGDNELHDGSIASQAVRAYPNGGRSLVSDVGLFDTLRVGSNQYFGFSHSASGNPYDEQSLSFAFEGMGFDSRKTNSPTSHHNVPLTNGHYPSERVDGTLSQQHAPATRQCDSLGLQFSVQHAMQNNDVEHQEQSPRFPPQLGTFSRNPELHSFDRNFGVPCHPSIASASSLKMWQSQMYTPHDQNVGSNFMWQQNTGVQPYSIMQPNYACPQMQQVSGFGISRHRSNEQAAVYPPAKGPSSSYIGTPNFHWLENGYSYLNGAASQKRRNSGGLNNTFADSFPSTSYTGSSCGSGDFHHFQWAEKVFNSYGPHHQQGDNLSHPYGLGLSHHQRSDIAHPYGLGFSHHQRSDKLNTAMMGRVCMLSKDQDACRFLQKLLSEGTQEDIDKIFGEIIDNVGDLMVDPTAHYLVQKILEECTNDQRTHMIREITKAPIKLHKASCNVHGTRVVQKVIDTMNTPDQVSMLVSALNTGMMCLMTDSYGNHVVDHCLQKLLPEHKAFILEAAASCYLQLARDRHGCCVLQKCIGHSSDEQRNNLLCKITSSALTLSEDPYGNYVIQFILDLNIEWITVRVVDELAGHFGNLSMQKCGSHVVEHCLKLAPRLICDRIINELMHDPKLLDIILDQYGNFVIQTALKQCQGEHHAAFVETIKPHTAVMQSNMYGKKVLSRICLKNKHCRFDLH

SEQ ID NO: 179172 - protein, 523 aa, Zea Mays
MGESQSSEDASRFRALGNGVSGAGQGSAGDNELHDGSIASQAVRAYPNGGRSLVSDVGLFDTLRVGSNQYFGFSHSASGNPYDEQSLSFAFEGMGFDSRKTNSPTSHHNVPLTNGHYPSERVDGTLSQQHAPATRQCDSLGLQFSVQHAMQNNDVEHQEQSPRFPPQLGTFSRNPELHSFDRNFGVPCHPSIASASSLKMWQSQMYTPHDQNVGSNFMWQQNTGVQPYSIMQPNYACPQMQQVSGFGISRHRSNEQAAVYPPAKGPSSSYIGTPNFHWLENGYSYLNGAASQKRRNSGGLNNTFADSFPSTSYTGSSCGSGDFHHFQWAEKVFNSYGPHHQQGDNLSHPYGLGLSHHQRSDIAHPYGLGFSHHQRSDKLNTASYVERIRMRPDVGNSVNFFDLSSYARLLNSPFLSSQSDTYKSIDEVMGRVCMLSKDQDACRFLQKLLSEGTQEDIDKIFGEIIDNVGDLMVDPTAHYLVQKILEECTNDQRTHMIREITKAPIKLHKASCNVHGVESCLTE

SEQ ID NO: 179173 - protein, 528 aa, Zea Mays
MGESQSSEDASRFRALGNGVSGAGQGSAGDNELHDGSIASQAVRAYPNGGRSLVSDVGLFDTLRVGSNQYFGFSHSASGNPYDEQSLSFAFEGMGFDSRKTNSPTSHHNVPLTNGHYPSERVDGTLSQQHAPATRQCDSLGLQFSVQHAMQNNDVEHQEQSPRFPPQLGTFSRNPELHSFDRNFGVPCHPSIASASSLKMWQSQMYTPHDQNVGSNFMWQQNTGVQPYSIMQPNYACPQMQQVSGFGISRHRSNEQAAVYPPAKGPSSSYIGTPNFHWLENGYSYLNGAASQKRRNSGGLNNTFADSFPSTSYTGSSCGSGDFHHFQWAEKVFNSYGPHHQQGDNLSHPYGLGLSHHQRSDIAHPYGLGFSHHQRSDKLNTASYVERIRMRPDVGNSVNFFDLSSYARLLNSPFLSSQSDTYKSIDEVMGRVCMLSKDQDACRFLQKLLSEGTQEDIDKIFGEIIDNVGDLMVDPTAHYLVQKILEECTNDQRTHMIREITKAPIKLHKASCNVHGSFLRLLHHAIFN

SEQ ID NO: 179174 - protein, 518 aa, Zea Mays
MGESQSSEDASRFRALGNGVSGAGQGSAGDNELHDGSIASQAVRAYPNGGRSLVSDVGLFDTLRVGSNQYFGFSHSASGNPYDEQSLSFAFEGMGFDSRKTNSPTSHHNVPLTNGHYPSERVDGTLSQQHAPATRQCDSLGLQFSVQHAMQNNDVEHQEQSPRFPPQLGTFSRNPELHSFDRNFGVPCHPSIASASSLKMWQSQMYTPHDQNVGSNFMWQQNTGVQPYSIMQPNYACPQMQQVSGFGISRHRSNEQAAVYPPAKGPSSSYIGTPNFHWLENGYSYLNGAASQKRRNSGGLNNTFADSFPSTSYTGSSCGSGDFHHFQWAEKVFNSYGPHHQQGDNLSHPYGLGLSHHQRSDIAHPYGLGFSHHQRSDKLNTASYVERIRMRPDVGNSVNFFDLSSYARLLNSPFLSSQSDTYKSIDEVMGRVCMLSKDQDACRFLQKLLSEGTQEDIDKIFGEIIDNVGDLMVDPTAHYLVQKILEECTNDQRTHMIREITKAPIKLHKASCNVHGRL

SEQ ID NO: 179175 - protein, 227 aa, Zea Mays
MSVMAAIRLDDNPDKIERALTTALLDGGPLSHKRSIEFASDPLASSTWEEVSPKDTLITPVQCKSIWRQFKAETEYSVAQAMSMQEAQRRSKNWLPPAWTILLLAILGYNEFMFLLRNPLYLLGLFVAFVLSYAIWMQYDITAYFRHGTLSALLTILSRLLPTIIDIMMQIINMKHKHKSPHPSRHPQHIHAQSFMNQTWGRAQVRYQSPDSPSSSSSVGSNSGDDS

SEQ ID NO: 179176 - protein, 472 aa, Zea Mays
METMYFDEGVRAAKRQQLESSMLDHAYPVIERVMEHLHLVALDKFKGDLEQSLRHTEGFAESVRRCSQTSMAEFDAGMTDTAVKHVQWDASKVRNKLQEHIQAHVECIRNAKLAELRANFEKKLSDAISGPVQSILETGERDSWACIRRLYRREIENAALSFSASLSEFDLDQTISNKMVSDLREYARSVVETKAREEAGNVLMRMKERFFTVLSHDKDSMPRSWMRDEDIRTITREARLGALRLMSVMAAIRLDDNPDKIERALTTALLDGGPLSHKRSIEFASDPLASSTWEEVSPKDTLITPVQCKSIWRQFKAETEYSVAQAMSMQEAQRRSKNWLPPAWTILLLAILGYNEFMFLLRNPLYLLGLFVAFVLSYAIWMQYDITAYFRHGTLSALLTILSRLLPTIIDIMMQIINMKHKHKSPHPSRHPQHIHAQSFMNQTWGRAQVRYQSPDSPSSSSSVGSNSGDDS

SEQ ID NO: 179177 - protein, 527 aa, Zea Mays
MVATVRCEEIANENLKQFLSDKGWLDLNAAVESGLPPSFGMRLSAILDSYLSEYDMETMYFDEGVRAAKRQQLESSMLDHAYPVIERVMEHLHLVALDKFKGDLEQSLRHTEGFAESVRRCSQTSMAEFDAGMTDTAVKHVQWDASKVRNKLQEHIQAHVECIRNAKLAELRANFEKKLSDAISGPVQSILETGERDSWACIRRLYRREIENAALSFSASLSEFDLDQTISNKMVSDLREYARSVVETKAREEAGNVLMRMKERFFTVLSHDKDSMPRSWMRDEDIRTITREARLGALRLMSVMAAIRLDDNPDKIERALTTALLDGGPLSHKRSIEFASDPLASSTWEEVSPKDTLITPVQCKSIWRQFKAETEYSVAQAMSMQEAQRRSKNWLPPAWTILLLAILGYNEFMFLLRNPLYLLGLFVAFVLSYAIWMQYDITAYFRHGTLSALLTILSRLLPTIIDIMMQIINMKHKHKSPHPSRHPQHIHAQSFMNQTWGRAQVRYQSPDSPSSSSSVGSNSGDDS

SEQ ID NO: 179178 - protein, 458 aa, Zea Mays
MDATGAVGVGGRDGECHAAQVVGADGEMDAAAIERFAAAAGLQGRGLSYAVVSILGPQGSGKSTLLNHLFGTSFREMDALKGRHQTTKGIWIAKAAGIEPFTVVLDLEGTDGRERGQDDTAFEKQSALFALAVSDIVMINLWCHDIGREHAANRPLLRTVFQVLMRLFSPRKTTLLLVIRDKTKTPLEYLTQALKEDIQKIWDSVQKPEAYKEAALSDFFDVEATALSSYEEKEELFKEQVGQLRQRFYHSIAPGGLAADRRGVIPASGFSLSALQIWEVIRENKDLNLPAHEVMVATVRCEEIANENLKQFLSDKGWLDLNAAVESGLPPSFGMRLSAILDSYLSEYDMETMYFDEGVRAAKRQQLESSMLDHAYPVIERVMEHLHLVALDKFKGDLEQSLRHTEGFAESVRRCSQTSMAEFDAGMTAFFMQIQQLNMCSGMLQKLGINCKSIYKLM

SEQ ID NO: 179179 - protein, 185 aa, Zea Mays
METRPAPCDLEAAVPAGSGAATAAAAQQEAPAAKKVAEEEDPRLRWAFVRKVYAILSLQFALTAAVAATACLVRPIPRFFASGPPAASCSPCSSTGRSTPGTSSCSPYSLSAAVSASPSPPPPPSAQWSCKLPSSQLLLSWGSPSSPSGASRGATTSPSRSPSCSPASSCCWCTSSSRSASRWEG

SEQ ID NO: 179180 - protein, 76 aa, Zea Mays
MARVSVIVAMISYIYSHHFFVSLISPITSLCPYGNNWTPLNSTFATPFFSTERGRWSRGGVEPVWCRSSTMVLASI

SEQ ID NO: 179181 - protein, 117 aa, Zea Mays
MENTNSLKIFGLSPITSLCPYGNNWTPLNSTFATPFFSTERGRWSRGGVEPDLLRWCWRRFECQSLEMNRLAMLSTGARTVRGSVSNGPRPQRRSDSFLVCFRTVRAWEGPCRGGEF

SEQ ID NO: 179182 - protein, 104 aa, Zea Mays
MTSATSMPPAHNPHPPRCSHRKTVQASFNYLHLLRRTQHRSTVHLYEDLDREEMVFLIMFNTACIRSNILMLNCDHIDMLWNGKYQFPKDFRFESHHKSLSVWK

SEQ ID NO: 179183 - protein, 56 aa, Zea Mays
MVHIGCCLAKYADIYFSSTKIYSADRVKFYPYLFLLFCKPNGVCIFLNIAIILASY

SEQ ID NO: 179184 - protein, 115 aa, Zea Mays
MWLRCCWVAATAQDGAHRGAVRKRAPHPAQRRRVQHHRLWPGRTRLVRELMLLVLPSPTWTRPPAGAPGGGGTSATAPAGTASCRRRLNHPSHAPTQQQRPAAPPREKANRGCGG

SEQ ID NO: 179185 - protein, 270 aa, Zea Mays
MGMFTKTGWKNLRTKHEEKTGQKLTKKQLKNKLDNMKKEYTWFMEFKNYATGLGWDEAKQTVDCSKEWWDEHLARCNNPGKGIKCNHVRFRKQGPKHLDDLHILFDKVHVSGATASCPGDISSDESSDDDVVEVQKTIDNVDVKLAALKKSKLGKRKRKDCSTATEEKDEKSPFFRLYKNTCLKIETAAEKISTSVEASSTPPTNPVPSIAEAMKMVKDCGVQEKTALMHTATFLIVKPEFREVFSLLETNEGRLDLLEREHEKESIKRM

SEQ ID NO: 179186 - protein, 60 aa, Zea Mays
MHFHFLYVFPGVAFGTLQFIAEMELRVSMEMHVAELSQVSIHCVCVRLFGHRVLPFHGES

SEQ ID NO: 179187 - protein, 881 aa, Zea Mays
MAEAIILALRKIGSALADETAKKMLAKLSEKVNNLRDLNDKIESIRMQLTAMNNVIRKIGTVYLTDEVVRGWIGEVRKVAYHVEDVMDMYSYHTLQMEEEWFLKKYFIKASHYVLVFSQIAEEVIKVEKEIKKVVELKNLWFEPSHLVADQLIEMERQRSHDNYPLLFKDEDLVGIEDNRRRLTEWLYSDELDSTVITVSGMGGLGKTTLVTNVYEREKTNFSATAWMVVSQTYTIEALLRKLLMKVGREEQVSPNIDKLDVHDLKENIKQKLDNRKCLIVLDDVWDQEVYLQMSDAFQNLQSSSIIITTRKNHVAALAQPTRRLVVHPLRNTQAFDLFCRRIFYNKEDHACPSDLVEVATNIVDRCQGLPLAIVSIACLLSSRTQTYYIWKQVYNQLRSELSKNDHIRAVLNLSYHDLPGDLRNCFLYCSLFPEDYPIPHESLVRLWVAEGFALSKENNTAEEVAEGNLMELIHRNMLVVVENDEQGRVSTCTMHDVVRDLALVVAKEERFGTANNYRAMIQVDKDKDVRRLSSYGWKDSTSLDVRLPRLRTLVSLGTISSSPNMLLSILSESSYLTVLELQDSEITEVPGSIGNLFNLRYIGLRRTKVRSLPDSIEKLLNLQTLDIKQTKIEKLPRGISKVKKLRHLLADRYADEKQSQFRYFVGMQAPKDLSSLVELQTLETVEASKDLAEQLKKLMQLRTLWIDNITNADCANIFASLSRLHRLIIRGQWAQRTLQCPIFQGHGRHLKYLALSWCHLSEDPLEMLAPHLPNLTNLRLNNMRSASILVLPPGSFHNLKLLVLMHMPNVKQLVIGEGALQCIEGLYIVSLVELDKVPQGIESLRSLKKLSLVKLHRDFLTEWNNSGMHQKMQHVQEIRV

SEQ ID NO: 179188 - protein, 850 aa, Zea Mays
MAEAIILALRKIGSALADETAKKMLAKLSEKVNNLRDLNDKIESIRMQLTAMNNVIRKIGTVYLTDEVVRGWIGEVRKVAYHVEDVMDMYSYHTLQMEEEWFLKKYFIKASHYVLVFSQIAEEVIKVEKEIKKVVELKNLWFEPSHLVADQLIEMERQRSHDNYPLLFKDEDLVGIEDNRRRLTEWLYSDELDSTVITVSGMGGLGKTTLVTNVYEREKTNFSATAWMVVSQTYTIEALLRKLLMKVGREEQVSPNIDKLDVHDLKENIKQKLDNRKCLIVLDDVWDQEVYLQMSDAFQNLQSSSIIITTRKNHVAALAQPTRRLVVHPLRNTQAFDLFCRRIFYNKEDHACPSDLVEVATNIVDRCQGLPLAIVSIACLLSSRTQTYYIWKQVYNQLRSELSKNDHIRAVLNLSYHDLPGDLRNCFLYCSLFPEDYPIPHESLVRLWVAEGFALSKENNTAEEVAEGNLMELIHRNMLVVVENDEQGRVSTCTMHDVVRDLALVVAKEERFGTANNYRAMIQVDKDKDVRRLSSYGWKDSTSLDVRLPRLRTLVSLGTISSSPNMLLSILSESSYLTVLELQDSEITEVPGSIGNLFNLRYIGLRRTKVRSLPDSIEKLLNLQTLDIKQTKIEKLPRGISKVKKLRHLLADRYADEKQSQFRYFVGMQAPKDLSSLVELQTLETVEASKDLAEQLKKLMQLRTLWIDNITNADCANIFASLSSMPLLSNLLLSAKDENEPLRIEALKPGSTGLHRLIIRGQWAQRTLQCPIFQGHGRHLKYLALSWCHLSEDPLEMLAPHLPNLTNLRLNNMRSASILVLPPGSFHNLKLLVLMHMPNVKQLVIGEGTS

SEQ ID NO: 179189 - protein, 142 aa, Zea Mays
MAMQHPNIVRILGYCREPQRKVIEQSGRYIIVDVVESLLYYEYVPNGNLEKYISDASASRPDWKTCFEIIKGICQGLRYLHKEMDRPIVHLDLHPTNILLDENMVPKITDFGLSRLFGEEQTRINTINVVGKKCVRRGQMST

SEQ ID NO: 179190 - protein, 633 aa, Zea Mays
MVHRQKPSSPIKDSIDEELQELILKCGGLPKVIVAVANFLAPKTVSWMDSASSMNLKFMQELESSPEFACLQPLFGWLHSYFRTCPDFLKPCIFYLSIFPRDHSIRRRRLVRRWIAEGYARDTDKISAEERGEQFFCRLLDLSIIMQKPYSVTTGFRDSRMTLCQVNSFVREYIISRQMEENLVFELGGSCTLTSQRMGRHLIILKSWDRDRIVFESIDFSRLRSLTVFGEWKPFFISDRMRLLRVLDLEDASDLKDEDLKQMMKLLCRLKYLSLRGCTGIYSLPNSLGCLRQLETLDVRHTAIATMPRTITKLKKLQYLRASTTKPTKEQPTPDTAVTPKPTKKQPNPHTSVSWTSSLFHRHRQLEGVVVPTGLEKLTALLTIGVVNVNSARGRSILKEVRKLTQLRKLGVSGISRNNSKDFCLAISSRAHLDSLSVKLKKDNQDCLCVTPDGYLPPKNLQSFKLYGLADSFPKWINQLENLRKLVLEMTILTQDTIKGLKDLKVCILRLITKQLPDGKLNFCVMLHGQQLRCYETVKILEISCSSSLDVAFGSQSLQNLELLKVSCCSGSGSVMKLSGLEKLSESELKEVQIKGSDDFIVKTDVEEQLARHPKKPVLKVEKVLSSTGDFEL

SEQ ID NO: 179191 - protein, 982 aa, Zea Mays
MLPPCLAASALPIKEAVTEIEQLKVRVEDVSRRNSRYSLISDSGSKPIMQQQTAPKTIFGTMVLDMMVEARDTAKRQQGLGDLTQLLTKEQADLGVISVWGTGSELGTTSIIRKAYQDPELCQKFECRGWVKLTQPFNPHEFLRSMVAQFYANSCLQNGMVINVDELKRIEEMATTGGGLIGAFMDKVNENRYLIVLENLSTIGDWDTIGTYLPDRKNGSRVIVSTQQCEIASLCIGHSYQVAEVKQYSAEHSVCVFFEEGLQGNGDKSMESDRVVDNNNEMSMQDEITHGTGFLSDRIPTSKRKDASDWVKNFQLVERKSEMNQLDNEGVVFNVKGLEDKAALKLFKKQVHRQKPSSPIKDSIDEELQELILKCGGLPKVIVAVANFLAPKTVSWMDSASSMNLKFMQELESSPEFACLQPLFGWLHSYFRTCPDFLKPCIFYLSIFPRDHSIRRRRLVRRWIAEGYARDTDKISAEERGEQFFCRLLDLSIIMQKPYSVTTGFRDSRMTLCQVNSFVREYIISRQMEENLVFELGGSCTLTSQRMGRHLIILKSWDRDRIVFESIDFSRLRSLTVFGEWKPFFISDRMRLLRVLDLEDASDLKDEDLKQMMKLLCRLKYLSLRGCTGIYSLPNSLGCLRQLETLDVRHTAIATMPRTITKLKKLQYLRASTTKPTKEQPTPDTAVTPKPTKKQPNPHTSVSWTSSLFHRHRQLEGVVVPTGLEKLTALLTIGVVNVNSARGRSILKEVRKLTQLRKLGVSGISRNNSKDFCLAISSRAHLDSLSVKLKKDNQDCLCVTPDGYLPPKNLQSFKLYGLADSFPKWINQLENLRKLVLEMTILTQDTIKGLKDLKVCILRLITKQLPDGKLNFCVMLHGQQLRCYETVKILEISCSSSLDVAFGSQSLQNLELLKVSCCSGSGSVMKLSGLEKLSESELKEVQIKGSDDFIVKTDVEEQLARHPKKPVLKVEKVLSSTGDFEL

SEQ ID NO: 179192 - protein, 1023 aa, Zea Mays
MLPPCLAASALPIKEAVTEIEQLKVRVEDVSRRNSRYSLISDSGSKPIMQQQTAPKTIFGTMVLDMMVEARDTAKRQQGLGDLTQLLTKEQADLGVISVWGTGSELGTTSIIRKAYQDPELCQKFECRGWVKLTQPFNPHEFLRSMVAQFYANSCLQNGMVINVDELKRIEEMATTGGGLIGAFMDKVNENRYLIVLENLSTIGDWDTIGTYLPDRKNGSRVIVSTQQCEIASLCIGHSYQVAEVKQYSAEHSVCVFFEEGLQGNGDKSMESDRVVDNNNEMSMQDEITHGTGFLSDRIPTSKRKDASDWVKNFQLVERKSEMNQLGNYIAKSIEEWDLIQAALVSRPSRSIIIVITTEASIATYCADNEGVVFNVKGLEDKAALKLFKKQVHRQKPSSPIKDSIDEELQELILKCGGLPKVIVAVANFLAPKTVSWMDSASSMNLKFMQELESSPEFACLQPLFGWLHSYFRTCPDFLKPCIFYLSIFPRDHSIRRRRLVRRWIAEGYARDTDKISAEERGEQFFCRLLDLSIIMQKPYSVTTGFRDSRMTLCQVNSFVREYIISRQMEENLVFELGGSCTLTSQRMGRHLIILKSWDRDRIVFESIDFSRLRSLTVFGEWKPFFISDRMRLLRVLDLEDASDLKDEDLKQMMKLLCRLKYLSLRGCTGIYSLPNSLGCLRQLETLDVRHTAIATMPRTITKLKKLQYLRASTTKPTKEQPTPDTAVTPKPTKKQPNPHTSVSWTSSLFHRHRQLEGVVVPTGLEKLTALLTIGVVNVNSARGRSILKEVRKLTQLRKLGVSGISRNNSKDFCLAISSRAHLDSLSVKLKKDNQDCLCVTPDGYLPPKNLQSFKLYGLADSFPKWINQLENLRKLVLEMTILTQDTIKGLKDLKVCILRLITKQLPDGKLNFCVMLHGQQLRCYETVKILEISCSSSLDVAFGSQSLQNLELLKVSCCSGSGSVMKLSGLEKLSESELKEVQIKGSDDFIVKTDVEEQLARHPKKPVLKVEKVLSSTGDFEL

SEQ ID NO: 179193 - protein, 577 aa, Zea Mays
MGDLVVGLAKSVVEGVLTKAQSAIEEESKLRQSAQRDLVFITGEFEMMHSFLNVANEERAKNNVVRTWVRQVRDLAYDVEDCIEFVVHLDNRPHWWRRFIPSCMPASALPVDAVVAEIEKIKVRVEDVSKRNSRYSLISDSGSKPVMQQQPATGPAIGTTTLDMFVESRDATKKQQGLGDITQLITKENIDLGVISLWGTGGDLGKTSIIRKAYQDQEICENFGCRGWIKLTYPFNPHKFLQSLVTQFYTNSCLQQGTTLDVAQLKRMVAKRGIIEEFTKQVDGKRYLLVLENMCTMGEWDAIRACLPHRNKGNWIIVSTEHHEIASLCVGHSYQVLELKQYSAEYPVCVFFKESKKTGRVISSSGEILEDEMSHRGGLTYGRIPTSRKALASSWMDQSTLVGRESQMNELRKYQTTARFKDWQVMSVWGIAGVGKSDLVKNLYYERMLKEDPMFDKYGWVHVSHPFNLRDFSRNLLLDFHSDAVGIRDPIQECHKLLKEHQCLVVIDDLQSVEEWDLIRPALVSRHSKSVIIVITTDEKIATYCADDEEVVFNVKCLEAEASFDLFKKELTVRLTN

SEQ ID NO: 179194 - protein, 1124 aa, Zea Mays
MGDLVVGLAKSVVEGVLTKAQSAIEEESKLRQSAQRDLVFITGEFEMMHSFLNVANEERAKNNVVRTWVRQVRDLAYDVEDCIEFVVHLDNRPHWWRRFIPSCMPASALPVDAVVAEIEKIKVRVEDVSKRNSRYSLISDSGSKPVMQQQPATGPAIGTTTLDMFVESRDATKKQQGLGDITQLITKENIDLGVISLWGTGGDLGKTSIIRKAYQDQEICENFGCRGWIKLTYPFNPHKFLQSLVTQFYTNSCLQQGTTLDVAQLKRMVAKRGIIEEFTKQVDGKRYLLVLENMCTMGEWDAIRACLPHRNKGNWIIVSTEHHEIASLCVGHSYQVLELKQYSAEYPVCVFFKESKKTGRVISSSGEILEDEMSHRGGLTYGRIPTSRKALASSWMDQSTLVGRESQMNELRKYQTTARFKDWQVMSVWGIAGVGKSDLVKNLYYERMLKEDPMFDKYGWVHVSHPFNLRDFSRNLLLDFHSDAVGIRDPIQECHKLLKEHQCLVVIDDLQSVEEWDLIRPALVSRHSKSVIIVITTDEKIATYCADDEEVVFNVKCLEAEASFDLFKKEELESNPEFSVLQDLFAWMHSYFRACPDFLRPCIFYMSIFPGSQIIRRRRLVMRWVAEGYSRDTKDITAEEKGEMFFSMLVNLSMIQPPTCRVITDMKMVLCQVSAFFHEYIISRPVEENIIFALEVFALKGRCLPTTGRTGRHLVIERCWDRDRIVFESIDFSRLRSLTVFGQWESFFISKSMKVLRVLDLENATGVTDKDLEQMVKLLPRLKFLSLRGSTGICHLPSSLGELRQLETLDIRGTFIAKLPASITKLKKLQYMRAGTISLAKESSTSYSSASRLPNLCKSCKLVGVEMPSGIDELTPLHTLGVVNAGIGGGKATLKELKKITQLRKLGVSGVNKKNNKEFCAAISCHVRLESLSVWLSKGNQGLNEISSQDKPLQNLQSLKLYGLGSEVPAWMKDLPKLTKLDLHMTISAEVDIIKVLGEIKELCTLRLCVKPLQDGDGKLDFCVWVNGIQQRCYLNLKILEITCSSKLNISFGSEAMQNLELLRARCCSGSTLKFMEIKNLSKQKLKEVQLIGSHDTALKDDMEKQLKEHPRKPPLKLEEPEGC

SEQ ID NO: 179195 - protein, 619 aa, Zea Mays
MGDLVVGLAKSVVEGVLTKAQSAIEEESKLRQSAQRDLVFITGEFEMMHSFLNVANEERAKNNVVRTWVRQVRDLAYDVEDCIEFVVHLDNRPHWWRRFIPSCMPASALPVDAVVAEIEKIKVRVEDVSKRNSRYSLISDSGSKPVMQQQPATGPAIGTTTLDMFVESRDATKKQQGLGDITQLITKENIDLGVISLWGTGGDLGKTSIIRKAYQDQEICENFGCRGWIKLTYPFNPHKFLQSLVTQFYTNSCLQQGTTLDVAQLKRMVAKRGIIEEFTKQVDGKRYLLVLENMCTMGEWDAIRACLPHRNKGNWIIVSTEHHEIASLCVGHSYQVLELKQYSAEYPVCVFFKESKKTGRVISSSGEILEDEMSHRGGLTYGRIPTSRKALASSWMDQSTLVGRESQMNELRKYQTTARFKDWQVMSVWGIAGVGKSDLVKNLYYERMLKEDPMFDKYGWVHVSHPFNLRDFSRNLLLDFHSDAVGIRDPIQECHKLLKEHQCLVVIDDLQSVEEWDLIRPALVSRHSKSVIIVITTDEKIATYCADDEEVVFNVKCLEAEASFDLFKKEAINRLNCHVSEMSEVFRKKLSKLRGWVMALVGPRDWCLGLQSKGAVFFF

SEQ ID NO: 179196 - protein, 574 aa, Zea Mays
MGDLVVGLAKSVVEGVLTKAQSAIEEESKLRQSAQRDLVFITGEFEMMHSFLNVANEERAKNNVVRTWVRQVRDLAYDVEDCIEFVVHLDNRPHWWRRFIPSCMPASALPVDAVVAEIEKIKVRVEDVSKRNSRYSLISDSGSKPVMQQQPATGPAIGTTTLDMFVESRDATKKQQGLGDITQLITKENIDLGVISLWGTGGDLGKTSIIRKAYQDQEICENFGCRGWIKLTYPFNPHKFLQSLVTQFYTNSCLQQGTTLDVAQLKRMVAKRGIIEEFTKQVDGKRYLLVLENMCTMGEWDAIRACLPHRNKGNWIIVSTEHHEIASLCVGHSYQVLELKQYSAEYPVCVFFKESKKTGRVISSSGEILEDEMSHRGGLTYGRIPTSRKALASSWMDQSTLVGRESQMNELRKYQTTARFKDWQVMSVWGIAGVGKSDLVKNLYYERMLKEDPMFDKYGWVHVSHPFNLRDFSRNLLLDFHSDAVGIRDPIQECHKLLKEHQCLVVIDDLQSVEEWDLIRPALVSRHSKSVIIVITTDEKIATYCADDEEVVFNVKCLEAEASFDLFKKEVCYQ

SEQ ID NO: 179197 - protein, 577 aa, Zea Mays
MGDLVVGLAKSVVEGVLTKAQSAIEEESKLRQSAQRDLVFITGEFEMMHSFLNVANEERAKNNVVRTWVRQVRDLAYDVEDCIEFVVHLDNRPHWWRRFIPSCMPASALPVDAVVAEIEKIKVRVEDVSKRNSRYSLISDSGSKPVMQQQPATGPAIGTTTLDMFVESRDATKKQQGLGDITQLITKENIDLGVISLWGTGGDLGKTSIIRKAYQDQEICENFGCRGWIKLTYPFNPHKFLQSLVTQFYTNSCLQQGTTLDVAQLKRMVAKRGIIEEFTKQVDGKRYLLVLENMCTMGEWDAIRACLPHRNKGNWIIVSTEHHEIASLCVGHSYQVLELKQYSAEYPVCVFFKESKKTGRVISSSGEILEDEMSHRGGLTYGRIPTSRKALASSWMDQSTLVGRESQMNELRKYQTTARFKDWQVMSVWGIAGVGKSDLVKNLYYERMLKEDPMFDKYGWVHVSHPFNLRDFSRNLLLDFHSDAVGIRDPIQECHKLLKEHQCLVVIDDLQSVEEWDLIRPALVSRHSKSVIIVITTDEKIATYCADDEEVVFNVKCLEAEASFDLFKKEDLLCRIF

SEQ ID NO: 179198 - protein, 583 aa, Zea Mays
MGDLVVGLAKSVVEGVLTKAQSAIEEESKLRQSAQRDLVFITGEFEMMHSFLNVANEERAKNNVVRTWVRQVRDLAYDVEDCIEFVVHLDNRPHWWRRFIPSCMPASALPVDAVVAEIEKIKVRVEDVSKRNSRYSLISDSGSKPVMQQQPATGPAIGTTTLDMFVESRDATKKQQGLGDITQLITKENIDLGVISLWGTGGDLGKTSIIRKAYQDQEICENFGCRGWIKLTYPFNPHKFLQSLVTQFYTNSCLQQGTTLDVAQLKRMVAKRGIIEEFTKQVDGKRYLLVLENMCTMGEWDAIRACLPHRNKGNWIIVSTEHHEIASLCVGHSYQVLELKQYSAEYPVCVFFKESKKTGRVISSSGEILEDEMSHRGGLTYGRIPTSRKALASSWMDQSTLVGRESQMNELRKYQTTARFKDWQVMSVWGIAGVGKSDLVKNLYYERMLKEDPMFDKYGWVHVSHPFNLRDFSRNLLLDFHSDAVGIRDPIQECHKLLKEHQCLVVIDDLQSVEEWDLIRPALVSRHSKSVIIVITTDEKIATYCADDEEVVFNVKCLEAEASFDLFKKEFGCTIRSIQCDNG

SEQ ID NO: 179199 - protein, 185 aa, Zea Mays
MSSVFSGDETAPFFGFLGAAAALVFSCMGAAYGTAKSGVGVASMGVMRPELVMKSIVPVVMAGVLGIYGLIIAVIISTGINPKAKPYYLFDGYAHLSSGLACGLAGLAAGMAIGIVGDAGVRANAQQPKLFVGMILILIFAEALALYGLIVGIILSSRAAPFDERYEQEASRKLVFSELYEASKQ

SEQ ID NO: 179200 - protein, 880 aa, Zea Mays
MIRIIYNENQEAERAESLNEKLVLATSSNDSSPQHDQSMKPDIYQSPLLFPNIRNDDVPDSVKNLNEKVSPKFKVDDVQDSVKSLNEKLSAALLTINDKDDLVKQHTRVAEEAVAGWEQAEAEVASLKQLLETASKKNTSLEDQVSHLDDALKECVRQLRQAREEQENKIHETVAKKSKELESEKFELQHHIAELSKQLQATKLEATTVRVQRDLQEKLQIVEKENKDLKVELLALSKDLKILARERDLSNQAAETASKLHLESVKKITRVEAECLKLRHLTRRTSLTNDSRLITNSACMESQTDSQSDSGEHMLVDEMKNSDSWATALIAELDQFKNANNDTRNLVNNSVEIDLMDDFLEMEKLAALPEVDCVSSSFGAETDSDQGVSRDKSSKVKTEPLQCQVTDLHAKIEKIEGEKRELEMALADARVQLGTSCDALMVANNRLIDLQMQLDLANESKHAAFGEAERLNGERKDLALQLESRSSQVDELQLMVASLEKNVDRKVLELQLELVSVEAADLRKTVASLEEKIDAEITLSMQHKTNADLAEASKESLEAQLQSANTEIGKLNGIVQTLENEVRKETDSREELLKQIEAMKIESERSLSVVSTKESLEVQLQVANSEVAKLRGMVNALECDAANEKAYSSDLQMQLEAVEGIRKVLESELESSHQEVMRLKEKVSSLEARIKDQTSLLVEYTAKSEDAVSRKKAMEGQLEAANLEVTKLRNKVSLIQGKVEQEKLLSEEYEAKCRKLEAQVLRDSREAKLWRLTNSNGDLKVKQEKELVSAAGKLAECQKTIANLGRQLKSLTDLDGVVADPEKLESRDTHLDFRDGGDVADGLYELGLPKRNGSCLSPLRSDPSPRGLPSLSSYLSKTKR

SEQ ID NO: 179201 - protein, 926 aa, Zea Mays
MIRIIYNENQEAERAESLNEKLVLATSSNDSSPQHDQSMKPDIYQSPLLFPNIRNDDVPDSVKNLNEKVSPKFKVDDVQDSVKSLNEKLSAALLTINDKDDLVKQHTRVAEEAVAGWEQAEAEVASLKQLLETASKKNTSLEDQVSHLDDALKECVRQLRQAREEQENKIHETVAKKSKELESEKFELQHHIAELSKQLQATKLEATTVRVQRDLQEKLQIVEKENKDLKVELLALSKDLKILARERDLSNQAAETASKLHLESVKKITRVEAECLKLRHLTRRTSLTNDSRLITNSACMESQTDSQSDSGEHMLVDEMKNSDSWATALIAELDQFKNANNDTRNLVNNSVEIDLMDDFLEMEKLAALPEVDCVSSSFGAETDSDQGVSRDKSSKVKTEPLQCQVTDLHAKIEKIEGEKRELEMALADARVQLGTSCDALMVANNRLIDLQMQLDLANESKHAAFGEAERLNGERKDLALQLESRSSQVDELQLMVASLEKNVDRKVLELQLELVSVEAADLRKTVASLEEKIDAEITLSMQHKTNADLAEASKESLEAQLQSANTEIGKLNGIVQTLENEVRKETDSREELLKQIEAMKIESERSLSVVSTKESLEVQLQVANSEVAKLRGMVNALECDAANEKAYSSDLQMQLEAVEGIRKVLESELESSHQEVMRLKEKVSSLEARIKDQTSLLVEYTAKSEDAVSRKKAMEGQLEAANLEVTKLRNKVSLIQGKVEQEKLLSEEYEAKCRKLEAQVLRDSREAKLWRLTNSNGDLKEKELVSAAGKLAECQKTIANLGRQLKSLTDLDGVVADPEKLESRDTHLDFRDGGDVADGLYELGLPKRNGSCLSPLRSDPSPRGLPSLSSYLSKTKRVCDKFTRSCETVVRYSRVGIQLVYNKNRRKKTNSTGRQSRSRADQTNVQ

SEQ ID NO: 179202 - protein, 300 aa, Zea Mays
MSSTAAVALNRRTRSRPPSVASSRRSDDPTAAGAGAPANGNGKVSTKPASPDHTSGERTVKKLRLSKALTIAEGTTVSEACRRMAARRVDAVLLTDAGGLLSGIVTDKDIATRVIAEGLRVEQTIISKIMTRNPSYVMADTPAIEALHKMVQGKFRHLPVVENGEVIAMLDIAKCLYDAISRLEKAAEQGSALAAAIEGVERQLGGNFSGPHNLLETLRERMFKPSLSTIITENTKVATVSLSDPVCVATRKMRDLRVNSVIIMAGNSLHGIFTSKDVLMRVVAQNLSPELTLVEKCLLF

SEQ ID NO: 179203 - protein, 248 aa, Zea Mays
MTAHPDCATLDTTILDALHIMHDGKFLHIPVLDGDGQVAACLDVLQLTHAAISMVEGGPGGANDVANTIMQKFWDSALEPPDEDFDSHSELSLVVPSDAGDGRSCIYPPAVGNSFVFKLQDRKGRMHRFTCGSESLDELMSSVIQRLGMGDEKSVIQLLYEDDEGDKVLLTTNSDLTGAVLYAKSSGLKALRLHIDDSDSSNEVTQPLPELASSPHGSQSMHVHYGLMACAIALTGVAVMVYMRHSKA

SEQ ID NO: 179204 - protein, 63 aa, Zea Mays
MASAATTLLKSSFLPKKAEWGSKHQLVAAHPRPATVVVSMVARASAYADELVQTAFAILLIIF

SEQ ID NO: 179205 - protein, 155 aa, Zea Mays
MIDTDNSGTITFDELKDGLKRVGSELTENEIQALMEAADIDNSGTIDYGEFIAATLHMNKLEREENLVSAFSFFDKDGSGFITIDELSQACHEFGLDDVHLEDMIKDVDQNNDGQIDYSEFTAMMRKGNAGATGRRTMRNSLHLNLGELLNPSKT

SEQ ID NO: 179206 - protein, 311 aa, Zea Mays
MQPDPSGNTNAKAKLPLMAPAPSSGRPASVLPYKTANVRDHYRIGKKLGQGQFGTTYHCVGKADGAEYACKSIPKRKLLCREDYEDVYREIQIMHHLSEHPNVVRIRGAYEDALFVHIVMELCAGGELFDRIVAKGHYSERAAANLIKTIVGVVEGCHSLGVMHRDLKPENFLFASTAEEAPLKATDFGLSMFYKPGDKFSDVVGSPYYVAPEVLQKCYGPEADVWSAGVILYILLCGVPPFWAGRLCEPNLILNLNPGPVFLIALRIWSAICLLGILKRDLVLMRFSATHGLLMMPWRLISLLILLFSQG

SEQ ID NO: 179207 - protein, 277 aa, Zea Mays
MKRVSSHVSLASEAEINLDLSRLIIDKPRFTLERKRSFDEQSWSELSHRQNDGFDSVLQSPAFPSGVFDSPFSVGTHFGGPHPLVNEAWEALRKSVVYFREQPVGTIAAVDHASEEVLNYDQVFVRDFVPSALAFLMNNETDIVKNFLLKTLHLQSSEKMVDRFKLGAGAMPASFKVDRNKNRNTETLVADFGESAIGRVAPVDSGFWWIILLRAYTKYTGDVSLSESPECQKCMRLILNLCLSEGFDTFPTLLCTDGCSMIDRRMVGPFHLDLIHI

SEQ ID NO: 179208 - protein, 274 aa, Zea Mays
MLRSRFAGTIVKAQQKALLDHGKNIDPVKLQLEKERLEKRQQEEKARIEAQVKAAEAAAQQKFEEEMRVKREQEREAARLAVRMMKKTVDIDNSDFLKELENFSKTWQSNPPGKLIVDFIDGDLPPGLGSPLERLGLFMKNDLEDEVEQEVEDSASPSMDVDMRKDLAGHEMQDSISPVKVIGTKDDFQGADINTRKDFQEDAAGHEMQDCISAVKVIGTKDDFQGAVGHEMANSLSPSTFVDTKKYSEGTEHEMVDSISPLMDPNTEEGEISC

SEQ ID NO: 179209 - protein, 324 aa, Zea Mays
MLALEDPVQSSVTVGVSHFERCSLWVQVLYYPFYGSGGSADYEGNYAEEEDSQMMRQKRSLRPELGEPVVLRCQPYKFPLAELLLPLECSPVEYFRLWPSLPAMVECTGTYTYEGSGFKATAAQQYDSSPFLGGLKSISSKPFHQVCSHFIRTVAGFQLCYAAKTWFGGFVGMMIFGASEVSRNVDLGDETTTMICKFVMRASNESITREIESDLQGWLDDITDGAVEYMPEDEVKSAAAERLKISMERISLLKAAKPKVPPAKTEQEEEEERKQSEELDGFGNPKGPSTLSKLTAEEAEHRALQAAVLQEWHQLCKEKAMKAQ

SEQ ID NO: 179210 - protein, 830 aa, Zea Mays
MDLLIAQITTDLRSSDALRQSLALLQALQQCAAGRDVSALARTAATEILSAPSSAVCKRLALDLLRALPLPPDLLDPLLLSSLRSDLSFPDPDVASSSIASFPSLPSHLLPSLLSSAHAEIANALSSPAESLRLGAVTSLSSFLPRDDLVLMCSTNPSLMAHATTWWARLAELALDSADAVSAGAFEALARLFQELEGRRMSRLAGDKLVDGEGVLAVRAQWAADAIDFIWSRRNMLIARSVVMPAESFRLTVHPLVHAAKMVASGVVNTLQRIAKPGDTTIADSVESSAEKLVGVSDIVSHLLPFLSSLDPPLVFEVGINMLALADVPGGKPEWASAAIIAILTLWDRQEFSSMRETIVRAVVTNLHLLDLGMQVSLFKRLLQMVRNLRAESDRMHALACICRTALCVDLFAKESVRRGQKPVPGTDVISLFEDVRLKEDLNSVTSKNLFREELVASLVESCFQLSLPLPELKNSGTESRVIGALAYGTGYGALNWTEPALDVVEVCRPCVLWDCDGRTYAVDCYLKLFGRLCHIYDTRGGVKTIKAGASQDQILNEMRLRNLQLQLIRDLREVHTPRISSRLIWAISEHFDLEGLDPLLADDPEDPLNIIISNMHKILFNIDSSATTSNRIQDVQAVLICAQRLGARNTRAGQLLTKELEEFRASTSADSVTKHQSRYVLQVIKYVTNHPNNRWVAVGDATGDYPFSHHKLTVQFSEASAAQDRKLEVLVHKAIQELWRPHPSQLTLLQTKGISALHKELPKACTLTGSSDPCYIEAYHLADPTDGRITLHLKGGHSCWPLWSTVLYGWFLSDCSPPRKSCFPGSCPK

SEQ ID NO: 179211 - protein, 575 aa, Zea Mays
MDLLIAQITTDLRSSDALRQSLALLQALQQCAAGRDVSALARTAATEILSAPSSAVCKRLALDLLRALPLPPDLLDPLLLSSLRSDLSFPDPDVASSSIASFPSLPSHLLPSLLSSAHAEIANALSSPAESLRLGAVTSLSSFLPRDDLVLMCSTNPSLMAHATTWWARLAELALDSADAVSAGAFEALARLFQELEGRRMSRLAGDKLVDGEGVLAVRAQWAADAIDFIWSRRNMLIARSVVMPAESFRLTVHPLVHAAKMVASGVVNTLQRIAKPGDTTIADSVESSAEKLVGVSDIVSHLLPFLSSLDPPLVFEVGINMLALADVPGGKPEWASAAIIAILTLWDRQEFSSMRETIVRAVVTNLHLLDLGMQVSLFKRLLQMVRNLRAESDRMHALACICRTALCVDLFAKESVRRGQKPVPGTDVISLFEDVRLKEDLNSVTSKNLFREELVASLVESCFQLSLPLPELKNSGTESRVIGALAYGTGYGALNWTEPALDVVEVCRPCVLWDCDGRTYAVDCYLKLFGRLCHIYDTRGGVKTIKAGASQDQILNEMRLRNLQLQLIRDLREL

SEQ ID NO: 179212 - protein, 1385 aa, Zea Mays
MDLLIAQITTDLRSSDALRQSLALLQALQQCAAGRDVSALARTAATEILSAPSSAVCKRLALDLLRALPLPPDLLDPLLLSSLRSDLSFPDPDVASSSIASFPSLPSHLLPSLLSSAHAEIANALSSPAESLRLGAVTSLSSFLPRDDLVLMCSTNPSLMAHATTWWARLAELALDSADAVSAGAFEALARLFQELEGRRMSRLAGDKLVDGEGVLAVRAQWAADAIDFIWSRRNMLIARSVVMPAESFRLTVHPLVHAAKMVASGVVNTLQRIAKPGDTTIADSVESSAEKLVGVSDIVSHLLPFLSSLDPPLVFEVGINMLALADVPGGKPEWASAAIIAILTLWDRQEFSSMRETIVRAVVTNLHLLDLGMQVSLFKRLLQMVRNLRAESDRMHALACICRTALCVDLFAKESVRRGQKPVPGTDVISLFEDVRLKEDLNSVTSKNLFREELVASLVESCFQLSLPLPELKNSGTESRVIGALAYGTGYGALNWTEPALDVVEVCRPCVLWDCDGRTYAVDCYLKLFGRLCHIYDTRGGVKTIKAGASQDQILNEMRLRNLQLQLIRDLREVHTPRISSRLIWAISEHFDLEGLDPLLADDPEDPLNIIISNMHKILFNIDSSATTSNRIQDVQAVLICAQRLGARNTRAGQLLTKELEEFRASTSADSVTKHQSRYVLQVIKYVTNHPNNRWVAVGDATGDYPFSHHKLTVQFSEASAAQDRKLEVLVHKAIQELWRPHPSQLTLLQTKGISALHKELPKACTLTGSSDPCYIEAYHLADPTDGRITLHLKILNLTELELNRVDIRVGLSGALYYMDGFSRTVRHLGNLVSQDPVQSSVTVGVSHFERCSLWVQVLYYPFYGSGGSADYEGNYAEEEDSQMMRQKRSLRPELGEPVVLRCQPYKFPLAELLLPLECSPVEYFRLWPSLPAMVECTGTYTYEGSGFKATAAQQYDSSPFLGGLKSISSKPFHQVCSHFIRTVAGFQLCYAAKTWFGGFVGMMIFGASEVSRNVDLGDETTTMICKFVMRASNESITREIESDLQGWLDDITDGAVEYMPEDEVKSAAAERLKISMERISLLKAAKPKVPPAKTEQEEEEERKQSEELDGFGNPKGPSTLSKLTAEEAEHRALQAAVLQEWHQLCKEKAMKAQYCVANKLFVTVAFLRSGVKINYASADAPEVKKKRKLQCSLDMQPMSTQAKLDISDDVVDAGLVDDVEGGGMVKTVRYVGEEMEEDDDDDEGVLALVGYAADPVLTLEGAPAPEGALALEGVVLGSPSAASMEVQVGSLMPPIDDAVATSSTLPIRSRPDDPTTFGEATPSQVPEDATTTSTSVGIPMGVALRLGDLEPLALVPTSFVASTDVATSGLSWLHQLWIFQCFY

SEQ ID NO: 179213 - protein, 226 aa, Zea Mays
MAPALVAGAMWWRSSPLAVQDRLGLLFFVSIFWGVFASFNAVFAFPQERPVLARERASGMYALSSYFMSRMAGDLPMELALPTAFTVVVYLMAALNPSPAAFALTLAVILAYVLVAEGLGLAVGAAMMDAKRASTLVTVVMLAYLLTGGFYVHNVPGFMVWAKYTSFTYYCYRLLIAVQYGGHLKRLLPPEAVDGEAGPGACIAALVAMFFGYRLLAYLALRRVRK

SEQ ID NO: 179214 - protein, 326 aa, Zea Mays
MPPNAEDVHGSGGGGALATTAPAASKMDCFLTTVCTPLDLQFIDVSYRVKQTERSASKAPPGGRISHSGPGAPATAEERTILKGITGEARPGEVLAVLGPSGSGKSTLLSILGGRLAGRHSGTVLAGGRPPCRAVQRRTGFVAQDDVLHPHLTVRETLAFCAMLRLPRSAPASAKAAAAEAVIAELGLAACADTVVGNAFVRGVSGGERKRVSIGHELLVNPSLLVLDEPTSGLDSTAAARLVATLSALARKGRTVVLSVHQPSSRVYRMFDSVLLLAEGSCLYFGAGRDAMDYFASVGFAPGFHVNPADFMLDLANGTPVTEGGN

SEQ ID NO: 179215 - protein, 72 aa, Zea Mays
MANSRTRIQLQNARDHISQDFLFLDLLKQVKVLFLEQHFIFPSVRDLDTLQRIRITRIHQTLHRRAHAPDGH

SEQ ID NO: 179216 - protein, 769 aa, Zea Mays
MPHSRLKWRKRKLNPDASPSKPSISTAAADHSSDSDSAALNDDEDPSALGATGDGATDNDADAAASEDPAVELREAEVLPSADAISSFPAAKRRVVNRPHASILALLEAERSACSGDVPTVALPALENISHGQLQVLSGVLPDHPSLATDPDKPSLYVCTPPPLMEGHGVPKQFQGRFHVVPKHSDWFSPGTVHRLERQVVPHFFTGKSPGHTPEKYVMLRNKVIAKYLENPSKRLAFAECQGLVGSTSELYDLSRIVRFLDTWGIINYLAAGSVHRGLRMATSLLREEPTGELQLLTAPLKSIDGLILFDRPKCSLPVEDISRMAATSSNSEAVDFDAAFSDLDGKIRERLSESSCSYCLQPLPSLHYRSQKEADIFLCSDCFHDARYITGHSCLDFQRVDGDNDESENDSDKWTDEETLLLLEGIEKYNDNWDDIAGHVGTKSKAQCIYHFIRLPVEDCLLENVEIPNAPIPFRPQSNGYQCLDSNGSTSGAPVQNIQQGNELPFINSSNPVMSLVAFLASSIGPRVAASCAHAALSFLTRDEDSRVSSEGSHAGGLGNGANSNFQNHNGNVKYAAMLGLSAAAMKSKLFADQEEREVQRLTATVINHQLKRLELKLKQFAEVETLLLKECEQVERVRHRISAERVRMRSALLGPTGSGLPGGSCSTMPSNPAGMSPRPVGVPGYMPQTSMPATYANNLQGHGNPQMPFLHQRPQMLSFGPRLPLSAIQTQPSPQSSNMFNSGMPNSIAPNHHQLLRSSSGNNSSAG

SEQ ID NO: 179217 - protein, 108 aa, Zea Mays
MELTSTSLCAPPPRVPAPSSPGARAQLPARRDGPLAPARPCPQPWRLAAAAPAFHGSTSCFLVVGALPNISAGGCLHPLHGELAPAFLLAQDPLPCSSHLLWTPALTS

SEQ ID NO: 179218 - protein, 859 aa, Zea Mays
MIDCNIVGGNWIELPAGKYRKAACIMSYCQLELDCLYSDLVSHAAEGEYSKMAPFRILSFDIECAGRKGHFPEPTHDPVIQVEFIIHVSDTRYHLVSIQIANLVTHQGEDQPFVRNVMTLKSCSPIVGVEVMSFDAERDILLAWRDFIREVDPDIIIGYNICKFDMPYLIERAEVLKIAEFPILGRIRNSRVRVRDTTFSSRQYGVRESKDVTIEGRVQFDLLQAMQRDYKLSSYSLNSVSAHFLGEQKEDVHHSIISDLQNGNPETRRRLAVYCLKDAYLPQRLLDKLMYIYNYVEMARVTGVPISFLLSRGQSIKVLSQLLRKAKQKNLVIPNIKGQGSGQDTFEGATVLEARAGFYEKPIATLDFASLYPSIMMAYNLCYCTLARKLNLPPEFVNKTPSGEIFVKPELQKGILPEILEELLAARKRAKADLKEAKDPLERAVLDGRQLALKISANSVYGFTGATVGQLPCLEISSSVTSYGRQMIEHTKKLVEDKFTTVGGYEHTAEVIYGDTDSVMVQFGVSTVEDAMKLGREAADYISGTFTKPIKLEFEKVYFPYLLISKKRYAGLYWTNPEKFDKMDAKGIETVRRDNCLLVKNLVTECLHKILVDRDVPGAVQYVKNTISDLLMNRVDLSLLVITKGLTKTGEDYAVKAAHVELAERMRKRDPATAPTVGDRVPYVIIKAAKGAKAYEKSEDPIYVLDNNIPIDPQYYLENQISKPLLRIFEPILKNASKELLHGSHTRSVSISTPSNSGIMKFAKKQLTCLGCKAVISGASQTLCSHCKGREAELYCKTVANVSDLEMLFGRLWTQCQECQGSLHQDVLCTSRDCPIFYRRRKAQKDMTEARLQLDRWDF

SEQ ID NO: 179219 - protein, 575 aa, Zea Mays
MYIYNYVEMARVTGVPISFLLSRGQSIKVLSQLLRKAKQKNLVIPNIKGQGSGQDTFEGATVLEARAGFYEKPIATLDFASLYPSIMMAYNLCYCTLVPPEEARKLNLPPEFVNKTPSGEIFVKPELQKGILPEILEELLAARKRAKADLKEAKDPLERAVLDGRQLALKISANSVYGFTGATVGQLPCLEISSSVTSYGRQMIEHTKKLVEDKFTTVGGYEHTAEVIYGDTDSVMVQFGVSTVEDAMKLGREAADYISGTFTKPIKLEFEKVYFPYLLISKKRYAGLYWTNPEKFDKMDAKGIETVRRDNCLLVKNLVTECLHKILVDRDVPGAVQYVKNTISDLLMNRVDLSLLVITKGLTKTGEDYAVKAAHVELAERMRKRDPATAPTVGDRVPYVIIKAAKGAKAYEKSEDPIYVLDNNIPIDPQYYLENQISKPLLRIFEPILKNASKELLHGSHTRSVSISTPSNSGIMKFAKKQLTCLGCKAVISGASQTLCSHCKGREAELYCKTVANVSDLEMLFGRLWTQCQECQGSLHQDVLCTSRDCPIFYRRRKAQKDMTEARLQLDRWDF

SEQ ID NO: 179220 - protein, 1126 aa, Zea Mays
MAGTPQFQSPHFPPPSPPLGPTFVPPAMNSGGRGGKRRGPPPLAPSGAAAKRVNPSPGTPHVPPPASAAAAVEEDMMDEDVFLDESILAEDEAALLMLQRDEALASRLARWKRPAIPTDLAAGCSRTVAFQQLEIDYVIGESHKELLPSSSGSAAILRIFGVTREGHSLCCQVHGFEPYFYIGCPSGMGPDDISRFHQTLEGRMKESNRSSNVPRFVKRVELVQKQTIMHYQTQQSQPFLKIVVALPTMVASCRGILERGITIEGLGSKSFLTYESNILFALRFMIDCNIVGGNWIELPAGKYRKAACIMSYCQLELDCLYSDLVSHAAEGEYSKMAPFRILSFDIECAGRKGHFPEPTHDPVIQIANLVTHQGEDQPFVRNVMTLKSCSPIVGVEVMSFDAERDILLAWRDFIREVDPDIIIGYNICKFDMPYLIERAEVLKIAEFPILGRIRNSRVRVRDTTFSSRQYGVRESKDVTIEGRVQFDLLQAMQRDYKLSSYSLNSVSAHFLGEQKEDVHHSIISDLQNGNPETRRRLAVYCLKDAYLPQRLLDKLMYIYNYVEMARVTGVPISFLLSRGQSIKVLSQLLRKAKQKNLVIPNIKGQGSGQDTFEGATVLEARAGFYEKPIATLDFASLYPSIMMAYNLCYCTLEARKLNLPPEFVNKTPSGEIFVKPELQKGILPEILEELLAARKRAKADLKEAKDPLERAVLDGRQLALKISANSVYGFTGATVGQLPCLEISSSVTSYGRQMIEHTKKLVEDKFTTVGGYEHTAEVIYGDTDSVMVQFGVSTVEDAMKLGREAADYISGTFTKPIKLEFEKVYFPYLLISKKRYAGLYWTNPEKFDKMDAKGIETVRRDNCLLVKNLVTECLHKILVDRDVPGAVQYVKNTISDLLMNRVDLSLLVITKGLTKTGEDYAVKAAHVELAERMRKRDPATAPTVGDRVPYVIIKAAKGAKAYEKSEDPIYVLDNNIPIDPQYYLENQISKPLLRIFEPILKNASKELLHGSHTRSVSISTPSNSGIMKFAKKQLTCLGCKAVISGASQTLCSHCKGREAELYCKTVANVSDLEMLFGRLWTQCQECQGSLHQDVLCTSRDCPIFYRRRKAQKDMTEARLQLDRWDF

SEQ ID NO: 179221 - protein, 1130 aa, Zea Mays
MAGTPQFQSPHFPPPSPPLGPTFVPPAMNSGGRGGKRRGPPPLAPSGAAAKRVNPSPGTPHVPPPASAAAAVEEDMMDEDVFLDESILAEDEAALLMLQRDEALASRLARWKRPAIPTDLAAGCSRTVAFQQLEIDYVIGESHKELLPSSSGSAAILRIFGVTREGHSLCCQVHGFEPYFYIGCPSGMGPDDISRFHQTLEGRMKESNRSSNVPRFVKRVELVQKQTIMHYQTQQSQPFLKIVVALPTMVASCRGILERGITIEGLGSKSFLTYESNILFALRFMIDCNIVGGNWIELPAGKYRKAACIMSYCQLELDCLYSDLVSHAAEGEYSKMAPFRILSFDIECAGRKGHFPEPTHDPVIQIANLVTHQGEDQPFVRNVMTLKSCSPIVGVEVMSFDAERDILLAWRDFIREVDPDIIIGYNICKFDMPYLIERAEVLKIAEFPILGRIRNSRVRVRDTTFSSRQYGVRESKDVTIEGRVQFDLLQAMQRDYKLSSYSLNSVSAHFLGEQKEDVHHSIISDLQNGNPETRRRLAVYCLKDAYLPQRLLDKLMYIYNYVEMARVTGVPISFLLSRGQSIKVLSQLLRKAKQKNLVIPNIKGQGSGQDTFEGATVLEARAGFYEKPIATLDFASLYPSIMMAYNLCYCTLVPPEEARKLNLPPEFVNKTPSGEIFVKPELQKGILPEILEELLAARKRAKADLKEAKDPLERAVLDGRQLALKISANSVYGFTGATVGQLPCLEISSSVTSYGRQMIEHTKKLVEDKFTTVGGYEHTAEVIYGDTDSVMVQFGVSTVEDAMKLGREAADYISGTFTKPIKLEFEKVYFPYLLISKKRYAGLYWTNPEKFDKMDAKGIETVRRDNCLLVKNLVTECLHKILVDRDVPGAVQYVKNTISDLLMNRVDLSLLVITKGLTKTGEDYAVKAAHVELAERMRKRDPATAPTVGDRVPYVIIKAAKGAKAYEKSEDPIYVLDNNIPIDPQYYLENQISKPLLRIFEPILKNASKELLHGSHTRSVSISTPSNSGIMKFAKKQLTCLGCKAVISGASQTLCSHCKGREAELYCKTVANVSDLEMLFGRLWTQCQECQGSLHQDVLCTSRDCPIFYRRRKAQKDMTEARLQLDRWDF

SEQ ID NO: 179222 - protein, 1101 aa, Zea Mays
MAGTPQFQSPHFPPPSPPLGPTFVPPAMNSGGRGGKRRGPPPLAPSGAAAKRVNPSPGTPHVPPPASAAAAVEEDMMDEDVFLDESILAEDEAALLMLQRDEALASRLARWKRPAIPTDLAAGCSRTVAFQQLEIDYVIGESHKELLPSSSGSAAILRIFGVTREGHSLCCQVHGFEPYFYIGCPSGMGPDDISRFHQTLEGRMKESNRSSNVPRFVKRVELVQKQTIMHYQTQQSQPFLKIVVALPTMVASCRGILERGITIEGLGSKSFLTYESNILFALRFMIDCNIVGGNWIELPAGKYRKAACIMSYCQLELDCLYSDLVSHAAEGEYSKMAPFRILSFDIECAGRKGHFPEPTHDPVIQIANLVTHQGEDQPFVRNVMTLKSCSPIVGVEVMSFDAERDILLAWRDFIREVDPDIIIGYNICKFDMPYLIERAEVLKIAEFPILGRIRNSRVRVRDTTFSSRQYGVRESKDVTIEGRVQFDLLQAMQRDYKLSSYSLNSVSAHFLGEQDAYLPQRLLDKLMYIYNYVEMARVTGVPISFLLSRGQSIKVLSQLLRKAKQKNLVIPNIKGQGSGQDTFEGATVLEARAGFYEKPIATLDFASLYPSIMMAYNLCYCTLVPPEEARKLNLPPEFVNKTPSGEIFVKPELQKGILPEILEELLAARKRAKADLKEAKDPLERAVLDGRQLALKISANSVYGFTGATVGQLPCLEISSSVTSYGRQMIEHTKKLVEDKFTTVGGYEHTAEVIYGDTDSVMVQFGVSTVEDAMKLGREAADYISGTFTKPIKLEFEKVYFPYLLISKKRYAGLYWTNPEKFDKMDAKGIETVRRDNCLLVKNLVTECLHKILVDRDVPGAVQYVKNTISDLLMNRVDLSLLVITKGLTKTGEDYAVKAAHVELAERMRKRDPATAPTVGDRVPYVIIKAAKGAKAYEKSEDPIYVLDNNIPIDPQYYLENQISKPLLRIFEPILKNASKELLHGSHTRSVSISTPSNSGIMKFAKKQLTCLGCKAVISGASQTLCSHCKGREAELYCKTVANVSDLEMLFGRLWTQCQECQGSLHQDVLCTSRDCPIFYRRRKAQKDMTEARLQLDRWDF

SEQ ID NO: 179223 - protein, 555 aa, Zea Mays
MAGTPQFQSPHFPPPSPPLGPTFVPPAMNSGGRGGKRRGPPPLAPSGAAAKRVNPSPGTPHVPPPASAAAAVEEDMMDEDVFLDESILAEDEAALLMLQRDEALASRLARWKRPAIPTDLAAGCSRTVAFQQLEIDYVIGESHKELLPSSSGSAAILRIFGVTREGHSLCCQVHGFEPYFYIGCPSGMGPDDISRFHQTLEGRMKESNRSSNVPRFVKRVELVQKQTIMHYQTQQSQPFLKIVVALPTMVASCRGILERGITIEGLGSKSFLTYESNILFALRFMIDCNIVGGNWIELPAGKYRKAACIMSYCQLELDCLYSDLVSHAAEGEYSKMAPFRILSFDIECAGRKGHFPEPTHDPVIQIANLVTHQGEDQPFVRNVMTLKSCSPIVGVEVMSFDAERDILLAWRDFIREVDPDIIIGYNICKFDMPYLIERAEVLKIAEFPILGRIRNSRVRVRDTTFSSRQYGVRESKDVTIEGRVQFDLLQAMQRDYKLSSYSLNSVSAHFLGEQKEDVHHSIISDLQNGNPETRRRLAVYCLKNSSIKPHLVKYL

SEQ ID NO: 179224 - protein, 529 aa, Zea Mays
MAGTPQFQSPHFPPPSPPLGPTFVPPAMNSGGRGGKRRGPPPLAPSGAAAKRVNPSPGTPHVPPPASAAAAVEEDMMDEDVFLDESILAEDEAALLMLQRDEALASRLARWKRPAIPTDLAAGCSRTVAFQQLEIDYVIGESHKELLPSSSGSAAILRIFGVTREGHSLCCQVHGFEPYFYIGCPSGMGPDDISRFHQTLEGRMKESNRSSNVPRFVKRVELVQKQTIMHYQTQQSQPFLKIVVALPTMVASCRGILERGITIEGLGSKSFLTYESNILFALRFMIDCNIVGGNWIELPAGKYRKAACIMSYFMSILNTTNRYSDLVSHAAEGEYSKMAPFRILSFDIECAGRKGHFPEPTHDPVIQIANLVTHQGEDQPFVRNVMTLKSCSPIVGVEVMSFDAERDILLAWRDFIREVDPDIIIGYNICKFDMPYLIERAEVLKIAEFPILGRIRNSRVRVRDTTFSSRQYGVRESKDVTIEGRVQFDLLQAMQRDYKLSSYSLNSVSAHFLGEQGAAKESPLAPTIS

SEQ ID NO: 179225 - protein, 530 aa, Zea Mays
MRLLVPDGARRQRLLQCEAPPSPSPPSPSPYPSSSPSRTVVVGIRRDAASRELLTWALVKVANAGDRVVALHVATAAAADGLLVRLDERSRAADSLASVLAVYDGFCNLKQINLELKVCGGSSIRKTLVKEAAACGAAHLILGVTNNSRSFGSSLTSVAKYCSKRVPASCSVLAVNNGKVVYHKDAGHGLQHELYQSNTTIPETPRRSYRKLLSTMIGDKLWDENGKDRRCVSRAVTMPMRSPARPKEFSLALVPVKGCQHESPAVATGWPLLRKKFLPDRKASAPDKSKMSVVQWAMRLPSRYSAVSPVHSEYRTTKPDSTSASHILRDRVIVPSRSNSGKSCVVIEELEKETPEELTLLKEKFSSIYSSFSYSELAKITSDFSPECVVGQGGTSQVYRGCLANGKELAVKILKYSDEVLKEFVSEIEIVSSLSHKNVISLVGFCFKNDDLLLVYEYLQRGSLEEILHGKKECKSIFGWTERFSVAMGVARALDYLHSDNNSRPVIHRDVKSSNILISKCFEPKSGLLM

SEQ ID NO: 179226 - protein, 184 aa, Zea Mays
MTTLEPPSRHSPCNHMLLLHYRSHSHCALHSMCGPYAVVPLPPAHFHYPRPHCHHCPCVGFVSSPCQLRTATTCSQSPLCWCCSWPRRTIATPPQHTHCLPPPPLTHTHHKSCTAFTSWSHDRCTHMAFVQALRSHDILVVDVHAWPPAASTQLPPHLSQPQAPLGPPLHGRHSKAHLRQTIPI

SEQ ID NO: 179227 - protein, 259 aa, Zea Mays
MAGFGAGAITGLADHVGVGVYFNPFVEWRDKRIKYGVVRMRDLAMDVLTWDRFYLSGRLQKPVHVLVDNWDIRKVNSINLEMATSASLLLLPAEFTEYDLYAQICSLSYMGDLRMLFAEDKDKVKKIVEGSFQSFQLMYSPLLQEYIAEGLLKTSSHGQYKTFRQDCGPCTTNELFSVLPWTIQSQMQGRHTLHGKEVPPRTVVSSKEMAANCVRRALRHRVMVSSVRQAVCGLLASGGAVAAQYLGKKMAKAWRSRVP

SEQ ID NO: 179228 - protein, 273 aa, Zea Mays
MNAVAEEDRAAELAGPLRDLLPPVDFCCAYGSTLLHARPDGTSMVDYIIGVADPLQWHSENLERNPAHYSRWMAGFGAGAITGLADHVGVGVYFNPFVEWRDKRIKYGVVRMRDLAMDVLTWDRFYLSGRLQKPVHVLVDNWDIRKVNSINLEMATSASLLLLPAEFTEYDLYAQICSLSYMGDLRMLFAEDKDKVKKIVEGSFQSFQLMYSPLLQEYIAEGLLKTSSHGQYKTFRIAVHVQQMNCSLFFRGRSKAKCKEGTHCTEKKYHHAP

SEQ ID NO: 179229 - protein, 178 aa, Zea Mays
MATSASLLLLPAEFTEYDLYAQICSLSYMGDLRMLFAEDKDKVKKIVEGSFQSFQLMYSPLLQEYIAEGLLKTSSHGQYKTFRQDCGPCTTNELFSVLPWTIQSQMQGRHTLHGKEVPPRTVVSSKEMAANCVRRALRHRVMVSSVRQAVCGLLASGGAVAAQYLGKKMAKAWRSRVP

SEQ ID NO: 179230 - protein, 181 aa, Zea Mays
MAMTVIRLAAIRPPSASSSAASPSLWPPARLRLRVRCRAGGDGGMKKEEGEAEAPESLFARELRRRGMAPGAGAKRGVAATEFERGAAADGQRERSMALNSEGLEGLVPRAKLLLSLGSTFFLAFGPLILVTVSLFAVLYVYFGPSFVHDASKTPVSPPPYIDPYELLEDERLSRPSPDVF

SEQ ID NO: 179231 - protein, 160 aa, Zea Mays
MLGFSTGQLLVVLGACSVMMKPSDMVKIARTAGRMTGRAVGRLIVARRQLDEILGQSAATQVHKELKDAMTQLDSIRYEVQNLSRLSPGQFMLKQHNAGMAEAGKSDSSDGPTTNVAGSKQSPHLRRRLVLVDSFPKPHSYGSLRLSATGKKNFVRKFAV

SEQ ID NO: 179232 - protein, 331 aa, Zea Mays
MAGMLPDGGRAVVRLGSGDPTAFPCFRTVPEAVDAVASAVQSGQYNSYSTSVGLELARRSIAQYLSCDLPYKLSPDDVYLTSGCTQAIEILCSALARPGANILLPRPGFMFYEARAIFNGMEARYFNLLPGNGWEVDIDGVQALADKNTVAMVIVNPGNPCGNVYSYEHLAKVAETARKLGIFVIADEVYAHLTFGERKFVPMGVFGAVAPVLTLGSISKRWMVPGWRLGWIVTNDPNGVFQRTKVVHSIKSYLDISSDPATFVQGAIPKLVENTKEEFFEKTIEILKRCVDICCEKLKGINAITCPSKPEGSMFVMVCETGSVLPGGHQR

SEQ ID NO: 179233 - protein, 79 aa, Zea Mays
MMGSKLRETCTQHISKARMQQMMKFRALVFFTLVSESDCTCIPFLKAQSLFWLEDFSTATKNNEVSWRNTIHELTTKIY

SEQ ID NO: 179234 - protein, 560 aa, Zea Mays
MDIPLSAMCKSPESTHSPNSLLSEKSSPQGSHVIVNLVPMNGLHCASSGHSAPVDNQAILSDMGVFDGELHESVSGRSVDAYDMLPIAELRKKMASARRNCAVQHTEEQHVKSLRVKKCISNSKDKKTRPIQELMGEIQLKGNKNFSRDFVLALGVSRDGPTTLSPDRLVSIGPKRCSSTKVLACKKLAKRRGSKELCSPNSSLDVTRTDQQGGRKEVAEAMKECSLALDRTLEDAKNITELSNQENLLSMLPPGFKSVSNRKGTNIHDAQLGEEPAVMTNNSLIEPNGNDDMCTDHAATTKLAENYNVMETAIMSIDCPAQQPCGEVDERSVLGLKNAGSTQCIIDSSPSSESLLPSPQALFVKSSPVWHIVEAMHVFKELPQQPHFIPLQEVPPTLREGMALGMMVSFADLVKVTMEASIGNDMEWFEDKIRTISHLEANGFSVQSIQSAMTEMVKVKTEHTSYHCEIGKLSSKLVENMASSSRAGALLDEKDEAAARLEEELVSIRQESQKIAKEKEKIDAEVVSIKTACSGYEDLCSGVERKFKEVLAGLQRKRLT

SEQ ID NO: 179235 - protein, 679 aa, Zea Mays
MTGNLIHRHDKIKREADISGNIKIFTEDEIERITNNFSTLIGKGGFGEVYRGTLDDDNEPVAVKKYINEDSREVFMEEVRIHSKIGHKNVVKLIGYCIGESTLMIVMEYMSKGNLNDLLHSEISIPLDVRLGIAIGCAEALSYMHSMHVSSGNLVCHGDIKPANILLDDNLTAKLTDFGISRLLVGGVTRYTTTVKGSIGYMDPIYIQEGRLTPRSDVYSFGLVLCELMAGKGVRKGAINLILYANKGCASGKGFREICDAAIANENNMKILKEMQKLAAECLSLTISRRPQMTDVVKRLRTLRKELKNRHENYSEPILASHHSWRKNKKQEMIAPTYNSKLQIKKSLSFFKRSISSSKVQSEPSNVRIFAQEELKEVTHNYSCLLGGGLSGKVYRGTLEDNAVVAVRVFSEVLEGFEEAFVNGGMILSQISHRNVVKLLGYCLDADCPAFVYEYAARGSLSDVLDRHEDFPLDLRAKIAVKIAEALEYLHSPATGIIRHGYVVPSKILLDGNFMPKLTGFSWARKLIKDPIHDRCVSLRVKADVYQFGVLLLMLISRKNFVFYADHDDIVAQFRAARQADGSGRAFFDDDVAGHGGDVGLLEEMGRLSLKCVCEEIDQRPTMSEVAEHLRIITRSWKKCSSSEGATALVSKAMAKKSHVAAEAEATKLDWPPGSDIRD

SEQ ID NO: 179236 - protein, 694 aa, Zea Mays
MCAQHCGECALVNKIMTGNLIHRHDKIKREADISGNIKIFTEDEIERITNNFSTLIGKGGFGEVYRGTLDDDNEPVAVKKYINEDSREVFMEEVRIHSKIGHKNVVKLIGYCIGESTLMIVMEYMSKGNLNDLLHSEISIPLDVRLGIAIGCAEALSYMHSMHVSSGNLVCHGDIKPANILLDDNLTAKLTDFGISRLLVGGVTRYTTTVKGSIGYMDPIYIQEGRLTPRSDVYSFGLVLCELMAGKGVRKGAINLILYANKGCASGKGFREICDAAIANENNMKILKEMQKLAAECLSLTISRRPQMTDVVKRLRTLRKELKNRHENYSEPILASHHSWRKNKKQEMIAPTYNSKLQIKKSLSFFKRSISSSKVQSEPSNVRIFAQEELKEVTHNYSCLLGGGLSGKVYRGTLEDNAVVAVRVFSEVLEGFEEAFVNGGMILSQISHRNVVKLLGYCLDADCPAFVYEYAARGSLSDVLDRHEDFPLDLRAKIAVKIAEALEYLHSPATGIIRHGYVVPSKILLDGNFMPKLTGFSWARKLIKDPIHDRCVSLRVKADVYQFGVLLLMLISRKNFVFYADHDDIVAQFRAARQADGSGRAFFDDDVAGHGGDVGLLEEMGRLSLKCVCEEIDQRPTMSEVAEHLRIITRSWKKCSSSEGATALVSKAMAKKSHVAAEAEATKLDWPPGSDIRD

SEQ ID NO: 179237 - protein, 586 aa, Zea Mays
MRKRMESVDDLIEEAKLRTVWWALCIFAVSYFLTHTSKSMWTNVPMSILILAFLRYLSFKVEFRWREHPVRKQTHLSQASKRQLSANDHRLSTVPPVSRWRRKVGSPSVEAAFESFIEKILRDFVLDLWYSDITPDREAPELIRGLVLHALGELSGRVKEMNLVDMLTRDMVDLIGNHLDIFRKNEILIGVDVMRTLSSEEIDERLKQHLIVSQELHPALLSSEHEYKVLQEIVGGIMALVLRPQDAQSPLVRCFSRELMTCLILQPVMNFASPVYINELVVYLLNAKDTGSAGGTNMANTGTVTLVPYKGGSQGCQMESRNLTVETSGLVPPNNSGMRSLVTSECGKSKVSEDDNDGTIQPRQPDWAAVLDAATKRRSEVLAPENLENMWAIGRNYQKKMVKLDHSSRQKGSEGSDNSTSAGAVGKELSSNFNDRIASVDDKYMVNLMQSKNRNAQSTFVTGSHPLALQNMNEVKPKEGSQVNFTSKEKPHETSNRVKAQLKRCNSTPDIEKRYLAKSNQPMVSSERLNVRINQDERGVGPASHVEVLMHVPKIRCRVVGAYFEKQGSKSFAVYSIVVTDADNKS

SEQ ID NO: 179238 - protein, 853 aa, Zea Mays
MRKRMESVDDLIEEAKLRTVWWALCIFAVSYFLTHTSKSMWTNVPMSILILAFLRYLSFKVEFRWREHPVRKQTHLSQASKRQLSANDHRLSTVPPVSRWRRKVGSPSVEAAFESFIEKILRDFVLDLWYSDITPDREAPELIRGLVLHALGELSGRVKEMNLVDMLTRDMVDLIGNHLDIFRKNEILIGVDVMRTLSSEEIDERLKQHLIVSQELHPALLSSEHEYKVLQEIVGGIMALVLRPQDAQSPLVRCFSRELMTCLILQPVMNFASPVYINELVVYLLNAKDTGSAGGTNMANTGTVTLVPYKGGSQGCQMESRNLTVETSGLVPPNNSGMRSLVTSECGKSKVSEDDNDGTIQPRQPDWAAVLDAATKRRSEVLAPENLENMWAIGRNYQKKMVKLDHSSRQKGSEGSDNSTSAGAVGKELSSNFNDRIASVDDKYMVNLMQSKNRNAQSTFVTGSHPLALQNMNEVKPKEGSQVNFTSKEKPHETSNRVKAQLKRCNSTPDIEKRYLAKSNQPMVSSERLNVRINQDERGVGPASHVEVLMHVPKIRCRVVGAYFEKQGSKSFAVYSIVVTDADNKSWFVKRRYRNFERLHRQLKEIPNYSLHLPPKSFLSSSVDDYLVHQRCILLDKYLQDLLSIANIAEQHEVLDFLSASSKTYSAGKSSSVMKTLADGLKRAVGTSPSSATAQFADNRMSLSWNQEEKDNHNLHQRNLERAHSLSDGDSNYEDHISSVNSGCHSDNEVNNRGHTSNDVEHIETCSSLDKQASDQIGKPAKEYSDSSNMSSLNAFEDPTGIPPEWMPTNVSVPLLNLVDKVFQLKRRGWIRFFGYQNKFCSWSWKMQLMNGS

SEQ ID NO: 179239 - protein, 652 aa, Zea Mays
MRKRMESVDDLIEEAKLRTVWWALCIFAVSYFLTHTSKSMWTNVPMSILILAFLRYLSFKVEFRWREHPVRKQTHLSQASKRQLSANDHRLSTVPPVSRWRRKVGSPSVEAAFESFIEKILRDFVLDLWYSDITPDREAPELIRGLVLHALGELSGRVKEMNLVDMLTRDMVDLIGNHLDIFRKNEILIGVDVMRTLSSEEIDERLKQHLIVSQELHPALLSSEHEYKVLQEIVGGIMALVLRPQDAQSPLVRCFSRELMTCLILQPVMNFASPVYINELVVYLLNAKDTGSAGGTNMANTGTVTLVPYKGGSQGCQMESRNLTVETSGLVPPNNSGMRSLVTSECGKSKVSEDDNDGTIQPRQPDWAAVLDAATKRRSEVLAPENLENMWAIGRNYQKKMVKLDHSSRQKGSEGSDNSTSAGAVGKELSSNFNDRIASVDDKYMVNLMQSKNRNAQSTFVTGSHPLALQNMNEVKPKEGSQVNFTSKEKPHETSNRVKAQLKRCNSTPDIEKRYLAKSNQPMVSSERLNVRINQDERGVGPASHVEVLMHVPKIRCRVVGAYFEKQGSKSFAVYSIVVTDADNKSWFVKRRYRNFERLHRQLKEIPNYSLHLPPKSFLSSSVDDYLVHQRCILLDKYLQLILQSSMKFWIF

SEQ ID NO: 179240 - protein, 834 aa, Zea Mays
MRKRMESVDDLIEEAKLRTVWWALCIFAVSYFLTHTSKSMWTNVPMSILILAFLRYLSFKVEFRWREHPVRKQTHLSQASKRQLSANDHRLSTVPPVSRWRRKVGSPSVEAAFESFIEKILRDFVLDLWYSDITPDREAPELIRGLVLHALGELSGRVKEMNLVDMLTRDMVDLIGNHLDIFRKNEILIGVDVMRTLSSEEIDERLKQHLIVSQELHPALLSSEHEYKVLQEIVGGIMALVLRPQDAQSPLVRCFSRELMTCLILQPVMNFASPVYINELVVYLLNAKDTGSAGGTNMANTGTVTLVPYKGGSQGCQMESRNLTVETSGLVPPNNSGMRSLVTSECGKSKVSEDDNDGTIQPRQPDWAAVLDAATKRRSEVLAPENLENMWAIGRNYQKKMVKLDHSSRQKGSEGSDNSTSAGAVGSHPLALQNMNEVKPKEGSQVNFTSKEKPHETSNRVKAQLKRCNSTPDIEKRYLAKSNQPMVSSERLNVRINQDERGVGPASHVEVLMHVPKIRCRVVGAYFEKQGSKSFAVYSIVVTDADNKSWFVKRRYRNFERLHRQLKEIPNYSLHLPPKSFLSSSVDDYLVHQRCILLDKYLQDLLSIANIAEQHEVLDFLSASSKTYSAGKSSSVMKTLAVNVDDAMDDIVRQFKGVSDGLKRAVGTSPSSATAQFADNRMSLSWNQEEKDNHNLHQRNLERAHSLSDGDSNYEDHISSVNSGCHSDNEVNNRGHTSNDVEHIETCSSLDKQASDQIGKPAKEYSDSSNMSSLNAFEDPTGIPPEWMPTNVSVPLLNLVDKVFQLKRRGWIRFFGYQNKFCSWSWKMQLMNGS

SEQ ID NO: 179241 - protein, 317 aa, Zea Mays
MKAMRRWAKQILTGLAYLHSQKPPIIHRDLKCDNIFINGNHGKVKIGDFGLAMVMQQRKTQSIQGTLEFMAPELFGENYNELVDIYSFGMCMLEMVTGECPYSECQGFVQIYKKISEGVKPVALSKVKDAEVRSFIESCLASAADRLPASELLKSPFLMIDDIIINDKTSNPVQEPIAFPPNLDLDLEATPIFISLLPNGTVDNGKGSFSLVLRRGGFVLEGDMSGSNPVNLLLRIPVPNGKCKNIEFAFDLENDTSLLVATEMVQELELPSWSMPIVAKLVDAFLLKTVRGWRPCVQVGQMIQAVQNTASVNGKSI

SEQ ID NO: 179242 - protein, 423 aa, Zea Mays
MASDPDVSGGEQAEPPDDVDDPDVDEVDPTGRYFRYKEVVGSGAFKTVYKGFDVVEGIEVAWAKVEITGRTMGSPKELQRLKTEIQLLRSLHHKHILKLYASWVDNKKRAVNIITELFTSGNLREYRTKHKKVDMKAMRRWAKQILTGLAYLHSQKPPIIHRDLKCDNIFINGNHGKVKIGDFGLAMVMQQRKTQSIQGTLEFMAPELFGENYNELVDIYSFGMCMLEMVTGECPYSECQGFVQIYKKISEGVKPVALSKVKDAEVRSFIESCLASAADRLPATFPPNLDLDLEATPIFISLLPNGTVDNGKGSFSLVLRRGGFVLEGDMSGSNPVNLLLRIPVPNGKCKNIEFAFDLENDTSLLVATEMVQELELPSWSMPIVAKLVDAFLLKTVRGWRPCVQVGQMIQAVQNTASVNGKSI

SEQ ID NO: 179243 - protein, 308 aa, Zea Mays
MASDPDVSGGEQAEPPDDVDDPDVDEVDPTGRYFRYKEVVGSGAFKTVYKGFDVVEGIEVAWAKVEITGRTMGSPKELQRLKTEIQLLRSLHHKHILKLYASWVDNKKRAVNIITELFTSGNLREYRTKHKKVDMKAMRRWAKQILTGLAYLHSQKPPIIHRDLKCDNIFINGNHGKVKIGDFGLAMVMQQRKTQSIQGTLEFMAPELFGENYNELVDIYSFGMCMLEMVTGKCKNIEFAFDLENDTSLLVATEMVQELELPSWSMPIVAKLVDAFLLKTVRGWRPCVQVGQMIQAVQNTASVNGKSI

SEQ ID NO: 179244 - protein, 258 aa, Zea Mays
MASDPDVSGGEQAEPPDDVDDPDVDEVDPTGRYFRYKEVVGSGAFKTVYKGFDVVEGIEVAWAKVEITGRTMGSPKELQRLKTEIQLLRSLHHKHILKLYASWVDNKKRAVNIITELFTSGNLREYRTKHKKVDMKAMRRWAKQILTGLAYLHSQKPPIIHRDLKCDNIFINGNHGKVKIGDFGLAMVMQQRKTQSIQGTLEFMAPELFGENYNELVDIYSFGMCMLEMVTGCKTSCSLQGQRCRSKEFHRELPSFSC

SEQ ID NO: 179245 - protein, 433 aa, Zea Mays
MCPAASRRSRPTMWTTPTSTRSTPLAATSGYKGFDVVEGIEVAWAKVEITGRTMGSPKELQRLKTEIQLLRSLHHKHILKLYASWVDNKKRAVNIITELFTSGNLREYRTKHKKVDMKAMRRWAKQILTGLAYLHSQKPPIIHRDLKCDNIFINGNHGKVKIGDFGLAMVMQQRKTQSIQGTLEFMAPELFGENYNELVDIYSFGMCMLEMVTGECPYSECQGFVQIYKKISEGVKPVALSKVKDAEVRSFIESCLASAADRLPASELLKSPFLMIDDIIINDKTSNPVQEPIAFPPNLDLDLEATPIFISLLPNGTVDNGKGSFSLVLRRGGFVLEGDMSGSNPVNLLLRIPVPNGKCKNIEFAFDLENDTSLLVATEMVQELELPSWSMPIVAKLVDAFLLKTVRGWRPCVQVGQMIQAVQNTASVNGKSI

SEQ ID NO: 179246 - protein, 1459 aa, Zea Mays
MSSSASSAALVAHPVSEKLTRANHALWKAQVRAAMRGARLEGYLTGATKMPDEETVDNAGKKSPNPAFEEWEAKDQQILSYLLSSISREVQIQVTSAKTAAEAWHSIEAMFASQTRARAVNLRLALSTTKKGSMTVAEYYTKMKGYGDEMAAAGRPLQDEEMVEYILTGLEEEFLPMVSALVTRVDPISLEDLYSQLLNFETKLDLMRGGGEQHQGSANMAGRGGRGNQRGGSGGRGQRGGRGSSRGGRASWSGGRQSNQGGYIRRSNNSSDERPVCQVCFKKGHTAARCWHRFEEDFVPDEKLAGAATNSYHVDTNWYTDTGATDHITGELEKLSIREKYAGGDQIHTASGSGMTISHIGQSTVNTPNRNLHLNDVLYVPQAKKNLVSVHKLTSDNSAFIEFHPNFFVIKDKDTKNILLKGRCHKGLYPIPATSTIKNALGAVKPSMSRWHNRLGHPSSFIVRQVVSKNKLPCLGPSTDESVCDACQKAKAHQFPYPRSTSVSSSPLELVFSDVWGPAPESVGRKKYYVSFIDDYSKFTWVYLIKYKSEVFQKFHEFQSLVERLFDRKILAVQTDWGGEYQRLNTFFNKIGISHLVSCPHAHQQNGSAERKHRHIVEVGLSLLAHASMPLKFWDEAFLAAAYLINRTPTKILNLDTPFERLFHKQPDYSVLRIFGCVCWPNLRPYNSHKLQFRSKQCVFLGYSSLHKGFKCLDVSTGRVYVSRDVTFDENVFPFASLHSNAGARLRSEIQLLSPDLLNPATFNSGVDSLIDHAADMSTDPNQISGDNSVQDQAEHTPNMDVLAPSVPNTAPEADAVHIPGSASHSGSAPAAPSTAAPSPTCRGDSRVATHPSASHDYVASVDMSRGIAGREESFLTAPTTATSPASSEPSGSLPATAADAQVPEPILGGVSSMDPASTRPRTRLQQGVRKPKVYTDGTIRYGCFTSSGEPYDLNEALGDVNWKDAMDIEYSALMKNKTWHLVPPKKGRNVIGCKWVYKIKRKADGSLDRYKARLVAKGYKQQYGIDYDDTFSPVVKHATIRIILSIAVSRGWSLRQLDVQNAFLHGVLEEEVYMQQPPGYEDSTKLNYVCKLDKALYGLKQAPRAWYSRLSNKLLSLGFQASKADTSLFFYNKGSVTIFVLVYVDDIIVASSTHKATEALLSDLNKEFALKDLGDLNYFLGIEVNKVRDGIILTQDKYASDLLKKVGMSDCKPISTPLSTSEKLSIHEGSPLGEKDITQYRSIVGALQYLTLTRPDIAFSVNKVCQFLHAPTTLHWAAVKRILRYIKQCTNLGLHIHRSDSTLVSAFSDADWAGSVDDRKSTGGFAVFLGSNLVSWSARKQPTVSRSSTESEYKALANATAELIWVQILLTEISIKSPRAAKLWCDNLGAKYLSANPIFHARTKHIEVDYHFVRDRVAKKLLDIEYVPTGDQVADGFTKPLSVRLLENFKVNLNLTRL

SEQ ID NO: 179247 - protein, 86 aa, Zea Mays
MKKRQHIYNYCCLATNNMATFNSHILWYVIHNPYRTRSSRCNCTCMDRLKAMFGSWLIFRILMLTKQLLEFELNFVPESHNLSTSR

SEQ ID NO: 179248 - protein, 663 aa, Zea Mays
MVHVGEMLASAVIKEVVRRLPALLQAPVKGPAKMIRSFREDLDEMKMTLESIKATMAEAEQRSINDETARLWLKRLKRAAYDISDMFDEFEHGSPPGKKLQGPSWFEIMFSRDMAKKMKKMNKRLKEIAEQWKNYGGIGRVSCEPKNDAAEEQETTSSSSSAVVVGRRAEKQAVINILLSSNNTYPQETISHCTVIHGLGGVGKSELATSVFNDERIKEAFPQRAWVWLGQNFREKDIGRAIISIVECGSCNLEILESIYQHLRKVLLGRCLIVLDNLWDSVHLAKLQGELGSNVSILVTSRREIQLNMPRSTLFRLDPLSERFSLDLVKEVASSYFPAGDIPETAMEEIVKMCGGVPLALKSVASQLRPERSVKELLSLIRAISPPKSDYGTTDIQDRVLASLKLTYHLMSPSLKLCFAYCAIFAKGDEIDREGLCHQWIALGLTEKMYAEDRVRDLLTMSFLRDPEPPAITRSSSGGSSKLKMHDLGFFLESPMGTNSCILPARSLSILWGQDDRYWRLNSIPESRFALSMELIAVWWLEIEGWVPFEFLSTDTSYDIFLVYKLADEHDGLRWGESYVAVDGVHTTDGVVSFVDEDAVRVDRVAYPVTRSEGWMELWLGEFYNKYVDREVKVSVWEKTDTYAKIGLIIEGMEIRKKSGSIS

SEQ ID NO: 179249 - protein, 434 aa, Zea Mays
MAVAAGVSEPPIVEQVITEFFAKSLHIILESRSPYDSSRNFIRPSPPSSPLAGSQPRDRWFNLALRDCPAALENFDLWRQSNLEPLVIDIVLLQRDNTKTTSVGASRIIERWIIKYETSRSGNIIKNSGKKARSGSSQDHSLYRRAYSGSTVLFRSLYLVVRLLPAYHLFQELNSSGRICPLNLSHKISSFVEPFTRAEDAEMKHYAFAPIETLFGSLSLSVSYVPVLDLAAVPEQSSPMPPELIKDYVGSPTTDFLRKLDSLPSDGIAPGCFPMTRRHSWSTEHGVRQSASPFPMSSEPHGCLQPRMPTDNSPTAYSHPHNTPSSGKERNTVNEEYYPSPPLSPSPSHSPSSYPRNPFFRYESPPSSIPTVMAGGGCSRLPPSPRRNDKQQCSSQNENLSHSPNNKSIVSKDLVKLSGFRNEKSLQKQTFHHG

SEQ ID NO: 179250 - protein, 152 aa, Zea Mays
MDELDERELVFAWEDKDTIIDQLNRVDLSDREDHESSQDLGGSLTRSPDAAIGILMRILKNAPGLRERLLTGPSAPVPQEPSSLQRVMTEEHGSGASSSAGVPSSLLRSRTAADTLEELNKYKEIRESILNRDKGHSCSTKLLEEKPADGDR

SEQ ID NO: 179251 - protein, 81 aa, Zea Mays
MRGEDEELVDQKKYLEERCKPQCVKSLYEYEKCVKRVENDDTGHKHCTGQYFDYWSCIDKCHQSSLRSSNDLCDVMRLLTK

SEQ ID NO: 179252 - protein, 277 aa, Zea Mays
MLRRQPRLPAAPSPPLAVLRRAFRSEAALEAIRSHLHSPPSKSTSTSSDADGDDKAAPASLALYNYPTFAGAYAALAARLFHQRVRRRLLVLPFSSVVPFRAEDFKDAGFQTCYLLDFIGPKKFAFELARFIPSVKAFDHRQSTLARIPKLGQCPNNVELHIDISIGSARSVFDYFSKELAGTKSDSRMWENLLEQEHVERVSNVLECIEDADLRRYQLPNTKEFQTALRDERAKLNCVTNPHVFEQGEIACSWPPAVCRGVHTEAFQDSAWKRVIW

SEQ ID NO: 179253 - protein, 202 aa, Zea Mays
MLRRQPRLPAAPSPPLAVLRRAFRSEAALEAIRSHLHSPPSKSTSTSSDADGDDKAAPASLALYNYPTFAGAYAALAARLFHQRVRRRLLVLPFSSVVPFRAEDFKDAGFQTCYLLDFIGPKKFAFELARFIPSVKAFDHRQSTLARIPKLGQCPNNVELHIDISIGSARSVFDYFSKELAGTKSDSVSRENISFMFIILYD

SEQ ID NO: 179254 - protein, 104 aa, Zea Mays
MSLLIAQYCYLQKDRVPPSVNRTVGSYHEIRSFLKVTREQKQSLVDLDRLDSARKRLQENYQEAQNAKKQRTIQVMDINDIPKPKSRNAFIRKSGSGGLPARHR

SEQ ID NO: 179255 - protein, 140 aa, Zea Mays
MVSGFQYSPSPQRFNGSTSEMANNGFESTMDAKRRASPVPAHHNSRQMNNNHHSTTITTSTSSAPAFSVQKVTREQKQSLVDLDRLDSARKRLQENYQEAQNAKKQRTIQVMDINDIPKPKSRNAFIRKSGSGGLPARHR

SEQ ID NO: 179256 - protein, 136 aa, Zea Mays
MVSGFQYSPSPQRFNGSTSEMANNGFESTMDAKRRASPVPAHHNSRQMNNNHHSTTITTSTSSAPAKVTREQKQSLVDLDRLDSARKRLQENYQEAQNAKKQRTIQVMDINDIPKPKSRNAFIRKSGSGGLPARHR

SEQ ID NO: 179257 - protein, 116 aa, Zea Mays
MANNGFESTMDAKRRASPVPAHHNSRQMNNNHHSTTITTSTSSAPAKVTREQKQSLVDLDRLDSARKRLQENYQEAQNAKKQRTIQVMDINDIPKPKSRNAFIRKSGSGGLPARHR

SEQ ID NO: 179258 - protein, 239 aa, Zea Mays
MDRGERLGRALDAFGGNLWALVDAALDAAARDRPDELRARRDSIVERLYAAAAGCSNCAGRPPSVAALAAAGLEEEDGEEAAPASPWAEADAQAGGAEAQTEVLGAGEPDLESKIVAIRDFLEDPNQPENELVSLLQNLADMDVTYNALQETDIGRQVNGLRKHPSAEVRRLVKQLIRKWKEIVDDWVRLDNSGGDGSASVMTDGDSPHKIQGRSHQSPRVSGFQYSPSPQRWFNFRDG

SEQ ID NO: 179259 - protein, 360 aa, Zea Mays
MDRGERLGRALDAFGGNLWALVDAALDAAARDRPDELRARRDSIVERLYAAAAGCSNCAGRPPSVAALAAAGLEEEDGEEAAPASPWAEADAQAGGAEAQTEVLGAGEPDLESKIVAIRDFLEDPNQPENELVSLLQNLADMDVTYNALQETDIGRQVNGLRKHPSAEVRRLVKQLIRKWKEIVDDWVRLDNSGGDGSASVMTADGDSPHKIQGRSHQSPRVSGFQYSPSPQRFNGSTSEMANNGFESTMDAKRRASPVPAHHNSRQMNNNHHSTTITTSTSSAPAFSVQKVTREQKQSLVDLDRLDSARKRLQENYQEAQNAKKQRTIQVMDINDIPKPKSRNAFIRKSGSGGLPARHR

SEQ ID NO: 179260 - protein, 330 aa, Zea Mays
MDRGERLGRALDAFGGNLWALVDAALDAAARDRPDELRARRDSIVERLYAAAAGCSNCAGRPPSVAALAAAGLEEEDGEEAAPASPWAEADAQAGGAEAQTEPENELVSLLQNLADMDVTYNALQETDIGRQVNGLRKHPSAEVRRLVKQLIRKWKEIVDDWVRLDNSGGDGSASVMTDGDSPHKIQGRSHQSPRVSGFQYSPSPQRFNGSTSEMANNGFESTMDAKRRASPVPAHHNSRQMNNNHHSTTITTSTSSAPAKVTREQKQSLVDLDRLDSARKRLQENYQEAQNAKKQRTIQVMDINDIPKPKSRNAFIRKSGSGGLPARHR

SEQ ID NO: 179261 - protein, 53 aa, Zea Mays
MNFRPLPPRGGRGVKALKDDSTHNYESCIVFQKTYQGHTMKTYQVIFSVIHWI

SEQ ID NO: 179262 - protein, 70 aa, Zea Mays
MFLLHTCIFIASHKHSCICIENEEEAVVKEEVVPQAEDPPVENNFYFDFCGTDPEPPATQGKPQCIYPFP

SEQ ID NO: 179263 - protein, 93 aa, Zea Mays
MVHIFCSLFRTERQAHGTLLNKHVEDTNLVSVFLLELVHDVFCLKKLVFLFNSSIQLAFTLIFHILKLPVNVIFLLLFNRNHIHQFLDLIFIC

SEQ ID NO: 179264 - protein, 144 aa, Zea Mays
MGLSDKDIVALSGGHTLGRAHPERSGFDGAWTKEPLKFDNSYFLELLNEESEGLLKLPTDKALLSDPEFRRYVELYAKDEDAFFKDYAESHKKLSELGFTPRSTAPSKSDLPTAAVLAQSAFGVAVAAAVVIAGYLYEASKKAK

SEQ ID NO: 179265 - protein, 165 aa, Zea Mays
MAAPMVDAEYLRQVDRARRHLRALISNKGCAPIMLRLAWHDAGTYDLKTKTGGANGSIRYEEEYTHGSNAGLKIAIDLLEPIKAKNPKITYADLYQLAGVVAVEVTGGPTVEFIPGRRDSSVCPREGRLPDAKKGAPHLRDIFYRMGLSDKDIVALSGGHTLGSP

SEQ ID NO: 179266 - protein, 267 aa, Zea Mays
MAAPMVDAEYLRQVDRARRHLRALISNKGCAPIMLRLAWHDAGTYDLKTKTGGANGSIRYEEEYTHGSNAGLKIAIDLLEPIKAKNPKITYADLYQDSSVCPREGRLPDAKKGAPHLRDIFYRMGLSDKDIVALSGGHTLGRAHPERSGFDGAWTKEPLKFDNSYFLELLNEESEGLLKLPTDKALLSDPEFRRYVELYAKDEDAFFKDYAESHKKLSELGFTPRSTAPSKSDLPTAAVLAQSAFGVAVAAAVVIAGYLYEASKKAK

SEQ ID NO: 179267 - protein, 69 aa, Zea Mays
MASIAGSSALSFAMPVKAINSNSLAFSPVRKGNTFLRLQPVPMRSVSCAVSFILGLTMHKYIWRGFSVS

SEQ ID NO: 179268 - protein, 102 aa, Zea Mays
MASIAGSSALSFAMPVKAINSNSLAFSPVRKGNTFLRLQPVPMRSVSCAAKKDTVDKVCEIVKKQLALPDHTEVCGESKFSELGADSLDTDIVSQSVIPYSL

SEQ ID NO: 179269 - protein, 121 aa, Zea Mays
MATDALALMDHLGWKKAHVFGHSMGAMIACKLDVMAPHRLCSLALLNVTRGGFQCFPKVDAQMLSLAFRFLRAKTPEERALVDLETHYTKVVHTVLSAQEEMLATWRTSRSFRTTMSSSLS

SEQ ID NO: 179270 - protein, 134 aa, Zea Mays
MDVCLSFRMDFATTLKHKRQEFSVPELIGSLDVEERVRAKDTCGKGGETSSANMVQKNSNASHKTMKPKQATLFKKKNKGVGCFVCGSIDQWASACPDRKFKQEKKPAQEKKTTNMVVSDTAEGTSGAKGLEHC

SEQ ID NO: 179271 - protein, 105 aa, Zea Mays
MGNGSHACVLSVGTVILKFTSGKTVLLKNVQHVPSINKNLVSGSLLCRDGYKLVFESNKCILSKYGTFVGKGYDSGGLFCLSLHDVCNKSVNNVISNESYIWHSR

SEQ ID NO: 179272 - protein, 203 aa, Zea Mays
MATDALALMDHLGWKKAHVFGHSMGAMIACKLDVMAPHRLCSLALLNVTRGGFQCFPKVDAQMLSLAFRFLRAKTPEERALVDLETHYTKCKGAGTLLMGNGSHACVLSVGTVILKFTSGKTVLLKNVQHVPSINKNLVSGSLLCRDGYKLVFESNKCILSKYGTFVGKGYDSGGLFCLSLHDVCNKSVNNVISNESYIWHSR

SEQ ID NO: 179273 - protein, 50 aa, Zea Mays
MILQTTRVLTTSRSNTNKHGIDKINITPIIRTHCIIMIYASLGDRGNENH

SEQ ID NO: 179274 - protein, 124 aa, Zea Mays
MATDALALMDHLGWKKAHVFGHSMGAMIACKLDVMAPHRLCSLALLNVTRGGFQCFPKVDAQMLSLAFRFLRAKTPEERALVDLETHYTKVFLPCLGCAHYLQRTQGSRRKIPKTQKILDWTAG

SEQ ID NO: 179275 - protein, 124 aa, Zea Mays
MATDALALMDHLGWKKAHVFGHSMGAMIACKLDVMAPHRLCSLALLNVTRGGFQCFPKVDAQMLSLAFRFLRAKTPEERALVDLETHYTKVFLPCLGCAHYLQRTQGSRGKIPKTQKILDWTAG

SEQ ID NO: 179276 - protein, 127 aa, Zea Mays
MATDALALMDHLGWKKAHVFGHSMGAMIACKLDVMAPHRLCSLALLNVTRGGFQCFPKVDAQMLSLAFRFLRAKTPEERALVDLETHYTKKIPRYRPFPETPLCAPPCHTRVLGAPRPGREHKHQIC

SEQ ID NO: 179277 - protein, 410 aa, Zea Mays
MMSHQQQIAPPSRGSVNGFPHLKLDRVGSGRHESKIVRSSSGGFTNSGNDIKLGHGSHSRDRLIYVLTQLIGHHVNVHVKNGSIISGIFHATNSDKDFGVVLKMAQVIKDGSARGQRFASDVVKKPETMIIPARELVQVFAKDVALGGDELPKGPGHDKRKDLLIDSAISRSHYLEERELERWAPDEGDSECIELEKYDRKGNRSWDQFETNAALFGVKSTFNEEIYTTKLERGPHMRELEKHASRIAREIEGEDTKDIHLAEERGLFLGDDLDHDEEIKYSAVRRDTDNSKYKPPFTNVPSSTYQVDLFNRTVNIVPKDLLGCSSTMDEESSSHIFDDIDASATIQTNSVRQPTSDYLPDRLSSNDENRLDRKLSKGSNENMDKRKLQPENNLSDGARPLISEGIQAKS

SEQ ID NO: 179278 - protein, 135 aa, Zea Mays
MKIWIRESCNLRIIYLMVQDLLFLKEFKLNPNAKSFTPSASLRPPHPASSDASYYYTNNIPAAPLGPGLPVGMGFPPAYGTQPVMYNAQPGASQQGYMHPVGLQQYGQQMMMGGGQNRPVYYYAPEMQQYRGRNF

SEQ ID NO: 179279 - protein, 404 aa, Zea Mays
MMSHQQQIAPPSRGSVNGFPHLKLDRVGSGRHESKIVRSSSGGFTNSGHGSHSRDRLIYVLTQLIGHHVNVHVKNGSIISGIFHATNSDKDFGVVLKMAQVIKDGSARGQRFASDVVKKPETMIIPARELVQVFAKDVALGGDELPKGPGHDKRKDLLIDSAISRSHYLEERELERWAPDEGDSECIELEKYDRKGNRSWDQFETNAALFGVKSTFNEEIYTTKLERGPHMRELEKHASRIAREIEGEDTKDIHLAEERGLFLGDDLDHDEEIKYSAVRRDTDNSKYKPPFTNVPSSTYQVDLFNRTVNIVPKDLLGCSSTMDEESSSHIFDDIDASATIQTNSVRQPTSDYLPDRLSSNDENRLDRKLSKGSNENMDKRKLQPENNLSDGARPLISEGIQAKS

SEQ ID NO: 179280 - protein, 498 aa, Zea Mays
MPTRPSSRIYDSCMCANAPIFTGIEQLPQFSHLQELIGLTATDSVELGDIVDPPVIRTATSILPLGWTGLPGGKNAEPLKVDIIGHDLQMCTLFQAQINGNWYSTVIETLPSATSYSPNGELQPTLQKMRILVGQPLKQPPNYISGDFMIPVMAGADSTPDFGFESFFEDKDCCKGLSGFLIYGTSDFVTVRKEVHVRTRRVRLLGLEGAGKTSLLKAMLGQVKERNSTVLECIHVDLHGKGISNGLCYIDSTTVNLQELPLEVGRFKEELLLGLHDISRKTDLVIAVHNLAHRIPQYQRSNTSQPQPALSLLLDEAKALSIPWILAITNKFSVSAHEQNRLISSAMEAYQVSPEMTKVVNSSPFLMPSARNSLQQIRSATGKLKKDPANRSGYLPVNFGLSSFQRKDIVMHVEGVSSLRQLVHQVVLNNEETAFEELARERLLKELASEKAASLQVKQKPRKRDGSVTAAAVGASLGAGLGIVMAVIMGAASALRKP

SEQ ID NO: 179281 - protein, 794 aa, Zea Mays
MEFQHWTYTILHRKETGNLFFVDTHLVAALATLAILRVIATTSSEEDNRLHVKCITFSQPPVGNAALRDYVHKRGWQDYFKSYCIPEDLVPRILSPAYFHHYNAQTPEASFTNKTDVKSEEVMEASGERPRGNNREHLVLGVGPVQKSFWRLSKLVPLEGVRKSLSAIQKQTNVFGKAPSQLDSYLQSKVDESEEPPQSLEIQESSQGIALTPLSDKDGGNTEDNNRTEKINASEAGGSKRWSRVPSLPSYVPFGELYLLGDSSVNTLSDSEYSKMTSVQSVISELRERLQSHSMKSYRARFQKIYDSCMCANAPIFTGIEQLPQFSHLQELIGLTATDSVELGDIVDPPVIRTATSILPLGWTGLPGGKNAEPLKVDIIGHDLQMCTLFQAQINGNWYSTVIETLPSATSYSPNGELQPTLQKMRILVGQPLKQPPNYISGDFMIPVMAGADSTPDFGFESFFEDKDCCKGLSGFLIYGTSDFVTVRKEVHVRTRRVRLLGLEGAGKTSLLKAMLGQVKERNSTVLECIHVDLHGKGISNGLCYIDSTTVNLQELPLEVGRFKEELLLGLHDISRKTDLVIAVHNLAHRIPQYQRSNTSQPQPALSLLLDEAKALSIPWILAITNKFSVSAHEQNRLISSAMEAYQVSPEMTKVVNSSPFLMPSARNSLQQIRSATGKLKKDPANRSGYLPVNFGLSSFQRKDIVMHVEGVSSLRQLVHQVVLNNEETAFEELARERLLKELASEKAASLQVKQKPRKRDGSVTAAAVGASLGAGLGIVMAVIMGAASALRKP

SEQ ID NO: 179282 - protein, 672 aa, Zea Mays
MEASGERPRGNNREHLVLGVGPVQKSFWRLSKLVPLEGVRKSLSAIQKQTNVFGKAPSQLDSYLQSKVDESEEPPQSLEIQESSQGIALTPLSDKDGGNTEDNNRTEKINASEAGGSKRWSRVPSLPSYVPFGELYLLGDSSVNTLSDSEYSKMTSVQSVISELRERLQSHSMKSYRARFQKIYDSCMCANAPIFTGIEQLPQFSHLQELIGLTATDSVELGDIVDPPVIRTATSILPLGWTGLPGGKNAEPLKVDIIGHDLQMCTLFQAQINGNWYSTVIETLPSATSYSPNGELQPTLQKMRILVGQPLKQPPNYISGDFMIPVMAGADSTPDFGFESFFEDKDCCKGLSGFLIYGTSDFVTVRKEVHVRTRRVRLLGLEGAGKTSLLKAMLGQVKERNSTVLECIHVDLHGKGISNGLCYIDSTTVNLQELPLEVGRFKEELLLGLHDISRKTDLVIAVHNLAHRIPQYQRSNTSQPQPALSLLLDEAKALSIPWILAITNKFSVSAHEQNRLISSAMEAYQVSPEMTKVVNSSPFLMPSARNSLQQIRSATGKLKKDPANRSGYLPVNFGLSSFQRKDIVMHVEGVSSLRQLVHQVVLNNEETAFEELARERLLKELASEKAASLQVKQKPRKRDGSVTAAAVGASLGAGLGIVMAVIMGAASALRKP

SEQ ID NO: 179283 - protein, 1018 aa, Zea Mays
MAAALASRVESWVRDQAARLQPWAAALPQAPRWPWPPPRPAWPWPGDRRRQRERMFREEYERRSRQLRELCRAVRVDTVAELQELLCAMVLAECVYKRPVSEMMRYINKFKSDFGGNVVSLERVQPSLDHVPHRYLLAEAGDTLFATFIGTKQYKDIIADVNIFQGTLFHEDTAHDLAPDVDPEQNDTQKGEESHGKSYRETSKKLRKPKPAVHRGFLARANGIPALDLYNLAQKRNRKLVLCGHSLGGAVAALATLAILRVIATTSSEEDNRLHVKCITFSQPPVGNAALRDYVHKRGWQDYFKSYCIPEDLVPRILSPAYFHHYNAQTPEASFTNKTDVKSEEVMEASGERPRGNNREHLVLGVGPVQKSFWRLSKLVPLEGVRKSLSAIQKQTNVFGKAPSQLDSYLQSKVDESEEPPQSLEIQESSQGIALTPLSDKDGGNTEDNNRTEKINASEAGGSKRWSRVPSLPSYVPFGELYLLGDSSVNTLSDSEYSKMTSVQSVISELRERLQSHSMKSYRARFQKIYDSCMCANAPIFTGIEQLPQFSHLQELIGLTATDSVELGDIVDPPVIRTATSILPLGWTGLPGGKNAEPLKVDIIGHDLQMCTLFQAQINGNWYSTVIETLPSATSYSPNGELQPTLQKMRILVGQPLKQPPNYISGDFMIPVMAGADSTPDFGFESFFEDKDCCKGLSGFLIYGTSDFVTVRKEVHVRTRRVRLLGLEGAGKTSLLKAMLGQVKERNSTVLECIHVDLHGKGISNGLCYIDSTTVNLQELPLEVGRFKEELLLGLHDISRKTDLVIAVHNLAHRIPQYQRSNTSQPQPALSLLLDEAKALSIPWILAITNKFSVSAHEQNRLISSAMEAYQVSPEMTKVVNSSPFLMPSARNSLQQIRSATGKLKKDPANRSGYLPVNFGLSSFQRKDIVMHVEGVSSLRQLVHQVVLNNEETAFEELARERLLKELASEKAASLQVKQKPRKRDGSVTAAAVGASLGAGLGIVMAVIMGAASALRKP

SEQ ID NO: 179284 - protein, 1485 aa, Zea Mays
MQEGLGQRMHVPHGINLCIATSSMPFQAQSFIEPSTGQVNPPVTSENLSANSQAVNDAGAVEGTDMNEKSVQKPKRKKHRPKVIKEGQSAKLQKPKTPKPPKENGNQPTGKRKYVRRKGLSAPAEQIPLCADTHTRAKPGVVQRCLDFDVEDQHGHLDLVPQTQETEIQTGPADTQPSISGVERSNVQISYHWGGTSSSISSVDPIAGIHGLQADCNSKRVSFDLNNSIVSQLPTNYSSPMDSSEQFFNFDLREEVRTNQLLPHLTSSVDHTRHPSVNFDQYISTSQDCPEKSPRHYQMVSSYRILENMTTASQYTERVSMGGNFNPEACMGEDAIIKQMAQSYRPLESPFVPPNHNERDMMNGNLNEFPVKNDYLKFSTNSNYQTGAGFDHCSPDYSDVLAMGTKREHDAISGHQISLGIDFINSNRTRKFCSDDPLSTSSQTSYCPQSCKRMRPEDHSNQLHGTMGKLSSASAFSDGLNTNKVSAMNPRIGTLADVQLLMALEKSKASQQMFEFDYVTSQNNMIHERTGLALQNIADKGFIALPNKQFPSFAAQNIPLPGSTVNQLGESNTLRNGVHQIQPWEITYRLHDSRDNFSLPGNTQFSNGTVNPSSENYIQSNAIHEHQCLENVVAKVPVLSETQNTSTQEGHNHCTAATTDEHIRTTSDEVVRSLTRRASQPTTNGNYNIKSSRVTAEANCTEKPRKRGRPRKVVNPNGEPKERGTKGKQNVGHAELISPKGSCADFLKTNGITYASESSTGITPRMSTVELKSSDQDKEIHGGAMPQATAASVDPLDGIIEKIKLLTINGPDKGVSEVPKNALVPYEGEFSALIAFEGKAKKSRPRAKVNIDPVTTMMWNLLMGPDMGDDAEGLDKDKEKWLDEERRVFRGRVDSFIARMHLVQGDRRFSRWKGSVVDSVVGVFLTQNVSDHLSSSAFMAVAAKFPVKIEVPKKPVAEMSHTPEQKDSCSGLFGDSIKLQGNIYIEEISDIKSLITTEDNEESNNNELIGNSAGNGVNCATGGCHVSYSVVETEDGSLEDVISSQNSAVSSQNSPDYVVRRTDPIGSSSLQNFTEEGCIMRNMSNGTGISTDYTLFLPIQDPKGMLGLSEYCGLNPLPVSGVNKDMLLDLNRSYQPLHTYMPYDQNSESDFTGVSCLNHMGKSFHTGPDKVNLSSVTQSEASLYPIDPLEQGDFSPLIKQNFQPLHSSDEVPFFKEHSSCNDFLRNKTEAHFLEPLVCSNPQEVYTTSTDQMGAEQSQSGCGQKYNDARVQTASHERHQSSTLCDNQNSCSVVLQGVASDSTQKFVDTQKGPSKARQNGSKAKVRGRPKKKTDDWDSLRKKVLSNGGDKQRSHDARDTVDWEAVRQAEVREISETIRERGMNNMLAERIKEFLNRLVTDHGSIDLEWLRDVQPDKAKDFLLSIRGLGLKSVECVRLLTLHHMAFPVDTNVGRICVRLGWVPLQPLPESLQLHLLEISTSGLDYAN

SEQ ID NO: 179285 - protein, 935 aa, Zea Mays
MQEGLGQRMHVPHGINLCIATSSMPFQAQSFIEPSTGQVNPPVTSENLSANSQAVNDAGAVEGTDMNEKSVQKPKRKKHRPKVIKEGQSAKLQKPKTPKPPKENGNQPTGKRKYVRRKGLSAPAEQIPLCADTHTRAKPGVVQRCLDFDVEDQHGHLDLVPQTQETEIQTGPADTQPSISGVERSNVQISYHWGGTSSSISSVDPIAGIHGLQADCNSKRVSFDLNNSIVSQLPTNYSSPMDSSEQFFNFDLREEVRTNQLLPHLTSSVDHTRHPSVNFDQYISTSQDCPEKSPRHYQMVSSYRILENMTTASQYTERVSMGGNFNPEACMGEDAIIKQMAQSYRPLESPFVPPNHNERDMMNGNLNEFPVKNDYLKFSTNSNYQTGAGFDHCSPDYSDVLAMGTKREHDAISGHQISLGIDFINSNRTRKFCSDDPLSTSSQTSYCPQSCKRMRPEDHSNQLHGTMGKLSSASAFSDGLNTNKVSAMNPRIGTLADVQLLMALEKSKASQQMFEFDYVTSQNNMIHERTGLALQNIADKGFIALPNKQFPSFAAQNIPLPGSTVNQLGESNTLRNGVHQIQPWEITYRLHDSRDNFSLPGNTQFSNGTVNPSSENYIQSNAIHEHQCLENVVAKVPVLSETQNTSTQEGHNHCTAATTDEHIRTTSDEVVRSLTRRASQPTTNGNYNIKSSRVTAEANCTEKPRKRGRPRKVVNPNGEPKERGTKGKQNVGHAELISPKGSCADFLKTNGITYASESSTGITPRMSTVELKSSDQDKEIHGGAMPQATAASVDPLDGIIEKIKLLTINGPDKGVSEVPKNALVPYEGEFSALIAFEGKAKKSRPRAKVNIDPVTTMMWNLLMGPDMGDDAEGLDKDKEKWLDEERRVFRGRVDSFIARMHLVQGDRRFSRWKGSVVDSVVGVFLTQNVSDHLSR

SEQ ID NO: 179286 - protein, 162 aa, Zea Mays
MVDEVGPPEKPAMEPAPAAKQIMVPEKPEEMLRAQHMLTTLVDEVRPPEKPEETPENTSAGCPTPSYPRPRMLMSSAPPVPLPRRQRAPPSSSLAPRPDRRRRRAAGSTVLSVVGGHGQQPERPSIVQGSPPWATQEGDSHTHMQDIEEKHNHVVCHLSFDC

SEQ ID NO: 179287 - protein, 149 aa, Zea Mays
MSPAAPQHKLREAIAMVDEVGPPEKPAMEPAPAAKQIMVPEKPEEMLRAQHMLTTLVDEVRPPEKPEETPENTSAVWLEAMANSQRDLASSKGALHGRHKRGTATHTCKTLRRSTTMLCVTFPLIASWIIHILYRLNHLLHQKRHMFLQ

SEQ ID NO: 179288 - protein, 124 aa, Zea Mays
MVDEVGPPEKPAMEPAPAAKQIMVPEKPEEMLRAQHMLTTLVDEVRPPEKPEETPENTSAGCPTPSYPRPRMLMSSAPPVPLPRRQRAPPSSSLAPRPDRRRRRAAGSTVLRCSPMPLPLRTSG

SEQ ID NO: 179289 - protein, 86 aa, Zea Mays
MVQESLSRELQIERDKNKSLTERFEDVERQLELAIKEQEATVELFAEERKCHDQEVENLKRKLTEASSTIQDLMEQLNAARNCCKR

SEQ ID NO: 179290 - protein, 484 aa, Zea Mays
MVSLFHRSRTYSGGEQGTRIIIYNLWEDDEGELELDFDADANIRGVNRDQNKIKKANQFPNSKHFFTYRHSLRSYASILYLMLPDNFQMILRGKKIDHHNIINDLMLKKQLTYNPTVGDGLPKDMHVAAKVTIGFVKDARQHIDIQGFNVYHKNRLIKPFWRVWTSAGVAGRGIIGVLEVNFVEPAHDKQDFERTNCLARLEARLNRMQKKYWSDNRHRIGYGTNDASTDSVKRKTGLSLRPFGQGSWKSGYLQTIRSDGRSCSNTTNNIMNASMSSPETSKLSGPNREFSSTTVCQHRAEKSANTIRSERSVLHGLSNTDGGKTETANAPSKSTSPILRTSLPPTPNEGKRSERIAAKYQSKQVNATTNGDRESIVDPEAIIKKLKEENSSLKERILMVQESLSRELQIERDKNKSLTERFEDVERQLELAIKEQEATVELFAEERKCHDQEVENLKRKLTEASSTIQDLMEQLNAARNCCKR

SEQ ID NO: 179291 - protein, 748 aa, Zea Mays
MAPTAVDPGPSDHLLAPAPAAMAGGGDGGDGQMEVVFNVSSSDTDSDDLGAGGGKRSRPVAGQGGGRDREDKKARILAAAATVPAGFLEPLSPVRLLPPPAPGRSVTKQFWKAGDYVGKPDHLLAVVAAQHSDSGMDHVRVHPKFLHSNATSHKWALGAFAELLDNSLDEVVHGATYVNIDMIESKKDGTPMLLVQDNGGGMNPDKMRHCMSLGYSAKSKVKNTIGQYGNGFKTSTMRLGADVLVFSCSRGIEGTRPTQSVGMLSYTFLRSTNRDDIIVPMIDYEKENEWKRKARTTLTDWCMSLETIIQWSPYSTEAELIQEFGSIGEQGTRIIIYNLWEDDEGELELDFDADANDIQIRGVNRDQNKIKKANQFPNSKHFFTYRHSLRVAAKVTIGFVKDARQHIDIQGFNVYHKNRLIKPFWRVWTSAGVAGRGIIGVLEVNFVEPAHDKQDFERTNCLARLEARLNRMQKKYWSDNRHRIGYGTNDASTDSVKRKTGLSLRPFGQGSWKSGYLQTIRSDGRSCSNTTNNIMNASMSSPETSKLSGPNREFSSTTVCQHRAEKSANTIRSERSVLHGLSNTDGGKTETANAPSKSTSPILRTSLPPTPNEGKRSERIAAKYQSKQVNATTNGDRESIVDPEAIIKKLKEENSSLKERILMVQESLSRELQIERDKNKSLTERFEDVERQLELAIKEQEATVELFAEERKCHDQEVENLKRKLTEASSTIQDLMEQLNAARNCCKR

SEQ ID NO: 179292 - protein, 697 aa, Zea Mays
MAPTAVDPGPSDHLLAPAPAAMAGGGDGGDGQMEVVFNVSSSDTDSDDLGAGGGKRSRPVAGQGGGRDREDKKARILAAAATVPAGFLEPLSPVRLLPPPAPGRSVTKQFWKAGDYVGKPDHLLAVVAAQHSDSGMDHVRVHPKFLHSNATSHKWALGAFAELLDNSLDEVVHGATYVNIDMIESKKDGTPMLLVQDNGGGMNPDKMRHCMSLGYSAKSKVKNTIGQYGNGFKTSTMRLGADVLVFSCSRGIEGTRPTQSVGMLSYTFLRSTNRDDIIVPMIDYEKENEWKRKARTTLTDWCMSLETIIQWSPYSTEAELIQEFGSIGEQGTRIIIYNLWEDDEGELELDFDADANDIQIRGVNRDQNKIKKANQFPNSKHFFTYRHSLRSYASILYLMLPDNFQMILRGKKIDHHNIINDLMLKKQLTYNPTVGDGLPKDMHVAAKVTIGFVKDARQHIDIQGFNVYHKNRLIKPFWRVWTSAGVAGRGIIGVLEVNFVEPAHDKQDFERTNCLARLEARLNRMQKKYWSDNRHRIGYGTNDASTDSVKRKTGLSLRPFGQGSWKSGYLQTIRSDGRSCSNTTNNIMNASMSSPETSKLSGPNREFSSTTVCQHRAEKSANTIRSERSVLHGLSNTDGGKTETANAPSKSTSPILRTSLPPTPNEGKRSERIAAKYQSKNLDGAGIIIKGTANRAG

SEQ ID NO: 179293 - protein, 611 aa, Zea Mays
MIESKKDGTPMLLVQDNGGGMNPDKMRHCMSLGYSAKSKVKNTIGQYGNGFKTSTMRLGADVLVFSCSRGIEGTRPTQSVGMLSYTFLRSTNRDDIIVPMIDYEKENEWKRKARTTLTDWCMSLETIIQWSPYSTEAELIQEFGSIGEQGTRIIIYNLWEDDEGELELDFDADANDIQIRGVNRDQNKIKKANQFPNSKHFFTYRHSLRSYASILYLMLPDNFQMILRGKKIDHHNIINDLMLKKQLTYNPTVGDGLPKDMHVAAKVTIGFVKDARQHIDIQGFNVYHKNRLIKPFWRVWTSAGVAGRGIIGVLEVNFVEPAHDKQDFERTNCLARLEARLNRMQKKYWSDNRHRIGYGTNDASTDSVKRKTGSWKSGYLQTIRSDGRSCSNTTNNIMNASMSSPETSKLSGPNREFSSTTVCQHRAEKSANTIRSERSVLHGLSNTDGGKTETANAPSKSTSPILRTSLPPTPNEGKRSERIAAKYQSKQVNATTNGDRESIVDPEAIIKKLKEENSSLKERILMVQESLSRELQIERDKNKSLTERFEDVERQLELAIKEQEATVELFAEERKCHDQEVENLKRKLTEASSTIQDLMEQLNAARNCCKR

SEQ ID NO: 179294 - protein, 739 aa, Zea Mays
MAPTAVDPGPSDHLLAPAPAAMAGGGDGGDGQMEVVFNVSSSDTDSDDLGAGGGKRSRPVAGQGGGRDREDKKARILAAAATVPAGFLEPLSPVRLLPPPAPGRSVTKQFWKAGDYVGKPDHLLAVVAAQHSDSGMDHVRVHPKFLHSNATSHKWALGAFAELLDNSLDEVVHGATYVNIDMIESKKDGTPMLLVQDNGGGMNPDKMRHCMSLGYSAKSKVKNTIGQYGNGFKTSTMRLGADVLVFSCSRGIEGTRPTQSVGMLSYTFLRSTNRDDIIVPMIDYEKENEWKRKARTTLTDWCMSLETIIQWSPYSTEAELIQEFGSIGEQGTRIIIYNLWEDDEGELELDFDADANDIQIRGVNRDQNKIKKANQFPNSKHFFTYRHSLRVAAKVTIGFVKDARQHIDIQGFNVYHKNRLIKPFWRVWTSAGVAGRGIIGVLEVNFVEPAHDKQDFERTNCLARLEARLNRMQKKYWSDNRHRIGYGTNDASTDSVKRKTGSWKSGYLQTIRSDGRSCSNTTNNIMNASMSSPETSKLSGPNREFSSTTVCQHRAEKSANTIRSERSVLHGLSNTDGGKTETANAPSKSTSPILRTSLPPTPNEGKRSERIAAKYQSKQVNATTNGDRESIVDPEAIIKKLKEENSSLKERILMVQESLSRELQIERDKNKSLTERFEDVERQLELAIKEQEATVELFAEERKCHDQEVENLKRKLTEASSTIQDLMEQLNAARNCCKR

SEQ ID NO: 179295 - protein, 798 aa, Zea Mays
MAPTAVDPGPSDHLLAPAPAAMAGGGDGGDGQMEVVFNVSSSDTDSDDLGAGGGKRSRPVAGQGGGRDREDKKARILAAAATVPAGFLEPLSPVRLLPPPAPGRSVTKQFWKAGDYVGKPDHLLAVVAAQHSDSGMDHVRVHPKFLHSNATSHKWALGAFAELLDNSLDEVVHGATYVNIDMIESKKDGTPMLLVQDNGGGMNPDKMRHCMSLGYSAKSKVKNTIGQYGNGFKTSTMRLGADVLVFSCSRGIEGTRPTQSVGMLSYTFLRSTNRDDIIVPMIDYEKENEWKRKARTTLTDWCMSLETIIQWSPYSTEAELIQEFGSIGEQGTRIIIYNLWEDDEGELELDFDADANIRGVNRDQNKIKKANQFPNSKHFFTYRHSLRSYASILYLMLPDNFQMILRGKKIDHHNIINDLMLKKQLTYNPTVGDGLPKDMHVAAKVTIGFVKDARQHIDIQGFNVYHKNRLIKPFWRVWTSAGVAGRGIIGVLEVNFVEPAHDKQDFERTNCLARLEARLNRMQKKYWSDNRHRIGYGTNDASTDSVKRKTGLSLRPFGQGSWKSGYLQTIRSDGRSCSNTTNNIMNASMSSPETSKLSGPNREFSSTTVCQHRAEKSANTIRSERSVLHGLSNTDGGKTETANAPSKSTSPILRTSLPPTPNEGKRSERIAAKYQSKQVNATTNGDRESIVDPEAIIKKLKEENSSLKERILMVQESLSRELQIERDKNKSLTERFEDVERQLELAIKEQEATVELFAEERKCHDQEVENLKRKLTEASSTIQDLMEQLNAARNCCKR

SEQ ID NO: 179296 - protein, 692 aa, Zea Mays
MAPTAVDPGPSDHLLAPAPAAMAGGGDGGDGQMEVVFNVSSSDTDSDDLGAGGGKRSRPVAGQGGGRDREDKKARILAAAATVPAGFLEPLSPVRLLPPPAPGRSVTKQFWKAGDYVGKPDHLLAVVAAQHSDSGMDHVRVHPKFLHSNATSHKWALGAFAELLDNSLDEVVHGATYVNIDMIESKKDGTPMLLVQDNGGGMNPDKMRHCMSLGYSAKSKVKNTIGQYGNGFKTSTMRLGADVLVFSCSRGIEGTRPTQSVGMLSYTFLRSTNRDDIIVPMIDYEKENEWKRKARTTLTDWCMSLETIIQWSPYSTEAELIQEFGSIGEQGTRIIIYNLWEDDEGELELDFDADANDIQIRGVNRDQNKIKKANQFPNSKHFFTYRHSLRSYASILYLMLPDNFQMILRGKKIDHHNIINDLMLKKQLTYNPTVGDGLPKDMHVAAKVTIGFVKDARQHIDIQGFNVYHKNRLIKPFWRVWTSAGVAGRGIIGVLEVNFVEPAHDKQDFERTNCLARLEARLNRMQKKYWSDNRHRIGYGTNDASTDSVKRKTGLSLRPFGQGSWKSGYLQTIRSDGRSCSNTTNNIMNASMSSPETSKLSGPNREFSSTTVCQHRAEKSANTIRSERSVLHGLSNTDGGKTETANAPSKSTSPILRTSLPPTPNEGKRSERIAAKYQSKLSWVTILSVEDH

SEQ ID NO: 179297 - protein, 776 aa, Zea Mays
MAPTAVDPGPSDHLLAPAPAAMAGGGDGGDGQMEVVFNVSSSDTDSDDLGAGGGKRSRPVAGQGGGRDREDKKARILAAAATVPAGFLEPLSPVRLLPPPAPGRSVTKQFWKAGDYVGKPDHLLAVVAAQHSDSGMDHVRVHPKFLHSNATSHKWALGAFAELLDNSLDEVVHGATYVNIDMIESKKDGTPMLLVQDNGGGMNPDKMRHCMSLGYSAKSKVKNTIGQYGNGFKTSTMRLGADVLVFSCSRGIEGTRPTQSVGMLSYTFLRSTNRDDIIVPMIDYEKENEWKRKARTTLTDWCMSLETIIQWSPYSTEAELIQEFGSIGEQGTRIIIYNLWEDDEGELELDFDADANDIQIRGVNRDQNKIKKANQFPNSKHFFTYRHSLRSYASILYLMLPDNFQMILRGKKIDHHNIINDLMLKKQLTYNPTVGDGLPKDMHVAAKVTIGFVKDARQHIDIQGFNVYHKNRLIKPFWRVWTSAGVAGRGIIGVLEVNFVEPAHDKQDFERTNCLARLEARLNRMQKKYWSDNRHRIGYGTNDASTDSVKRKTGSWKSGYLQTIRSDGRSCSNTTNNIMNASMSSPETSKLSGPNREFSSTTVCQHRAEKSANTIRSERSVLHGLSNTDGGKTETANAPSKSTSPILRTSLPPTPNEGKRSERIAAKYQSKQVNATTNGDRESIVDPEAIIKKLKEENSSLKESYLGLPFSVWKITKADIIALIDKIDDRLPRWKAALMHQARRATMVKLVLIVIPIYRFIVLHCPKWVLKSIDKI

SEQ ID NO: 179298 - protein, 785 aa, Zea Mays
MAPTAVDPGPSDHLLAPAPAAMAGGGDGGDGQMEVVFNVSSSDTDSDDLGAGGGKRSRPVAGQGGGRDREDKKARILAAAATVPAGFLEPLSPVRLLPPPAPGRSVTKQFWKAGDYVGKPDHLLAVVAAQHSDSGMDHVRVHPKFLHSNATSHKWALGAFAELLDNSLDEVVHGATYVNIDMIESKKDGTPMLLVQDNGGGMNPDKMRHCMSLGYSAKSKVKNTIGQYGNGFKTSTMRLGADVLVFSCSRGIEGTRPTQSVGMLSYTFLRSTNRDDIIVPMIDYEKENEWKRKARTTLTDWCMSLETIIQWSPYSTEAELIQEFGSIGEQGTRIIIYNLWEDDEGELELDFDADANDIQIRGVNRDQNKIKKANQFPNSKHFFTYRHSLRSYASILYLMLPDNFQMILRGKKIDHHNIINDLMLKKQLTYNPTVGDGLPKDMHVAAKVTIGFVKDARQHIDIQGFNVYHKNRLIKPFWRVWTSAGVAGRGIIGVLEVNFVEPAHDKQDFERTNCLARLEARLNRMQKKYWSDNRHRIGYGTNDASTDSVKRKTGLSLRPFGQGSWKSGYLQTIRSDGRSCSNTTNNIMNASMSSPETSKLSGPNREFSSTTVCQHRAEKSANTIRSERSVLHGLSNTDGGKTETANAPSKSTSPILRTSLPPTPNEGKRSERIAAKYQSKQVNATTNGDRESIVDPEAIIKKLKEENSSLKESYLGLPFSVWKITKADIIALIDKIDDRLPRWKAALMHQARRATMVKLVLIVIPIYRFIVLHCPKWVLKSIDKI

SEQ ID NO: 179299 - protein, 378 aa, Zea Mays
MTSRAAAEAALLLPLRLHSAPLRLRFFCTSASRLRWACSAAALLAVVSLVTAICAMPDAGAGTNVEADAGALRLEIEALRLKVARLESLLEANSKALDIKASILEEDNKLNEAMEREIQLLTNGPDRTKNSQSKSYSAGNIKSMEDEVRQLQHEIIKINSNSYTVESLAHDTEKRVEALSLEIEDMTAEQWIQIRQLEQAFVLTKMMTSKVHERSRPSDTVYKWPGKEIIVKYVRNIKLDGIYIRGASYVRSCFSHTYKQSRSFVQAISRCYHETSRFRKAIRHRYTSDINKPDVFFLGGTISRSNISLPYNQFKIFISLARKFHYKAQGFIRDVMESNKYSCGLSNEPVTFILAYLVVISPLWIAWFLYSTWFSSRK

SEQ ID NO: 179300 - protein, 377 aa, Zea Mays
MTSRAAAEAALLLPLRLHSAPLRLRFFCTSASRLRWACSAAALLAVVSLVTAICAMPDAGAGTNVEADAGALRLEIEALRLKVARLEANSKALDIKASILEEDNKLNEAMEREIQLLTNGPDRTKNSQSKSYSAGNIKSMEDEVRQLQHEIIKINSNSYTVESLAHDTEKRVEALSLEVKKIEDMTAEQWIQIRQLEQAFVLTKMMTSKVHERSRPSDTVYKWPGKEIIVKYVRNIKLDGIYIRGASYVRSCFSHTYKQSRSFVQAISRCYHETSRFRKAIRHRYTSDINKPDVFFLGGTISRSNISLPYNQFKIFISLARKFHYKAQGFIRDVMESNKYSCGLSNEPVTFILAYLVVISPLWIAWFLYSTWFSSRK

SEQ ID NO: 179301 - protein, 325 aa, Zea Mays
MTSRAAAEAALLLPLRLHSAPLRLRFFCTSASRLRWACSAAALLAVVSLVTAICAMPDAGAGTNVEADAGALRLEIEALRLKVARLESLLEANSKALDIKASILEEDNKLNEAMEREIQLLTNGPDRTKIEDMTAEQWIQIRQLEQAFVLTKMMTSKVHERSRPSDTVYKWPGKEIIVKYVRNIKLDGIYIRGASYVRSCFSHTYKQSRSFVQAISRCYHETSRFRKAIRHRYTSDINKPDVFFLGGTISRSNISLPYNQFKIFISLARKFHYKAQGFIRDVMESNKYSCGLSNEPVTFILAYLVVISPLWIAWFLYSTWFSSRK

SEQ ID NO: 179302 - protein, 155 aa, Zea Mays
MTSRAAAEAALLLPLRLHSAPLRLRFFCTSASRLRWACSAAALLAVVSLVTAICAMPDAGAGTNVEADAGALRLEIEALRLKVARLESLLEANSKALDIKASILEEDNKLNEAMEREIQLLTNGPDRTKNSQSKSYSAGNIKSMEDELSMDAHDP

SEQ ID NO: 179303 - protein, 218 aa, Zea Mays
MSDEFEPVDIEGSEKPDVWVHRPGSYVTSTWEPRKGRARCQDSRIHRENDSCSDSPRSSVSGSHRSDSSTEEPTSSKSHRHLQKVKKGLGKLAGAVLHRSPKENDDEASPCVTPHQNIRPVGESRVSVTYVVDQDPAGVDGSGSRRDDHQQSPEREELDSPSKRHLRKKAVHMVKHAGKTAHNLKSMFSKKGLDKSKEEHRSDEECDEEGDVVAARRV

SEQ ID NO: 179304 - protein, 600 aa, Zea Mays
MRKGNVPIRERWLNYAVEKIWPVCMERVASQQFLLPIFPWFLEKFKPWTARKAVIQSLYLGRNPPMFTDIRVVNQSTDDDHLVLEIGMNFLSADDMDARMAVQLRKRLGFGITTNMHITGMHVEGKVLVGVRFLRQWPFIGRVRVCFVEPPYFQMTVKPLFGHGLDVTELPGISGWLDRMLDVAFGQTLVEPNMLVIDLEKFASESTDNWFSVDEKPPIAYARVEILEGADMKPSDPNGLADPYVKGQLGPYRFRTKIHKKTLDPKWLEEFKIPITSWEALNLLHLQVRDKDPIFDDALGDCSISINKLRGGIRHDIWIALKNIKTGRIHVAVTVLEEENEKVSNDEEEQCGIHKVDKASTPRSSFSSRTNHESECSDEFRKMSDEFEPVDIEGSEKPDVWVHRPGSYVTSTWEPRKGRARCQDSRIHRENDSCSDSPRSSVSGSHRSDSSTEEPTSSKSHRHLQKVKKGLGKLAGAVLHRSPKENDDEASPCVTPHQNIRPVGESRVSVTYVVDQDPAGVDGSGSRRDDHQQSPEREELDSPSKRHLRKKAVHMVKHAGKTAHNLKSMFSKKGLDKSKEEHRSDEECDEEGDVVAARRV

SEQ ID NO: 179305 - protein, 407 aa, Zea Mays
MLVIDLEKFASESTDNWFSVDEKPPIAYARVEILEGADMKPSDPNGLADPYVKGQLGPYRFRTKIHKKTLDPKWLEEFKIPITSWEALNLLHLQVRDKDPIFDDALGDCSISINKLRGGIRHDIWIALKNIKTGRIHVAVTVLEEENEKVSNDEEEQCGIHKVDKASTPRSSFSSRTNHESECSDEFRKMSDEFEPVDIEGSEKPDVWVHRPGSYVTSTWEPRKGRARCQDSRIHRENDSCSDSPRSSVSGSHRSDSSTEEPTSSKSHRHLQKVKKGLGKLAGAVLHRSPKENDDEASPCVTPHQNIRPVGESRVSVTYVVDQDPAGVDGSGSRRDDHQQSPEREELDSPSKRHLRKKAVHMVKHAGKTAHNLKSMFSKKGLDKSKEEHRSDEECDEEGDVVAARRV

SEQ ID NO: 179306 - protein, 513 aa, Zea Mays
MNFLSADDMDARMAVQLRKRLGFGITTNMHITGMHVEGKVLVGVRFLRQWPFIGRVRVCFVEPPYFQMTVKPLFGHGLDVTELPGISGWLDRMLDVAFGQTLVEPNMLVIDLEKFASESTDNWFSVDEKPPIAYARVEILEGADMKPSDPNGLADPYVKGQLGPYRFRTKIHKKTLDPKWLEEFKIPITSWEALNLLHLQVRDKDPIFDDALGDCSISINKLRGGIRHDIWIALKNIKTGRIHVAVTVLEEENEKVSNDEEEQCGIHKVDKASTPRSSFSSRTNHESECSDEFRKMSDEFEPVDIEGSEKPDVWVHRPGSYVTSTWEPRKGRARCQDSRIHRENDSCSDSPRSSVSGSHRSDSSTEEPTSSKSHRHLQKVKKGLGKLAGAVLHRSPKENDDEASPCVTPHQNIRPVGESRVSVTYVVDQDPAGVDGSGSRRDDHQQSPEREELDSPSKRHLRKKAVHMVKHAGKTAHNLKSMFSKKGLDKSKEEHRSDEECDEEGDVVAARRV

SEQ ID NO: 179307 - protein, 421 aa, Zea Mays
MLDVAFGQTLVEPNMLVIDLEKFASESTDNWFSVDEKPPIAYARVEILEGADMKPSDPNGLADPYVKGQLGPYRFRTKIHKKTLDPKWLEEFKIPITSWEALNLLHLQVRDKDPIFDDALGDCSISINKLRGGIRHDIWIALKNIKTGRIHVAVTVLEEENEKVSNDEEEQCGIHKVDKASTPRSSFSSRTNHESECSDEFRKMSDEFEPVDIEGSEKPDVWVHRPGSYVTSTWEPRKGRARCQDSRIHRENDSCSDSPRSSVSGSHRSDSSTEEPTSSKSHRHLQKVKKGLGKLAGAVLHRSPKENDDEASPCVTPHQNIRPVGESRVSVTYVVDQDPAGVDGSGSRRDDHQQSPEREELDSPSKRHLRKKAVHMVKHAGKTAHNLKSMFSKKGLDKSKEEHRSDEECDEEGDVVAARRV

SEQ ID NO: 179308 - protein, 84 aa, Zea Mays
MRTQRKDAKKCLQVCASFLFIYHLIVFFATLTVVSLALAGCLMNWAVRYLCSLFYFTVFEETTKLVLTLFEFVLCFVLVLTQMY

SEQ ID NO: 179309 - protein, 359 aa, Zea Mays
MERFITDLIKKSVQDVTGSEFELFMGFLRSLSIFGDSAPRESFQELIEIIQAQADLNSQFNVSDIDHIERWISCMYMALPIFMRGASASKFLNYFVKQIVPAFEKIPEEKKLDLLKTIASSSPYAAAQDSRQLLPSVVQLLKKYMPGKKVEDINHNYVECLLYTFHHLAHKTPNTTNSLCGYKIVTGQPSDRLGEDFSEHYKDFTERLTGTEETVRAASKRLTQGMADFNKAISSAKTDEEKTKIKGDQQTSTRTMRSYNNILAMTQSLHSKSPLFIGDKKITLSWMEQPNKAAATKAGGKRSQPSTNGNDPANKKGRGGMQNQLVNRAFEGLSHVGRGSGRGRGRGGRGRGRGWSGYH

SEQ ID NO: 179310 - protein, 457 aa, Zea Mays
MAAAAADDAAEVERLYELGERLSSANDKSEHAADYEAIIAAVKGQSAKAKQLAAQLIPRFFRSFPALGTRAMSAMFDLVDMEELAIRIQAIRGFPLLGKDTEFVSKIADVLGQLLTSEENVERDAVHKALMSLIRQDVKNSLQPLFKHVEQGSEIREKIICFLRDKVFPLKAELLKPQAEMERFITDLIKKSVQDVTGSEFELFMGFLRSLSIFGDSAPRESFQELIEIIQAQADLNSQFNVSDIDHIERWISCMYMALPIFMRGASASKFLNYFVKQIVPAFEKIPEEKKLDLLKTIASSSPYAAAQDSRQLLPSVVQLLKKYMPGKKVEDINHNYVECLLYTFHHLAHKTPNTTNSLCGYKIVTGQPSDRLGEDFSEHYKDFTERLTGTEETVRAASKRLTQGMADFNKAISSAKTDEEKTKIKGDQQTSTRTMRSYNNILAMTQAVASRSCVHV

SEQ ID NO: 179311 - protein, 231 aa, Zea Mays
MDDLRLQKPPDGEPYEIRNQGEDLVNRGVITMKDIEEMKSGKVGSGVLNVGLPAYVILNALLRSAKADSVGLILSDGSEITSDNRPKNTIFDWFFDPLMVIKEQIKAENLTDEEEEYLKMCVLLAGDPSRLKGSLPHVPSLIERKKADIDAFTRRLQGITKSISRYPTSKSRFDVLVKALLSELERTMGQSGNGSQSQAHRLRNSVARMLSQKSMGKTANIREKRKRRNYL

SEQ ID NO: 179312 - protein, 225 aa, Zea Mays
MGSGIATSLLVSNISVVLKEVNPQFLQRGEKTIAGNLEGLVKRGSLTKDRMHKAMALLKGALDYSDFKDVDMVIEAVIEKIPLKQSIFADIEKICPKHCILATNTSTIDLNVVGKKTNSQDRIIGAHFFSPAHIMPLLEIVRTEKTSPQAILDLITIGKIIKKVPIVVGNCTGFAVNLTFFPYTQGSHLLVSLGIDVFRIDRVISTFGMPMGPFQWESSIYLDKE

SEQ ID NO: 179313 - protein, 69 aa, Zea Mays
MAAGSIRVTMEVGADGVALITIANPPVNALHPIIIAGLKDKYAEALRRDDVKAIVLTDSNTFHFCKNET

SEQ ID NO: 179314 - protein, 1083 aa, Zea Mays
MGCSASKCCSQLKCSLCSNGCLGQAPDSPRESRGKSSRGRGRVDSSGSDDSSGDDLGEDDDAFNHMNATRESTAGISRLSRVSSQFLPPDASRKVQVPLGNYDLRYSFLSQRGYYPESLDKANQDSYCVHTPFGPSPDDHLFGVFDGHGEYGAQCSQFVKRRLCENLLRDNRFRTDAVLALHSAFVATNTQLHADNLDDSMSGTTAVTILVRGKTIYVANTGDSRAVIAEKQGDDIVAVDLSIDQTPYRFDELERVKECGARVLTLDQIEGLKNPDVQCWGTEESDDGDPPRLWVQNGMYPGTAFTRSIGDSVAESIGVIADPEIFVLDLNSNNPFFVLASDGVFEFLSSQTVVDMVSKYKDPRDACAEIVAESYRLWLQYETRTDDITIILVHINGLTDESTQTVTKVTLQPSQQVVGLAGPESPLIVSSNTNNQRSKHDLSRARLRALESSLENGQLWVPPSPSHRKTWEEQAHIERVLHDHFLFRKLTDSQCHVLLDCMQRVEVKPRDIVVQQGGEGDCFYVVGSGEYEVLAIQEENGKEITKVLHRYTADKLSSFGELALMHNKPLQASVRAVTSGTLWALKREDFRGILMSEFSNIPSLKLLRSVQLFTRFTVLQLSQLAESLVEVSFADGQIIVDKNDKFSSLYIIQRGRVRLILATDQMTSDTWDLISAETKQAQSSRENGNYVLDIDEGGHFGEWSLIGETIAFTAIAVGDVTCSTIMKEKFDSIVGPFPKLSQADSKIKESLVTLENVADGDFPFRRVKLSDLEWKMCIYAADCSEIGLVQVRGYDKMRTLKRFYIKRVQDLHKEVQVFEEKDLMKSLSKSTCVPEVLSTCADQSYLGILLNCCLCCSLASILHTPLNETSARFFAASVVVALEELHQKSIIYRGVSADILMLDRSGHLQLVDFRFAKKLEGQRTYTICGIADSLAPEIVLGRGHGFPADWWALGVLIYFMLQSDMPFGSWRESELEPITKIAKGHLVMPVSFSAEVVDLITKLLVVDENARLGTSGAEAVKKHPWFDGTDWERIASGTCAAPEEITERINYCIETLNEDLSASPSVPIEDPDDLTAPEWIQDW

SEQ ID NO: 179315 - protein, 951 aa, Zea Mays
MGCSASKCCSQLKCSLCSNGCLGQAPDSPRESRGKSSRGRGRVDSSGSDDSSGDDLGEDDDAFNHMNATRESTAGISRLSRVSSQFLPPDASRKVQVPLGNYDLRYSFLSQRGYYPESLDKANQDSYCVHTPFGPSPDDHLFGVFDGHGEYGAQCSQFVKRRLCENLLRDNRFRTDAVLALHSAFVATNTQLHADNLDDSMSGTTAVTILVRGKTIYVANTGDSRAVIAEKQGDDIVAVDLSIDQTPYRFDELERVKECGARVLTLDQIEGLKNPDVQCWGTEESDDGDPPRLWVQNGMYPGTAFTRSIGDSVAESIGVIADPEIFVLDLNSNNPFFVLASDGVFEFLSSQTVVDMVSKYKDPRDACAEIVAESYRLWLQYETRTDDITIILVHINGLTDKESTQTVTKVTLQPSQQVVGLAGPESPLIVSSNTNNQRSKHDLSRARLRALESSLENGQLWVPPSPSHRKTWEEQAHIERVLHDHFLFRKLTDSQCHVLLDCMQRVEVKPRDIVVQQGGEGDCFYVVGSGEYEVLAIQEENGKEITKVLHRYTADKLSSFGELALMHNKPLQASVRAVTSGTLWALKREDFRGILMSEFSNIPSLKLLRSVQLFTRFTVLQLSQLAESLVEVSFADGQIIVDKNDKFSSLYIIQRGRVRLILATDQMTSDTWDLISAETKQAQSSRENGNYVLDIDEGGHFGEWSLIGETIAFTAIAVGDVTCSTIMKEKFDSIVGPFPKLSQADSKIKESLVTLENVADGDFPFRRVKLSDLEWKMCIYAADCSEIGLVQVRGYDKMRTLKRFYIKRVQDLHKEVQVFEEKDLMKSLSKSTCVPEVLSTCADQSYLGILLNCCLCCSLASILHTPLNETSARFFAASVVVALEELHQKSIIYRGVSADILMLDRSGHLQLVDFRFAKKLEGQRTYTICGIADSLAPEIVLGRGHGFPADW

SEQ ID NO: 179316 - protein, 388 aa, Zea Mays
MGCSASKCCSQLKCSLCSNGCLGQAPDSPRESRGKSSRGRGRVDSSGSDDSSGDDLGEDDDAFNHMNATRESTAGISRLSRVSSQFLPPDASRKVQVPLGNYDLRYSFLSQRGYYPESLDKANQDSYCVHTPFGPSPDDHLFGVFDGHGEYGAQCSQFVKRRLCENLLRDNRFRTDAVLALHSAFVATNTQLHADNLDDSMSGTTAVTILVRGKTIYVANTGDSRAVIAEKQGDDIVAVDLSIDQTPYRFDELERVKECGARVLTLDQIEGLKNPDVQCWGTEESDDGDPPRLWVQNGMYPGTAFTRSIGDSVAESIGVIADPEIFVLDLNSNNPFFVLASDGVFEFLSSQTVVDMVSKYKDPRDACAEIVAESYRLWLQNLPRLLRR

SEQ ID NO: 179317 - protein, 1084 aa, Zea Mays
MGCSASKCCSQLKCSLCSNGCLGQAPDSPRESRGKSSRGRGRVDSSGSDDSSGDDLGEDDDAFNHMNATRESTAGISRLSRVSSQFLPPDASRKVQVPLGNYDLRYSFLSQRGYYPESLDKANQDSYCVHTPFGPSPDDHLFGVFDGHGEYGAQCSQFVKRRLCENLLRDNRFRTDAVLALHSAFVATNTQLHADNLDDSMSGTTAVTILVRGKTIYVANTGDSRAVIAEKQGDDIVAVDLSIDQTPYRFDELERVKECGARVLTLDQIEGLKNPDVQCWGTEESDDGDPPRLWVQNGMYPGTAFTRSIGDSVAESIGVIADPEIFVLDLNSNNPFFVLASDGVFEFLSSQTVVDMVSKYKDPRDACAEIVAESYRLWLQYETRTDDITIILVHINGLTDKESTQTVTKVTLQPSQQVVGLAGPESPLIVSSNTNNQRSKHDLSRARLRALESSLENGQLWVPPSPSHRKTWEEQAHIERVLHDHFLFRKLTDSQCHVLLDCMQRVEVKPRDIVVQQGGEGDCFYVVGSGEYEVLAIQEENGKEITKVLHRYTADKLSSFGELALMHNKPLQASVRAVTSGTLWALKREDFRGILMSEFSNIPSLKLLRSVQLFTRFTVLQLSQLAESLVEVSFADGQIIVDKNDKFSSLYIIQRGRVRLILATDQMTSDTWDLISAETKQAQSSRENGNYVLDIDEGGHFGEWSLIGETIAFTAIAVGDVTCSTIMKEKFDSIVGPFPKLSQADSKIKESLVTLENVADGDFPFRRVKLSDLEWKMCIYAADCSEIGLVQVRGYDKMRTLKRFYIKRVQDLHKEVQVFEEKDLMKSLSKSTCVPEVLSTCADQSYLGILLNCCLCCSLASILHTPLNETSARFFAASVVVALEELHQKSIIYRGVSADILMLDRSGHLQLVDFRFAKKLEGQRTYTICGIADSLAPEIVLGRGHGFPADWWALGVLIYFMLQSDMPFGSWRESELEPITKIAKGHLVMPVSFSAEVVDLITKLLVVDENARLGTSGAEAVKKHPWFDGTDWERIASGTCAAPEEITERINYCIETLNEDLSASPSVPIEDPDDLTAPEWIQDW

SEQ ID NO: 179318 - protein, 449 aa, Zea Mays
MQRVEVKPRDIVVQQGGEGDCFYVVGSGEYEVLAIQEENGKEITKVLHRYTADKLSSFGELALMHNKPLQASVRAVTSGTLWALKREDFRGILMSEFSNIPSLKLLRSVQLFTRFTVLQLSQLAESLVEVSFADGQIIVDKNDKFSSLYIIQRGRVRLILATDQMTSDTWDLISAETKQAQSSRENGNYVLDIDEGGHFGEWSLIGETIAFTAIAVGDVTCSTIMKEKFDSIVGPFPKLSQADSKIKESLVTLENVADGDFPFRRVKLSDLEWKMCIYAADCSEIGLVQVRGYDKMRTLKRFYIKRVQDLHKEVQVFEEKDLMKSLSKSTCVPEVLSTCADQSYLGILLNCCLCCSLASILHTPLNETSARFFAASVVVALEELHQKSIIYRGVSADILMLDRSGHLQLVDFRFAKKLEGQRTYTICGIADSLAPEIVLGRGHGFPADW

SEQ ID NO: 179319 - protein, 282 aa, Zea Mays
MQRVEVKPRDIVVQQGGEGDCFYVVGSGEYEVLAIQEENGKEITKVLHRYTADKLSSFGELALMHNKPLQASVRAVTSGTLWALKREDFRGILMSEFSNIPSLKLLRSVQLFTRFTVLQLSQLAESLVEVSFADGQIIVDKNDKFSSLYIIQRGRVRLILATDQMTSDTWDLISAETKQAQSSRENGNYVLDIDEGGHFGEWSLIGETIAFTAIAVGDVTCSTIMKEKFDSIVGPFPKLSQADSKIKESLVTLENVADGDFPFRRVKLSDLVRGMENVHICC

SEQ ID NO: 179320 - protein, 508 aa, Zea Mays
MGCSASKCCSQLKCSLCSNGCLGQAPDSPRESRGKSSRGRGRVDSSGSDDSSGDDLGEDDDAFNHMNATRESTAGISRLSRVSSQFLPPDASRKVQVPLGNYDLRYSFLSQRGYYPESLDKANQDSYCVHTPFGPSPDDHLFGVFDGHGEYGAQCSQFVKRRLCENLLRDNRFRTDAVLALHSAFVATNTQLHADNLDDSMSGTTAVTILVRGKTIYVANTGDSRAVIAEKQGDDIVAVDLSIDQTPYRFDELERVKECGARVLTLDQIEGLKNPDVQCWGTEESDDGDPPRLWVQNGMYPGTAFTRSIGDSVAESIGVIADPEIFVLDLNSNNPFFVLASDGVFEFLSSQTVVDMVSKYKDPRDACAEIVAESYRLWLQYETRTDDITIILVHINGLTDESTQTVTKVTLQPSQQVVGLAGPESPLIVSSNTNNQRSKHDLSRARLRALESSLENGQLWVPPSPSHRKTWEEQVRRILSGYYMIISYLGSLLTHNVMFYLIVCNELR

SEQ ID NO: 179321 - protein, 691 aa, Zea Mays
MGCSASKCCSQLKCSLCSNGCLGQAPDSPRESRGKSSRGRGRVDSSGSDDSSGDDLGEDDDAFNHMNATRESTAGISRLSRVSSQFLPPDASRKVQVPLGNYDLRYSFLSQRGYYPESLDKANQDSYCVHTPFGPSPDDHLFGVFDGHGEYGAQCSQFVKRRLCENLLRDNRFRTDAVLALHSAFVATNTQLHADNLDDSMSGTTAVTILVRGKTIYVANTGDSRAVIAEKQGDDIVAVDLSIDQTPYRFDELERVKECGARVLTLDQIEGLKNPDVQCWGTEESDDGDPPRLWVQNGMYPGTAFTRSIGDSVAESIGVIADPEIFVLDLNSNNPFFVLASDGVFEFLSSQTVVDMVSKYKDPRDACAEIVAESYRLWLQYETRTDDITIILVHINGLTDKESTQTVTKVTLQPSQQVVGLAGPESPLIVSSNTNNQRSKHDLSRARLRALESSLENGQLWVPPSPSHRKTWEEQAHIERVLHDHFLFRKLTDSQCHVLLDCMQRVEVKPRDIVVQQGGEGDCFYVVGSGEYEVLAIQEENGKEITKVLHRYTADKLSSFGELALMHNKPLQASVRAVTSGTLWALKREDFRGILMSEFSNIPSLKLLRSVQLFTRFTVLQLSQLAESLVEVSFADGQIIVDKNDKFSSLYIIQRGRVRLILATDQMTSDTWDLISAETKQAQSSRENGEI

SEQ ID NO: 179322 - protein, 311 aa, Zea Mays
MQRVEVKPRDIVVQQGGEGDCFYVVGSGEYEVLAIQEENGKEITKVLHRYTADKLSSFGELALMHNKPLQASVRAVTSGTLWALKREDFRGILMSEFSNIPSLKLLRSVQLFTRFTVLQLSQLAESLVEVSFADGQIIVDKNDKFSSLYIIQRGRVRLILATDQMTSDTWDLISAETKQAQSSRENGNYVLDIDEGGHFGEWSLIGETIAFTAIAVGDVTCSTIMKEKFDSIVGPFPKLSQADSKIKESLVTLENVADGDFPFRRVKLSDLEWKMCIYAADCSEIGLVQVRGYEENFYNGLKKCGPSININ

SEQ ID NO: 179323 - protein, 312 aa, Zea Mays
MLADQMITRIEFMHSKGYLHRDIKPDNFLMGLGRKANQVYVIDFGLAKRYRDSATNRHIPYRENKNLTGTARYASRNTHLGIVLLPEQSRRDDLESIGYVLLYFLRGSLPWQGLKAATKKQKYDKISEKKLSTPIEALCKSHPVEFASYFHYCHSLTFDQRPDYSFLRHVFRELFEREGYQFDYVYDWTLLKCKQSQKAKVQQGCSHDAGVSSRPVATNVDKHQVGVARPINASGLLEAEQRPAIRMQLNSRSNNLHPERLGVSASHNNVLLQSTSLDNADAPMDHATHSKAQGSIDPHTRGSYSPGPSNRT

SEQ ID NO: 179324 - protein, 371 aa, Zea Mays
MDRIVGSKYKLGRKIGSGSFGEIYLATHVDTYEIVAVKIESSKTNHPQLLYEAKLYNALQGGTGIANIKWCGIDGDENILVIDLLGPSLEDLFVYCGRRFSLKTVLMLADQMITRIEFMHSKGYLHRDIKPDNFLMGLGRKANQVYVIDFGLAKRYRDSATNRHIPYRENKNLTGTARYASRNTHLGIVLLPEQSRRDDLESIGYVLLYFLRGSLPWQGLKAATKKQKYDKISEKKLSTPIEALCKSHPVEFASYFHYCHSLTFDQRPDYSFLRHVFRELFEREGYQFDYVYDWTLLKCKQSQKAKVQQGCSHDAGVSSRPVATNVDKHQVGVARPINASGLLEAEQRPAIRMQLNSRSNNLHPERLLPLC

SEQ ID NO: 179325 - protein, 277 aa, Zea Mays
MDRIVGSKYKLGRKIGSGSFGEIYLATHVDTYEIVAVKIESSKTNHPQLLYEAKLYNALQGGTGIANIKWCGIDGDENILVIDLLGPSLEDLFVYCGRRFSLKTVLMLADQMVYVIDFGLAKRYRDSATNRHIPYRENKNLTGTARYASRNTHLGIEQSRRDDLESIGYVLLYFLRGSLPWQGLKAATKKQKYDKISEKKLSTPIEALCKSHPVEFASYFHYCHSLTFDQRPDYSFLRHVFRELFEREGYQFDYVYDWTLLKCKQSQKAKVQQGCSA

SEQ ID NO: 179326 - protein, 194 aa, Zea Mays
MDRIVGSKYKLGRKIGSGSFGEIYLATHVDTYEIVAVKIESSKTNHPQLLYEAKLYNALQGGTGIANIKWCGIDGDENILVIDLLGPSLEDLFVYCGRRFSLKTVLMLADQMITRIEFMHSKGYLHRDIKPDNFLMGLGRKANQVYVIDFGLAKRYRDSATNRHIPYRENKNLTGTARYASRNTHLGIVFLGRA

SEQ ID NO: 179327 - protein, 472 aa, Zea Mays
MRWKLNSSVYKRVPSRETAMEPDVETPMRMTDGGGSGAGPSWRMSLPHVCVATLTSFLFGYHSGVVNEPLEVISADLGFAGNTLAEGLVVSICLGGAFVGCLFSGSIADGIGRRRAFQLSALPMIIGAAISALSNSLEGMLLGRFLVGTGMGLGPPVASLYITEVSPSTVRGTYGSFVQIATCLGIIVSLLIGTPVKDIDRWWRVCFWVAVIPATLQALGMEFCAESPQWLYKCGKISEAEMQFEKLLGPLHVKSAMAELSRYERVDDGESVKYSELFYGRHFNLSGINSVFYFSSTVFRSVGVPSNLANICMGISNLSGSIVAMLLMDKLGRKVLLSGSFLGMAFAMGLQAVGANRQYLGSACVYLSVGGILLFVLSFSLGAGPVPGLLLPEIFPNKIRAKAMALCMSVHWIVNFFVSLMFLRLLEQLGPQLLYTIFSSVCVVASIFVRRHVLETKGKTLQEIEVSLLQPQ

SEQ ID NO: 179328 - protein, 306 aa, Zea Mays
MRWKLNSSVYKRVPSRETAMEPDVETPMRMTDGGGSGAGPSWRMSLPHVCVATLTSFLFGYHSGVVNEPLEVISADLGFAGNTLAEGLVVSICLGGAFVGCLFSGSIADGIGRRRAFQLSALPMIIGAAISALSNSLEGMLLGRFLVGTGMGLGPPVASLYITEVSPSTVRGTYGSFVQIATCLGIIVSLLIGTPVKDIDRWWRVCFWVAVIPATLQALGMEFCAESPQWLYKCGKISEAEMQFEKLLGPLHVKSAMAELSRYERVDDGESVKYSELFYGRHFNVIRHKFCVLFLINCIQKCGGAL

SEQ ID NO: 179329 - protein, 112 aa, Zea Mays
MLGRKSTARATVVPDPDYRLPIAILGIASAFAYADNLLAAAPVGLLGLLLLFQTTRVRFVFDNEALEVKVGEQLQESGENVFVGGKNRWKYAGGLLILHTSFFSVLCIIMIT

SEQ ID NO: 179330 - protein, 58 aa, Zea Mays
MPPSLPWAQTRCRSARRTGSGGPGTPAVHTRRRFPQVARPDVTRYVPMFVEIEYDPNC

SEQ ID NO: 179331 - protein, 85 aa, Zea Mays
MAATTTIDGHNWMYPLTFGFIDGETDDNWVWFMRQLHREIGDLTSLAVCTDTCKGLENEEKVVFPRADHTKFFRHLMQNFIKRQA

SEQ ID NO: 179332 - protein, 264 aa, Zea Mays
MNIPRAGIEAILSSNDLQVASEDTIYDFLLRWARAQYPKSEERREVLSSRLLPLVRFSHMTCRKLRKVLACTDIDHEQATKCVTEALLFKADAPHRQRALAADAITCRKFAERAYKYRPLKVVEFDRPYPQCIAYLDLKRDECSRLFPAGRIYSQAFHLAGQGFFLSAHCNMEQQSAFYCFGLFLGMQEKGSTSVTVDYEFAARTRPSGEFVSKYKGNYTFTGGKAVGYRNLFAIPWQKFLADDSLFFVDGMLHLRAELTIKQP

SEQ ID NO: 179333 - protein, 77 aa, Zea Mays
MEPDFSTVGGPSFEFAFNEANFSDRELRIEVVAGDYDAPGSTGGGSGGGGLADWARHRKRRREELFKEKGGQDFRSI

SEQ ID NO: 179334 - protein, 381 aa, Zea Mays
MLAMGSEEWELYPSSDIGSQVIEYRPVSEDSDDDQNGDVAVSLDVVLPDDLLEKVLSFLPVASIIRSGSVCKRWHEIVHARRHAWSKIVPQKPWYFMFTCSEDAVSGFAYDPSLRKCETRRRIVVCNPITKDWKRLLDAPGGKTAGYSALAFSVDIRSHHYTVAVARSNQVPSEYYHWELTIHLYESVSGSWMTPFTGVLVGWRGGDECVICDGVLYYLLYFTGILVNNNEHRHCLVMYDLTARPNHTSLISMAIPVPCVLTCGRLMNLSKKLVLVGGIGKQDRPGIIKGIGIWELHNKEWREVARMPHKFFQGFGEFDDVFASCGADDLIYIQSYGSPALLTFEVNHKSWKWSVKSPVSKRFPLQLFTGFSFEPRLDVAL

SEQ ID NO: 179335 - protein, 248 aa, Zea Mays
MRWDASEAEVALERIWELHDRLSDAILAASRAHLFLLAPQPPPVPSAPPVKGAHRVSGGRNGCVFVKGGGEALAAAAESVSETVQSRHQAERDSAIARLEQSRLVLATRLAEHQGKKHRIIDEVLAFVGEVSDKSQFISFEDVCATHSRSEDDAEDNRGNGSRIMSNMLSSSLSLAKNSFRLDKIGGALGNAAMFAVSVLAFFQLHQITFGSKTPAMEYRKRIEYSIQPRSSQSNGKGKLLEVYLARG

SEQ ID NO: 179336 - protein, 272 aa, Zea Mays
MLLASSTRRYEQFPLARNNGLPRFSRVKMSCLGTNQSNHHSDTVRSSSPSCGDTRKIHPVVKMCGITSARDAEMAVKAGAELIGMILWPNSKRSVSLLEAKEISRVAQSYGAESVGVFVDDNEERILRVSDSCDLNFVQLHGDESRALVHTLSKNNRIIYVLNADDDGKLINIPDIEYELDWYLVDSAKGGSGKGFNWQKFQMPSVKSKNGWLLAGGLHADNVCEAFSALKPDGVDVSSGICGRDGIRKDADRINSFISKLSKLLLGLRAKE

SEQ ID NO: 179337 - protein, 327 aa, Zea Mays
MMYYLIHRGAGSEKLLKLLTHHMEEQRKRKALMSCLEGKAMSEFEEAMSQIVGLQELKMQLRRWARGMFFDEKRRAMGLGIAKRRAPHMAFLGNPGTGKTMVARILGKLLHMVGILPTDKVTEVQRTDLVGEFVGHTGPKTRRKIHDAEGGILFVDEAYRLIPMQKSDDKDYGLEALEEIMSVMDSGKIVVVFAGYCEPMKRVIASNDGFCRRVTKFFYFDDFSTTELAEILHMKMKSPSDCSLLYGFKLHPSCSIEAIGELIAREITEEQRKQMNGGLVDTLLINARENLDSRLDFSCNDADTMITITLEDLEAGLRQISRQRHLQ

SEQ ID NO: 179338 - protein, 181 aa, Zea Mays
MMYYLIHSKMPLNHIPGGAGSEKLLKLLTHHMEEQRKRKALMSCLEGKAMSEFEEAMSQIVGLQELKMQLRRWARGMFFDEKRRAMGLGIAKRRAPHMAFLGNPGTGKTMVARILGKLLHMVGILPTDKVTEVQRTDLVGEFVGHTGPKTRRKVLILSFLFIRKAPSAAQISVSGKLRNKF

SEQ ID NO: 179339 - protein, 314 aa, Zea Mays
MPGSQNGGPRPRPVKVETIHDLARAGDLAGVQRKLLENPSLLNDKNPVMCQTPLHVAAGYNNTEIVKFLLNQQGTETVDLEAKNMYGETPLHMAVKNSSCGSTNLLLEHGAHIEAKANNGMTPLHLAVWHAIQAGDFSTVSVLLSYNPDCFVKDDEGKMPLNHIPGGAGSEKLLKLLTHHMEEQRKRKALMSCLEGKAMSEFEEAMSQIVGLQELKMQLRRWARGMFFDEKRRAMGLGIAKRRAPHMAFLGNPGTGKTMVARILGKLLHMVGILPTDKVTEVQRTDLVGEFVGHTGPKTRRKREVFSSWMKLTG

SEQ ID NO: 179340 - protein, 193 aa, Zea Mays
MQFKLETSAQFVITSFHQEGKMPLNHIPGGAGSEKLLKLLTHHMEEQRKRKALMSCLEGKAMSEFEEAMSQIVGLQELKMQLRRWARGMFFDEKRRAMGLGIAKRRAPHMAFLGNPGTGKTMVARILGKLLHMVGILPTDKVTEVQRTDLVGEFVGHTGPKTRRKVLILSFLFIRKAPSAAQISVSGKLRNKF

SEQ ID NO: 179341 - protein, 268 aa, Zea Mays
MDKITIYVEHPEPYDPPAEPAPPPPQPLKLTKKEQKKLRTQRRLAKEKDRQEMIRQGLLEPPKPKVKMSNLMKVLGSEAVQDPTRLEMEIRTAAAEREQAHVDRNIARKLTPSERREKKERKLFDDPTNTIETIVCVYKIRDLSHPQTRFKVDVNAQENKLTGAVVITDSISVVVVEGGKKSIKRYNKLMLNRIDWPAAVGGDEDTEMEADKPVNSCVLVWQGSVAKPTFHRFTVHNCRSEAAAKKVFVDVSVPHYWDLAVNFSEDSS

SEQ ID NO: 179342 - protein, 589 aa, Zea Mays
MSAASKSSNLSLDALAKAKKALQLKKELSEKLKKLPMLNNKLATAVTATQVSKEAAKTSVSAVDAQHFSKGEAKLTDVSSLPTSSISGTPAIGGVIGIPGLTHIPNLDSVKRAQELAAKMGFRQDPQFAPVINFFPGTSTEVTVAQRPAKAPVLRLDSHGREIDEQGNVISMTKPTNLSTLKVNINKQKKEAFQIIKPDLDSLAKSSVHFDERMGINQKKLLRPKRPGFQFVEEGKLSRQAELQKIKSQFGEAQAKELKVKQAQLAKAKAEVDINPNFIEVAPGVRAPKQKQNEDIPEIEPWDAKILLSATYEDISVEEINMDKITIYVEHPEPYDPPAEPAPPPPQPLKLTKKEQKKLRTQRRLAKEKDRQEMIRQGLLEPPKPKVKMSNLMKVLGSEAVQDPTRLEMEIRTAAAEREQAHVDRNIARKLTPSERREKKERKLFDDPTNTIETIVCVYKIRDLSHPQTRFKVDVNAQENKLTGAVVITDSISVVVVEGGKKSIKRYNKLMLNRIDWPAAVGGDEDTEMEADKPVNSCVLVWQGSVAKPTFHRFTVHNCRSEAAAKKVFVDVSVPHYWDLAVNFSEDSS

SEQ ID NO: 179343 - protein, 277 aa, Zea Mays
MWRRRTLEHTRPNLVEFMHSTGIHISNIVLKNSPFWNIHPVYCDNVVVTNMMILAPRDSPNTDGVDPDSSSNVCIEDSYISTGDDLVAIKSGWDEYGIAYGRPSAGVTVRRVRGSSPFSGIAIGSEASGGVRDVLVEDCAIFDSGYGIHIKTNVGRGGYIRNVTVDGVRLTGVRSGVRIAGDVGDHPDAHFSQLAVPTVDAVRISNVWGVNVQQPGSLEGIRASPFTRICLSNVKLFGWRSDAAWKCRDVRGAALGVQPSPCAELATSFASARSSCS

SEQ ID NO: 179344 - protein, 204 aa, Zea Mays
MAGVYKWKLASYKQMERTKVASERLSLRSNSTKHHDTVHLGLGHFGKDGNLICRSLKSILKPKARQYAIVKVHNKDVDEGCSSKDNEIISSPSDRKEGSQLRALESYFSKFNPSQQLYSLPQKKHKSGPSSSNEVDAIIADEDANLKNRADSLQVQIDRGHTGIKSNQNTPNEVYKEYLIFDEKSLLDMHTDDQASGFCLTSVI

SEQ ID NO: 179345 - protein, 355 aa, Zea Mays
MAGVYKWKLASYKQMERTKVASERLSLRSNSTKHHDTVHLGLGHFGKDGNLICRSLKSILKPKARQYAIVKVHNKDVDEGCSSKDNEIISSPSDRKEGSQLRALESYFSKFNPSQQLYSLPQKKHKSGPSSSNEVDAIIADEDANLKNRADSLQVQIDRGHTGIKSNQNTPNEVYKEYLIFDEKSLLDMHTDDQASGFCLTNLLAGVNIAVLLFEIASPVKNSENEYLSLPLLYGAKINNLILSGEWWRLLTPMCLHSGFLHIALGCWALLIFGPRVCRAYGQRTFFLIYILGGICGNLSSFVHTPEITVCGTGPVFSLIGAWLVYQGQNKQVIDKDVSERHILGRPFLEFSLVI

SEQ ID NO: 179346 - protein, 265 aa, Zea Mays
MEIGDLVQEPSNSSPGPISPSARSALPARTPQIPNGHAYRRLQVGAGCTASCGPEHRAELKRHLMAGVYKWKLASYKQMERTKVASERLSLRSNSTKHHDTVHLGLGHFGKDGNLICRSLKSILKPKARQYAIVKVHNKDVDEGCSSKDNEIISSPSDRKEGSQLRALESYFSKFNPSQQLYSLPQKKHKSGPSSSNEVDAIIADEDANLKNRADSLQVQIDRGHTGIKSNQNTPNEVYKEYLIFDEKSLLDMHTDDQASGFCLT

SEQ ID NO: 179347 - protein, 268 aa, Zea Mays
MEIGDLVQEPSNSSPGPISPSARSALPARTPQIPNGHAYRRLQVGAGCTASCGPEHRAELKRHLMAGVYKWKLASYKQMERTKVASERLSLRSNSTKHHDTVHLGLGHFGKDGNLICRSLKSILKPKARQYAIVKVHNKDVDEGCSSKDNEIISSPSDRKEGSQLRALESYFSKFNPSQQLYSLPQKKHKSGPSSSNEVDAIIADEDANLKNRADSLQVQIDRGHTGIKSNQNTPNEVYKEYLIFDEKSLLDMHTDDQASGFCLTSVI

SEQ ID NO: 179348 - protein, 201 aa, Zea Mays
MAGVYKWKLASYKQMERTKVASERLSLRSNSTKHHDTVHLGLGHFGKDGNLICRSLKSILKPKARQYAIVKVHNKDVDEGCSSKDNEIISSPSDRKEGSQLRALESYFSKFNPSQQLYSLPQKKHKSGPSSSNEVDAIIADEDANLKNRADSLQVQIDRGHTGIKSNQNTPNEVYKEYLIFDEKSLLDMHTDDQASGFCLT

SEQ ID NO: 179349 - protein, 101 aa, Zea Mays
MLATQEFVVTHEVGAGGKSFRAGKRSNVHEDDEKPECPCIFVEPMKWMQTVEEGYVAKKLFCMGCKARLGQFNWAGMQCSCGAWVIPAFQLTKSKIDQCSM

SEQ ID NO: 179350 - protein, 284 aa, Zea Mays
MTQHARLRLPPAVQPRLPLSSFLSATSRRLGNRCRPRSGAQVSIGRPFPVDSKHQVWAISNQTVHLWRLQFQVLKACQTANLGIHQELGPEISQNPMGNHVNPEKETNEIPGSEVNQELVEICQGAVVETDTIQENQAVPEAGLEVNEETVETCQETAAESDVNLEKQTSDPGVIYRCRKCRRMLATQEFVVTHEVGAGGKSFRAGKRSNVHEDDEKPECPCIFVEPMKWMQTVEEGYVAKKLFCMGCKARLGQFNWAGMQCSCGAWVIPAFQLTKSKIDQCSM

SEQ ID NO: 179351 - protein, 211 aa, Zea Mays
METSQTANLGIHQELGPEISQNPMGNHVNPEKETNEIPGSEVNQELVEICQGAVVETDTIQENQAVPEAGLEVNEETVETCQETAAESDVNLEKQTSDPGVIYRCRKCRRMLATQEFVVTHEVGAGGKSFRAGKRSNVHEDDEKPECPCIFVEPMKWMQTVEEGYVAKKLFCMGCKARLGQFNWAGMQCSCGAWVIPAFQLTKSKIDQCSM

SEQ ID NO: 179352 - protein, 402 aa, Zea Mays
MSCVPVMAASFGDIIPTYSMSGFKGRLQLVNSVLSSLPTYAMCTLQVPAAVLEYIDTARRHCLWRNSDSNAKFKPLVAWNKCTRPKKKGGLGVINLRSQNSYLRMKFLDKLYNRKQIPWVNLVWNTYYSDGKTPHASKFMGSFWWRDALKLCDLFRGISNCKVGDGKTVLFWHDLWNDNIRRNKFPRLFTFAKNQSISVASFLTQENLTDNFHLPLTEQANTELQQLPDEVQQIRESVIEPEEKDSWSYIWGNSTYSSTKLYHYTFKNVNPPKPFLWILESRCSNKLKVFAWLLLMDRLNTRNILKRKNFKVQGDNYSCALCQLQREETAFHLFFNCPFSQDCWRHLNIQWNHQIDFFATFQQARDLHGSPFFMEVFIIAAWQIWKQRNNFIFDRGRPSFIG

SEQ ID NO: 179353 - protein, 67 aa, Zea Mays
MLGMPWSTSPRFPLPPASLWPAILLSPWRYVEVEDGWTAGSNLTKCRGLTAHPVTHFNSTKRTCLLE

SEQ ID NO: 179354 - protein, 168 aa, Zea Mays
MGGMLPQQGMMRPPNILGGAGAGFPSTAQMGGGPMGMPVGHPHMGIMQQSGGGGCGAGGMPGLGFHPGLGGGMHSGADMLQAAAASGNPVAQQQYMALMQQQQQQMMMMQQQQQQHGNGGAGYPAAMGYGYGRPPMHYPMGYPVLPPHSHAEPYNIFSDENANSCSLM

SEQ ID NO: 179355 - protein, 233 aa, Zea Mays
MTDVHTCTSSGRRKTKTPTSGWVAAQALPLLKKKPTMGAKELQTALQDTYNVQIAYLTLWRGREKALAELFGSWEESFQLLFSWKQAVLEKMPDSVVEIDVREEDGKVYFHRFFCAFGPCIKGFLEGCRPYLSLDSIALNGRWNGHLPSATGVDGHNWMYPVAFGFFEFENLDSWTWFMTHLHKALGDMPLLAVCSDACKGLTKAVATIFPNAEKRECFRHLMQNYIKRSRKQ

SEQ ID NO: 179356 - protein, 624 aa, Zea Mays
MFWLRHHHIIRPPLESPSLTMKRANSVAIGSTDIPQIDWASIESESRWEEEGHQEVVKEDGMYDTLGLQKEVDCVQNDCEDAQATMPCLDNDDDVVMFDINNPVMRLGSTYSSMKEFRLSMIQYAIKQEFELGIEATSTRRYRGYCKGGDCPWSIHARKKVEESPTIIVTAMTDVHTCTSSGRRKTKTPTSGWVAAQALPLLKKKPTMGAKELQTALQDTYNVQIAYLTLWRGREKALAELFGSWEESFQLLFSWKQAVLEKMPDSVVEIDVREEDGKVYFHRFFCAFGPCIKGFLEGCRPYLSLDSIALNGRWNGHLPSATGVDGHNWMYPVAFGFFEFENLDSWTWFMTHLHKALGDMPLLAVCSDACKGLTKAVATIFPNAEKRECFRHLMQNYIKRYAGQEHMYPAARAYRKEVFDQHFANVIGISDLMAWMKKEHSLLWYRSGFNPAIKCDYITNNIAEVFNNWVKDYLDLPICELADKIRTLIMDLFFRRRRIGERLNGKILPAVLNVLRARTRGLGHLSLVNSDHYCAEVRDNNNCHSRHIVDAKVHYCSCEEWQHTGKPCQHALCVIIAEQYRVVELEYFVDEYYSVEKFKKAYDGRIGACLVPSLTYHTLPNFSA

SEQ ID NO: 179357 - protein, 453 aa, Zea Mays
MTDVHTCTSSGRRKTKTPTSGWVAAQALPLLKKKPTMGAKELQTALQDTYNVQIAYLTLWRGREKALAELFGSWEESFQLLFSWKQAVLEKMPDSVVEIDVREEDGKVYFHRFFCAFGPCIKGFLEGCRPYLSLDSIALNGRWNGHLPSATGVDGHNWMYPVAFGFFEFENLDSWTWFMTHLHKALGDMPLLAVCSDACKGLTKAVATIFPNAEKRECFRHLMQNYIKRYAGQEHMYPAARAYRKEVFDQHFANVIGISDLMAWMKKEHSLLWYRSGFNPAIKCDYITNNIAEVFNNWVKDYLDLPICELADKIRTLIMDLFFRRRRIGERLNGKILPAVLNVLRARTRGLGHLSLVNSDHYCAEVRDNNNCHSRHIVDAKVHYCSCEEWQHTGKPCQHALCVIIAEQYRVVELEYFVDEYYSVEKFKKAYDGRIGACLVPSLTYHTLPNFSA

SEQ ID NO: 179358 - protein, 562 aa, Zea Mays
MPELPSSMPQPLHVLAPSPPHYTTTVGVPVVDHEEANSVAIGSTDIPQIDWASIESESRWEEEGHQEVVKEDGMYDTLGLQKEVDCVQNDCEDAQATMPCLDNDDDVVMFDINNPVMRLGSTYSSMKEFRLSMIQYAIKQEFELGIEATSTRRYRGYCKGGDCPWSIHARKKVEESPTIIVTAMTDVHTCTSSGRRKTKTPTSGWVAAQALPLLKKKPTMGAKELQTALQDTYNVQIAYLTLWRGREKALAELFGSWEESFQLLFSWKQAVLEKMPDSVVEIDVREEDGKVYFHRFFCAFGPCIKGFLEGCRPYLSLDSIALNGRWNGHLPSATGVDGHNWMYPVAFGFFEFENLDSWTWFMTHLHKALGDMPLLAVCSDACKGLTKAVATIFPNAEKRECFRHLMQNYIKRYAGQEHMYPAARAYRKEVFDQHFANVIGISDLMAWMKKEHSLLWYRSGFNPAIKCDYITNNIAEVFNNWVKDYLDLPICELADKIRTLIMDLFFRRRRIGERLNGKILPAVLNVLRARTRGLGHLSLVNSDHYCAEVKKAVKEHSKMVPV

SEQ ID NO: 179359 - protein, 563 aa, Zea Mays
MYDTLGLQKEVDCVQNDCEDAQATMPCLDNDDDVVMFDINNPVMRLGSTYSSMKEFRLSMIQYAIKQEFELGIEATSTRRYRGYCKGGDCPWSIHARKKVEESPTIIVTAMTDVHTCTSSGRRKTKTPTSGWVAAQALPLLKKKPTMGAKELQTALQDTYNVQIAYLTLWRGREKALAELFGSWEESFQLLFSWKQAVLEKMPDSVVEIDVREEDGKVYFHRFFCAFGPCIKGFLEGCRPYLSLDSIALNGRWNGHLPSATGVDGHNWMYPVAFGFFEFENLDSWTWFMTHLHKALGDMPLLAVCSDACKGLTKAVATIFPNAEKRECFRHLMQNYIKRYAGQEHMYPAARAYRKEVFDQHFANVIGISDLMAWMKKEHSLLWYRSGFNPAIKCDYITNNIAEVFNNWVKDYLDLPICELADKIRTLIMDLFFRRRRIGERLNGKILPAVLNVLRARTRGLGHLSLVNSDHYCAEVRDNNNCHSRHIVDAKVHYCSCEEWQHTGKPCQHALCVIIAEQYRVVELEYFVDEYYSVEKFKKAYDGRIGACLVPSLTYHTLPNFSA

SEQ ID NO: 179360 - protein, 636 aa, Zea Mays
MPELPSSMPQPLHVLAPSPPHYTTTVGVPVVDHEEANSVAIGSTDIPQIDWASIESESRWEEEGHQEVVKEDGMYDTLGLQKEVDCVQNDCEDAQATMPCLDNDDDVVMFDINNPVMRLGSTYSSMKEFRLSMIQYAIKQEFELGIEATSTRRYRGYCKGGDCPWSIHARKKVEESPTIIVTAMTDVHTCTSSGRRKTKTPTSGWVAAQALPLLKKKPTMGAKELQTALQDTYNVQIAYLTLWRGREKALAELFGSWEESFQLLFSWKQAVLEKMPDSVVEIDVREEDGKVYFHRFFCAFGPCIKGFLEGCRPYLSLDSIALNGRWNGHLPSATGVDGHNWMYPVAFGFFEFENLDSWTWFMTHLHKALGDMPLLAVCSDACKGLTKAVATIFPNAEKRECFRHLMQNYIKRYAGQEHMYPAARAYRKEVFDQHFANVIGISDLMAWMKKEHSLLWYRSGFNPAIKCDYITNNIAEVFNNWVKDYLDLPICELADKIRTLIMDLFFRRRRIGERLNGKILPAVLNVLRARTRGLGHLSLVNSDHYCAEVRDNNNCHSRHIVDAKVHYCSCEEWQHTGKPCQHALCVIIAEQYRVVELEYFVDEYYSVEKFKKAYDGRIGACLVPSLTYHTLPNFSA

SEQ ID NO: 179361 - protein, 792 aa, Zea Mays
MDDLPGDEGRSQTHPSDRNWPSHLEQKFQSLPLTKQERNFDSAYSSLDSREVGHSLQAAQTLWSSGSLSGPIPNGFYSIIPEKRLKEHFDTIPSPDDLYSLGIEGFKAEIILVDIERDKKLSALKQLCTALVKGLNSNPAAMIKKIAGLVFDFYNRPNPHLSPARTSSEDLSNLLENRGVQLLGQIRHGSCRPKAILFKVLADSVGIDSKLLVGIPNEEPHGYDNSSKHMSVVVILKSAEFLVDLMRFPGQLVPFSSKAVVTSHMSATGESDSADYDSCDSPLEPNSPLCAQRQEQDDGNRSFKVLSLRNIMLKSTNSMEGKMSCSSHSEPNVANAFCGRSRDKVVDEHQRTASSSPEHPLSRVRGRSMLGDKQYGGAVAVSRSDGASTSNTHRARRSTNITPEISDDIVRAVRAMSESMRQNRLSREQKDGSLGSSNDSMKHEPAGDSNDDEASTRRPSALEGLRRQFNSQKAVSLPSSPNRSGILGLRSPSDYTEADLMATWNEVLQSSPFLNKPLLPYEEWCIEFSEITVGIRVGVGFFGEVFRGLWNGTDVAIKVFLEQDLTTENMKDFCNEISILSRLRHPNVILFLGACMKPPHLSLVTEYMEVGSLYSLIHSKTQKTKLHWKRRLKMLRDICRGLMCMHRLKIVHRDLKSANCLVNKYWTVKICDFGLSRVMSNSAMNDNSSAGTPEWMAPELIRNEPFTEKCDIFSFGVIMWELCTLCRPWEGIPPVQIVYSVANDGARLEIPDGPLGSLIADCWAEPERRPCCQEILTRLLDCEVMHSKDQVG

SEQ ID NO: 179362 - protein, 759 aa, Zea Mays
MDDLPGDEGRSQTHPSDRNWPSHLEQKFQSLPLTKQERNFDSAYSSLDSREVGHSLQAAQTLWSSGSLSGPIPNGFYSIIPEKRLKEHFDTIPSPDDLYSLGIEGFKAEIILVDIERDKKLSALKQLCTALVKGLNSNPAAMIKKIAGLVFDFYNRPNPHLSPARTSSEDLSNLLENRGVQLLGQIRHGSCRPKAILFKVLADSVGIDSKLLVGIPNEEPHGYDNSSKHMSVVVILKSAEFLVDLMRFPGQLVPFSSKAVVTSHMSATGESDSADYDSCDSPLEPNSPLCAQRQEQDDGNRSFKVLSLRNIMLKSTNSMEGKMSCSSHSEPNVANAFCGRSRDKVVDEHQRTASSSPEHPLSRVRGRSMLGDKQYGGAVAVSRAVRAMSESMRQNRLSREQKDGSLGSSNDSMKHEPAGDSNDDEASTRRPSALEGLRRQFNSQKAVSLPSSPNRSGILGLRSPSDYTEADLMATWNEVLQSSPFLNKPLLPYEEWCIEFSEITVGIRVGVGFFGEVFRGLWNGTDVAIKVFLEQDLTTENMKDFCNEISILSRLRHPNVILFLGACMKPPHLSLVTEYMEVGSLYSLIHSKTQKTKLHWKRRLKMLRDICRGLMCMHRLKIVHRDLKSANCLVNKYWTVKICDFGLSRVMSNSAMNDNSSAGTPEWMAPELIRNEPFTEKCDIFSFGVIMWELCTLCRPWEGIPPVQIVYSVANDGARLEIPDGPLGSLIADCWAEPERRPCCQEILTRLLDCEYTLC

SEQ ID NO: 179363 - protein, 470 aa, Zea Mays
MDDLPGDEGRSQTHPSDRNWPSHLEQKFQSLPLTKQERNFDSAYSSLDSREVGHSLQAAQTLWSSGSLSGPIPNGFYSIIPEKRLKEHFDTIPSPDDLYSLGIEGFKAEIILVDIERDKKLSALKQLCTALVKGLNSNPAAMIKKIAGLVFDFYNRPNPHLSPARTSSEDLSNLLENRGVQLLGQIRHGSCRPKAILFKVLADSVGIDSKLLVGIPNEEPHGYDNSSKHMSVVVILKSAEFLVDLMRFPGQLVPFSSKAVVTSHMSATGESDSADYDSCDSPLEPNSPLCAQRQEQDDGNRSFKVLSLRNIMLKSTNSMEGKMSCSSHSEPNVANAFCGRSRDKVVDEHQRTASSSPEHPLSRVRGRSMLGDKQYGGAVAVSRSDGASTSNTHRARRSTNITPEISDDIVRAVRAMSESMRQNRLSREQKDGSLGSSNDSMKHIMIYYHPTNQRPSLACPPALSPRLLFW

SEQ ID NO: 179364 - protein, 756 aa, Zea Mays
MYNGIGLQTARGSGTNGYVQTNKFFIKPRSTSGGGPGGPHRPPLPDATGADGGGLGGMRKPNKEILEHDRKRQVELNLLVLRDALEEQGYTEDEIEERVEEARKAAEAEAAAVAAAEEAGSVSGAGRPPLPGRGFTDTQSHHVAARKEKQLETLRAALGLNVEDAKKGDVESDVESGELVPGKYYEELVTVGENNSKDSKNAKKSKKKKENDKRRQPKSSRKSKYDSDLDHDHNTKTKKSSHHDSDDDSETDYDEKKEKKYNKKHRLGSDDDSENDRKKAKRGKNSGSESDTDSGHGKKKTKHVKSDQGGRKKIQVKNSHHDSESDTDSSYGKKTEHARNDRGERKKIPVNNSRHDFKSDIDSGYGKKTEDAKSEHYERKKLLVKSSRHDSESDTDSGYGKKKMEHIKNERDERKKVLVKNSRHDSESDTDSGYGKKKMEHAKIERDERRKVPVKSSRYDSESDTDSGYGKKKMEQTKNVRDEKRKVPLKSSHHDSESDADIDYRKKKIEHTEGIRDERKKIPARSSRHDSDSGADNNGKNKRPLQSSRHDLEDEKPRSRNYNYGSRASEHEKHMLKKDVQEKRKVATSSDSSDYSSSLSSSDSDTSADSYEEQKRSQAGGRRNELTTQRQKEEERKELEKQQKREKEKKRQREREEERQREREQYERKGGNDVERDNKRKLIDDRYDPNSSRDREEGYRDSQNRDDNRRQEEHGQHNRYMDSHDSKRSRHDSHYHSRRDFEQRYSRDEHRDRRRH

SEQ ID NO: 179365 - protein, 108 aa, Zea Mays
MVNMYWHERQGSSMGHPQGSGTPKHSGRDAIERPGDIASLGPIQGGDRSAVGRPGPRLGNTDGGLTELVGLWRTFETGRAEQGVGHGRGRVQDRHGGQLSGRLHAALP

SEQ ID NO: 179366 - protein, 207 aa, Zea Mays
MSMLFWCAISGLENQIIAIASGGEDCTIRLWSMSTRAKNHPLIATFHGHEKTLSFLSIAWHKSSLLVSCSKDSKVKVWDTVAPSSGSSSCVGSAHLNSNGPPIAMKCHESLCYIAAGAEVTAIDLRTMKKASVLALQNHRMLSCEMMPSEWLICTGTKDRALLWDTRKAQELPNTVAEMQSNGPVTLLHLDQYKVVTGVPSDGQVHV

SEQ ID NO: 179367 - protein, 175 aa, Zea Mays
MSTRAKNHPLIATFHGHEKTLSFLSIAWHKSSLLVSCSKDSKVKVWDTVAPSSGSSSCVGSAHLNSNGPPIAMKCHESLCYIAAGAEVTAIDLRTMKKASVLALQNHRMLSCEMMPSEWLICTGTKDRALLWDTRKAQELPNTVAEMQSNGPVTLLHLDQYKVVTGVPSDGQVHV

SEQ ID NO: 179368 - protein, 85 aa, Zea Mays
MHDNLTCLKPLQALPIREETNLRLRLFYQLSSCFYGKDIPPTNLMLLTWSYYLCDFWSLGTNNLTGSLPSELGNLVNGNDPIVDS

SEQ ID NO: 179369 - protein, 85 aa, Zea Mays
MRGRGRKMAPSKCSICQGTGHRWRTCKRGQLDVDDEPKNKRRRSKKTSSVAASNQLEDGTLNALEFNYLQVDESNVDASNKLEGS

SEQ ID NO: 179370 - protein, 370 aa, Zea Mays
MIEGSDPVTGHIISTTIGGKNGEPKRTISYMAERVVGTGSFGIVFQAKCLETGETVAIKKVLQDKRYKNRELQIMRSMDHCNVVSLKHCFFSTTSRDELFLNLVMEFVPESLYRVLKHYSNMNQRMPLIYVKLYTYQIFRGLAYIHTVPGVCHRDVKPQNLLVDPLTHQVKICDFGSAKMLVKGEANISYICSRYYRAPELIFGATEYTTSIDIWSAGCVLAELLLGQPLFPGESAVDQLVEIIKVLGTPTREEIRCMNPNYTEFRFPQIKAHPWHKIFHKRMPPEAIDLASRLLQYSPNLRCTALEACAHPFFDDLREPHARLPNGRPFPPLFNFKQELANASPELINRLIPDHARRHLGLTLLPATGP

SEQ ID NO: 179371 - protein, 296 aa, Zea Mays
MRSMDHCNVVSLKHCFFSTTSRDELFLNLVMEFVPESLYRVLKHYSNMNQRMPLIYVKLYTYQIFRGLAYIHTVPGVCHRDVKPQNLLVDPLTHQVKICDFGSAKMLVKGEANISYICSRYYRAPELIFGATEYTTSIDIWSAGCVLAELLLGQPLFPGESAVDQLVEIIKVLGTPTREEIRCMNPNYTEFRFPQIKAHPWHKIFHKRMPPEAIDLASRLLQYSPNLRCTALEACAHPFFDDLREPHARLPNGRPFPPLFNFKQELANASPELINRLIPDHARRHLGLTLLPATGP

SEQ ID NO: 179372 - protein, 347 aa, Zea Mays
MESLKGYMAERVVGTGSFGIVFQAKCLETGETVAIKKVLQDKRYKNRELQIMRSMDHCNVVSLKHCFFSTTSRDELFLNLVMEFVPESLYRVLKHYSNMNQRMPLIYVKLYTYQIFRGLAYIHTVPGVCHRDVKPQNLLVDPLTHQVKICDFGSAKMLVKGEANISYICSRYYRAPELIFGATEYTTSIDIWSAGCVLAELLLGQPLFPGESAVDQLVEIIKVLGTPTREEIRCMNPNYTEFRFPQIKAHPWHKIFHKRMPPEAIDLASRLLQYSPNLRCTALEACAHPFFDDLREPHARLPNGRPFPPLFNFKQELANASPELINRLIPDHARRHLGLTLLPATGP

SEQ ID NO: 179373 - protein, 454 aa, Zea Mays
MLHVAQAFIDKNYHPTVICRAYTKALDDAIAVLDKIAMPVDVNDRGAMLGLVKSSIGTKFTGQFGDLIADLAIDATTTAGVDLGQGMREVDIKKYIKVEKVPGGQLEDSRVLKGVMINKDVVAPGKMRRKIVNPRIILLDCPVEYKKGENQTNAELMKEEDWQVLLEMEEEYIKNLCAQILKFKPDLVITEKGLSDLAIHYLSKAGVTAIRRLRKTDNNRIAKACGAVIVNRPEELQESDVGTGAGLFEVKKIGDEFFAFIVDCKDPKACTVLLRGASKDVLNEVERNLQDAMSVARNILKNPKLLPGGGATELTVSATLKQKSSSVEGVEKWPYEAAALAFEAIPRTLAQNCGLNVIRIMTQLQGKHANGENAWVGIDGRSGDIVDMKERKIWDSYSVKAQTFKTAIEAACMLLRIDDIVSGIKKKQAPGASAPKQPQIETEGDADNEQMIPE

SEQ ID NO: 179374 - protein, 554 aa, Zea Mays
MALHAPVHVMKDSLKRESGAKVHQANIQAAKAVADIIRTTLGPRSMLKMLLDAGGGIVVTNDGNSILREIDIAHPAAKSMIELSRTQDEEVGDGTTSVIVLAGEMLHVAQAFIDKNYHPTVICRALDDAIAVLDKIAMPVDVNDRGAMLGLVKSSIGTKFTGQFGDLIADLAIDATTTAGVDLGQGMREVDIKKYIKVEKVPGGQLEDSRVLKGVMINKDVVAPGKMRRKIVNPRIILLDCPVEYKKGENQTNAELMKEEDWQVLLEMEEEYIKNLCAQILKFKPDLVITEKGLSDLAIHYLSKAGVTAIRRLRKTDNNRIAKACGAVIVNRPEELQESDVGTGAGLFEVKKIGDEFFAFIVDCKDPKACTVLLRGASKDVLNEVERNLQDAMSVARNILKNPKLLPGGGATELTVSATLKQKSSSVEGVEKWPYEAAALAFEAIPRTLAQNCGLNVIRIMTQLQGKHANGENAWVGIDGRSGDIVDMKERKIWDSYSVKAQTFKTAIEAACMLLRIDDIVSGIKKKQAPGASAPKQPQIETEGDADNEQMIPE

SEQ ID NO: 179375 - protein, 287 aa, Zea Mays
MEEEYIKNLCAQILKFKPDLVITEKGLSDLAIHYLSKAGVTAIRRLRKTDNNRIAKACGAVIVNRPEELQESDVGTGAGLFEVKKIGDEFFAFIVDCKDPKACTVLLRGASKDVLNEVERNLQDAMSVARNILKNPKLLPGGGATELTVSATLKQKSSSVEGVEKWPYEAAALAFEAIPRTLAQNCGLNVIRIMTQLQGKHANGENAWVGIDGRSGDIVDMKERKIWDSYSVKAQTFKTAIEAACMLLRIDDIVSGIKKKQAPGASAPKQPQIETEGDADNEQMIPE

SEQ ID NO: 179376 - protein, 385 aa, Zea Mays
MLKMLLDAGGGVDLGQGMREVDIKKYIKVEKVPGGQLEDSRVLKGVMINKDVVAPGKMRRKIVNPRIILLDCPVEYKKGENQTNAELMKEEDWQVLLEMEEEYIKNLCAQILKFKPDLVITEKGLSDLAIHYLSKAGVTAIRRLRKTDNNRIAKACGAVIVNRPEELQESDVGTGAGLFEVKKIGDEFFAFIVDCKDPKACTVLLRGASKDVLNEVERNLQDAMSVARNILKNPKLLPGGGATELTVSATLKQKSSSVEGVEKWPYEAAALAFEAIPRTLAQNCGLNVIRIMTQLQGKHANGENAWVGIDGRSGDIVDMKERKIWDSYSVKAQTFKTAIEAACMLLRIDDIVSGIKKKQAPGASAPKQPQIETEGDADNEQMIPE

SEQ ID NO: 179377 - protein, 342 aa, Zea Mays
MSSAGISGCVPTTEHHIQTNHGPVSVAVYGDHDKPALVTYPDIALNYMSCFQGLLFCPEAASLLLHNFCIYHISPPGHELGAAPISPNAPIPSVDDLADQVADVLDFFGLGSVMCFGVTAGAYILTLFAAKYRERVLGLILVSPLCKGPTWTEWLYSKVTSNLLYYYGMCGLVKECLLQRYFSKEVRGFSELPESDIVQACKSLLEQRQSMNVWRFVQTMNERYDLSEHIKRLQCRTLIFVGDNSQFHTEAVHLTSKLDRRYCALVEVQACGSLVTEEQPHAMLIPMEYFLMGYGLYRPPSQVVECSPRSPLSPFCISPDLLSPESMGVKLKPIRTRVRLEV

SEQ ID NO: 179378 - protein, 268 aa, Zea Mays
MRTMQLGAAPISPNAPIPSVDDLADQVADVLDFFGLGSVMCFGVTAGAYILTLFAAKYRERVLGLILVSPLCKGPTWTEWLYSKVTSNLLYYYGMCGLVKECLLQRYFSKEVRGFSELPESDIVQACKSLLEQRQSMNVWRFVQTMNERYDLSEHIKRLQCRTLIFVGDNSQFHTEAVHLTSKLDRRYCALVEVQACGSLVTEEQPHAMLIPMEYFLMGYGLYRPPSQVVECSPRSPLSPFCISPDLLSPESMGVKLKPIRTRVRLEV

SEQ ID NO: 179379 - protein, 148 aa, Zea Mays
MSCFQGLLFCPEAASLLLHNFCIYHISPPGHELGAAPISPNAPIPSVDDLADQVADVLDFFGLGSVMCFGVTAGAYILTLFAAKYRERVLGLILVSPLCKGPTWTEWLYSKVTSNLLYYYGMCGLVKECLLQRYFSKCEDSLNYPNQT

SEQ ID NO: 179380 - protein, 449 aa, Zea Mays
MGITSLTILIGELLLPFFLVVMEFICNMSCAFVCLLFVLLFFFYYVHYVSLSYTYTDVQTIFLQNRARNPMSGGYSQQGYRPPRPQSNWGPPSVPPQQPGYGYMQPGAYPGAPPQYGAPQQPYGSYPPTSGGYQTGWDQSQNQQSHTTPPGTGYDYYSQQQQPQQQSAPGTAASTDATSYNYGQPSTYASQGYDSTYTQQSGGQQAYGHDGYTGYQTQGQQQGYSQQTGYDQQGYGTSAYGSAASSTQDGSNYGGPGGASQASPGQQTSNPAAGSQPGYTSQPPTSAAATYPPQGSAPSGYGAPPSQSGYGTQPPQQAGYGQGAYGQPSPQGQKPPALSPYGQAPPPGSAQAGYGQYGYSQPAYGAPPAYPGAPIASHQGYGQQQSYGQQQSYGDAYGSASYGQPPAYSTEATPPAASQDHSAAPAAALGTTASTAPENSGGAQTSAET

SEQ ID NO: 179381 - protein, 318 aa, Zea Mays
MSGGYSQQGYRPPRPQSNWGPPSVPPQQPGYGYMQPGAYPGAPPQYGAPQQPYGSYPPTSGGYQTGWDQSQNQQSHTTPPGTGYDYYSQQQQPQQQSAPGTAASTDATSYNYGQPSTYASQGYDSTYTQQSGGQQAYGHDGYTGYQTQGQQQGYSQQTGYDQQGYGTSAYGSAASSTQDGSNYGGPGGASQASPGQQTSNPAAGSQPGYTSQPPTSAAATYPPQGSAPSGYGAPPSQSGYGTQPPQQAGYGQGAYGQPSPQGQKPPALSPYGQLLKTVGAPKHPLKLELQQLIGNKHFPRPCRVVSSALLLNIITHLI

SEQ ID NO: 179382 - protein, 119 aa, Zea Mays
MPSLSPTMTEGNIAKWLKKEGDKVSPGEVLCEVETDKATVEMECMEEGYLAKIIHGDGAKEIKVAEPVAPAESKAQPEPSQPKVEEKKLTQAPEVKAPKIEEASQSGDRPTIKCERYWS

SEQ ID NO: 179383 - protein, 635 aa, Zea Mays
MCLYMALSIPDVPGTVIQATQNSCNVFVVSKRRLIMKLARYPQTSESNRNLRIESISHETFALSHRSLLFDNFGDDEAQSDSFSQSHSSHSASNVVSSSESSEQVASGSSGVNYAATEGSKNYDSLSSWGEDPWVASNSSEECQSTDDVSKLRKELQETLVVYDKACANLVSVKKKIQVLSIECSEEARKVEHALEWEEALKQTVSDEKAKQLEVISEVEQAGKSFTREAYSRYKTEMAASMICQDKVQIVDAILTKSRSCRRYSKRDIELATDNFSEERKIGEGGYGNVYRCTLDHTEVAVKVIQENSIDKTDEFLKEVEILSQLRHPNLVLLLGFCPEIGCLVYEYLKNGSLEDQLFNSEGCQPLHWFLRFQVVFEVSCGLAFLHARSPEPVVHRDLKPANILLDRNYVGKVGDVGFAKFVSDLVPDWQTEYKDTIVAGTLYYTDPEYQQTGTVRPKSDVFALGVVILQLLTGRRPDGLVASAENAVRNGRLADILDWSQAGWPLAEAEVFARLGLRCAALRCRDRPDLESEVLPELDEILHRITFAVSLRSPKLTSVPSHFVCPITQELMEDPHVAADGHTYEHYAIRAWLKRHRTSPVTRSKLQNSSVIPNHSLRGAIQQWKSQLPAQTNE

SEQ ID NO: 179384 - protein, 317 aa, Zea Mays
MAAATTAGAGAATPQPPRQYKLAPQSELRVEVLPDAPLRVRLVTGTAEIFGTELPPEGWVPVPPRSKIAIFTWHGATVELDGVSESEYTSDETPMVIYVNTHAILDARRARARTAAAQGGDKEASQGPRVIVVGPTDSGKSTLCKMLLSWAAKLGWKPTYVDLDIGQGSITIPGCISATPIEKPIDIIDGIPLEMPLVYFYGHPNPSINADVYKVLMKELAKTLEKQFSGNAESRAAGMVINTMGWVEGLGYELLLNAIETFKANVVLVLGQEKLWKMLKDAVQSKSNIDVVKLHKSEGVVLRNSKYRQRTRSFRIK

SEQ ID NO: 179385 - protein, 621 aa, Zea Mays
MASAGGEGAVLVPLARRCGGCDGREEAVVEAMLQWQKVSDLLIAASLLSIPLELLYFATCAALAPLRRVLLQLGTFIVMCGVTHLLNVLAYDHPGSHRILVALTTAKILGALATSAAAVSLPVLFPRLLRLKVRESFLRTKARQLDRDLATVRHREETVWRVVRAVTHHIRDSIDARTILRTTMLQLAAALGLSNCAIWMPQPGGSDRGVLQLMDQLLPDRDDEGDKVLHHSGGTRAISVRDPDVAAVLASKDAKVLSRPGSALKAASCRSVPLAGAAAAIRIPNFHGEVGSRNTSEPLSYAILVLVLRAHEDQHRAPTGWSNLDLEIVQAVADQVTVALSHAAALEESQLIRHRLAEQHGALLRARSELAAATKARNNAHSAMRSAMGRPMHSVVGLISVMQQEAAAMRPEQRLIVDAIARTNAVSSTLMDDVMETLQRMVDIRDPPLSTPTPTLVSRRPFELRSLIRDAAFVARCLSGCQELGFSHQLQANSLPEWVVGDDKRVFHLVLHMVGAQLSRCHGQHVTAAGRTLSFSVCSCNSIASEHQDWIPSPLRPVSFTSGNQVFVRIQIGLTKSGPGSSPASRPPQCGLSSDSGGANMRLTFAMCKKIVESRKAREKP

SEQ ID NO: 179386 - protein, 571 aa, Zea Mays
MMKMHGLGDMAYWTISYCYFLVISLLYMFLLVVFGAVVDIKLFAVNSYVLQFLLYFIYMNLQISFAFLMTTYFSTSATATVTGYLYVIGSGLIGEYLFRPFVEDTSVSRSLITLMEFFPPMSLYRIIYELSPPPSPSGPFSDFSGVRVGDLSDPENGILVLMVVMVLEWPTFLFLTLYLDGFGWLQTRVRKLPPAAAASSHQTLQKPSTTRPQERPEASIEIDGTTDIPGEVARACAEREIVDRFLQQPDQSYAVIVDNVRKVYPPRDGNAEVVAVNGFSLSIKRGQCFGLLGSNGAGKTSLIGMLTGFTKPTSGTAYIDGMDIRTDMSEIYTRIGVCPQFNLLWETLTGREHLMFYGRLKRLNGAALTEAAEQSMKVLKIFEGGVADTLVSQYSGGMKRRLSVAISLIGDPKVVYLDEPSTGLDPASRSALWDAVKLAKKDKAIILTTHSMEEAEALCDRIGITAHGRLRCTGTSKELKAKYGGTFVFTVTTAAAGEDEAVERLVRGSISPDAKRTYHIAGTQKFELPKQGVRIAEVFRAMEQAKRSLSIAAWGLVDTTLEDVFIKVAAC

SEQ ID NO: 179387 - protein, 418 aa, Zea Mays
MLLFCTLPAYDFTSSDLKHYNMVLQYNPDESNVLRVPRLMNLASSAYLRLRGNDTNMRFVFVKDMPRDGHPMKAPDMSFIVGKMVFVWIIMLLFPVILSSLVYEKQQKLRAMMKMHGLGDMAYWTISYCYFLVISLLYMFLLVVFGAVVDIKLFAVNSYVLQFLLYFIYMNLQISFAFLMTTYFSTSATATVTGYLYVIGSGLIGEYLFRPFVEDTSVSRSLITLMEFFPPMSLYRIIYELSPPPSPSGPFSDFSGVRVGDLSDPENGILVLMVVMVLEWPTFLFLTLYLDGFGWLQTRVRKLPPAAAASSHQTLQKPSTTRPQERPEASIEIDGTTDIPGEVARACAEREIVDRFLQQPDQSYAVIVDNVRKVYPPRDGNAEVVAVNGFSLSIKRGQCFGLLGSNGAGKTSLIGMVC

SEQ ID NO: 179388 - protein, 275 aa, Zea Mays
MPSLLSCMQCPAIRSSAFLAAAAGGTLHRWNDHVRLVDVVDDGGANEEGGDDDDGRPREGRGPRRHPPAAEPLATGHPPGSPTPVPNGHLHPQKESGVRTPNQHQAKHDVSGNICTVLLNNRCISFLRPNIASYQLVFHAIFFSKKKQRKHRFLPVQIPRHHTNQLTKIYCKAGEFVGAEREREREREREKLKFEDRVRRAVVEWRDWSSTGAPWAYRHIPMTAWPQGTRGGAGHCTHLRPARAHCTQAPEDRARCRANGHRFVMCHTVVVEPRI

SEQ ID NO: 179389 - protein, 74 aa, Zea Mays
MSPTALLEIEPKSDFEEPICDLSKMLTTNTISAQRRCAFLEVQLLKLNWTSLELKTREDDTQTSFVPSIPSYAK

SEQ ID NO: 179390 - protein, 684 aa, Zea Mays
MASRIKEDERHEKIIRGLLKLPANKRCINCNNLGPQYVCTNFWTFVCTNCSGSHREFTHRVKSVSMAKFTAQEVAALQEGGNERAREVFFKEWDPQRNGYPDSSNADKLRNFIKHVYVERRYTGERSTDRPPRAKDDKDEYSENRRSDGNWGGSRSPPNGSYSDRQNYSGRSDDRNSRYSYGDRSPGYDQNDYKRSPRYFEVGDNRSGKITPIQGFEDRRFSEPRKRDSGSPDFQKEADGSSPVVRPVRDILGDNAPQLRVGEPSKPATEPAKPTVVRPIDPPKPSVVRPIDPPKPNGTRAIDPPPLTKTISSASSIGSAEGTSEQTKVASAVSLIDFSADPEPESTAPPQPAPMTQQPPVNAVAPQPVLEQRKSAPSVSGGDWASFDAFGQQQTPQTSSSVNPLESALAQLSFSEAPSAPNVSAYPVSLDPTLKANDGGYSSVLDQSHSLFDAPFGISGNQASTVMSGQETSVQQSSIAAPTAGLPSQATANQQGTSGIQGAASSTDSKFSGRKELPADIFTALYPPSTPMMPGWQRAPHFGMGYAMQYPPGVFQGMQAYPQPTYQQPVYSQHAYSHPQPVKASNPFDLGNGPAPTQAHMPPSGPPGVLAGPAPQTLISNSSFGVPPQQPHQLYQSAAHPSHFMMQQVPNSMPMPEQQPNSMLVTFGIPPAKHPPTFIRLRWG

SEQ ID NO: 179391 - protein, 462 aa, Zea Mays
MASRIKEDERHEKIIRGLLKLPANKRCINCNNLGPQYVCTNFWTFVCTNCSGSHREFTHRVKSVSMAKFTAQEVAALQEGGNERAREVFFKEWDPQRNGYPDSSNADKLRNFIKHVYVERRYTGERSTDRPPRAKDDKDEYSENRRSDGNWGGSRSPPNGSYSDRQNYSGRSDDRNSRYSYGDRSPGYDQNDYKRSPRYFEVGDNRSGKITPIQGFEDRRFSEPRKRDSGSPDFQKEADGSSPVVRPVRDILGDNAPQLRVGEPSKPATEPAKPTVVRPIDPPKPSVVRPIDPPKPNGTRAIDPPPLTKTISSASSIGSAEGTSEQTKVASAVSLIDFSADPEPESTAPPQPAPMTQQPPVNAVAPQPVLEQRKSAPSVSGGDWASFDAFGQQQTPQTSSSVNPLESALAQLSFSEAPSAPNVSAYPVSLDPTLKANDGGYSSVLDQSHSLFDAPFGISGNQ

SEQ ID NO: 179392 - protein, 1027 aa, Zea Mays
MEFSKQGQAPMPNNIGLQPLPSSNVQSNQTEYPSLFYPSSLPGDWSSHMGTSVPVSSYYIVPMNQQSVQLVASPKVQMLKSPSFQSSNKRSAQKELPSKVQHHQLESVRSKFRESLIAALSLDLDQQNRSQSPDNVQSDGSTDKFKPAAGDVVQDLAANTSKDVCTTNSGVATTVAPSRCEENEKLISGLASEMTMSINDDMQQPSNQVSSEDDLLGQCMVADELLQGHGLSWVSDHVAGISKPNAEPNDLKRPQTSDVESESKRIKSANELAMDEEKFNQRAESLAFRIEEELFKLFRGVNKKYKEKGRSLLFNLKDKSNPELRERVLSGDIAPERLCSMTAEELASKELSEWRLAKAEEFAQMVVLPNMEVDPRRLVRKTHKGEFQVEVEEPDGFSVEVELGSNLTNIPSKTVEDQAKSNGTDGKEDVQEKDKASDGTSQDEGGRTGNNDMPGDVQYIDNEKADLMQELILDDMKDTVNLPPIPSLDEFMQGLDSEPPFVDLSVGTPQEDVNDSEEPGTTMEPEDLPETEDNASTPEKFESESDKSSAQVNSEPKLESPGDTAVPNSDLTEPRDGELNKSSPSHGKGEAKKTTTDNASNPDSVHQDQAASIPMIRESIWEGAIQLNVSSLSNVVAIFKSGEKPSLKVWRSFVEIKGRVKLSAFQEFVEQLPKSRSRAIMITELCWKEGSSESGRQHILQTIDAYISDGRVGLAEPAEGIELYLCPSHGKTVEILSRHLPKEHQESLAVAGSSFIGVVVWRRPDIPRVPTSRHRHDGSKRQSILGKPPVTNPAAARPSLPLNSYGAPPGFPNQRHQEEEDVADDAPPGFGPGVARDEDDLPEFNFVNPTHHAANVTARAYMGRPHVPPPSARPAEQMRELVQKYGKRSSVQAPRTWDDDDDDIPEWNPSQTIKQPPPLPHAPQQQPLPPPPVQQMDAYQQQYHITSAVQPQVPVASLTHAYLQIQQPGQAWQQPSNPWWPAQGVAAAAAQMTNIVHHQPQYGVVPGSSGVQGYDYSSASGMAWRPR

SEQ ID NO: 179393 - protein, 762 aa, Zea Mays
MEFSKQGQAPMPNNIGLQPLPSSNVQSNQTEYPSLFYPSSLPGDWSSHMGTSVPVSSYYIVPMNQQSVQLGASRPEVSHPAQPLLSRVSLRPPQQVLNIQTSLPAMAGSQPSPSMAGRKSQQKVASPKVQMLKSPSFQSSNKRSAQKELPSKVQHHQLESVRSKFRESLIAALSLDLDQQNRSQSPDNVQSDGSTDKFKPAAGDVVQDLAANTSKDVCTTNSGVATTVAPSRCEENEKLISGLASEMTMSINDDMQQPSNQVSSEDDLLGQCMVADELLQGHGLSWVSDHVAGISKPNAEPNDLKRPQTSDVESESKRIKSANELAMDEEKFNQRAESLAFRIEEELFKLFRGVNKKYKEKGRSLLFNLKDKSNPELRERVLSGDIAPERLCSMTAEELASKELSEWRLAKAEEFAQMVVLPNMEVDPRRLVRKTHKGEFQVEVEEPDGFSVEVELGSNLTNIPSKTVEDQAKSNGTDGKEDVQEKDKASDGTSQDEGGRTGNNDMPGDVQYIDNEKADLMQELILDDMKDTVNLPPIPSLDEFMQGLDSEPPFVDLSVGTPQEDVNDSEEPGTTMEPEDLPETEDNASTPEKFESESDKSSAQVNSEPKLESPGDTAVPNSDLTEPRDGELNKSSPSHGKGEAKKTTTDNASNPDSVHQDQAASIPMIRESIWEGAIQLNVSSLSNVVAIFKSGEKPSLKVWRSFVEIKGRVKLSAFQEFVEQLPKSRSRAIMERKFETVLMRPIHSSKPPSSTRLILELN

SEQ ID NO: 179394 - protein, 242 aa, Zea Mays
MDGKKLGNRIIRVNEVRTRGPRDFGRDGFRRDPRRYGRDPYWDRRDREQSYDRERDPYHDRDSDRSREHDRERDYEHGGFNREVDYPMDRDHEVDDIHPREHDRAAETHNMDSDNDKYKEHGSRKSHPKGRDSKDLSSSSDLQNDVSQIKDKISAKGQHIADLQKKAQKLEDELAAARKVSSERQLAVTDLYKHFLQLQDYNDRVKTAEHRLQSLVDAAMAELDMAEDATTRDGSMYENGVV

SEQ ID NO: 179395 - protein, 151 aa, Zea Mays
MDGKKLGNRIIRVNEVRTRGPRDFGRDGFRRDPRSHPKGRDSKDLSSSSDLQNDVSQIKDKISAKGQHIADLQKKAQKLEDELAAARKVSSERQLAVTDLYKHFLQLQDYNDRVKTAEHRLQSLVDAAMAELDMAEDATTRDGSMYENGVV

SEQ ID NO: 179396 - protein, 209 aa, Zea Mays
MDGKKLGNRIIRVNEVRTRGPRDFGRDGFRRDPRRYGRDPYWDRRDREQSYDRERDPYHDRDSDRSREHDRERDYEHGGFNREVDYPMDRDHEVDDIHPREHDRAAETHNMDSDNDKYKEHGSRKRFSHPKGRDSKDLSSSSDLQNDGKHQLDKTIQMREDLENEVSQIKDKISAKGQHIADLQKKAQVISVMVFKGFCCPHLPHSYMR

SEQ ID NO: 179397 - protein, 249 aa, Zea Mays
MDGKKLGNRIIRVNEVRTRGPRDFGRDGFRRDPRRYGRDPYWDRRDREQSYDRERDPYHDRDSDRSREHDRERDYEHGGFNREVDYPMDRDHEVDDIHPREHDRAAETHNMDSDNDKYKEHGSRKSHPKGRDSKDLSSSSDLQNDGKHQLDKTIQMREDLENEVSQIKDKISAKGQHIADLQKKAQKLEDELAAARKVSSERQLAVTDLYKHFLQLQDYNDRVKTAEHRLQVCLCCWQGENGALILCFD

SEQ ID NO: 179398 - protein, 171 aa, Zea Mays
MQKKNGSWRFCIDYRKLNDLTIKNRFPMSLVDEIIDELVGTKYFSSLDLTAGYHQIRMGEADEHKIAFKTHKGHYQFKVMPFGLTNAPATFRCAINMVLAPFLRKFVMVFLDDILVYSPNWHKHLEHLRLVFTTLRQHQFFLKKCVLLSWESKNSFIWIILFHLKGWLLTH

SEQ ID NO: 179399 - protein, 820 aa, Zea Mays
MERKRNPIVFLDVSVGDEPDERMIFELFADVAPLVTENFRALCTGELGIGHKTKKPLCYKGSSFHRVIEGFMAQGGDIAKGNGSGGENIYSGKSADETCVLPHDDRGLLTTADTGSKASGSQFCITFKPNSHLDRKHTVFGKLVVGSDVLKRIEQVDVQSPDSTPVVPVTIVNCGELTDRKDIGSMRIGIDKKRAAKSKLSKGISSDEESNEGQHKGRRNKSSKRRRKKRYFYSESDSSSESETESSDSESDSDTYSSDSSDVSSSSDDRRRRRKRHSKKNKRKRSRRKHDQRRERRRRKRDRKSKQKSKSRIKGDSEAESSSDSSSEDARSKRHRHGRKSKASSQVFEENIAAVSALKDATSPQQKSGIPNSPAQDVSPLQNGENYTNGVNESKIERNAAVMPVLTGNQSKSRSQSMSVNHSMSKSMSISPRRSPMKRSITTTKRSVSRSPVHHNRSGSPVGAPQKSVSRSSARRQSISRSPARSLSKSPPRDASRSPHISRTPVKAHRRSISRSSARSMEQRSLSRSLERIHVRKSVSPRPPLAKPKSITRTPVTSPLRSVSRSPARISRSPLRPSRRSPMRSPRRNIHRSLSRSPARILRSVSRSPVRGGRPRRNISRSPSPLRRALTPPNNGRSRSRSDSPDGSPKRIRRGRGFTQRYSFARQYRSPSADRLHRYGGRNDRDRYMGYRGFRHRSPPRRYRSPSRGRVSSPRYRRRSRSASRSPVHRGRRGGYNKSPVRSRSPPARKRSPSDRARSVSRSHLSRSVSKSPPVHHPSPLDSPSLERASDGKSRSPSPSGGGKKGLVSYGDGTPDSAGK

SEQ ID NO: 179400 - protein, 445 aa, Zea Mays
MERKRNPIVFLDVSVGDEPDERMIFELFADVAPLVTENFRALCTGELGIGHKTKKPLCYKGSSFHRVIEGFMAQGGDIAKGNGSGGENIYSGKSADETCVLPHDDRGLLTTADTGSKASGSQFCITFKPNSHLDRKHTVFGKLVVGSDVLKRIEQVDVQSPDSTPVVPVTIVNCGELTDRKDIGSMRIGIDKKRAAKSKLSKGISSDEESNEGQHKGRRNKSSKRRRKKRYFYSESDSSSESETESSDSESDSDTYSSDSSDVSSSSDDRRRRRKRHSKKNKRKRSRRKHDQRRERRRRKRDRKSKQKSKRIKGDSEAESSSDSSSEDARSKRHRHGRKSKASSQVFEENIAAVSALKDATSPQQKSGIPNSPAQDVSPLQNGENYTNGVNESKIERNAAVMPVLTGNQSKSRFPILLHTSFFVLTASGSGVSSDIDKQEPEHEC

SEQ ID NO: 179401 - protein, 715 aa, Zea Mays
MERKRNPIVFLDVSVGDEPDERMIFELFADVAPLVTENFRALCTGELGIGHKTKKPLCYKGSSFHRVIEGFMAQGGDIAKGNGSGGENIYSGKSADETCVLPHDDRGLLTTADTGSKASGSQFCITFKPNSHLDRKHTVFGKLVVGSDVLKRIEQVDVQSPDSTPVVPVTIVNCGELTDRKDIGSMRIGIDKKRAAKSKLSKGISSDEESNEGQHKGRRNKSSKRRRKKRYFYSESDSSSESETESSDSESDSDTYSSDSSDVSSSSDDRRRRRKRHSKKNKRKRSRRKHDQRRERRRRKRDRKSKQKSKSRIKGDSEAESSSDSSSEDARSKRHRHGRKSKASSQVFEENIAAVSALKDATSPQQKSGIPNSPAQDVSPLQNGENYTNGVNESKIERNAAVMPVLTGNQSKSRSQSMSVNHSMSKSMSISPRRSPMKRSITTTKRSVSRSPVHHNRSGSPVGAPQKSVSRSSARRQSISRSPARSLSKSPPRDASRSPHISRTPVKAHRRSISRSSARSMEQRSLSRSLERIHVRKSVSPRPPLAKPKSITRTPVTSPLRSVSRSPARISRSPLRPSRRSPMRSPRRNIHRSLSRSPARILRSVSRSPVRGGRPRRNISRSPSPLRRALTPPNNGRSRSRSDSPDGSPKRIRRGRGFTQRYSFARQYRSPSADRLHRYGGRNDRDRYMGYRGFRHRSPPRRYRSPSRGRVSSPS

SEQ ID NO: 179402 - protein, 273 aa, Zea Mays
MAFGRRSPGSSRHPPALTIVTALLLASLYFAAAAAALSPTDAMHNNNWAVLVCTSRFWLRIIMLQKSSALSNYLIPFCCLLFPFRTVKRLGIPDERIILMLADDMACNPRNSYPAQVFNNENHQLNLYGDNVEVDYRGYEVTVENFLRVLTGRHESAVPRSKRLLSDEGSHILLYMTGHGGDEFLKFQDSEELQSHDLADAVKQMKEKHRFKELLIMVDTCQAATLFSQLQSPGVLAIGSSMKGENSYSHHLDSDVFLLWIGLPIIHLLSLRN

SEQ ID NO: 179403 - protein, 217 aa, Zea Mays
MDPPQELAAAGRKRRRRGGVRNRKRLSSQKGLPPATAPPTPASPPVKRRRKDIAGQAAAMPKRGNTSSLLDKMRARLSGGHFRMLNEKLYTCSGEDAFDYFKNDPNLFDVYHTGYQEQMSHWPEQPVNVIINWLKSQNASWTVADFGCGNAAVAKNLKNKVFSIDLVSDEPSVIACDMAHDVKNRMFILFYFRKKEKSKVAKSIDWPQLKPCLYKRR

SEQ ID NO: 179404 - protein, 218 aa, Zea Mays
MDPPQELAAAGRKRRRRGGVRNRKRLSSQKGLPPATAPPTPASPPVKRRRKDIAGQAAAMPKRGNTSSLLDKMRARLSGGHFRMLNEKLYTCSGEDAFDYFKNDPNLFDVYHTGYQEQMSHWPEQPVNVIINWLKSQNASWTVADFGCGNAAVAKNLKNKVFSIDLVSDEPSVIACDMAHTPLEPSSIDVAIFCLSLMGINYPSYLEEANRVLKPSAK

SEQ ID NO: 179405 - protein, 142 aa, Zea Mays
MSHWPEQPVNVIINWLKSQNASWTVADFGCGNAAVAKNLKNKVFSIDLVSDEPSVIACDMAHTPLEPSSIDVAIFCLSLMGINYPSYLEEANRVLKPSGWLVIAEVRSRLDPSNGGADPEKFSKAIIQLGFSLVSKVCMFSN

SEQ ID NO: 179406 - protein, 205 aa, Zea Mays
MANAADDPMADEAGVEDAFTQEINHSYVPRYHVLSWMETVEGMVAGVASLPPVYLILNREIYDTCSCLLMMPVWCQSYLLETGWGWKRLVPYRPGYVELHVFKKYLGDYFDHNREAFLCAEQKPDPFGWIVAEKSALIAAAKSCLKMEKALLRYCASFLTPDDKRLILRIKDQAKQMIQSEGDQSLIVTICLEKSPSAIRFGGLP

SEQ ID NO: 179407 - protein, 311 aa, Zea Mays
MANAADDPMADEAGVEDAFTQEINHSYVPRYHVLSWMETVEGMVAGVASLPPVYLILNRDLLETGWGWKRLVPYRPGYVELHVFKKYLGDYFDHNREAFLCAEQKPDPFGWIVAEKSALIAAAKSCLKMEKALLRYCASFLTPDDKRLILRIKDQAKQMIQSEGDQSLIVTICLECIAKEAELMYNYLPCDFDTTEEVAVCNKVRRSALNLMLYKGSESAVAAGAMMGITTEAKSIFDLLSRDHDVVMEVFTCESIREHTASVLTQLGKEFACETATVNSSSARPMGDVRDLNSEVSGSMEDCTSMDGARF

SEQ ID NO: 179408 - protein, 329 aa, Zea Mays
MANDDPMADEAGVEDAFTQEINHSYVPRYHVLSWMETVEGMVAGVASLPPVYLILNREIYDTCSCLLMMPVWCQSYLLETGWGWKRLVPYRPGYVELHVFKKYLGDYFDHNREAFLCAEQKPDPFGWIVAEKSALIAAAKSCLKMEKALLRYCASFLTPDDKRLILRIKDQAKQMIQSEGDQSLIVTICLECIAKEAELMYNYLPCDFDTTEEVAVCNKVRRSALNLMLYKGSESAVAAGAMMGITTEAKSIFDLLSRDHDVVMEVFTCESIREHTASVLTQLGKEFACETATVNSSSARPMGVSDVRDLNSEVSGSMEDCTSMDGARF

SEQ ID NO: 179409 - protein, 203 aa, Zea Mays
MANDDPMADEAGVEDAFTQEINHSYVPRYHVLSWMETVEGMVAGVASLPPVYLILNREIYDTCSCLLMMPVWCQSYLLETGWGWKRLVPYRPGYVELHVFKKYLGDYFDHNREAFLCAEQKPDPFGWIVAEKSALIAAAKSCLKMEKALLRYCASFLTPDDKRLILRIKDQAKQMIQSEGDQSLIVTICLEKSPSAIRFGGLP

SEQ ID NO: 179410 - protein, 168 aa, Zea Mays
MGITERALMKSIASRGCFGCAQPTPIIAVDKPTKGLRIQGRSVKRRNVSDDFWSSSPHEMENSALQSRHSMSSISTAAQPNDQHVSGTSSSPNEFVNQGLLLWHQTRQQWIGNRRLNSQGQQSQEPKISCNATYESLLGSSKPFPQPTPLGEMVDFLVVSWEQEGLYG

SEQ ID NO: 179411 - protein, 163 aa, Zea Mays
MLRKSLNFKATPMPSFYKEPTPVKVELKKIPPTRAKSPKFGRSKNKSTPETEENATADQPAHLSLEENVSQTGVKKPTPLNPAKKPQRKSLPRLPSEETGPLDATSRQLIKSAKLDAVSAPETGSATGQAQLQGSQTETDSGQGPVEAGANPDEQDASEQSVV

SEQ ID NO: 179412 - protein, 90 aa, Zea Mays
MHQGYPKETLVRFLKAREWNVAKAHKMIVECLNWRIQNEIDSVLERPIVPVDLYRSIRDSQLIGLSGYTKEFSIGKLICRMKIALKRLKC

SEQ ID NO: 179413 - protein, 188 aa, Zea Mays
MHQGYPKETLVRFLKAREWNVAKAHKMIVECLNWRIQNEIDSVLERPIVPVDLYRSIRDSQLIGLSGYTKEGLPIFGIGVGHSTYDKASVHYYVQSHIQINEYRDRIILPRLTQQFGRPVTSCIKVLDMTGLKLSALSQIKMLTSISTVDDLNYPEKTETYYVVNVPYIFSACWKVLSVTANARTYGF

SEQ ID NO: 179414 - protein, 242 aa, Zea Mays
MGADSEDAVKQLSLLMEQVEAPLKRSFQNMHQGYPKETLVRFLKAREWNVAKAHKMIVECLNWRIQNEIDSVLERPIVPVDLYRSIRDSQLIGLSGYTKEGLPIFGIGVGHSTYDKASVHYYVQSHIQINEYRDRIILPRLTQQFGRPVTSCIKVLDMTGLKLSALSQIKMLTSISTVDDLNYPEKTETYYVVNVPYIFSACWKVVKPLLQERTKKKVKVLTGCGRDELLKVNIFFLACCLF

SEQ ID NO: 179415 - protein, 235 aa, Zea Mays
MGADSEDAVKQLSLLMEQVEAPLKRSFQNMHQGYPKETLVRFLKAREWNVAKAHKMIVECLNWRIQNEIDSVLERPIVPVDLYRSIRDSQLIGLSGYTKEGLPIFGIGVGHSTYDKASVHYYVQSHIQINEYRDRIILPRLTQQFGRPVTSCIKVLDMTGLKLSALSQIKMLTSISTVDDLNYPEKTETYYVVNVPYIFSACWKERTKKKVKVLTGCGRDELLKVNIFFLACCLF

SEQ ID NO: 179416 - protein, 191 aa, Zea Mays
MGADSEDAVKQLSLLMEQVEAPLKRSFQNMHQGYPKETLVRFLKAREWNVAKAHKMIVECLNWRIQNEIDSVLEGLPIFGIGVGHSTYDKASVHYYVQSHIQINEYRDRIILPRLTQQFGRPVTSCIKVLDMTGLKLSALSQIKMLTSISTVDDLNYPEKTETYYVVNVPYIFSACWKVLSVTANARTYGF

SEQ ID NO: 179417 - protein, 370 aa, Zea Mays
MDRHLNNACRYHQSIACFTSLDHGLVHMYTFDPATMNFRSVELVFSSRFNMSAPCNGLVCAYDIKGDAEVLNPTTRKHLRLPDSALKSRSLYSEYFVGFVHSTKQYKVVSIRHHVRFLTFEICTIGTPSWRTIHESAELLVATKAVIVKDGMYWLLLDEASSYSSREILTLNLTDERFSKIAIPDAVKSHKLELFEGEGKLRLLSTHSDGSSNIVSDIWVADLAGEDWIHLQTIIPLTHLGISPFFQLKTKVFFGNQKRLLCVDLQDGTVSYINMPSGETLISCGMFVESFAPAATGLVSSTASYGDRSRLAEPSMADPGPSFRGAGSSSASRGRSSGLTGWSSADLEQSFKRTKRTTNMQWKISKHRAI

SEQ ID NO: 179418 - protein, 388 aa, Zea Mays
MDCNSDDLDKQNEVTGSRVFIPQDAQGVILAFLPGRDVVKLRSVCKFWLECVEEHSFMDRHLNNACRYHQSIACFTSLDHGLVHMYTFDPATMNFRSVELVFSSRFNMSAPCNGLVCAYDIKGDAEVLNPTTRKHLRLPDSALKSRSLYSEYFVGFVHSTKQYKVVSIRHHVRFLTFEICTIGTPSWRTIHESAELLVATKAVIVKDGMYWLLLDEASSYSSREILTLNLTDERFSKIAIPDAVKSHKLELFEGEGKLRLLSTHSDGSSNIVSDIWVADLAGEDWIHLQTIIPLTHLGISPFFQLKTKVFFGNQKRLLCVDLQDGTVSYINMPSGETLISCGMFVESFAPAATGLVSSTASYADLEQSFKRTKRTTNMQWKISKHRAI

SEQ ID NO: 179419 - protein, 212 aa, Zea Mays
MDLQLHVFYRALGLSFVGGLSTAIGALFVVLNPAPNLKVLGLLQGFAAGLMLSISFLDLAHNALNSIGFLKGNLWFFAGVLFFGFIIKFIPEPDFSPPADPSEKEADDGVSGKDMMRKHRRQVLFSGIITAVGISLHNLPEGMAVFLGSVKGLHVGLNLAVAIALHNIPEGVAVALPIYFATKSKKKAFYTAAFSGLAEPLGVVALCCFQAV

SEQ ID NO: 179420 - protein, 263 aa, Zea Mays
MGRNRKGRKARVSHDADADADADGSEDERATTAGRSLYEILGVEKTASQQEIKKAYHKLALRLHPDKNPGDEEAKEKFQQLQKALVGEAANNLQEYFRTMYKKVTEADIEEFEAKYRGSDSEKTDLKELYTKYKGNMNRLFCAMICSEPKLDSHRFKDIIDEAIGEGELKSTKVYEKWAKKISGMEPPTNPLERRVKKRKNSEENDLILAISQRRAERKKQFNSILSNIMSKCDSKASSSEPTEEEFEQAQQRLESRRAKRRK

SEQ ID NO: 179421 - protein, 71 aa, Zea Mays
MAAATAMAQKHHGSHRNRNPFLLGHVHRLRPTMTTTRLNADELYKRILQEITPSVSQDTFFWGRVAYLFTV

SEQ ID NO: 179422 - protein, 262 aa, Zea Mays
MHAEDGSDGDAAGDAPPGDSRLGEGLEQLVRHDPGAAAVLEVQVVVALVDEPLDLLHPAAELLERRLHHGLRQPRRLRELPHVLLVGRVRREDVQRRHDLDGLHLRGQHVQQRRLRLLEELLHLLARPALLHRHVLPDGGRPVGEVAGEVVLAEVDGRVVAGGDPHDGGQRLHQAVAGVQHGPPRLVLLVAVPHVAHLVPERPQLGVGGHGLVGLVVDVDVLGRPLPDGVPDQEPVVGVGVVLDGELQLPVLQPLGRVGRQV

SEQ ID NO: 179423 - protein, 757 aa, Zea Mays
MGAPRHLLDVAMLCALFVSAASFTDPPDALGLLGLYHTLESPWQLSGWTFQGGDPCGEGGGSKHWRGVFCKGPSIVAINISGLGVGGWLGPDLLKFQSLKKLDMSFNNIAGEIPSTLPPNVEYLNLAANKFEGNIPSSLPWLRSLKYLNFSYNKLSGVIGDVFVNMDSLETMDLSFNAFNSDLPRSFSSLTSLRYLYLQHNEFTGSVILLAGLPLSSLNIENNHFSGYVPGTFQSIPELRIDGNQFQPGFKLASSSFTRKTPAAPPQSLPPPPLQSPSPSPSPLAAQQKPKRRPKSPKPSFGYSSLQNNSHHRKSHSRVTAAAMASATCTVFVLLVVGLVLRSRKSCSCSPKSTSNHAKTLPANMETVPTANEVLYSWSSLLIGSDTSSSNGITSERVPKIKSWFKASKKLLTAKQFPAADILAATKDFNEECFIGEGLTGRVYRGEFSDGQLLAIKRIDMVDLSLSEQDELMDMLWNVSRLKHPNISALVGYCVEFEHCALLYEYAENGSLDDILFAPATRSMALSWKARMKIALGVAYALEYMHLTYSPPVAHGNIKARNILLDAQLMPYLCDCGLAKLSHFVSTTRMKDSEAIISAKGYAAPELSDPGANDIKADIYSFGVILLVLLTGQKAFDSSRRQSDQFLVDWAAPHLDDLDSLERITDPRISGSMPPKAISSLGIIILLCVKQSPDLRPPMTIITDKLVKLVESTGLQKISTTRHLEIDAQDPSFITTRPYFEPSSTVSQGGTESCISR

SEQ ID NO: 179424 - protein, 787 aa, Zea Mays
MESRGRVSAGKGGWTWMGGSGVGAATERVSAEGAVWPRHWGERAQKGAGDKVRASTTRALGLLGLYHTLESPWQLSGWTFQGGDPCGEGGGSKHWRGVFCKGPSIVAINISGLGVGGWLGPDLLKFQSLKKLDMSFNNIAGEIPSTLPPNVEYLNLAANKFEGNIPSSLPWLRSLKYLNFSYNKLSGVIGDVFVNMDSLETMDLSFNAFNSDLPRSFSSLTSLRYLYLQHNEFTGSVILLAGLPLSSLNIENNHFSGYVPGTFQSIPELRIDGNQFQPGFKLASSSFTRKTPAAPPQSLPPPPLQSPSPSPSPLAAQQKPKRRPKSPKPSFGYSSLQNNSHHRKSHSRVTAAAMASATCTVFVLLVVGLVLRSRKSCSCSPKSTSNHAKTLPANMETVPTANEVLYSWSSLLIGSDTSSSNGITSERVPKIKSWFKASKKLLTAKQFPAADILAATKDFNEECFIGEGLTGRVYRGEFSDGQLLAIKRIDMVDLSLSEQDELMDMLWNVSRLKHPNISALVGYCVEFEHCALLYEYAENGSLDDILFAPATRSMALSWKARMKIALGVAYALEYMHLTYSPPVAHGNIKARNILLDAQLMPYLCDCGLAKLSHFVSTTRMKDSEAIISAKGYAAPELSDPGANDIKADIYSFGVILLVLLTGQKAFDSSRRQSDQFLVDWAAPHLDDLDSLERITDPRISGSMPPKAISSLGIIILLCVKQSPDLRPPMTIITDKLVKLVESTGLQKISTTRHLEIDAQDPSFITTRPYFEPSSTVSQGGTESCISR

SEQ ID NO: 179425 - protein, 798 aa, Zea Mays
MESRGRVSAGKGGWTWMGGSGVGAATERVSAEGAVWPRHWGERAQKGAGDKVRASTTRALGLLGLYHTLESPWQLSGWTFQGGDPCGEGGGSKHWRGVFCKGPSIVAINISGLGVGGWLGPDLLKFQSLKKLLWCFSSHVDDRDMSFNNIAGEIPSTLPPNVEYLNLAANKFEGNIPSSLPWLRSLKYLNFSYNKLSGVIGDVFVNMDSLETMDLSFNAFNSDLPRSFSSLTSLRYLYLQHNEFTGSVILLAGLPLSSLNIENNHFSGYVPGTFQSIPELRIDGNQFQPGFKLASSSFTRKTPAAPPQSLPPPPLQSPSPSPSPLAAQQKPKRRPKSPKPSFGYSSLQNNSHHRKSHSRVTAAAMASATCTVFVLLVVGLVLRSRKSCSCSPKSTSNHAKTLPANMETVPTANEVLYSWSSLLIGSDTSSSNGITSERVPKIKSWFKASKKLLTAKQFPAADILAATKDFNEECFIGEGLTGRVYRGEFSDGQLLAIKRIDMVDLSLSEQDELMDMLWNVSRLKHPNISALVGYCVEFEHCALLYEYAENGSLDDILFAPATRSMALSWKARMKIALGVAYALEYMHLTYSPPVAHGNIKARNILLDAQLMPYLCDCGLAKLSHFVSTTRMKDSEAIISAKGYAAPELSDPGANDIKADIYSFGVILLVLLTGQKAFDSSRRQSDQFLVDWAAPHLDDLDSLERITDPRISGSMPPKAISSLGIIILLCVKQSPDLRPPMTIITDKLVKLVESTGLQKISTTRHLEIDAQDPSFITTRPYFEPSSTVSQGGTESCISR

SEQ ID NO: 179426 - protein, 582 aa, Zea Mays
MGAPRHLLDVAMLCALFVSAASFTDPPDALGLLGLYHTLESPWQLSGWTFQGGDPCGEGGGSKHWRGVFCKGPSIVAINISGLGVGGWLGPDLLKFQSLKKLDMSFNNIAGEIPSTLPPNVEYLNLAANKFEGNIPSSLPWLRSLKYLNFSYNKLSGVIGDVFVNMDSLETMDLSFNAFNSDLPRSFSSLTSLRYLYLQHNEFTGSVILLAGLPLSSLNIENNHFSGYVPGTFQSIPELRIDGNQFQPGFKLASSSFTRKTPAAPPQSLPPPPLQSPSPSPSPLAAQQKPKRRPKSPKPSFGYSSLQNNSHHRKSHSRVTAAAMASATCTVFVLLVVGLVLRSRKSCSCSPKSTSNHAKTLPANMETVPTANEVLYSWSSLLIGSDTSSSNGITSERVPKIKSWFKASKKLLTAKQFPAADILAATKDFNEECFIGEGLTGRVYRGEFSDGQLLAIKRIDMVDLSLSEQDELMDMLWNVSRLKHPNISALVGYCVEFEHCALLYEYAENGSLDDILFAPATRSMALSWKARMKIALGVAYALERIQKLSSVLKAMLPLSLVILEQMTSKLIFTVLVLFCLCF

SEQ ID NO: 179427 - protein, 264 aa, Zea Mays
MNTGMGGLGGRPIHPQANPFGTALQGAGPGLIRTGLETYGGRILDSSSEFMQSNITQYLSDPQYYFQVNSQYVRNKLKVILFPFLHRGHWTRITEPVGGRLSYKPPVQDINAPDLYIPLMAFGTYIVAAGYALGVLGRFTPEALTLQFSKGILGWFLQVVLIKGLLYSLGSGEAPLLDIVAYAGYCFAGTSLAMVARIFWSYLYYFIMPWFCLCTGVFLVKTMKRVLLGGPRSYERHPGRNHYFLIFLAVVQFPMLFWLGNICG

SEQ ID NO: 179428 - protein, 486 aa, Zea Mays
MATTATTMAPVTAPVATANLEPTPTPLHPRPAAPPHLRALSTLAPVKSEAPPTPSSSTAITAAAGAEDPSYIITVPSYSAWFSFDSIHDTERRLLPEFFVGEAAAASGCRGPHAYKYYRDSLIRRFRARPGRRLTLTEARRGLVGDVGSVRRVFDFLEEWGLINYGALPSGSKQAKEKREEAAQQSSLPFGAIAPRKLCTGCRTVCGLAYYACDKADISLCARCYVNNNYRPGLSPANFKRVEITEDAKPDWTDKETLHLLEAVLHYGEDWKKVSEHVSSRSEKDCIARFIRLPFGEQFMGHKEDRMRFENTDDNTDEPGANVSKRLRLTPLADASNPIMAQVAFLSAIVGSDVASAAAQAAISAQSRVDLNDGEIETSINSIKQEANVLLKEAAANARAQLEKERNSIEQSLSNIVDVQMKEIQDKICRFEQKEMLMEKERQQLHFLRDLLFTDQLAVMQHQQRSPAVATECKGDEKPKPVASMS

SEQ ID NO: 179429 - protein, 216 aa, Zea Mays
MATTATTMAPVTAPVATANLEPTPTPLHPRPAAPPHLRALSTLAPVKSEAPPTPSSSTAITAAAGAEDPSYIITVPSYSAWFSFDSIHDTERRLLPEFFVGEAAAASGCRGPHAYKYYRDSLIRRFRARPGRRLTLTEARRGLVGDVGSVRRVFDFLEEWGLINYGALPSGSKQAKEKREEAAQQSSLPFGAIAPRKLCTGCRTVCGLAYYACDKI

SEQ ID NO: 179430 - protein, 470 aa, Zea Mays
MATTATTMAPVTAPVATANLEPTPTPLHPRPAAPPHLRALSTLAPVKSEAPPTPSSSTAITAAAGAEDPSYIITVPSYSAWFSFDSIHDTERRLLPEFFVGEAAAASGCRGPHAYKYYRDSLIRRFRARPGRRLTLTEARRGLVGDVGSVRRVFDFLEEWGLINYGALPSGSKQAKEKREEAAQQSSLPFGAIAPRKLCTGCRTVCGLAYYACDKADISLCARCYVNNNYRPGLSPANFKRVEITEDAKPDWTDKETLHLLEAVLHYGEDWKKFMGHKEDRMRFENTDDNTDEPGANVSKRLRLTPLADASNPIMAQVAFLSAIVGSDVASAAAQAAISAQSRVDLNDGEIETSINSIKQEESSHTNGLSANVLLKEAAANARAQLEKERNSIEQSLSNIVDVQMKEIQDKICRFEQKEMLMEKERQQLHFLRDLLFTDQLAVMQHQQRSPAVATECKGDEKPKPVASMS

SEQ ID NO: 179431 - protein, 146 aa, Zea Mays
MASPQADEEIVAVLDEETLALMGVSNAATAARVAVGAEWEKFKENVRPLKRGHDVSKLNHALAQGTRQSLPAHRSRRSPQMIEAIYEYRGEDPLQPWLDCIKWVQESFPTGGDSACGPYGTTSATRTTSAFSKCGWNTLGTVLMPR

SEQ ID NO: 179432 - protein, 88 aa, Zea Mays
MASPQADEEIVAVLDEETLALMGVSNAATAARVAVGAEWEKFKENVRPLKRGHDVSKLNHALAQGTRQSLPAHRSRRSPQVDFPDSER

SEQ ID NO: 179433 - protein, 1852 aa, Zea Mays
MQFMPAFDLAQCFGMRQNFTSMDQDLIADGNVPQRSAHLRRRRDLPQTSTLPKVAVNHELGSAGTSMDPSFFNNTIKQSPSENRSSLKPPIFLMENSNHQPHHHTVALPVQYSDFFITSLGEIDNRTSYHNSYQIWPVGFTSYWHDRVTGSLFECEVHDGGNFGPLFKMRRLPCSAFQLPDASTTVCLNVVRNADTIETKEGSDLIEDTANDANDNISMLLSDFSETNQDFLSCLGNDLEGKESLGCSNVETKDMTVPDVLSDPGSFSWAPTNDANMYDKIGDFSYEGTSPSSVWRMISCAMMEACEKMYKEHGHLVLFCTHSSEKSPFDYESGPQRTDGPFNLLAKFCSSNGPKVPQFIEKENDVQSTCALLKEWLYPDRIGFDLEFVQEFVESLPKSGACSHYQFLCNRTGINSSLTIASGTLVAVNKNSPMHARHGSVVSGPQDHAQPSSSSIRELPPGNPISRKLAPELAGDVFQILEFLGRFAEIIGLKELPSIEQVEDELIDPWPMHPNKNDIHNYMDHNPPMNSPANVSSSYSNGESGITSIEEMVYVSIPVETSSAREAAQNKLAAQTLGRCSGLVLPEIHIALLKVLFTELVSRVAIFVDPSIDLKESKSRRGRKRDTDTLTRELKIDMLTANNLTWPELARRYILAVSSMSGCMDLSDISSREGVKLFRCLQGDGGILCGALPGVVGMEKDASLLAEAETLICNSSANEGNTVFMMDYKDTDIVDSPEEPASDTTLPDWVKSLEPVRKLPTNVGTRIRKCVYEALERKPPEWARKILEHSISKEVYKGNASGPTKKAVLSVLTEACRTKVPQNTEKPRKERNIISISEAVLKKCRIALRRAISSDESKQFANLLGTTLTNSNENEDEGILGFPGMVSRPLDFRTIDIRLAKGAYRGSWEAFLDDVQEVICNLQTAFADRPEVLIMVVALSESFESLYKTEVQDLVEKFDRYLSNENDSSEIHQELQDALTAANNKLPKAPWEDGVCKVCGIDRDDESVLLCDNCDSEYHTYCLNPPLARIPLGNWYCPSCTAQTHVAVQEQKKCLGEEAHVFIEKLNKLAVAMDEKEYWELTVAERIYLLKFLCDELHNTALIREHLDQCSDKSNDLQQKLRHLNYELKELRYRVEIKNPYATQSRWMKNDQVSNSSGLVENQQRAMPTASEHLEEAEQVNVGVNLNNPAEGVPAALLDVGKPCSTDNGISSTSVIEGNKSLGLSEQPSKIITDQTDRDSIAEGSNSCEKSLVGKSGTCDPNVGETHAATVINAPNGDLPDENAMTLSQDNIETSTSKLVDHDADMNESNNLLERISQLHGSISTVESQLSMASLRGECLGRDSVGRLYWVTGRPCKRPRLVADGSMMIPKDRDISMVTSHSQSTFDRGWNSASLVIYESDEEMKCLVDWLRDIDPREKDLKDSILHWQKSIYRQASFPITDPPVSKFSKSEPLMELPNTNAFIVLEQKYGLQTDQDTSELSKRRGTKSRSGSEERVYRCDCLEPIWPSRHHCLNCHETYLTLMEYEGHNGGKCTSSNDCPNESKEIDEPKLKGSKSDIKEKDPVVHNCSVEPSNSGKLESCPYDFEEICRKFTTNDSIKETVKEIGLLGSNGIPSCVPSPAYFLDPPVLLNESKRNDDKPNDWTSSLQECQAVSAKMSGQEGSQVGQDFSGNAGDEELPKSKKPVRDSTSAKEAPSTDISTRLLTVNGGLVPESSLMPVIGRNFHILKQLKINLLDIEAALPEEAFRASKSQQIRRRSWRAFVKDAELISYVVLAINFLQSMIKAEFLKKDWWYWSSFTAAIKTTTVSSLALRIYTLDDCIMYTKDPAPNLQPADNARSGNKGKRKKDIDS

SEQ ID NO: 179434 - protein, 936 aa, Zea Mays
MVSRPLDFRTIDIRLAKGAYRGSWEAFLDDVQEVICNLQTAFADRPEVLIMVVALSESFESLYKTEVQDLVEKFDRYLSNENDSSEIHQELQDALTAANNKLPKAPWEDGVCKVCGIDRDDESVLLCDNCDSEYHTYCLNPPLARIPLGNWYCPSCTAQTHVAVQEQKKCLGEEAHVFIEKLNKLAVAMDEKEYWELTVAERIYLLKFLCDELHNTALIREHLDQCSDKSNDLQQKLRHLNYELKELRYRVEIKNPYATQSRWMKNDQVSNSSGLVENQQRAMPTASEHLEEAEQVNVGVNLNNPAEGVPAALLDVGKPCSTDNGISSTSVIEGNKSLGLSEQPSKIITDQTDRDSIAEGSNSCEKSLVGKSGTCDPNVGETHAATVINAPNGDLPDENAMTLSQDNIETSTSKLVDHDADMNESNNLLERISQLHGSISTVESQLSMASLRGECLGRDSVGRLYWVTGRPCKRPRLVADGSMMIPKDRDISMVTSHSQSTFDRGWNSASLVIYESDEEMKCLVDWLRDIDPREKDLKDSILHWQKSIYRQASFPITDPPVSKFSKSEPLMELPNTNAFIVLEQKYGLQTDQDTSELSKRRGTKSRSGSEERVYRCDCLEPIWPSRHHCLNCHETYLTLMEYEGHNGGKCTSSNDCPNESKEIDEPKLKGSKSDIKEKDPVVHNCSVEPSNSGKLESCPYDFEEICRKFTTNDSIKETVKEIGLLGSNGIPSCECQAVSAKMSGQEGSQVGQDFSGNAGDEELPKSKKPVRDSTSAKEAPSTDISTRLLTVNGGLVPESSLMPVIGRNFHILKQLKINLLDIEAALPEEAFRASKSQQIRRRSWRAFVKDAELISYVVLAINFLQSMIKAEFLKKDWWYWSSFTAAIKTTTVSSLALRIYTLDDCIMYTKDPAPNLQPADNARSGNKGKRKKDIDS

SEQ ID NO: 179435 - protein, 1128 aa, Zea Mays
MMDYKDTDIVDSPEEPASDTTLPDWVKSLEPVRKLPTNVGTRIRKCVYEALERKPPEWARKILEHSISKEVYKGNASGPTKKAVLSVLTEACRTKVPQNTEKPRKERNIISISEAVLKKCRIALRRAISSDESKQFANLLGTTLTNSNENEDEGILGFPGMVSRPLDFRTIDIRLAKGAYRGSWEAFLDDVQEVICNLQTAFADRPEVLIMVVALSESFESLYKTEVQDLVEKFDRYLSNENDSSEIHQELQDALTAANNKLPKAPWEDGVCKVCGIDRDDESVLLCDNCDSEYHTYCLNPPLARIPLGNWYCPSCTAQTHVAVQEQKKCLGEEAHVFIEKLNKLAVAMDEKEYWELTVAERIYLLKFLCDELHNTALIREHLDQCSDKSNDLQQKLRHLNYELKELRYRVEIKNPYATQSRWMKNDQVSNSSGLVENQQRAMPTASEHLEEAEQVNVGVNLNNPAEGVPAALLDVGKPCSTDNGISSTSVIEGNKSLGLSEQPSKIITDQTDRDSIAEGSNSCEKSLVGKSGTCDPNVGETHAATVINAPNGDLPDENAMTLSQDNIETSTSKLVDHDADMNESNNLLERISQLHGSISTVESQLSMASLRGECLGRDSVGRLYWVTGRPCKRPRLVADGSMMIPKDRDISMVTSHSQSTFDRGWNSASLVIYESDEEMKCLVDWLRDIDPREKDLKDSILHWQKSIYRQASFPITDPPVSKFSKSEPLMELPNTNAFIVLEQKYGLQTDQDTSELSKRRGTKSRSGSEERVYRCDCLEPIWPSRHHCLNCHETYLTLMEYEGHNGGKCTSSNDCPNESKEIDEPKLKGSKSDIKEKDPVVHNCSVEPSNSGKLESCPYDFEEICRKFTTNDSIKETVKEIGLLGSNGIPSCVPSPAYFLDPPVLLNESKRNDDKPNDWTSSLQECQAVSAKMSGQEGSQVGQDFSGNAGDEELPKSKKPVRDSTSAKEAPSTDISTRLLTVNGGLVPESSLMPVIGRNFHILKQLKINLLDIEAALPEEAFRASKSQQIRRRSWRAFVKDAELISYVVLAINFLQSMIKAEFLKKDWWYWSSFTAAIKTTTVSSLALRIYTLDDCIMYTKDPAPNLQPADNARSGNKGKRKKDIDS

SEQ ID NO: 179436 - protein, 1820 aa, Zea Mays
MQFMPAFDLAQCFGMRQNFTSMDQDLIADGNVPQRSAHLRRRRDLPQTSTLPKVAVNHELGSAGTSMDPSFFNNTIKQSPSENRSSLKPPIFLMENSNHQPHHHTVALPVQYSDFFITSLGEIDNRTSYHNSYQIWPVGFTSYWHDRVTGSLFECEVHDGGNFGPLFKMRRLPCSAFQLPDASTTVCLNVVRNADTIETKEGSDLIEDTANDANDNISMLLSDFSETNQDFLSCLGNDLEGKESLGCSNVETKDMTVPDVLSDPGSFSWAPTNDANMYDKIGDFSYEGTSPSSVWRMISCAMMEACEKMYKEHGHLVLFCTHSSEKSPFDYESGPQRTDGPFNLLAKFCSSNGPKVPQFIEKENDVQSTCALLKEWLYPDRIGFDLEFVQEFVESLPKSGACSHYQFLCNRTGINSSLTIASGTLVAVNKNSPMHARHGSVVSGPQDHAQPSSSSIRELPPGNPISRKLAPELAGDVFQILEFLGRFAEIIGLKELPSIEQVEDELIDPWPMHPNKNDIHNYMDHNPPMNSPANVSSSYSNGESGITSIEEMVYVSIPVETSSAREAAQNKLAAQTLGRCSGLVLPEIHIALLKVLFTELVSRVAIFVDPSIDLKESKSRRGRKRDTDTLTRELKIDMLTANNLTWPELARRYILAVSSMSGCMDLSDISSREGVKLFRCLQGDGGILCGALPGVVGMEKDASLLAEAETLICNSSANEGNTVFMMDYKDTDIVDSPEEPASDTTLPDWVKSLEPVRKLPTNVGTRIRKCVYEALERKPPEWARKILEHSISKEVYKGNASGPTKKAVLSVLTEACRTKVPQNTEKPRKERNIISISEAVLKKCRIALRRAISSDESKQFANLLGTTLTNSNENEDEGILGFPGMVSRPLDFRTIDIRLAKGAYRGSWEAFLDDVQEVICNLQTAFADRPEVLIMVVALSESFESLYKTEVQDLVEKFDRYLSNENDSSEIHQELQDALTAANNKLPKAPWEDGVCKVCGIDRDDESVLLCDNCDSEYHTYCLNPPLARIPLGNWYCPSCTAQTHVAVQEQKKCLGEEAHVFIEKLNKLAVAMDEKEYWELTVAERIYLLKFLCDELHNTALIREHLDQCSDKSNDLQQKLRHLNYELKELRYRVEIKNPYATQSRWMKNDQVSNSSGLVENQQRAMPTASEHLEEAEQVNVGVNLNNPAEGVPAALLDVGKPCSTDNGISSTSVIEGNKSLGLSEQPSKIITDQTDRDSIAEGSNSCEKSLVGKSGTCDPNVGETHAATVINAPNGDLPDENAMTLSQDNIETSTSKLVDHDADMNESNNLLERISQLHGSISTVESQLSMASLRGECLGRDSVGRLYWVTGRPCKRPRLVADGSMMIPKDRDISMVTSHSQSTFDRGWNSASLVIYESDEEMKCLVDWLRDIDPREKDLKDSILHWQKSIYRQASFPITDPPVSKFSKSEPLMELPNTNAFIVLEQKYGLQTDQDTSELSKRRGTKSRSGSEERVYRCDCLEPIWPSRHHCLNCHETYLTLMEYEGHNGGKCTSSNDCPNESKEIDEPKLKGSKSDIKEKDPVVHNCSVEPSNSGKLESCPYDFEEICRKFTTNDSIKETVKEIGLLGSNGIPSCECQAVSAKMSGQEGSQVGQDFSGNAGDEELPKSKKPVRDSTSAKEAPSTDISTRLLTVNGGLVPESSLMPVIGRNFHILKQLKINLLDIEAALPEEAFRASKSQQIRRRSWRAFVKDAELISYVVLAINFLQSMIKAEFLKKDWWYWSSFTAAIKTTTVSSLALRIYTLDDCIMYTKDPAPNLQPADNARSGNKGKRKKDIDS

SEQ ID NO: 179437 - protein, 1682 aa, Zea Mays
MQFMPAFDLAQCFGMRQNFTSMDQDLIADGNVPQRSAHLRRRRDLPQTSTLPKVAVNHELGSAGTSMDPSFFNNTIKQSPSENRSSLKPPIFLMENSNHQPHHHTVALPVQYSDFFITSLGEIDNRTSYHNSYQIWPVGFTSYWHDRVTGSLFECEVHDGGNFGPLFKMRRLPCSAFQLPDASTTVCLNVVRNADTIETKEGSDLIEDTANDANDNISMLLSDFSETNQDFLSCLGNDLEGKESLGCSNVETKDMTVPDVLSDPGSFSWAPTNDANMYDKIGDFSYEGTSPSSVWRMISCAMMEACEKMYKEHGHLVLFCTHSSEKSPFDYESGPQRTDGPFNLLAKFCSSNGPKVPQFIEKENDVQSTCALLKEWLYPDRIGFDLEFVQEFVESLPKSGACSHYQFLCNRTGINSSLTIASGTLVAVNKNSPMHARHGSVVSGPQDHAQPSSSSIRELPPGNPISRKLAPELAGDVFQILEFLGRFAEIIGLKELPSIEQVEDELIDPWPMHPNKNDIHNYMDHNPPMNSPANVSSSYSNGESGDGGILCGALPGVVGMEKDASLLAEAETLICNSSANEGNTVFMMDYKDTDIVDSPEEPASDTTLPDWVKSLEPVRKLPTNVGTRIRKCVYEALERKPPEWARKILEHSISKEVYKGNASGPTKKAVLSVLTEACRTKVPQNTEKPRKERNIISISEAVLKKCRIALRRAISSDESKQFANLLGTTLTNSNENEDEGILGFPGMVSRPLDFRTIDIRLAKGAYRGSWEAFLDDVQEVICNLQTAFADRPEVLIMVVALSESFESLYKTEVQDLVEKFDRYLSNENDSSEIHQELQDALTAANNKLPKAPWEDGVCKVCGIDRDDESVLLCDNCDSEYHTYCLNPPLARIPLGNWYCPSCTAQTHVAVQEQKKCLGEEAHVFIEKLNKLAVAMDEKEYWELTVAERIYLLKFLCDELHNTALIREHLDQCSDKSNDLQQKLRHLNYELKELRYRVEIKNPYATQSRWMKNDQVSNSSGLVENQQRAMPTASEHLEEAEQVNVGVNLNNPAEGVPAALLDVGKPCSTDNGISSTSVIEGNKSLGLSEQPSKIITDQTDRDSIAEGSNSCEKSLVGKSGTCDPNVGETHAATVINAPNGDLPDENAMTLSQDNIETSTSKLVDHDADMNESNNLLERISQLHGSISTVESQLSMASLRGECLGRDSVGRLYWVTGRPCKRPRLVADGSMMIPKDRDISMVTSHSQSTFDRGWNSASLVIYESDEEMKCLVDWLRDIDPREKDLKDSILHWQKSIYRQASFPITDPPVSKFSKSEPLMELPNTNAFIVLEQKYGLQTDQDTSELSKRRGTKSRSGSEERVYRCDCLEPIWPSRHHCLNCHETYLTLMEYEGHNGGKCTSSNDCPNESKEIDEPKLKGSKSDIKEKDPVVHNCSVEPSNSGKLESCPYDFEEICRKFTTNDSIKETVKEIGLLGSNGIPSCECQAVSAKMSGQEGSQVGQDFSGNAGDEELPKSKKPVRDSTSAKEAPSTDISTRLLTVNGGLVPESSLMPVIGRNFHILKQLKINLLDIEAALPEEAFRASKSQQIRRRSWRAFVKDAELISYVVLAINFLQSMIKAEFLKKDWWYWSSFTAAIKTTTVSSLALRIYTLDDCIMYTKDPAPNLQPADNARSGNKGKRKKDIDS

SEQ ID NO: 179438 - protein, 2095 aa, Zea Mays
MDRPPHLVIDLNEAPPPPSSDTPPAQAPSPPQELAPPVQAPPPPPPPPPPPQFPPLLPPQLPLGAPNQQVRLQQEALDVVLRVHRPLELRNTPFGPIGNVPAGLLPGLGLPLLPLQPPAPHPGEAGWGNPPAPCSSCGRQEILGGTLVCDACDRGFHPNCVRVWPPLFPPPPPPGPPGARRPRAAANEDWICPACERRGARSTRWKLGAVELDINAAPPEDPVTVIANDIRRQNITDGPQLTVANLPHFEGGHLQNTTLYDGMQFMPAFDLAQCFGMRQNFTSMDQDLIADGNVPQRSAHLRRRRDLPQTSTLPKVAVNHELGSAGTSMDPSFFNNTIKQSPSENRSSLKPPIFLMENSNHQPHHHTVALPVQYSDFFITSLGEIDNRTSYHNSYQIWPVGFTSYWHDRVTGSLFECEVHDGGNFGPLFKMRRLPCSAFQLPDASTTVCLNVVRNADTIETKEGSDLIEDTANDANDNISMLLSDFSETNQDFLSCLGNDLEGKESLGCSNVETKDMTVPDVLSDPGSFSWAPTNDANMYDKIGDFSYEGTSPSSVWRMISCAMMEACEKMYKEHGHLVLFCTHSSEKSPFDYESGPQRTDGPFNLLAKFCSSNGPKVPQFIEKENDVQSTCALLKEWLYPDRIGFDLEFVQEFVESLPKSGACSHYQFLCNRTGINSSLTIASGTLVAVNKNSPMHARHGSVVSGPQDHAQPSSSSIRELPPGNPISRKLAPELAGDVFQILEFLGRFAEIIGLKELPSIEQVEDELIDPWPMHPNKNDIHNYMDHNPPMNSPANVSSSYSNGESAREAAQNKLAAQTLGRCSGLVLPEIHIALLKVLFTELVSRVAIFVDPSIDLKESKSRRGRKRDTDTLTRELKIDMLTANNLTWPELARRYILAVSSMSGCMDLSDISSREGVKLFRCLQGDGGILCGALPGVVGMEKDASLLAEAETLICNSSANEGNTVFMMDYKDTDIVDSPEEPASDTTLPDWVKSLEPVRKLPTNVGTRIRKCVYEALERKPPEWARKILEHSISKEVYKGNASGPTKKAVLSVLTEACRTKVPQNTEKPRKERNIISISEAVLKKCRIALRRAISSDESKQFANLLGTTLTNSNENEDEGILGFPGMVSRPLDFRTIDIRLAKGAYRGSWEAFLDDVQEVICNLQTAFADRPEVLIMVVALSESFESLYKTEVQDLVEKFDRYLSNENDSSEIHQELQDALTAANNKLPKAPWEDGVCKVCGIDRDDESVLLCDNCDSEYHTYCLNPPLARIPLGNWYCPSCTAQTHVAVQEQKKCLGEEAHVFIEKLNKLAVAMDEKEYWELTVAERIYLLKFLCDELHNTALIREHLDQCSDKSNDLQQKLRHLNYELKELRYRVEIKNPYATQSRWMKNDQVSNSSGLVENQQRAMPTASEHLEEAEQVNVGVNLNNPAEGVPAALLDVGKPCSTDNGISSTSVIEGNKSLGLSEQPSKIITDQTDRDSIAEGSNSCEKSLVGKSGTCDPNVGETHAATVINAPNGDLPDENAMTLSQDNIETSTSKLVDHDADMNESNNLLERISQLHGSISTVESQLSMASLRGECLGRDSVGRLYWVTGRPCKRPRLVADGSMMIPKDRDISMVTSHSQSTFDRGWNSASLVIYESDEEMKCLVDWLRDIDPREKDLKDSILHWQKSIYRQASFPITDPPVSKFSKSEPLMELPNTNAFIVLEQKYGLQTDQDTSELSKRRGTKSRSGSEERVYRCDCLEPIWPSRHHCLNCHETYLTLMEYEGHNGGKCTSSNDCPNESKEIDEPKLKGSKSDIKEKDPVVHNCSVEPSNSGKLESCPYDFEEICRKFTTNDSIKETVKEIGLLGSNGIPSCVPSPAYFLDPPVLLNESKRNDDKPNDWTSSLQECQAVSAKMSGQEGSQVGQDFSGNAGDEELPKSKKPVRDSTSAKEAPSTDISTRLLTVNGGLVPESSLMPVIGRNFHILKQLKINLLDIEAALPEEAFRASKSQQIRRRSWRAFVKDAELISYVVLAINFLQSMIKAEFLKKDWWYWSSFTAAIKTTTVSSLALRIYTLDDCIMYTKDPAPNLQPADNARSGNKGKRKKDIDS

SEQ ID NO: 179439 - protein, 97 aa, Zea Mays
MPPRSSSPPPLALIPLLAAGRGQAMALGVHGSDEVHQRCHRLTCARFRGLCVILAPHNPLLLRPRRHLDDDVTRTSASRAMRCCSSGQCRDWKTMPP

SEQ ID NO: 179440 - protein, 450 aa, Zea Mays
MAYGSSRFLIFFSLSKIHIKWAQVGPTDLGQARPNPTFPVSQKPTGRRPGGPHPVVTPTDPSQEPLPPLPASCFFPMAGIAGDDPFGFDSDSDSGDDGPVCYDPFEDCDGDGDEDEDAGLVGGHFALSYGGGGQYRISDFAFRGGEGDGGDVLVGQRQGPLSSHDEPILETLGRSFDSDGGLSQFYPHLFPASQLVEDTSGEEEEEEEMISRNALGGVGSEFERGAVDEETADDDEDGIVLMLNGFTLDSGPPVGGFQGPVDAVEEATSDDDVGEVGGLMLSGFDLRAPAPHATRPFRMVVGGEDTDSDDADLNLVDALARRVREATRRLPASRAVVDGLPEVALSDQEASHGCAVCKDAVVAGQSVLRLPCNHYFHGECIRPWLAIRNTCPVCRFQLPTGDAAEYDSPRSTTGGVVVSVPQQHSAPAQHRGRSQDFLSNMVPMLFPVCI

SEQ ID NO: 179441 - protein, 206 aa, Zea Mays
MQALLLPARAAPPPPAILRQRAVSASTCASQGCRLLLGASGCLSCGVRSRLRLTVVAASSSSSGPLYPTPPPTEEEVERVKLEQVMRRLEKTARYFKNLGTLGFWSQLVCTIVSAGILAFSTVVTGKVTAPFTFYATAAGIAAAFISSFWSFGYIRLSERLRRTSKEPAKASANTILSHFLGLASSLELLRSVSLPPAEAAAPAGA

SEQ ID NO: 179442 - protein, 329 aa, Zea Mays
MQALLLPARAAPPPPAILRQRAVSASTCASQGCRLLLGASGCLSCGVRSRLRLTVVAASSSSSGPLYPTPPPTEEEVERVKLEQVMRRLEKTARYFKNLGTLGFWSQLVCTIVSAGILAFSTVVTGKVTAPFTFYATAAGIAAAFISSFWSFGYIRLSERLRRTSKEPAKPEKWHCAEYSRDGRRCSGHASHRWCFGSKSSHNLCSSLLSGCCSRPKPCVGLRCFPSSGFSEHHPVAFPRAGELPGAAALGVAASSRSCRPCRGLSHGPWAAGSRKNLRSLGGGGSGRRRRSRCCCSGLCVQLASSLVHTTHTSMPCPSVQLEPTCLSA

SEQ ID NO: 179443 - protein, 236 aa, Zea Mays
MQALLLPARAAPPPPAILRQRAVSASTCASQGCRLLLGASGCLSCGVMRRLEKTARYFKNLGTLGFWSQLVCTIVSAGILAFSTVVTGKVTAPFTFYATAAGIAAAFISSFWSFGYIRLSERLRRTSKEPAKAPPRADVVNSLKNGIVLNILGMGAAVLGMQATVGALVAKALTTSAVPYYQAAAPGQSPVLALDVFLVQASANTILSHFLGLASSLELLRSVSLPPAEAAAPAGA

SEQ ID NO: 179444 - protein, 317 aa, Zea Mays
MEIFRPQKEHGLAQSGLKGKFKITTRCLWLDNGRLLDALYKAAHAALSSCPVNCPLSHMERMVAEILRKMVRKYSGKRPDVIAVAMENTTASFSEHLDAKSSGNFGPSSATSHLSMSPAMSLEGSYKTHPDNPEVEAEETLPEAARTAPDDATTSSNGEAFFSSDLHQPKTLEHFWESFKSPTAVKIARIVNGGKKQNLGKIGIMGKDSSIQSAPAPAKSSKKNKWKPEEIKSLIQMRGEMNERFQSVKGRMILWEEISDNMLKQGISRTPAQCKSLWTSLVQKYEESKDAESMKTWPYFLAMDRILSQQGEMATKG

SEQ ID NO: 179445 - protein, 563 aa, Zea Mays
MELIKKRLKEFGIFLSSRLKVLRIKKRFQAGPFEVEPIRVTHSIPDCCGLVLRCGDGIIFHTGDWKIDESPVDGKNFDRQALEELSKEGVTLMMSDSTNVLSPGRSISESVVAGSLLRHISEAKGRVITTQFASNIHRIGSIKAAADLTGRKMVFVGMSLRTYLEAAFKDGKAPLDPSTLIKVEDMDAYAPKDLLVVTTGSQGEPRAALNLASYGGSHALKLSKEDVLLYSAKVIPGNETRVMKMMNRLTDLGPKIIMGKDSGLHTSGHAYREELEEVLRIVKPQHFLPVHGELLFLKEHESLGRSTGIRHTTVIKNGEMLGVSHLRNRRVLSNGFVSLGKEDLQLMYSDGDKAFGTSTDLCIDERLRIASDGIIFVSMEIFRPQKEHGLAQSGLKGKFKITTRCLWLDNGRLLDALYKAAHAALSSCPVNCPLSHMERMVAEILRKMVRKYSGKRPDVIAVAMENTTASFSEHLDAKSSGNFGPSSATSHLSMSPAMSLEGSYKTHPDNPEVEAEETLPEAARTAPDDATTSSNAVKIARIVNGGKKQNLGKIGIMDAWRDE

SEQ ID NO: 179446 - protein, 538 aa, Zea Mays
MSLRTYLEAAFKDGKAPLDPSTLIKVEDMDAYAPKDLLVVTTGSQGEPRAALNLASYGGSHALKLSKEDVLLYSAKVIPGNETRVMKMMNRLTDLGPKIIMGKDSGLHTSGHAYREELEEVLRIVKPQHFLPVHGELLFLKEHESLGRSTGIRHTTVIKNGEMLGVSHLRNRRVLSNGFVSLGKEDLQLMYSDGDKAFGTSTDLCIDERLRIASDGIIFVSMEIFRPQKEHGLAQSGLKGKFKITTRCLWLDNGRLLDALYKAAHAALSSCPVNCPLSHMERMVAEILRKMVRKYSGKRPDVIAVAMENTTASFSEHLDAKSSGNFGPSSATSHLSMSPAMSLEGSYKTHPDNPEVEAEETLPEAARTAPDDATTSSNGEAFFSSDLHQPKTLEHFWESFKSPTAVKIARIVNGGKKQNLGKIGIMGKDSSIQSAPAPAKSSKKNKWKPEEIKSLIQMRGEMNERFQSVKGRMILWEEISDNMLKQGISRTPAQCKSLWTSLVQKYEESKDAESMKTWPYFLAMDRILSQQGEMATKG

SEQ ID NO: 179447 - protein, 382 aa, Zea Mays
MAGRLTGAAASSPLSRALLLLAALGLFSISFLSLRSLRPAADPALAAAADKSRPLLRLHSSSTVYHSPEAFAVGYAEMERSFKVYIYPDGDPKTFYQTPRKLTGKYASEGYFFQNIRESRFRTDDPDQAHLFFVPISPHKMRGKGTSYENMTVIVKDYVEGLINKYPYWNRTLGADHFFVTCHDVGVRAFEGLKFMVKNSIRVVCSPSYNVDFIPHKDIALPQVLQPFALHEGGNDIDNRVILGFWAGHRNSKIRVILARVWENDTELAISNNRISRAIGELVYQKQFYRTKFCICPGGSQVNSARISDSIHYGCVPVILRERDVYQLKNILKSISQEEFISLHKSLVQVQKHFVWHSPPVSYDAFHMVMYELWLRHNVIKY

SEQ ID NO: 179448 - protein, 192 aa, Zea Mays
MDSGSDSDGAPEELTAVQGVEKHEEISQVEKDSAIRVTREGKERRKRWAQRRTSSKPDKKAPKEVVEDEGTKQSEETDTMPGMLPTSVIEILAAREKQTFASDSEEENVKQKVQKRKKRMKTAGPETILLKDVRSTQHVKNALDFLEQRKKQVPRSNAVLKNASKALRLLSSKADMVEILWTDVFEWNRSGT

SEQ ID NO: 179449 - protein, 138 aa, Zea Mays
MKLILRTKMMESPMMIMMMKETMMMLKTRRKMMVVMRDQMTMRMRKMTMEMMMILQPMAKGEAMTTKMMVERMKRMMTTTTMMGTMAMRKRRKNLKRMMMMMKSPNHLLKRGNDQRLRRVVAYTQECCLFVPAQQFTV

SEQ ID NO: 179450 - protein, 144 aa, Zea Mays
MPHPKAQILHNEIFTSGGDQNLITRILGKSEDETNPENKDDGESDDDNDDEGDDDDAENEEEDDGGDEGSDDNENEEDDDGDDDDPAANGEGGSDDDEDDGGEDEEDDDDDDDDGDDGNEEEEEESEEDDDDDEVPQPPTKKRK

SEQ ID NO: 179451 - protein, 221 aa, Zea Mays
MSCGRSVAPTCSERKGSAPHESATNQRAHRQIRRKTGMSPREQGVLHAPTTTRAIAPGDKKGRPKMTGLPPVKRSAPSGSGPQGQLWPLAKWRTWRHGSRGGRAQLRPHRTPPTLITTCPNYPSSEYARVNHRRINEFIRKTHADGDTVKKKKLQNSFFFFSVSLPFPCPNHHEEKKLGVRVKKTCRARNSRDDVEVEASSVTGPYGSVDLRLRGKEFRGG

SEQ ID NO: 179452 - protein, 84 aa, Zea Mays
MSAEIAQLLLTHAYQACLSAEDANSNSADTPEKVGATLQEISSNFIAAFQNIRKVSPDIQISPFEKEALFTAATLVRKLKSKER

SEQ ID NO: 179453 - protein, 96 aa, Zea Mays
MHGAGVTVCVLCMCVHGAPLLLLRVVEREREKKTHIKKSALIPHVYFALRSVVLSLFMHVMAGREGQTWRHVCQRCANGGAFFSLLDPDLTTKFDV

SEQ ID NO: 179454 - protein, 53 aa, Zea Mays
MKWSSACCFVRFMYITMWICNSPNTMYIPPAVVPMSLSLRTTPNVGLDPVILF

SEQ ID NO: 179455 - protein, 665 aa, Zea Mays
MAYGDRVTTFEDSEKESEYGYVRKIWLPAGSRLGIWVVLAVTVVDLLGVAGLVQVVLACWDLASIGGQVSGPVVVADGMGGAAMYELVRVGHDNLIGEIIRLEGDSATIQVYEETAGLMVNDPVLRTRKPLSVELGPGILGNIFDGIQRPLKTIAIKSGDVYIPRGVSVPALDKDVLWEFQPTKLGVGDVITGGDLYATVFENTLMQHHVALPPGSMGKISYIAPAGQYNLQDTVLELEFQGIKKKFTMLQTWPVRSPRPVASKLAADTPLLTGQRVLDALFPSVLGGTCAIPGAFGCGKTVISQALSKYSNSEAVVYVGCGERGNEMAEVLMDFPQLTMTLPDGREESVMKRTTLVANTSNMPVAAREASIYTGITIAEYFRDMGYNVSMMADSTSRWAEALREISGRLAEMPADSGYPAYLAARLASFYERAGKVKCLGSPDRNGSVTIVGAVSPPGGDFSDPVTSATLSIVQVFWGLDKKLAQRKHFPSVNWLISYSKYSKALESFYEKFDPDFIDIRTKAREVLQREDDLNEIVQLVGKDALAESDKITLETAKLLREDYLAQNAFTPYDKFCPFYKSVWMMRNIIHFNTLANQAVERAAGTDGHKITYSVIKHRLGDLFYRLVSQKFEDPAEGEEALVGKFKKLYDDLTTGFRNLEDEAR

SEQ ID NO: 179456 - protein, 101 aa, Zea Mays
MSIAASKFDGAPDLQRALSLLSVGACGLPDPVHQTSCVIQFTSASENSGDLHLSHGANSGLASCGDGQHIASQPQAQLVRFTMDTSNSVYEPSFFSVNQIN

SEQ ID NO: 179457 - protein, 158 aa, Zea Mays
MEWTAPKRAASPPSPPLLWDWGGDHAGATGSGSGSSGDAPARRGGREREAKRARADDGEVRCQVEGCGLDLSRVKEYHRKHRVCEAHTKSPRVVVAGQERRFCQQCSRFHALSEFDQKKRSCRRRLSDHNARRRKPQPDAFAFASARLPSSSFASARC

SEQ ID NO: 179458 - protein, 307 aa, Zea Mays
MAMAMMAMRRAVALGARHIPAAAASSFRVVSLRHMSADAGAAMEKIRAAGLLRTQGLIAGQWVDAYDGKTIEVQNPATGEVLANVSCMGSRETSDAIASAHSTFYSWSKLTASERSKALRKWYDLIISHKEELALLMTLEQGKPMKEALGEVNYGASFIEYFAEEAKRIYGDIIPPTLSDRRLLVLKQPVGVVGAITPWNFPLAMITRKVGPALACGCTVVVKPSEFTPLTALAAADLALQAGIPAGALNVVMGNAAEIGDALLQSTQKDYIHWINSCWEKTDGWICKYCEKGLLGTWWECTLHCFR

SEQ ID NO: 179459 - protein, 537 aa, Zea Mays
MAMAMMAMRRAVALGARHIPAAAASSFRVVSLRHMSADAGAAMEKIRAAGLLRTQGLIAGQWVDAYDGKTIEVQNPATGEVLANVSCMGSRETSDAIASAHSTFYSWSKLTASERSKALRKWYDLIISHKEELALLMTLEQGKPMKEALGEVNYGASFIEYFAEEAKRIYGDIIPPTLSDRRLLVLKQPVGVVGAITPWNFPLAMITRKVGPALACGCTVVVKPSEFTPLTALAAADLALQAGIPAGALNVVMGNAAEIGDALLQSTQVRKITFTGSTAVGKKLMAGSANTVKKVSLELGGNAPCIVFDDADIDVAVKGSLAAKFRNSGQTCVCANRILVQEGIYEKFAKAFIQAVQSLKVGNGLEESTSQGPLINEAAVQKVEKFINDATSKGANVMLGGKRHSLGMSFYEPTVVGNVSNDMLLFREEVFGPVAPLIPFKTEEEAVHMANDTNAGLAAYIFTKSIPRSWRVSESLEYGLVGVNEGIISTEVAPFGGVKQSGLGREGSKYGIDEYLEVLLQRSSSSWCPRTIELTKV

SEQ ID NO: 179460 - protein, 391 aa, Zea Mays
MVRTFTRCSERTISKLEELTESEGREQNSTIVDLEAEFSNLALDIIGLGVFNFDFDSVTKESPVIKAVYGTLFEAEHRSTFYIPYWNLPLTKWIVPRQRKFHSDLKVINNCLDNLIKNAKETRQEADVEKLQQRDYSSLKDASLLRFLVDMRGADADDRQLRDDLMTMLIAGHETTAAVLTWSVFLLAQSPTRMRKAQAEVDSVLSNGAITVESLKKLEYIKLIILEALRLYPQPPLLIRRSLRPDKLPGGCNGAKEGYEIPAGTDIFVSVYNLHRSPYFWDRPNEFEPERFSVPKKDESIEGWSGFDPDRSPGAMYPNEIIADFAFLPFGGGPRKCVGDQFALLESTVALALLLRKFDVELRGSPDEVEMVTGATIHTKNGLWCRLRRRT

SEQ ID NO: 179461 - protein, 324 aa, Zea Mays
MAAATLLQGPAAASPRLGAAASAPSASHGRRRLTFSFRCQSTSVDKQQERPPKPKQRNLLDNASNLLTNFLSGGNLGAMPVAEGAVTDLFGKPLFFSLYDWFLEHGSVYKLAFGPKSFVVVSDPIVARHILRENAFYYDKGVLAEILKPIMGKGLIPADLDTWKQRRKVITPGFHALFIEAMVRTFTRCSERTISKLEELTESEGREQNSTIVDLEAEFSNLALDIIGLGVFNFDFDSVTKESPVIKAVYGTLFEAEHRSTFYIPYWNLPLTKWIVPRQRKFHSDLKVINNCLDNLIKNAKETRQEADVEKLQQRDYSSLKGFW

SEQ ID NO: 179462 - protein, 212 aa, Zea Mays
MGKGLIPADLDTWKQRRKVITPGFHALFIEAMVRTFTRCSERTISKLEELTESEGREQNSTIVDLEAEFSNLALDIIGLGVFNFDFDSVTKESPVIKAVYGTLFEAEHRSTFYIPYWNLPLTKWIVPRQRKFHSDLKVINNCLDNLIKNAKETRQEADVEKLQQRDYSSLKDASLLRFLVDMRGADADDRQLRDDLMTMLIAGHETTAAVLT

SEQ ID NO: 179463 - protein, 494 aa, Zea Mays
MPVAEGAVTDLFGKPLFFSLYDWFLEHGSVYKLAFGPKSFVVVSDPIVARHILRENAFYYDKGVLAEILKPIMGKGLIPADLDTWKQRRKVITPGFHALFIEAMVRTFTRCSERTISKLEELTESEGREQNSTIVDLEAEFSNLALDIIGLGVFNFDFDSVTKESPVIKAVYGTLFEAEHRSTFYIPYWNLPLTKWIVPRQRKFHSDLKVINNCLDNLIKNAKETRQEADVEKLQQRDYSSLKDASLLRFLVDMRGADADDRQLRDDLMTMLIAGHETTAAVLTWSVFLLAQSPTRMRKAQAEVDSVLSNGAITVESLKKLEYIKLIILEALRLYPQPPLLIRRSLRPDKLPGGCNGAKEGYEIPAGTDIFVSVYNLHRSPYFWDRPNEFEPERFSVPKKDESIEGWSGFDPDRSPGAMYPNEIIADFAFLPFGGGPRKCVGDQFALLESTVALALLLRKFDVELRGSPDEVEMVTGATIHTKNGLWCRLRRRT

SEQ ID NO: 179464 - protein, 69 aa, Zea Mays
MCPPSAIALANPSRVRRHRKRWMRSCVGIRRGHMSRENSCALDRPPANVTRPVPCVVQVDQRHRAPNFL

SEQ ID NO: 179465 - protein, 112 aa, Zea Mays
MLGSRCNAVTLMVLNLAATPIELSLIVPFLRLGEAVTGSGHFPLTADALKNVLTGHASKDVLMSIVHAMLGWLIAAPIVLVVLYAVSFPCFKVLVNRFGGIPSSPRTPIKAV

SEQ ID NO: 179466 - protein, 322 aa, Zea Mays
MARYLLAPTSTSSSTFLPKDGVKNSPTSRPLRLRALGSRTSKARHIMAVASEQAAPPARYPKVAAPTTGPIPAAELLGVIEAAAKAGADVIMEAVNKPRNIHYKGVADLVTDTDKLSESVILEVVTKNFKDHLILGEEGGLVGDSLSEYLWCIDPLDGTTNFAHGYPSFSVSISVLFRGKPAASTVVEFCGGPMCWSTRTISASAGGGAYCNGQKIHVSQTDKVEQSLLVTGFGYEHDDAWTTNMNLFKEFTDISRIVEEAGGVVTRMDGGEFTVFDRSVLVSNGLVHGQLLDRIGPPTEDLKKKGIDFSLWFKPDKYPTDF

SEQ ID NO: 179467 - protein, 348 aa, Zea Mays
MARYLLAPTSTSSSTFLPKDGVKNSPTSRPLRLRALGSRTSKARHIMAVASEQAAPPARYPKVAAPTTGPIPAAELLGVIEAAAKAGADVIMEAVNKPRNIHYKGVADLVTDTDKLSESVILEVVTKNFKDHLILGEEGGLVGDSLSEYLWCIDPLDGTTNFAHGYPSFSVSISVLFRGKPAASTVVEFCGGPMCWSTRTISASAGGGAYCNGQKIHVSQTDKVEQSLLVTGFGYEHDDAWTTNMNLFKEFTDISRGVRRLGSAAADMSHIGLGITEAYWEYRLKPWDMAAGVLVVIVTLSPMGILTFNKYFSKSVLINNHEYIRTKYRPFFFALPNLTSIRYYLLLI

SEQ ID NO: 179468 - protein, 139 aa, Zea Mays
MSHNPDCVCRCFGYEHDDAWTTNMNLFKEFTDISRGVRRLGSAAADMSHIGLGITEAYWEYRLKPWDMAAGVLIVEEAGGVVTRMDGGEFTVFDRSVLVSNGLVHGQLLDRIGPPTEDLKKKGIDFSLWFKPDKYPTDF

SEQ ID NO: 179469 - protein, 175 aa, Zea Mays
MARYLLAPTSTSSSTFLPKDGVKNSPTSRPLRLRALGSRTSKARHIMAVASEQAAPPARYPKVAAPTTGPIPAAELLGVIEAAAKAGADVIMEAVNKPRNIHYKGVADLVTDTDKLSESVILEVVTKNFKDHLILGEEGGLVGDSLSEYLWCIDPLGLVPCSVPTSDLTNIYLTL

SEQ ID NO: 179470 - protein, 167 aa, Zea Mays
MCWSTRTISASAGGGAYCNGQKIHVSQTDKVEQSLLVTGFGYEHDDAWTTNMNLFKEFTDISRGVRRLGSAAADMSHIGLGITEAYWEYRLKPWDMAAGVLIVEEAGGVVTRMDGGEFTVFDRSVLVSNGLVHGQLLDRIGPPTEDLKKKGIDFSLWFKPDKYPTDF

SEQ ID NO: 179471 - protein, 320 aa, Zea Mays
MRCERLRDPVFSSTAGNDSPLALAQAHETREKLKATHSELAEERAIEIVIIKTTGDMILDKPLADIGGKGLFTKEIDDALLQGRIDIAVHSMKDVPTYLPEGTILPCNLPREDVRDAFICLTANSLAELPAGSVIGSASLRRQSQILYRYPSLKVVNFRGNVQTRLRKLKEGDVSATLLALAGLRRLNMAENATAVLSVEEMLPAVAQGAIGIACRSNDDKMMEYLSALNHEDTRLAVACEREFLAVLDGNCRTPIAAYAYRDNDGNCSFRGLLSSPDGSKVFETTRSGPYSFDDMVEMGKDAGHELKAKAGPGFFDSLQ

SEQ ID NO: 179472 - protein, 330 aa, Zea Mays
MVSLRCTTAHHSLLGSPTCLARPRRRACPVVRAAVAVEAGAQAKVSLIRIGTRGSPLALAQAHETREKLKATHSELAEERAIEIVIIKTTGDMILDKPLADIGGKGLFTKEIDDALLQGRIDIAVHSMKDVPTYLPEELPAGSVIGSASLRRQSQILYRYPSLKVVNFRGNVQTRLRKLKEGDVSATLLALAGLRRLNMAENATAVLSVEEMLPAVAQGAIGIACRSNDDKMMEYLSALNHEDTRLAVACEREFLAVLDGNCRTPIAAYAYRDNDGNCSFRGLLSSPDGSKVFETTRSGPYSFDDMVEMGKDAGHELKAKAGPGFFDSLQ

SEQ ID NO: 179473 - protein, 383 aa, Zea Mays
MAQDDPVVSAQWLHEHLGMPDVKKVQRYTSSIPCVTGFGCFLVHAGREQGSMERISDGIVDRTTDLPHMLPSEEAFAAAISELDIKNQDKVIVYDGKGFFSAPRVWWMFRVFGHKKVWVLDGGLPQWQASGFNVEKASPDDDAVLKSIAANRAVKRVYNGEQTNTISFQTEFQPNLFWALEKVAQNVTAKTYQQIDARAKGRFDGVAPEPREGVRSGHIPGSVCVPFPEMFDGAPPSLLLPADELRRKFQHAGISLDRPIVVTCGSGVTACILALGLYRIGKRDVPVYDGSWTEWEGQSDSDYPKVTAPGGYRGTVLPSSRCATIVVAQWARCLKGWSTACAGADKQAGEEWSSGDGERRDERDAHGRQGGRGALSAARGWST

SEQ ID NO: 179474 - protein, 391 aa, Zea Mays
MGCFSTFCKKRRATRQPSSHHNEDVPGCSNITKYTYKELVRATNNFNPLNKIGEGGFGSVYKLRNGTVIAVKVLSSESRQGVREFLNELVAISDISHDNLVKLYGYCAEGDQRILVYNHLENNSLAQTLLGSSHSNIQFDWKTRVNICLGIARGLAYLHHGVSPHIVHRDIKASNILLDRDLTPKISDFGLAKLLPPNATHVSTRVAGTLGYLAPEYAIRGQVTRKSDVYSFGVLLLEIVCGRSNSDTRLAYGDQILLEKTWMHYEQGSLERIIDRSLGGGDLDVAQACRFLKVGLLCTQDVTRHRPDMPRVVAMLTGEWDVEPETVSKPAIISDFMDLKVRSTRKASDNVATPPTSSSTFLSSLMAHSSPLLSNESTQASMAFTGVSDRE

SEQ ID NO: 179475 - protein, 913 aa, Zea Mays
MKLSPSASGGLQDQPASPEAEEHKCLNSELWHACAGPLVSLPSVGSRVVYFPQGHGEQVAASTNKEMEAQIPNYPSLPPQLICQLHNVTMHADAETDEVYAQMTLQPLSPQELKDPFLPAELGTASNQPTNYFCKTLTASDTSTHGGFSVPRRAAEKVFPPLDFNQQPPAQELIAKDLHGNDWKFRHIFRGQPKRHLLTTGWSVFVSAKRLVAGDSVLFIWNDNNQLLLGIRRANRPQTVMPSSVLSSDSMHIGLLAAAAHAASTNSRFTIFYNPRASPCEFVIPMAKYVKAVYHTRISVGMRFRMLFETEESSVRRYMGTITGISDLDPVRWPNSHWRSVKVGWDESTAGEKQPRVSLWEIEPLTTFPMYPSPFALGLKRPWPAGLPSLYGGRGDGLTSSLMWLRDRANPGFQSLNFSGLGMSPWMQPRLDNSLLGLQSDMYQTIAAAAALQSTTKQVPPSAMQFQQPQNIADRSALLSSQILQQVQPRFQQIYPQNLNENKIQGHTQPEYLQVQQQLQRCQSFNEQKPPMHPQQQQQEPQQQQCVQTPQDQQMQEQKHLHNFHSLPDALSAFSQLSPATHSPPSALQTVPAFSHQQNFPDTNISSLSPSTGPSMHGMLGRLPSEAASSLPCVAMNAPVSVSDPWSSKRVAVESVNPCRPHVSPHIEHLDMATCNMPQSSALAPLPGRECLVDEDGCSDPQNHLLFGVHIDSHSLLMQGGIPALQNDNSSGTIPYSTSNFLSPSENDFPLNQPLRSAGCLDESDYLPCAENAEQANQQFATFVKVYKSGTVGRLLDITRFSSYDELRSEVGRLFGLEGQLEDPLRSGWQLVFVDREDDVLLVGDDPWQEFVNSVSCIKILSPEEVQRMGKPGIQLLSSAPSRRLGNGCDSYASMQEPRGLDAGMAPVGSVEF

SEQ ID NO: 179476 - protein, 515 aa, Zea Mays
MACRPAFFIRANPGFQSLNFSGLGMSPWMQPRLDNSLLGLQSDMYQTIAAAAALQSTTKQVPPSAMQFQQPQNIADRSALLSSQILQQVQPRFQQIYPQNLNENKIQGHTQPEYLQVQQQLQRCQSFNEQKPPMHPQQQQQEPQQQQCVQTPQDQQMQEQKHLHNFHSLPDALSAFSQLSPATHSPPSALQTVPAFSHQQNFPDTNISSLSPSTGPSMHGMLGRLPSEAASSLPCVAMNAPVSVSDPWSSKRVAVESVNPCRPHVSPHIEHLDMATCNMPQSSALAPLPGRECLVDEDGCSDPQNHLLFGVHIDSHSLLMQGGIPALQNDNSSGTIPYSTSNFLSPSENDFPLNQPLRSAGCLDESDYLPCAENAEQANQQFATFVKVYKSGTVGRLLDITRFSSYDELRSEVGRLFGLEGQLEDPLRSGWQLVFVDREDDVLLVGDDPWQEFVNSVSCIKILSPEEVQRMGKPGIQLLSSAPSRRLGNGCDSYASMQEPRGLDAGMAPVGSVEF

SEQ ID NO: 179477 - protein, 595 aa, Zea Mays
MGTITGISDLDPVRWPNSHWRSVKVGWDESTAGEKQPRVSLWEIEPLTTFPMYPSPFALGLKRPWPAGLPSLYGGRGDGLTSSLMWLRDRANPGFQSLNFSGLGMSPWMQPRLDNSLLGLQSDMYQTIAAAAALQSTTKQVPPSAMQFQQPQNIADRSALLSSQILQQVQPRFQQIYPQNLNENKIQGHTQPEYLQVQQQLQRCQSFNEQKPPMHPQQQQQEPQQQQCVQTPQDQQMQEQKHLHNFHSLPDALSAFSQLSPATHSPPSALQTVPAFSHQQNFPDTNISSLSPSTGPSMHGMLGRLPSEAASSLPCVAMNAPVSVSDPWSSKRVAVESVNPCRPHVSPHIEHLDMATCNMPQSSALAPLPGRECLVDEDGCSDPQNHLLFGVHIDSHSLLMQGGIPALQNDNSSGTIPYSTSNFLSPSENDFPLNQPLRSAGCLDESDYLPCAENAEQANQQFATFVKVYKSGTVGRLLDITRFSSYDELRSEVGRLFGLEGQLEDPLRSGWQLVFVDREDDVLLVGDDPWQEFVNSVSCIKILSPEEVQRMGKPGIQLLSSAPSRRLGNGCDSYASMQEPRGLDAGMAPVGSVEF

SEQ ID NO: 179478 - protein, 155 aa, Zea Mays
MDGVVVRRVIPSDNSCLFNAVGYVMEHNRNKASELRQQQSLVILRNSMKCFLANQMKRIVLGFWILKSGEEPLSSLFYLNTTGVKSQHMTFRPPAVISMVRRRITVKGPCSFMMVCIMMLSLCLRLKVHLKNLTRQSSPLIMTVPLVQQKALPST

SEQ ID NO: 179479 - protein, 175 aa, Zea Mays
MAKAQAQVAARFMMEAPPPQVVSVMRRRKAPRSLSTIAEDDREMLAPCGSPSDHGHAQVAARFTTEVAPPQVVSVMRRRKGPRSLDTIAEDDREQQLACGSPSDHGLATAWSSLQRIPTPPQPPRERAGGSVTRDLSKNFLDSHGCQQASGWEGGHMLGHRRAVHALELHKVGAC

SEQ ID NO: 179480 - protein, 64 aa, Zea Mays
MASSSCALLGLACFVLLAAAAGATQYKVGGDNGWAVPDATAESFNTWAEKTSFQIGDSLSPSSS

SEQ ID NO: 179481 - protein, 68 aa, Zea Mays
MSRCWSGGMPSLSWILALTLSMVSEDSTSRVIVFPVRVLTKICICIRITKQQGDYQQKRTVSKEINSI

SEQ ID NO: 179482 - protein, 73 aa, Zea Mays
MCTQPFIILLLASIIKTIFVPLAVDYIINLACSCSKMKPTSASYVQKAPCFRWAHPSPELQRKDLSSSGTRVR

SEQ ID NO: 179483 - protein, 67 aa, Zea Mays
MLVMASSWECRVDMASDPVLSLIGKLVHLKLCIYPQIGYTSIVELTTGDHMPKEEKMTCPIGTASEF

SEQ ID NO: 179484 - protein, 333 aa, Zea Mays
MSAMMQPQIILLKEGTDTSQGRAQVVSNINACTAVGDTVRTTLGPRGMDKLIHDDKGGVTISNDGATIMRLLDIVHPAAKILVDIAKSQDSEVGDGTTTVVLLAAEFLKEAKPYIEDGVHPHSLIRSYRTAGNMAIQRVKELAVSIEGKSLEEKKSLLAKCAATTLSSKLIGGEKEFFASMVVDAVLAIGNDDRLNLIGIKKVPGGTMRDSFLVNGVAFKKTFSYAGFEQQPKKFLNPKILLLNIELELKSEKENAEIRLSDPLQYQSIVDAEWNIIYDKLDKCVKSGAKIVLSRLAIGDLGTQIETFSVLAVSLKKICNVLLQQLVELFKLL

SEQ ID NO: 179485 - protein, 81 aa, Zea Mays
MLYPPSTCLKCSTSGKSPAGRWYSLCTCSTGPRVSAKQRDVEQKEKRKNDSNFGFRCDQIKASPSSDGQLCKHGSWQLGHA

SEQ ID NO: 179486 - protein, 116 aa, Zea Mays
MPSGFSIEVKLQRNLPGEHSRVAPGLSATCSQADMEIGVEARDDRRTQKKPRGPTATACACTSNPMRSVSVSALSSLHLHDWMKGCAWSGQRRPSRPTLPMRRSRSARSRALHDWI

SEQ ID NO: 179487 - protein, 268 aa, Zea Mays
MGLAGDGSADTANLSNSENGRFSYGVASSPGKRASMEDFYEARIDDVDGEKVGMFGVYDGHGGVRAAEYVKQHLFSNLIKHPKFITDTKAAIAETYNRTDSEFLKADSTQTRDAGSTASTAIIVGDRLLVANVGDSRAVISKGGQAIAVSRDHKPDQTDERQRIEDAGGFVMWAGTWRVGGVLAVSRAFGDKLLKPYVVADPEIKEEVVDSSLEFLILASDGLWDVVTNELLPWSSLSRTPRKQQTSFSKKLPEGEAPITSQLSSSAS

SEQ ID NO: 179488 - protein, 190 aa, Zea Mays
MGLAGDGSADTANLSNSENGRFSYGVASSPGKRASMEDFYEARIDDVDGEKVGMFGVYDGHGGVRAAEYVKQHLFSNLIKHPKFITDTKAAIAETYNRTDSEFLKADSTQTRDAGSTASTAIIVGDRLLVANVGDSRAVISKGGQAIAVSRDHKPDQTDERQRIEDAGGFVMWAEWVAFSLSLEHLVINS

SEQ ID NO: 179489 - protein, 66 aa, Zea Mays
MLRVDAGCCSARKLTPPTAVHAPGWLARWPPRRERCRRMTTGAGVVVTVWSFFLSSFPFHPLSSVM

SEQ ID NO: 179490 - protein, 475 aa, Zea Mays
MSEQSLLYLGLLGEYSRATRKRHKMALQNIGASNRDDAFYRYKMPRMITKIEGRGNGIKTNVVNMVDIAKALARPASYTTKYFGCELGAQSKFDEKTGISLVNGAHDTAKLAGLLEVFIKKYVQCYGCGNPETEILISKTQMISLKCAACGFVSDVDMRDKLTTFILKNPPEQKKGGKDKKAMRRAEKERLKEGEAADEEQKKLKKDAKKKGSKDSTAKGLKKKATTATGSDEDHSSSPTRSHDGDKAAADDDDDDVQWQTDTSIEAAKQRMQEQLSAATAEMVMLSTEETEKKMKQATHKDGSTNGSAKEIPNDKPAVTKPSPYEELIGDIKASLGSAPTPTQLKAVLASSTLPPQDVMNALLEALFGGVGKGFTKEVVKNKKYLAVAVPDEGAQTLLVQAIEAFGGKCNPEALKEVPVVLKALYDGDILDEETIVDWYNDAVAAGKDSQVVKNAKPFVEWLQSAESDEEGDDE

SEQ ID NO: 179491 - protein, 447 aa, Zea Mays
MSSSCIPTGLRLDLDMVKAAASPVGAHSSPLRPAHYSSPSSTLSSEASNASSSSATSVSLKRARAPRKRPNQAYNEAAALLASIHPSVFPVNKSPKTAPPRPPQLSVLAAALDASPDLLPPLPVLADSAFLLRDQDTPSPKPRSPSGAKNCPSPAPVSSAFRDFRDPPSSASLDAVGADELGEIDFDDDGFNADSILDVGDAAAGGLDGIMGSLTVDVESGTAARSDDSILSSSGIHPYLRRLMVVGLAGRFELGLGSQHGARPSLNRALKRRDDDGAWWMWPAVPVKDLTIAPPAPPAPPAPNAAVPQAAAAAAPEKKKSKKKKVVKAMAKGNEELLPNAKCKEEEADASVDDAAANGDGDSDSAPTNAPKAGLGLKLDADEVLKAWSDKGSMFAEGSGPELPTSAAEVRRTEQAAVGSGKPACCGTRRRGAPGSSPRRSGTRCAR

SEQ ID NO: 179492 - protein, 758 aa, Zea Mays
MSPPENPSPAAPAEPSQPPPPAAAAKGKGKKDEKKDDDLSEEDLALKEQLELYVVRAQDADPGVQKLALESMRQEIRSATSSMTSVPKPLKFLRPHFGTLKSYFETMQESELKKYMADILSVLALTMSVEGERESLKYRLLGSEGDIGSWGHEYVRNLAGEIAQEFQKRQDDDLPIDVLMELVQQIVSFHMKHNAEPEAVDLLMEVEDLDLLVEHVDATNYKRACLYLTSSSKFLPAPDDMLALDIAYTIYMKFGDLASALRISLQLEKSTQYVKQVYTATDDLLLKKQFSYLIARHGLAMEIDDEIAADDNDKEVLQEIVNNTKLSEGYLTLARDIEVMEPKSPEDIYKVHLIDGRGASSSLDSARQNLAATFVNAFVNAGFGQDKLMTAPSDSSSSGSSGNWLFKNKEHGKASAAASLGMILLWDTDSGLAQLDKYLHSNDTHVVAGALLGIGIVTCGVKSDCDPAFAILMEYIGKDDSNIRIGAILGLGIAYAGSQKEELKMHLSAVLGDSQSPLEVLVFSAIAMGLVFVGSCNEEIAQSIIFALMERSEAELAEPIIRLLPVALGLLYLGKQDSVEATAEVSKTFDEKIGKYCDVTLMSLAYAGTGNVLKVQKLLGICSQHLEKGETHQGPAVLGIALIAMAEELGAEMAVRSLERLLQYGEQNIRRAVPLALGILCISNPKVNVMDTLSRLSHDADADVSMAAIISLGLIGAGTNNARIAGMLRNLSSYYYKEAAHLFCDGTWGPCNRSPRVP

SEQ ID NO: 179493 - protein, 127 aa, Zea Mays
MTLRAWLLHSSDTLTMAKALFDLLAEETRLKSMFSATGSSSYSVLAAAQKSRSSTLVPCAHYKNTHRPDNCFIKFPKKLANFRARRVVRGRGTGSAHRGSAVIASTSPATALSSSWALDSRDLPCDI

SEQ ID NO: 179494 - protein, 71 aa, Zea Mays
MPLRVLLTGKLHGPDIGGAIALIHKAGVCGAVTPQSNFVTLDERFRVLKEIDWDSLAKEQETPAESAVPAT

SEQ ID NO: 179495 - protein, 175 aa, Zea Mays
MAAAARQRGTVKWFNDTKGFGFISPEDGSEDLFVHQSSIKSEGFRSLAEGEEVEFSVSEGDDGRTKAVDVTGPDGSFVRGGGGGGGGGGGGGCFKCGEPGHMARDCSSGGGGYGGGGGGGGGGCYNCGQAGHMARDCPSGGGGGGGRFGGGGGGGGDRSCYNCGEAGHIARDCPT

SEQ ID NO: 179496 - protein, 466 aa, Zea Mays
MGGGRKRRRRDGSETPSMHPRNRYAAAAPDFAALAELYPSFRPFVSVSGSGRASVDFTDFSSTRELTRVLLLHDHGVNWWIPDGQLCPTVPNRSNYIHWIEDLLSSDLIPPISSSSERVKGFDIGTGANCIYPLLGASLLGWTFVGSDVTNVALEWAKKNVESNPHLAELIEIRNANAAPSESETVVREAASEKILEPAEDVAMPKPHILVGVVKESESFDFCMCNPPFFESTEEAGLNPKTSCGGTAEEMVCPGGELAFITQIIEDSVSLKNSFRWFTSMIGRKANLKLLISKVREAGASVVKTTEFVQGHTARWGLAWSFIAPKPRKIVLGSSAPAKKHHSFMLQGLRREHGAFQILKSTEAFFLASNLSCKTDSSVFSVDVTLSDEQIEAAILHGDDYAGSLEDSSAKLQCVVKGISFRITVFEQIPGTLLIKGSLLNKALSVFWMPRNVQNEIMGRQQRISL

SEQ ID NO: 179497 - protein, 390 aa, Zea Mays
MASTDGQLCPTVPNRSNYIHWIEDLLSSDLIPPISSSSERVKGFDIGTGANCIYPLLGASLLGWTFVGSDVTNVALEWAKKNVESNPHLAELIEIRNANAAPSESETVVREAASEKILEPAEDVAMPKPHILVGVVKESESFDFCMCNPPFFESTEEAGLNPKTSCGGTAEEMVCPGGELAFITQIIEDSVSLKNSFRWFTSMIGRKANLKLLISKVREAGASVVKTTEFVQGHTARWGLAWSFIAPKPRKIVLGSSAPAKKHHSFMLQGLRREHGAFQILKSTEAFFLASNLSCKTDSSVFSVDVTLSDEQIEAAILHGDDYAGSLEDSSAKLQCVVKGISFRITVFEQIPGTLLIKGSLLNKALSGTFSSLFSRLEDALRAKCLSKAR

SEQ ID NO: 179498 - protein, 432 aa, Zea Mays
MGGGRKRRRRDGSETPSMHPRNRYAAAAPDFAALAELYPSFRPFVSVSGSGRASVDFTDFSSTRELTRVLLLHDHGVNWWIPDGQLCPTVPNRSNYIHWIEDLLSSDLIPPISSSSERVKGFDIGTGANCIYPLLGASLLGWTFVGSDVTNVALEWAKKNVESNPHLAELIEIRNANAAPSESETVVREAASEKILEPAEDVAMPKPHILVGVVKESESFDFCMCNPPFFESTEEAGLNPKTSCGGTAEEMVCPGGELAFITQIIEDSVSLKNSFRWFTSMIGRKANLKLLISKVREAGASVVKTTEFVQGHTARWGLAWSFIAPKPRKIVLGSSAPAKKHHSFMLQVTLSDEQIEAAILHGDDYAGSLEDSSAKLQCVVKGISFRITVFEQIPGTLLIKGSLLNKALSGTFSSLFSRLEDALRAKCLSKAR

SEQ ID NO: 179499 - protein, 166 aa, Zea Mays
MPGREEGAGGPAGAGGAGPERAGAGGGRRRGGTAAGARAGARAGPGSSAGAGAGSGRRRGRGAAGGPGAGGRGRRRRGVVPAGAAAGRAAEGGRVGGRAPPPPRDPAGQGGVPAGVEQEQGAARRRVLRATTRVQVLRRGGQPSRTGLAVACRVAAAAAAACYCSS

SEQ ID NO: 179500 - protein, 361 aa, Zea Mays
MEDAAETEQLEVAAILCDISRLVRSRHRRRQRARAAAPHLEILSWGRRRPRSMPEVKPSPVPAPAAAERGGAASPDTPLAYPESGGDDAPPEDKGEVAVAPPLDQWPDGRQLICLGWTARSGRRRNSSSARRRRACPSPGRTRVHSRSTLPPPHSLFLPREFRSSSVRVCLPSIACLCATSDLEPLIREIQAAAASPAQQSSVGCGAGGARANESLGEAVALAPSHEVLLDGSFLWRSLSVNLVAVVASCHGDWVPGRGTVSCCSILGRSVLLACVFVRTATTTTPALLAHLIPTPNKDRKLRPFFPQKQNHLRELSHPTRKKEEFLVSIPISRSPLTVYSTHARSGGRSRRTCRRWWCWT

SEQ ID NO: 179501 - protein, 681 aa, Zea Mays
MADMERREEKEKKPVVGRQQARRHAIGSGSTPSSPPPPTAAAGYSGKEMRGEEHRAALRQKRLKKAKCFKWRPSKGDMDSKVEAGGAGSGQVCDDAVLCSLSTASFSGLVSWQRVRTLGKVAEGCDAADPPVPRKLRSAINKRAGRFASAPSRHVKKRRHLSAISAQISSVGQETRSNGSSLFTEQEEAIADVLLSLSQVPSHSEVTADKAVADSSNTNDASTSFSKGPTKEDDQTAELPSAANELASQCACINKAVEQSNIVPNADPVAAAANQSSNSIPLLSANEQMQDLSMETAVNLPSPSKDTSINSAQKHHELQFDDSKCHPAQKPEAPLWLVNSDQSEGVLLHEREKAKNNSAQEIVPLVQTLLPCTPAGYLVKPSSSKLAAPANTISESANFTTPGNQNKHPVLRNVGAPKAWKRSITHVYVSHVIQMHVNKEKAAASSSLQSQARPEERLLARCPRPPNGSSTTSHKAAAARDERLYTVHFDVRVPAHQPPAGICDAGAGRQKIVSGSSWQNLPATSAAAAAAAQHVRYLHPQMARPPATPRDATPYSFPHFPYSRGSLPPAAALQQMPQYVCGPAYGLRPASSSAMMMKQLQQPMPTQQQHQQMWQYHVSQYQPRPDATLSPAAAWHGISSSLRPMGMLAPPEMPSPPRPPQMELFCAPYQGGRQPQQLRLM

SEQ ID NO: 179502 - protein, 633 aa, Zea Mays
MRGEEHRAALRQKRLKKAKCFKWRPSKGDMDSKVEAGGAGSGQVCDDAVLCSLSTASFSGLVSWQRVRTLGKVAEGCDAADPPVPRKLRSAINKRAGRFASAPSRHVKKRRHLSAISAQISSVGQETRSNGSSLFTEQEEAIADVLLSLSQVPSHSEVTADKAVADSSNTNDASTSFSKGPTKEDDQTAELPSAANELASQCACINKAVEQSNIVPNADPVAAAANQSSNSIPLLSANEQMQDLSMETAVNLPSPSKDTSINSAQKHHELQFDDSKCHPAQKPEAPLWLVNSDQSEGVLLHEREKAKNNSAQEIVPLVQTLLPCTPAGYLVKPSSSKLAAPANTISESANFTTPGNQNKHPVLRNVGAPKAWKRSITHVYVSHVIQMHVNKEKAAASSSLQSQARPEERLLARCPRPPNGSSTTSHKAAAARDERLYTVHFDVRVPAHQPPAGICDAGAGRQKIVSGSSWQNLPATSAAAAAAAQHVRYLHPQMARPPATPRDATPYSFPHFPYSRGSLPPAAALQQMPQYVCGPAYGLRPASSSAMMMKQLQQPMPTQQQHQQMWQYHVSQYQPRPDATLSPAAAWHGISSSLRPMGMLAPPEMPSPPRPPQMELFCAPYQGGRQPQQLRLM

SEQ ID NO: 179503 - protein, 1067 aa, Zea Mays
MYYIKKVETMARYYKIPVLLIEFSQDKSFSFQSANEIGDDVSPTNIISKLSLLVLHFPRLRIIWSRSLHATAEIFMSLKTNQDEPDEKKATRVGVPSEDGIVEDDVRSENYNTSAIEFLRRLPGVTDSNYRAIMDGCNSLAELALLPVESKHAENEQQIMGWAGSNPAQELPLSPTFFFVVVGQVVRLFESTLQNDYLNHTSCGAFHAQMESWERILYWMAVLWERGFSHENPQVRCLVMQSFLDIAWERYKDCTQIIPRGFVLGPLIRGLNDVVHHKDFVMNRQLVNLKSSAVCEQVIKVATSLINATEIPLNPLLHFIATIPREFSDYIGPLRVVVQKWFVQKEECSPGDTLLSKLIDFSATFVSQKRNEGSNVFDDEDVDAWEAEARWARTLLVTSEEEHLKRIFRFLEAYGYKLSEQCPSGDFIPIKNFIIVLSFIEELEEKKIPRGQSKVSIKREVQIGLVLEFICWLLRSCMLATPHHINLEGLRTPRCISLTCILAPARRIGTSMSERCIFSFSTLASPAADGNNSRRGGRHRGDSIVTRSSAAANTLPLLRNDDFDLREGLTDVRNVLRQRQKSGCSSRDMMVTVDNLKRLCIDHYFQEEIERAMGACCMGLIHSDDLFDATLAFRLLREAGHGVSADDVLRRFTDDDDSGGEFRLDLSKDIRGLLSLHDMSHLDMGGEELLCKARVFSRHHLASAVRYLEPSLGEYVRQSLDHPYHLSLTQYKARHHLAYLQSLPVRDTALERLVAAEFQLNRSLHQKEMQAIKRWWMELGLVQEIPVVRDQVLKWYMWSMTALQGRSFSRHRVQITKIIALVYVVDDIFDLVATLDELSLFAEAVKMWNSTAAESLPSYMRSCYKALYTVTNEIADTAEKEHGLNHVNHLRKAWAALFDGFMVEARWLATDKVPTAEDYLTNGVVTSGVPLTFVHIFIMLGCDDDQSTQALVDHMPSVISCPAKILRLWDDMGSAEDEAQEGFDGSYRDFYLMENPRCSRSDAEAHMRSLIAREWEELNRECLCKRTFSSSFTHVCLNAARMISVMYSYNKEQRLLVLEDYARMLIL

SEQ ID NO: 179504 - protein, 417 aa, Zea Mays
MLATPHHINLEGLRTPRCISLTCILAPARRIGTSMSERCIFSFSTLASPAADGNNSRRGGRHRGDSIVTRSSAAANTLPLLRNDDFDLREGLTDVRNVLRQRQKSGCSSRDMMVTVDNLKRLCIDHYFQEEIERAMGACCMGLIHSDDLFDATLAFRLLREAGHGVSADDVLRRFTDDDDSGGEFRLDLSKDIRGLLSLHDMSHLDMGGEELLCKARVFSRHHLASAVRYLEPSLGEYVRQSLDHPYHLSLTQYKARHHLAYLQSLPVRDTALERLVAAEFQLNRSLHQKEMQAIKRWWMELGLVQEIPVVRDQVLKWYMWSMTALQGRSFSRHRVQITKIIALVYVVDDIFDLVATLDELSLFAEAVKMWNSTAAESLPSYMRSCYKALYTVTNEIADTAEKEHGLNHVNHLRKAV

SEQ ID NO: 179505 - protein, 233 aa, Zea Mays
MQVIVDMREFMSSLPNVLHQKGIRIVPVTLEVGDYVLSPLICVERKSIADLFQSFASGRLYNQVETMARYYKIPVLLIEFSQDKSFSFQSANEIGDDVSPTNIISKLSLLVLHFPRLRIIWSRSLHATAEIFMSLKTNQDEPDEKKATRVGVPSEDGIVEDDVRSENYNTSAIEFLRRLPGVTDSNYRAIMDGCNSLAELALLPVERLAELMGGQKAARTLKEFLDAKCPTML

SEQ ID NO: 179506 - protein, 857 aa, Zea Mays
MKSSAGNVHDEDKNDESGIVLVSCKDERTCLQLQECILKGPCQVMREEWEKYLIGKAELHGLNKDKRKSEQPKGVGVLDGEVQMGSSESVCPVSISKLETNALLAAASELRNISNEADVKSSSNSSCSKAGGAKGKPKKTTSKRQGSNRKNKSKEGNDNSQGTGLDSEGQSGKADVQAEIVASKMSAYDASMSASTSNVKFNHSSAFGNLANAKPLPPVQFHALDSDHQVLDVWKPSVIIVYHPDITFVREIEVYKAENSSRKLKVYFLFYEDSTEVQKYESSIRRENEAFESLIRQKSLMMIPVDQDGRCIGPTVANEPEPPLCQNSITRKAGGKKAPEKEMQVIVDMREFMSSLPNVLHQKGIRIVPVTLEVGDYVLSPLICVERKSIADLFQSFASGRLYNQVETMARYYKIPVLLIEFSQDKSFSFQSANEIGDDVSPTNIISKLSLLVLHFPRLRIIWSRSLHATAEIFMSLKTNQDEPDEKKATRVGVPSEDGIVEDDVRSENYNTSAIEFLRRLPGVTDSNYRAIMDGCNSLAELALLPVESKHAENEQQIMGWAGSNPAQELPLSPTFFFVVVGQVVRLFESTLQNDYLNHTSCGAFHAQMESWERILYWMAVLWERGFSHENPQVRCLVMQSFLDIAWERYKDCTQIIPRGFVLGPLIRGLNDVVHHKDFVMNRQLVNLKSSAVCEQVIKVATSLINATEIPLNPLLHFIATIPREFSDYIGPLRVVVQKWFVQKEECSPGDTLLSKLIDFSATFVSQKRNEGSNVFDDEDVDAWEAEARWARTLLVTSEEEHLKRIFRFLEAYGYKLSEQCPSGDFIPIKNFIIVLSFIEELEVRQRELVCRSIIQS

SEQ ID NO: 179507 - protein, 1242 aa, Zea Mays
MLAFEQQVLADLVEDPNGGLVVLSSGLPLASLAATLLLHLHQTPGNAAGGGCLLVLSATDTLKARIRRRLQDKLQVHDVPPDLAAQQRATLYASGAALFLSPRALAADLLTSRLLPSRVQALLLLSAHRSTDTSSDAFICRLLRQRNLLPVYAFSDCPHAMVAGFSKAERTMKSLYVRRLHLWPRFHVLAAADLERAPPDVVDVRVPMTPPMRGIQAAVLATMDACLKELRRTNKVDVEDLTVDKGLFKSFDEIVRRQLDPIWHTLGKKTKQLVADLRTLRKLLDYLVRYDAVTYLKYLDTLRVSEGVRSVWILADSSHRIFELAKRRVYQAVRTDGVNVSIDNKGTPTKKRKVAHNSTKKGKVTGSCSWPLHLQELLQEIAEQRMKSSAGNVHDEDKNDESGIVLVSCKDERTCLQLQECILKGPCQVMREEWEKYLIGKAELHGLNKDKRKSEQPKGVGVLDGEVQMGSSESVCPVSISKLETNALLAAASELRNISNEADVKSSSNSSCSKAGGAKGKPKKTTSKRQGSNRKNKSKEGNDNSQGTGLDSEGQSGKADVQAEIVASKMSAYDASMSASTSNVKFNHSSAFGNLANAKPLPPVQFHALDSDHQVLDVWKPSVIIVYHPDITFVREIEVYKAENSSRKLKVYFLFYEDSTEVQKYESSIRRENEAFESLIRQKSLMMIPVDQDGRCIGPTVANEPEPPLCQNSITRKAGGKKAPEKEMQVIVDMREFMSSLPNVLHQKGIRIVPVTLEVGDYVLSPLICVERKSIADLFQSFASGRLYNQVETMARYYKIPVLLIEFSQDKSFSFQSANEIGDDVSPTNIISKLSLLVLHFPRLRIIWSRSLHATAEIFMSLKTNQDEPDEKKATRVGVPSEDGIVEDDVRSENYNTSAIEFLRRLPGVTDSNYRAIMDGCNSLAELALLPVESKHAENEQQIMGWAGSNPAQELPLSPTFFFVVVGQVVRLFESTLQNDYLNHTSCGAFHAQMESWERILYWMAVLWERGFSHENPQVRCLVMQSFLDIAWERYKDCTQIIPRGFVLGPLIRGLNDVVHHKDFVMNRQLVNLKSSAVCEQVIKVATSLINATEIPLNPLLHFIATIPREFSDYIGPLRVVVQKWFVQKEECSPGDTLLSKLIDFSATFVSQKRNEGSNVFDDEDVDAWEAEARWARTLLVTSEEEHLKRIFRFLEAYGYKLSEQCPSGDFIPIKNFIIVLSFIEELEVRQRELVCRSIIQS

SEQ ID NO: 179508 - protein, 447 aa, Zea Mays
MLAFEQQVLADLVEDPNGGLVVLSSGLPLASLAATLLLHLHQTPGNAAGGGCLLVLSATDTLKARIRRRLQDKLQVHDVPPDLAAQQRATLYASGAALFLSPRALAADLLTSRLLPSRVQALLLLSAHRSTDTSSDAFICRLLRQRNLLPVYAFSDCPHAMVAGFSKAERTMKSLYVRRLHLWPRFHVLAAADLERAPPDVVDVRVPMTPPMRGIQAAVLATMDACLKELRRTNKVDVEDLTVDKGLFKSFDEIVRRQLDPIWHTLGKKTKQLVADLRTLRKLLDYLVRYDAVTYLKYLDTLRVSEGVRSVWILADSSHRIFELAKRRVYQAVRTDGVNVSIDNKGTPTKKRKVAHNSTKKGKVTENEDSTVGPNTQKANTDVGIVLEEVLEEAPKWKVLWGGSGNGADAGPWLRRWCGQSAGRRSVLGSKEGDRSSREERRNCCKR

SEQ ID NO: 179509 - protein, 638 aa, Zea Mays
MLAFEQQVLADLVEDPNGGLVVLSSGLPLASLAATLLLHLHQTPGNAAGGGCLLVLSATDTLKARIRRRLQDKLQVHDVPPDLAAQQRATLYASGAALFLSPRALAADLLTSRLLPSRVQALLLLSAHRSTDTSSDAFICRLLRQRNLLPVYAFSDCPHAMVAGFSKAERTMKSLYVRRLHLWPRFHVLAAADLERAPPDVVDVRVPMTPPMRGIQAAVLATMDACLKELRRTNKVDVEDLTVDKGLFKSFDEIVRRQLDPIWHTLGKKTKQLVADLRTLRKLLDYLVRYDAVTYLKYLDTLRVSEGVRSVWILADSSHRIFELAKRRVYQAVRTDGVNVSIDNKGTPTKKRKVAHNSTKKGKVTGSCSWPLHLQELLQEIAEQRMKSSAGNVHDEDKNDESGIVLVSCKDERTCLQLQECILKGPCQVMREEWEKYLIGKAELHGLNKDKRKSEQPKGVGVLDGEVQMGSSESVCPVSISKLETNALLAAASELRNISNEADVKSSSNSSCSKAGGAKGKPKKTTSKRQGSNRKNKSKEGNDNSQGTGLDSEGQSGKADVQAEIVASKMSAYDASMSASTSNVKFNHSSAFGNLANAKPLPPVQFHALDSDHQVLDIPLRCKNMSPAFDGKMKHLNL

SEQ ID NO: 179510 - protein, 409 aa, Zea Mays
MLAFEQQVLADLVEDPNGGLVVLSSGLPLASLAATLLLHLHQTPGNAAGGGCLLVLSATDTLKARIRRRLQDKLQVHDVPPDLAAQQRATLYASGAALFLSPRALAADLLTSRLLPSRVQALLLLSAHRSTDTSSDAFICRLLRQRNLLPVYAFSDCPHAMVAGFSKAERTMKSLYVRRLHLWPRFHVLAAADLERAPPDVVDVRVPMTPPMRGIQAAVLATMDACLKELRRTNKVDVEDLTVDKGLFKSFDEIVRRQLDPIWHTLGKKTKQLVADLRTLRKLLDYLVRYDAVTYLKYLDTLRVSEGVRSVWILADSSHRIFELAKRRVYQAVRTDGVNVSIDNKGTPTKKRKVAHNSTKKGKVTGSCSWPLHLQVPTLRRLILMWALYWKRFWRRHRNGKCYGNCCKR

SEQ ID NO: 179511 - protein, 731 aa, Zea Mays
MLAFEQQVLADLVEDPNGGLVVLSSGLPLASLAATLLLHLHQTPGNAAGGGCLLVLSATDTLKARIRRRLQDKLQVHDVPPDLAAQQRATLYASGAALFLSPRALAADLLTSRLLPSRVQALLLLSAHRSTDTSSDAFICRLLRQRNLLPVYAFSDCPHAMVAGFSKAERTMKSLYVRRLHLWPRFHVLAAADLERAPPDVVDVRVPMTPPMRGIQAAVLATMDACLKELRRTNKVDVEDLTVDKGLFKSFDEIVRRQLDPIWHTLGKKTKQLVADLRTLRKLLDYLVRYDAVTYLKYLDTLRVSEGVRSVWILADSSHRIFELAKRRVYQAVRTDGVNVSIDNKGTPTKKRKVAHNSTKKGKVTENEDSTVGPNTQKANTDVGIVLEEVLEEAPKWKVLWELLQEIAEQRMKSSAGNVHDEDKNDESGIVLVSCKDERTCLQLQECILKGPCQVMREEWEKYLIGKAELHGLNKDKRKSEQPKDVKSSSNSSCSKAGGAKGKPKKTTSKRQGSNRKNKSKEGNDNSQGTGLDSEGQSGKADVQAEIVASKMSAYDASMSASTSNVKFNHSSAFGNLANAKPLPPVQFHALDSDHQVLDVWKPSVIIVYHPDITFVREIEVYKAENSSRKLKVYFLFYEDSTEVQKYESSIRRENEAFESLIRQKSLMMIPVDQDGRCIGPTVANEPEPPLCQNSITRKAGGKKAPEKEMQVIVDMREFMSSLPNVLHQKG

SEQ ID NO: 179512 - protein, 459 aa, Zea Mays
MLAFEQQVLADLVEDPNGGLVVLSSGLPLASLAATLLLHLHQTPGNAAGGGCLLVLSATDTLKARIRRRLQDKLQVHDVPPDLAAQQRATLYASGAALFLSPRALAADLLTSRLLPSRVQALLLLSAHRSTDTSSDAFICRLLRQRNLLPVYAFSDCPHAMVAGFSKAERTMKSLYVRRLHLWPRFHVLAAADLERAPPDVVDVRVPMTPPMRGIQAAVLATMDACLKELRRTNKVDVEDLTVDKGLFKSFDEIVRRQLDPIWHTLGKKTKQLVADLRTLRKLLDYLVRYDAVTYLKYLDTLRVSEGVRSVWILADSSHRIFELAKRRVYQAVRTDGVNVSIDNKGTPTKKRKVAHNSTKKGKVTENEDSTVGPNTQKANTDVGIVLEEVLEEAPKWKVLWGGSGNGADAGPWLRRWCGQSAGRRSVLGSKEGDRSSREERRFRDNSLLALFHNFPLHK

SEQ ID NO: 179513 - protein, 240 aa, Zea Mays
MEDWDSEEFQPVVPVVKAEPLKNQWADEDVEEDDVKESWEEEEEEEKPKPAPVEKVAAKPSTKAPAKKGKQQALTSAEEPDEPPLSPTSQKIRQQRLVEEADFKSTTELFAKKGSEQKSLDTFIPKSESDFAEYAELIANKLRPYEKSFHYMALLKNVMRLSMTSLKGADAKDISSSVTAIANEKIKAEKEAAAGKKKQGAKKKQLHIEKGDDDFIPGRGGGYDDPDDCMTVCIVFGDLV

SEQ ID NO: 179514 - protein, 229 aa, Zea Mays
MEDWEFQPVVPVVKAEPLKNQWADEDVEEDDVKESWEEEEEEEKPKPAPVEKVAAKPSTKAPAKKGKQQALTSAEEPDEPPLSPTSQKIRQQRLVEEADFKSTTELFAKKGSEQKSLDTFIPKSESDFAEYAELIANKLRPYEKSFHYMALLKNVMRLSMTSLKGADAKDISSSVTAIANEKIKAEKEAAAGKKKQGAKKKQLHIEKGDDDFIPGRGGGYDDPDEYDFM

SEQ ID NO: 179515 - protein, 599 aa, Zea Mays
MLQIAHDTLTNQSSRTEYDRALSEDRDAALTMDVAWDKVPGVLCVLQEAGEAQLVLATGEHLLQDRPPKRFKQDVVLAMALAYVDISRDAMAASPPDVICCCEVLERALKLLQEDGASNLAPELLAQIDETLEEITPRCVLELLALPTDEKHKNKRQEGLQGAKNILWSVGRGGIATVGGGFSREAFMNEAFLQMTSAEQMDFFSKTPNSIPPEWFEIYSVALAHIAQAIASKRPQFIMMADELFEQLQKFNIGSQYPYENEMDLALERALCSLLVGDICNCRMWLGIDNESSSYRDPKNIEFVVNNSSMNEENDLLPGLCKLLETWLVSEVFPRSRDTRGTQFRLGDYYDDPKVLSYLERMEGGGASHLAAAAAIAKLGAQATAALGTVKSSALQAFRSVAGDAIHDSRNDALKIISAGTLLALFAVLGLKCLPRNKSLPALRGEYGSVAVVDSIDGPAADEEPLEIPRMDAKLAEDIVRRWQSIKSKALGPEHTVTALQEVLGGNMLKVWADRAAEIERHGWFWEYALSGVTIDSITVSVDGRRAAVEATIEEVGRLTDVTDPKNDDAYDTKYTARYEMTYSRPAGWRITEGAVLRS

SEQ ID NO: 179516 - protein, 615 aa, Zea Mays
MEGVHSLLARPNSAPFAFSPLPLRRSHRPPPPGPSTCRAASRWADRLFADFHLLPAAADPPAAASSSSSSPFVPIFPEAADRALPLPVDFYKILGAEPHFLGDGIRRAFESRIAKPPQYGYSTEALVGRRQMLQIAHDTLTNQSSRTEYDRALSEDRDAALTMDVAWDKVPGVLCVLQEAGEAQLVLATGEHLLQDRPPKRFKQDVVLAMALAYVDISRDAMAASPPDVICCCEVLERALKLLQEDGASNLAPELLAQIDETLEEITPRCVLELLALPTDEKHKNKRQEGLQGAKNILWSVGRGGIATVGGGFSREAFMNEAFLQMTSAEQMDFFSKTPNSIPPEWFEIYSVALAHIAQAIASKRPQFIMMADELFEQLQKFNIGSQYPYENEMDLALERALCSLLVGDICNCRMWLGIDNESSSYRDPKNIEFVVNNSSMNEENDLLPGLCKLLETWLVSEVFPRSRDTRGTQFRLGDYYDDPKVLSYLERMEGGGASHLAAAAAIAKLGAQATAALGTVKSSALQAFRSVAGDAIHDSRNDALKIISAGASMGLWRLLTPLMVQRQMKSHWKSLGWTRSWLKTLFAGGKASSPRLWGQNTLSRHCKRSSAATC

SEQ ID NO: 179517 - protein, 180 aa, Zea Mays
MMPNHRNQYGACFCDHVPVSTLQVASNLPFNVSTEVVKLLLPMGDVFSVVVLMLQDETAVRLADASIQSPEYRSINVFVDFYSEPEYKFRVDRENFFPRPKVDGAVISFKLKNAEEYPPVSSPKSFFSMVSSGSWGHGVQKLVPNLNCFLWLREKGREWKQLFIFGYRYKAAHSWWSWSP

SEQ ID NO: 179518 - protein, 310 aa, Zea Mays
MVELTSLSPGPPRPSRLTPRRRPPPPTPHVHTSSRRRGRILGAATATPGADDYHSTIRSLNSRGRHVPRKSLGQNYTLNSKVNEELVAAAGVEEGDVVLEIGPGTGSLTSALLQAGATVFAVEKDKHMATLVKDRFGSTEQLKVIEEDITKFHIRSHFLPFMKEKYGATKKLAKVASNLPFNVSTEVVKLLLPMGDVFSVVVLMLQDETAVRLADASIQSPEYRSINVFVDFYSEPEYKFRVDRENFFPRPKVNSAFMGKRKMLRKSLQHICSSSEIEAALDNIGLPVTARPSDLILDDFVRLHNHLAKV

SEQ ID NO: 179519 - protein, 319 aa, Zea Mays
MVELTSLSPGPPRPSRLTPRRRPPPPTPHVHTSSRRRGRILGAATATPGADDYHSTIRSLNSRGRHVPRKSLGQNYTLNSKVNEELVAAAGVEEGDVVLEIGPGTGSLTSALLQAGATVFAVEKDKHMATLVKDRFGSTEQLKVIEEDITKFHIRSHFLPFMKEKYGATKKLAKVASNLPFNVSTEVVKLLLPMGDVFSVVVLMLQDETAVRLADASIQSPEYRSINVFVDFYSEPEYKFRVDRENFFPRPKVDGAVISFKLKNAEEYPPVSSPKSFFSMVNSAFMGKRKMLRKSLQHICSSSEIEAALDNIGLPVTTF

SEQ ID NO: 179520 - protein, 237 aa, Zea Mays
MVELTSLSPGPPRPSRLTPRRRPPPPTPHVHTSSRRRGRILGAATATPGADDYHSTIRSLNSRGRHVPRKSLGQNYTLNSKVNEELVAAAGVEEGDVVLEIGPGTGSLTSALLQAGATVFAVEKDKHMATLVKDRFGSTEQLKVIEEDITKFHIRSHFLPFMKEKYGATKKLAKVASNLPFNVSTEVVKLLLPMGDVFSVVVLMLQDETAVRLADASIQSPEYRSINVFVDFYSESS

SEQ ID NO: 179521 - protein, 635 aa, Zea Mays
MCHLFVGPEDEQAERVGNRFCSRLTPIQENKYCQLPLNNLKRQGCAEKRKPISVDKMYSESDRPSSTSSSAKRTHAIDPEVSDHEKCHKTESSHPSRFSKRRKEQLQNSSSVYPRKVQDVVLLDDEDMQPEEEVNCDMSDGQNGPKIYYPSRDNRESVELSRSDIKCLDPGVYLSSPVINFYIQYIKRNRLSSEDFRDKFYIFNTYFYGKLEEALCRQDEFSKLRRWWKGVNILNKAYIILPIHGMAHWSLVIICIPAKESISGPIILHLDSLAMHPSTKILNTVERYLEKEWCQLSSWEDFKNNIHKQSVEVPRQNNEYDCGIFMLYYIERFIKEAPERFTIDKLDMFNRSWFKPEEASGLRRRIRELLLEEFESAKLDDALPGADASERDDSINDGELKPDASSDSSEMVVEVVGGLGGTDKSNEGIKVVASEEASGESGDAGKSTEGTVAASEEKSIEGINVAEPEDACESIGGIYVAESDEASGEFGEIGKTNKGTKVAVSEGASVSGYTDKNMEDISDSEVAVLDKAPTSSYRRGEKTTACVLSEAASLSDSVKDEQGMVKPDSGSSKAEREGDLIVIASPERSEGNDEIIGSMPITDVVCDSCDSDTETKVRIVKIHRRKFVPSCGCSN

SEQ ID NO: 179522 - protein, 739 aa, Zea Mays
MGQRIDINWTEVFGKSSSPDREADVCFASPSSASAAPRTRARALGAAKVLPGDERRRGSPDRHQRKRLGKLRIDDDWSVGGQRHTAVHGDDGARRPRTRGAAKAADGRVQDAHSVSKDVYDFKDEQAERVGNRFCSRLTPIQENKYCQLPLNNLKRQGCAEKRKPISVDKMYSESDRPSSTSSSAKRTHAIDPEVSDHEKCHKTESSHPSRFSKRRKEQLQNSSSVYPRKVQDVVLLDDEDMQPEEEVNCDMSDGQNGPKIYYPSRSDIKCLDPGVYLSSPVINFYIQYIKRNRLSSEDFRDKFYIFNTYFYGKLEEALCRQDEFSKLRRWWKGVNILNKAYIILPIHGMAHWSLVIICIPAKESISGPIILHLDSLAMHPSTKILNTVERYLEKEWCQLSSWEDFKNNIHKQSVEVPRQNNEYDCGIFMLYYIERFIKEAPERFTIDKLDMFNRSWFKPEEASGLRRRIRELLLEEFESAKLDDALPGADASERDDSINDGELKPDASSDSSEMVVEVVGGLGGTDKSNEGIKVVASEEASGESGDAGKSTEGTVAASEEKSIEGINVAEPEDACESIGGIYVAESDEASGEFGEIGKTNKGTKVAVSEGASVSGYTDKNMEDISDSEVAVLDKAPTSSYRRGEKTTACVLSEAASLSDSVKDEQGMVKPDSGSSKAEREGDLIVIASPERSEGNDEIIGSMPITDVVCDSCDSDTETKVRIVKIHRRKFVPSCGCSN

SEQ ID NO: 179523 - protein, 416 aa, Zea Mays
MGQRIDINWTEVFGKSSSPDREADVCFASPSSASAAPRTRARALGAAKVLPGDERRRGSPDRHQRKRLGKLRIDDDWSVGGQRHTAVHGDDGARRPRTRGAAKAADGRVQDAHSVSKDVYDFSPEDEQAERVGNRFCSRLTPIQENKYCQLPLNNLKRQGCAEKRKPISVDKMYSESDRPSSTSSSAKRTHAIDPEVSDHEKCHKTESSHPSRFSKRRKEQLQNSSSVYPRKVQDVVLLDDEDMQPEEEVNCDMSDGQNGPKIYYPSRDNRESVELSRSDIKCLDPGVYLSSPVINFYIQYIKRNRLSSEDFRDKFYIFNTYFYGKLEEALCRQDEFSKLRRWWKGVNILNKAYIILPIHGMAHWSLVIICIPAKESISGPIILHLDSLAMHPSTKILNTVESLIGVGSNLKKHLV

SEQ ID NO: 179524 - protein, 508 aa, Zea Mays
MQPEEEVNCDMSDGQNGPKIYYPSRDNRESVELSRSDIKCLDPGVYLSSPVINFYIQYIKRNRLSSEDFRDKFYIFNTYFYGKLEEALCRQDEFSKLRRWWKGVNILNKAYIILPIHGMAHWSLVIICIPAKESISGPIILHLDSLAMHPSTKILNTVERYLEKEWCQLSSWEDFKNNIHKQSVEVPRQNNEYDCGIFMLYYIERFIKEAPERFTIDKLDMFNRSWFKPEEASGLRRRIRELLLEEFESAKLDDALPGADASERDDSINDGELKPDASSDSSEMVVEVVGGLGGTDKSNEGIKVVASEEASGESGDAGKSTEGTVAASEEKSIEGINVAEPEDACESIGGIYVAESDEASGEFGEIGKTNKGTKVAVSEGASVSGYTDKNMEDISDSEVAVLDKAPTSSYRRGEKTTACVLSEAASLSDSVKDEQGMVKPDSGSSKAEREGDLIVIASPERSEGNDEIIGSMPITDVVCDSCDSDTETKVRIVKIHRRKFVPSCGCSN

SEQ ID NO: 179525 - protein, 472 aa, Zea Mays
MQPEEEVNCDMSDGQNGPKIYYPSRDNRESVELSRSDIKCLDPGVYLSSPVINFYIQYIKRNRLSSEDFRDKFYIFNTYFYGKLEEALCRQDEFSKLRRWWKGVNILNKAYIILPIHGMAHWSLVIICIPAKESISGPIILHLDSLAMHPSTKILNTVERYLEKEWCQLSSWEDFKNNIHKQSVEFNRSWFKPEEASGLRRRIRELLLEEFESAKLDDALPGADASERDDSINDGELKPDASSDSSEMVVEVVGGLGGTDKSNEGIKVVASEEASGESGDAGKSTEGTVAASEEKSIEGINVAEPEDACESIGGIYVAESDEASGEFGEIGKTNKGTKVAVSEGASVSGYTDKNMEDISDSEVAVLDKAPTSSYRRGEKTTACVLSEAASLSDSVKDEQGMVKPDSGSSKAEREGDLIVIASPERSEGNDEIIGSMPITDVVCDSCDSDTETKVRIVKIHRRKFVPSCGCSN

SEQ ID NO: 179526 - protein, 390 aa, Zea Mays
MAHWSLVIICIPAKESISGPIILHLDSLAMHPSTKILNTVERYLEKEWCQLSSWEDFKNNIHKQSVEVPRQNNEYDCGIFMLYYIERFIKEAPERFTIDKLDMFNRSWFKPEEASGLRRRIRELLLEEFESAKLDDALPGADASERDDSINDGELKPDASSDSSEMVVEVVGGLGGTDKSNEGIKVVASEEASGESGDAGKSTEGTVAASEEKSIEGINVAEPEDACESIGGIYVAESDEASGEFGEIGKTNKGTKVAVSEGASVSGYTDKNMEDISDSEVAVLDKAPTSSYRRGEKTTACVLSEAASLSDSVKDEQGMVKPDSGSSKAEREGDLIVIASPERSEGNDEIIGSMPITDVVCDSCDSDTETKVRIVKIHRRKFVPSCGCSN

SEQ ID NO: 179527 - protein, 750 aa, Zea Mays
MGQRIDINWTEVFGKSSSPDREADVCFASPSSASAAPRTRARALGAAKVLPGDERRRGSPDRHQRKRLGKLRIDDDWSVGGQRHTAVHGDDGARRPRTRGAAKAADGRVQDAHSVSKDVYDFSPEDEQAERVGNRFCSRLTPIQENKYCQLPLNNLKRQGCAEKRKPISVDKMYSESDRPSSTSSSAKRTHAIDPEVSDHEKCHKTESSHPSRFSKRKEQLQNSSSVYPRKVQDVVLLDDEDMQPEEEVNCDMSDGQNGPKIYYPSRDNRESVELSRSDIKCLDPGVYLSSPVINFYIQYIKRNRLSSEDFRDKFYIFNTYFYGKLEEALCRQDEFSKLRRWWKGVNILNKAYIILPIHGMAHWSLVIICIPAKESISGPIILHLDSLAMHPSTKILNTVERYLEKEWCQLSSWEDFKNNIHKQSVEVPRQNNEYDCGIFMLYYIERFIKEAPERFTIDKLDMFNRSWFKPEEASGLRRRIRELLLEEFESAKLDDALPGADASERDDSINDGELKPDASSDSSEMVVEVVGGLGGTDKSNEGIKVVASEEASGESGDAGKSTEGTVAASEEKSIEGINVAEPEDACESIGGIYVAESDEASGEFGEIGKTNKGTKVAVSEGASVSGYTDKNMEDISDSEVAVLDKAPTSSYRRGEKTTACVLSEAASLSDSVKDEQGMVKPDSGSSKAEREGDLIVIASPERSEGNDEIIGSMPITDVVCDSCDSDTETKVRIVKIHRRKFVPSCGCSN

SEQ ID NO: 179528 - protein, 784 aa, Zea Mays
MISPRNLPILSGNLRSASPPPKGSSKTPIKSLSSPIAGRSTAAMGQRIDINWTEVFGKSSSPDREADVCFASPSSASAAPRTRARALGAAKVLPGDERRRGSPDRHQRKRLGKLRIDDDWSVGGQRHTAVHGDDGARRPRTRGAAKAADGRVQDAHSVSKDVYDFSPEDEQAERVGNRFCSRLTPIQENKYCQLPLNNLKRQGCAEKRKPISVDKMYSESDRPSSTSSSAKRTHAIDPEVSDHEKCHKTESSHPSRFSKRRKEQLQNSSSVYPRKVQDVVLLDDEDMQPEEEVNCDMSDGQNGPKIYYPSRSDIKCLDPGVYLSSPVINFYIQYIKRNRLSSEDFRDKFYIFNTYFYGKLEEALCRQDEFSKLRRWWKGVNILNKAYIILPIHGMAHWSLVIICIPAKESISGPIILHLDSLAMHPSTKILNTVERYLEKEWCQLSSWEDFKNNIHKQSVEVPRQNNEYDCGIFMLYYIERFIKEAPERFTIDKLDMFNRSWFKPEEASGLRRRIRELLLEEFESAKLDDALPGADASERDDSINDGELKPDASSDSSEMVVEVVGGLGGTDKSNEGIKVVASEEASGESGDAGKSTEGTVAASEEKSIEGINVAEPEDACESIGGIYVAESDEASGEFGEIGKTNKGTKVAVSEGASVSGYTDKNMEDISDSEVAVLDKAPTSSYRRGEKTTACVLSEAASLSDSVKDEQGMVKPDSGSSKAEREGDLIVIASPERSEGNDEIIGSMPITDVVCDSCDSDTETKVRIVKIHRRKFVPSCGCSN

SEQ ID NO: 179529 - protein, 222 aa, Zea Mays
MGYVLSAVARVLEQPTAWGAAPEMALLAGPLWAAVLLGLLLGWAWRPRWAAGLVAAPAPAAAAQPPFATLGFWKAQLPARLRAPLGSAAAVRHGEEEEEDEVSVRGGRSSEAGSEELAVGKRDLANLWRLVEGRDGGPAWIKMMDRSLPTMTYQAWRRDAQTGPPQYQSSSIFEDATPEEVRDFFGDDEFRVSNKWDDMLVYHKTLEECQTTGTMKVHWVRK

SEQ ID NO: 179530 - protein, 54 aa, Zea Mays
MYLVISCKEPTHITHQNEQSRKQSLHVYLHVYQWIYQFMINSGSNSNLPSKLCG

SEQ ID NO: 179531 - protein, 233 aa, Zea Mays
MEFVGSTMEERMTLCNMVIEAGGKNGVVPADETTFKYLEGKTSVDYEPVYSDAQARFFSDYRFDVSKLEPVVAKPHSPDNRAPARECKDVKIDRVYIGSCTGGKTEDFLAAAKVFLASGKKVKVPTFLVPATQKVWLDVYSLPVPGSGGKTCSQVFEEAGCDTPASPNCGACLGGPRDTYARMNEPTVCVSTTNRNFPGRMGHKEGKIYLASPYTAAASALTGYVTDPRDFLM

SEQ ID NO: 179532 - protein, 214 aa, Zea Mays
MPAPPVVWPSRTPSTRQAARRRSSLHKMRAPLQATVPLLLPMPRRCSLGRCPSLCARIFRSGSRHPQPRILCLQGSPDGPEQYVAVMNSIFSAQRSMVPIDSCIVGTQDSAFLQQASYITGGVYLKPQELNGLFQYLAAVFATDLHSRAFLRLPKTLGVDFRASCFCHKKTIDMGYVCSICLSIFCKNQKKCSTCGSEFSRAMPDLNSVPDQSK

SEQ ID NO: 179533 - protein, 229 aa, Zea Mays
MTSAHSKLYSDDVSLVVVVVDTNPFFWAAAALPFADFFAHLIHFVNSLLLLNHLNRVVVIAAGVSSCAYILDSSDASPSGGVAVSDTFDKASRKAEEFIAQDARATAGNGSVASANAASLLSGALSISLCYIQRIFRSGSRHPQPRILCLQGSPDGPEQYVAVMNSIFSAQRSMVPIDSCIVGTQDSAFLQQASYITGGVYLKPQELNGLFQYLAASTCASCSASRRPP

SEQ ID NO: 179534 - protein, 280 aa, Zea Mays
MAAPAPGATRLHPPFLLLPSPPRPHPPLRLRFLLPSPPPLRLRRRFPLLAAAAVSAGGGGGGEEAAGRKADKARQLQKRVLVGVAIGVGAGGIVVAGGWVFAAAVAAAVLAGSREYFELVRSTASGGGTPPPRYVSRACSAICALMPILTLYYGRMDVTVAFSAFVIAIALLLQRGNPRFAQLTSSVFGLFYCGYLPSFWVKLRSGLAAPALNTSIAYRWPILLGGQAHWTVGLVATLMAISSIIAADTSAFLCGRCHSLWNPDLSGFIVWGSCRVSDQA

SEQ ID NO: 179535 - protein, 332 aa, Zea Mays
MAAPAPGATRLHPPFLLLPSPPRPHPPLRLRFLLPSPPPLRLRRRFPLLAAAAVSAGGGGGGEEAAGRKADKARQLQKRVLVGVAIGVGAGGIVVAGGWVFAAAVAAAVLAGSREYFELVRSTASGGGTPPPRYVSRACSAICALMPILTLYYGRMDVTVAFSAFVIAIALLLQRGNPRFAQLTSSVFGLFYCGYLPSFWVKLRSGLAAPALNTSIAYRWPILLGGQAHWTVGLVATLMAISSIIAADTSAFLCGRAFGRTPLTNISPKKTLEGALAGLAGCVLTTVLLSTALRWPRSLLRTLDHSFLVTVGFSTELTATCSQGHSVTLLSE

SEQ ID NO: 179536 - protein, 282 aa, Zea Mays
MGGSTGYVRSLLRRPRRATPWKFTAKLMTRTNDASGGGKLPRKRFYRARAHSNPLSDSHFPVPISPEEVDLSQHYPRYFPADKGSDGEEAAAPQQIRFADVGCGFGGLLVGLSPLFPDTLMIGMELRDKVTEYVKERILALRGANPGQYDNISVVRTNSMKYIPNYFRKAQLTKMFFLFPDPHFKEKNHRRRVISMQLLDEYAYVMEVGGIIYTITDVEELGEWMRSCLEKHPLFETVPEEEIKADPVFKLLSTATEESQKVARNGGQTFYAIFRRISLQEE

SEQ ID NO: 179537 - protein, 287 aa, Zea Mays
MRIEEVQSTSKKQRIATHTHIKGLGLDANGMAIALAAGFVGQAAAREAAGLAVDMIRQKKMAGRAVLLAGPPATGKTALALGIAQELGSKVPFCPMVGSEVYSSEVKKTEVLMENFRRAIGLRIKENKEVYEGEVTELSPEEAESTTGGYAKSISHVIISLKTVKGTKQLKLDSSIYDALIKEKVAVGDVIYIEANSGAVKRVGRCDSFATEYDLEAEEYVPIPKGEVHKKKEIVQDVTLHDLDAANAQPQGGQDILSLMGQMMKPRKTEITEKLRQEINKLVFNFI

SEQ ID NO: 179538 - protein, 235 aa, Zea Mays
MRIEEVQSTSKKQRIATHTHIKGLGLDANGMAIALAAGFVGQAAAREAAGLAVDMIRQKKMAGRAVLLAGPPATGKTALALGIAQELGSKVPFCPMVGSEVYSSEVKKTEVLMENFRRAIGLRIKENKEVYEGEVTELSPEEAESTTGGYAKSISHVIISLKTVKGTKQLKLDSSIYDALIKEKVAVGDVIYIEANSGAVKRVGRCDSFATEYDLEAEEYVPIPKAIFFHTVALC

SEQ ID NO: 179539 - protein, 335 aa, Zea Mays
MDGGLDDEWEASFLDERELDRVSKERNELKNECTALKKDRTKKDLQIKAKEAEIQNLKKANVSSMKDVCSAGMNIDQSFHAPANEALHTGVSSRRTDKMSGKDKDAHSLRDDLYLKQGHQTDLLEALELRRRTMIDNGMSTSGVVSLEEDTHFEPRNATCKEIKAIGVQTDNTSDNEHLDCKKLLVERISGNLRAMWGMSPNSLSSRNLISKINVSCSEEILSLLQHTRLSDNCEPSSQAISSMNEAISQLYDTFIKMNSGKMSIQTFLEALLNLCAFDDAAIVSRTLRVFLKVLQHLLQHGAKSSESVPSGTMFLLNHMLTYSWRTTTKTVRPC

SEQ ID NO: 179540 - protein, 559 aa, Zea Mays
MWMNIDQSFHAPANEALHTGVSSRRTDKMSGKDKDAHSLRDDLYLKQGHQTDLLEALELRRRTMIDNGMSTSGVVSLEEDTHFEPRNATCKEIKAIGVQTDNTSDNEHLDCKKLLVERISGNLRAMWGMSPNSLSSRNLISKINVSCSEEILSLLQHTRLSDNCEPSSQAISSMNEAISQLYDTFIKMNSGKMSIQTFLEALLNLCAFDDAAIVSRTLRVFLKVLQHLLQHGAKSSERNNVSVEPYVNVLMENNHKDCSTLLRPVDAEDSLRLHNMFLPFTFWSSLFTGMLQIGVKYSQETIRTDALSIMILIVRTTDPIEERQKFGFTSVMTRLHLLLQKENGLLVKKHSVRLLFLLLNCPVMLKLLCSGGKDGSKQMGSEACESNRSQEVISSVLVDLSDCLTCGETCSLGIELCRLVIILLAYIASSGKLGYEVLLVPVSARGASFLEMIMEVLASQMQYETRELLKERCLVMREALILLNRLASHANYSKPTLEVLTRSKLCATWTIDVANRLPHTWMANDLAELAQKFRSRVYAFIEEKPLTSDGTNLGASNKR

SEQ ID NO: 179541 - protein, 482 aa, Zea Mays
MDGGLDDEWEASFLDEVIRATDEAEAVVSRNPNPTPTPAPAPIPTYYPLAAAPVSYLPASSVSYIPAASHLRSAISFSPPRDLSQRPPLPPPTAATSTRDALATGADVGRDFSPPPQLSQRPAADEGSLVAFAASSSASDRRFISTGCGEAGAKREAREIERLKRELDRVSKERNELKNECTALKKDRTKKDLQIKAKEAEIQNLKKANVSMKDVCSAGMNIDQSFHAPANEALHTGVSSRRTDKMSGKDKDAHSLRDDLYLKQGHQTDLLEALELRRRTMIDNGMSTSGVVSLEEDTHFEPRNATCKEIKAIGVQTDNTSDNEHLDCKKLLVERISGNLRAMWGMSPNSLSSRNLISKINVSCSEEILSLLQHTRLSDNCEPSSQAISSMNEAISQLYDTFIKMNSGKMSIQTFLEALLNLCAFDDAAIVSRTLRVFLKVLQHLLQHGAKSSESVPSGTMFLLNHMLTYSWRTTTKTVRPC

SEQ ID NO: 179542 - protein, 682 aa, Zea Mays
MDGGLDDEWEASFLDEVIRATDEAEAVVSRNPNPTPTPAPAPIPTYYPLAAAPVSYLPASSVSYIPAASHLRSAISFSPPRDLSQRPPLPPPTAATSTRDALATGADVGRDFSPPPQLSQRPAADEGSLVAFAASSSASDRRFISTGCGEAGAKREAREIERLKRELDRVSKERNELKNECTALKKDRTKKDLQIKAKEAEIQNLKKANVSSMKDVCSAGMNIDQSFHAPANEALHTGVSSRRTDKMSGKDKDAHSLRDDLYLKQGHQTDLLEALELRRRTMIDNGMSTSGVVSLEEDTHFEPRNATCKEIKAIGVQTDNTSDNEHLDCKKLLVERISGNLRAMWGMSPNSLSSRNLISKINVSCSEEILSLLQHTRLSDNCEPSSQAISSMNEAISQLYDTFIKMNSGKMSIQTFLEALLNLCAFDDAAIVSRTLRVFLKVLQHLLQHGAKSSERNNVSVEPYVNVLMENNHKDCSTLLRPVDAEDSLRLHNMFLPFTFWSSLFTGMLQIGVKYSQETIRTDALSIMILIVRTTDPIEERQKFGFTSVMTRLHLLLQKENGLLVKKHSVRLLFLLLNCPVMLKLLCSGGKDGSKQMGSEACESNRSQEVISSVLVDLSDCLTCGETCSLMFGDERSSYPAKPAGITRKLFETNLGSADEKQVMRDLDDRCCEPAAPYVDGK

SEQ ID NO: 179543 - protein, 769 aa, Zea Mays
MDGGLDDEWEASFLDEVIRATDEAEAVVSRNPNPTPTPAPAPIPTYYPLAAAPVSYLPASSVSYIPAASHLRSAISFSPPRDLSQRPPLPPPTAATSTRDALATGADVGRDFSPPPQLSQRPAADEGSLVAFAASSSASDRRFISTGCGEAGAKREAREIERLKRELDRVSKERNELKNECTALKKDRTKKDLQIKAKEAEIQNLKKANVAGMNIDQSFHAPANEALHTGVSSRRTDKMSGKDKDAHSLRDDLYLKQGHQTDLLEALELRRRTMIDNGMSTSGVVSLEEDTHFEPRNATCKEIKAIGVQTDNTSDNEHLDCKKLLVERISGNLRAMWGMSPNSLSSRNLISKINVSCSEEILSLLQHTRLSDNCEPSSQAISSMNEAISQLYDTFIKMNSGKMSIQTFLEALLNLCAFDDAAIVSRTLRVFLKVLQHLLQHGAKSSERNNVSVEPYVNVLMENNHKDCSTLLRPVDAEDSLRLHNMFLPFTFWSSLFTGMLQIGVKYSQETIRTDALSIMILIVRTTDPIEERQKFGFTSVMTRLHLLLQKENGLLVKKHSVRLLFLLLNCPVMLKLLCSGGKDGSKQMGSEACESNRSQEVISSVLVDLSDCLTCGETCSLGIELCRLVIILLAYIASSGKLGYEVLLVPVSARGASFLEMIMEVLASQMQYETRELLKERCLVMREALILLNRLASHANYSKPTLEVLTRSKLCATWTIDVANRLPHTWMANDLAELAQKFRSRVYAFIEEKPLTSDGTNLGASNKR

SEQ ID NO: 179544 - protein, 777 aa, Zea Mays
MDGGLDDEWEASFLDEVIRATDEAEAVVSRNPNPTPTPAPAPIPTYYPLAAAPVSYLPASSVSYIPAASHLRSAISFSPPRDLSQRPPLPPPTAATSTRDALATGADVGRDFSPPPQLSQRPAADEGSLVAFAASSSASDRRFISTGCGEAGAKREAREIERLKRELDRVSKERNELKNECTALKKDRTKKDLQIKAKEAEIQNLKKANVSSMKDVCSAGMNIDQSFHAPANEALHTGVSSRRTDKMSGKDKDAHSLRDDLYLKQGHQTDLLEALELRRRTMIDNGMSTSGVVSLEEDTHFEPRNATCKEIKAIGVQTDNTSDNEHLDCKKLLVERISGNLRAMWGMSPNSLSSRNLISKINVSCSEEILSLLQHTRLSDNCEPSSQAISSMNEAISQLYDTFIKMNSGKMSIQTFLEALLNLCAFDDAAIVSRTLRVFLKVLQHLLQHGAKSSERNNVSVEPYVNVLMENNHKDCSTLLRPVDAEDSLRLHNMFLPFTFWSSLFTGMLQIGVKYSQETIRTDALSIMILIVRTTDPIEERQKFGFTSVMTRLHLLLQKENGLLVKKHSVRLLFLLLNCPVMLKLLCSGGKDGSKQMGSEACESNRSQEVISSVLVDLSDCLTCGETCSLGIELCRLVIILLAYIASSGKLGYEVLLVPVSARGASFLEMIMEVLASQMQYETRELLKERCLVMREALILLNRLASHANYSKPTLEVLTRSKLCATWTIDVANRLPHTWMANDLAELAQKFRSRVYAFIEEKPLTSDGTNLGASNKR

SEQ ID NO: 179545 - protein, 537 aa, Zea Mays
MKDVCSAGMNIDQSFHAPANEALHTGVSSRRTDKMSGKDKDAHSLRDDLYLKQGHQTDLLEALELRRRTMIDNGMSTSGVVSLEEDTHFEPRNATCKEIKAIGVQTDNTSDNEHLDCKKLLVERISEEILSLLQHTRLSDNCEPSSQAISSMNEAISQLYDTFIKMNSGKMSIQTFLEALLNLCAFDDAAIVSRTLRVFLKVLQHLLQHGAKSSERNNVSVEPYVNVLMENNHKDCSTLLRPVDAEDSLRLHNMFLPFTFWSSLFTGMLQIGVKYSQETIRTDALSIMILIVRTTDPIEERQKFGFTSVMTRLHLLLQKENGLLVKKHSVRLLFLLLNCPVMLKLLCSGGKDGSKQMGSEACESNRSQEVISSVLVDLSDCLTCGETCSLGIELCRLVIILLAYIASSGKLGYEVLLVPVSARGASFLEMIMEVLASQMQYETRELLKERCLVMREALILLNRLASHANYSKPTLEVLTRSKLCATWTIDVANRLPHTWMANDLAELAQKFRSRVYAFIEEKPLTSDGTNLGASNKR

SEQ ID NO: 179546 - protein, 157 aa, Zea Mays
MKITRNVAKPDGRIEVETEVLAVEVLPGWKKGTKITFPNKGDKLHGQLAQDLTFVLDSKPHDVYNLEGNNLLVKQVIPLVDALAGAEINLTTLDGRNLPVRVEEVVRPGYEVVLENEGWPIRKEPGKKGKLVIKFDVTFPMRLSPSQRAAIRRIMGS

SEQ ID NO: 179547 - protein, 257 aa, Zea Mays
MDYYNILKVNRNATLEDLKKSYRRLARTWHPDKNLTGGAEAEAKFKQITEAYEVLSDPEKRAIYDQYGEEGLKGMPPPGSQSRSSTTAGPSGPSNFHYNPSDPDDFFAEFMASNKTYSFDHDRRRFQPRSHWTSARNSRSEAPSGSQKENGASTSNIEKPPPVEKTLLCTLEELYNGTKRKMKITRNVAKPDGYVVELLSSNFCDIFVVIGCSSMLRFSPFCCTRVWVNEHLDNLEIQTCTDDFSATIKICFANIYL

SEQ ID NO: 179548 - protein, 343 aa, Zea Mays
MAAAARVFRGSLFLMSPAAGAKASAAKKAGAAAAAAAVAKKTEAATTKPRLPTGITKPMPVSDEFRRFAGGAPEVARSEAIKLIWAHIKAHGLQTQQREVTLQEENAAYEKAISECKQKIQEKQMEATQLLSNLEEMEVTEHNLKTQLENALKELEAAQHKASTATSGTAENALLEAKSVTDLKSKDLEEKKRELELLDNKVQTLEKEWSVVEEESLKKPTPAQREKVLERQLHSLIEQLTAKQAQAEILATDVHSKEKELERLNHLHRNLYGGANETGAPRSRLSRGLLSGPEDYYYDPKAGRKPYQAGARTEGQNRLMILRSAIVLYVLLLHVIVFIKISV

SEQ ID NO: 179549 - protein, 195 aa, Zea Mays
MFPALREFVGGGKPVWGTCAGLIFLANKAVGQKTGGQELVGGLDCTVHRNFFGSQLQSFETELSVPKLSEKEGGNDTCRGVFIRAPAILEVGPDVEILADCPVPVDRPSITISFGEGTEEEEYSKDRVIVAVRQGNILATAFHPELTSDSRWHRFFLDMDKESPAKAFSALSLSSSSRDTEGLPKNKPFDLPIFE

SEQ ID NO: 179550 - protein, 166 aa, Zea Mays
MFPALREFVGGGKPVWGTCAGLIFLANKAVGQKTGGQELVGGLDCTVHRNFFGSQLQSFETELSVPKLSEKEGGNDTCRGVFIRAPAILEEEEYSKDRVIVAVRQGNILATAFHPELTSDSRWHRFFLDMDKESPAKAFSALSLSSSSRDTEGLPKNKPFDLPIFE

SEQ ID NO: 179551 - protein, 128 aa, Zea Mays
MFPALREFVGGGKPVWGTCAGLIFLANKAVVLLSGQKTGGQELVGGLDCTVHRNFFGSQLQSFETELSVPKLSEKEGGNDTCRGVFIRAPAILEVGPDVEILADCPVPVDRPSITISFGEGTEFLLVL

SEQ ID NO: 179552 - protein, 133 aa, Zea Mays
MAKLANYHNLFPALREFVGGGKPVWGTCAGLIFLANKAVGQKTGGQELVGGLDCTVHRNFFGSQLQSFETELSVPKLSEKEGGNDTCRGVFIRAPAILEVGPDVEILADCPVPVDRPSITISFGEGTEFLLVL

SEQ ID NO: 179553 - protein, 117 aa, Zea Mays
MAVVGVLALQGSYNEHMAVPCTSRVRRRWKACLGNLCWAHLSCKQSSSVAFRAKNRGAGTCWRIRLYSPPKLFWESDCFSCSFKALRQSFPCQSFRRRKEGMIHAAVYLYGHLLYWK

SEQ ID NO: 179554 - protein, 657 aa, Zea Mays
MEGAASGRCRMGMAIAAAVCLMPLLQLWGCVAVEANAGPYHFVKRHLDEVDRMRYKDPTQPLNTRIDDLLGRMTLAEKIGQMSQIERENATADVVSKYLVGSVLSGGGSVPAKNAPPEAWVEMVNGMQRAAMSTRLGIPVIYGIDAVHGHGNVYKATIFPHNVGLGCTREPELARRIGAAVALEVRATGIPYVFAPCVAVCRDPRWGRCYESFSEDPEVVRDMTAIISGFQGEIPDATDAGRPYVAPGHRNVAACSKHYVGDGGTTKGVNEGNTVASFHDLMAVHMPPYYNAVIRGVSTVMVSFSSWNGVKMHANHFLVTDHLKNRLRFRGFIISDWQGLDRITTPDHADYLLSIKLGILAGIDMVMIPYTYTEFIDDLTLLVRNGTIPMSRIDDAVRRILRVKFTMGLFDHPYADASLAGELGKQEHRDLAREAVRKSLVLLKNGKPGAGPMLPLPKNGAVLVAGSHADDLGSQCGGWTITWQGLTGNNLTAGTTILDGVRRAVAPGTDVVYSENPDAAFLQQNRARFGYAIVVVGEPPYAETFGDNLNLTIPAPGPDVIRNVCGAIKCVVVLVSGRPLVVEPFVDVIDALVAAWLPGTEGQGVSDVLFGDYGFTGKLSRTWFRSVDQLPMNVGDAHCEDALFPFGFGIETQPATY

SEQ ID NO: 179555 - protein, 615 aa, Zea Mays
MRRHLDEVDRMRYKDPTQPLNTRIDDLLGRMTLAEKIGQMSQIERENATADVVSKYLVGSVLSGGGSVPAKNAPPEAWVEMVNGMQRAAMSTRLGIPVIYGIDAVHGHGNVYKATIFPHNVGLGCTREPELARRIGAAVALEVRATGIPYVFAPCVAVCRDPRWGRCYESFSEDPEVVRDMTAIISGFQGEIPDATDAGRPYVAPGHRNVAACSKHYVGDGGTTKGVNEGNTVASFHDLMAVHMPPYYNAVIRGVSTVMVSFSSWNGVKMHANHFLVTDHLKNRLRFRGFIISDWQGLDRITTPDHADYLLSIKLGILAGIDMVMIPYTYTEFIDDLTLLVRNGTIPMSRIDDAVRRILRVKFTMGLFDHPYADASLAGELGKQEHRDLAREAVRKSLVLLKNGKPGAGPMLPLPKNGAVLVAGSHADDLGSQCGGWTITWQGLTGNNLTAGTTILDGVRRAVAPGTDVVYSENPDAAFLQQNRARFGYAIVVVGEPPYAETFGDNLNLTIPAPGPDVIRNVCGAIKCVVVLVSGRPLVVEPFVDVIDALVAAWLPGTEGQGVSDVLFGDYGFTGKLSRTWFRSVDQLPMNVGDAHCEDALFPFGFGIETQPATY

SEQ ID NO: 179556 - protein, 392 aa, Zea Mays
MKRTSLIYVPVKDLKGLSTGDVHLYCRNCSSRLTKQPLSGLHFAPLEMVACSPLGRDFVDMKKAIFDVSDENDHTAGKIKLKNSEEQAKIIATHAQPPTILEEGPSVSSSETIGVSQTNQPVTSQIETDTDVYFEKELDLLLGDLGHCCCVNGSNGKVEDSPSQISLRNRQNMLEIKRDYKLTKTISLGSSFVIKASNLLNDFEWVELFCGRCSSPLGSYPSQSSLVPADGRVRLFKCYTSTEIPVTGSHDVFRGHTLERVFVNLLLEVAEDEISFRTVVRDLKTKRPMLQLVLLSSKAWLSSGWCYENDTNGSHGTTDLQPSVKLLYSDYRNASEADLRTVEEWASKYRAEELYMMRRQIDELTECLGSAMDNFPVSCSSLEGLLLSSLRR

SEQ ID NO: 179557 - protein, 514 aa, Zea Mays
MRVLQHLNPRAGVLESLGQPEAHLHTCTMDVPQLTAEGATQLGDRVSLLHQTGTLQSETPCLTLGRDSNAVSMEKLHASDCLPCGKENVGTGLQPKSDPERADNRMSVARLGLDLNTVDSPDVAEPNPFFPYKKLGQSKVSDPSECGSTTGAIEESESHRKWREMKQNGFLSSFHGNAVVPRPRGRPPKRKRDDEFKKSSSTQHVQANKSVKVAAPSGLLSGLNPGIINHVRNSKQVYSIIKAMVHSERLENENHSSQTGERGREVNERIQDQKYGGGFMKCHLLINDNNAVFHQTLPNTSQFLAQDGDSLKLQLPSAVTMSSDRTFSTSADDPASNHDYMTVLSVKAASVASQWLELLHQDIRGRLAALKRSRKRVRNALHTELPYLTATEFSSNQENESSIANTSEIGCTDKAVSEAHVARWRSLFVQMDKTLQEEGKQLENKLKQVQEMQLNCDKGLKHMTCEAPLLGPMAELWKLKNPNISESEWAVQAAAASIYSTCNMVMRTENVPCF

SEQ ID NO: 179558 - protein, 441 aa, Zea Mays
MDFFTEYGEASQYQIQEVIGKGSYGVVAAAIDSHTGERVAIKKINDIFGNVSDAARILREIKLLRLLRHPNIVQIKHIMLPPTRREFKDIYVVFELMESDLHQVIKANDNLTPEHHRFFLYQLIRALKYMHSAHVFHRDLKPRNILANSDSKLKICDFGLARASFNDSLSAIYWTDYVATRWYRAPELCGSFFSSIHSDKAREYLLGMPRKRPIPFSHKFRNADPLALRLLERLLAFDPKDRPTAEEALADPYFSGLSKLELEPSAQPISKVDFEFEGRKLTKAGVREMIYREILEYHPQMLQEYIEGGDQIHFLYPSGVDRFQRQFAHLEENYRRGVASTPPRRQPTSLPRERVCSSEDGHSQDSDSEEQRAASYVARTTISPPRSQEEGGKLQPAYQSAAAAADSCAKSYLKGAASISGASRRGIKGDNGRKEKESPRL

SEQ ID NO: 179559 - protein, 234 aa, Zea Mays
MPRKRPIPFSHKFRNADPLALRLLERLLAFDPKDRPTAEEALADPYFSGLSKLELEPSAQPISKVDFEFEGRKLTKAGVREMIYREILEYHPQMLQEYIEGGDQIHFLYPSGVDRFQRQFAHLEENYRRGVASTPPRRQPTSLPRERVCSSEDGHSQDSDSEEQRAASYVARTTISPPRSQEEGGKLQPAYQSAAAAADSCAKSYLKGAASISGASRRGIKGDNGRKEKESPRL

SEQ ID NO: 179560 - protein, 493 aa, Zea Mays
MAAAAAAAGGEGDVGGGNSAGALLRIFVGGLAESVGAADLEALFASAGRVAGVEFVRTNGRSFAYVDFHCPNDKALARLFSTVKALPLKGTGKHKYSFRHIEVPSYPIHFCDCEEHCGPPEEANNEYASVLNAAAYEKERNIMNSVMNKLFEKENEHFDSGAMEKCDDRTDTIEPSNTVNGMQIEETEDAPEDLDDLQMEETEESSDEDLDDDLVINIAPRKSNKPAVRENIKQEVNKDSQLQKRPRIEETSLPKKRQKSEASSEPIKRNGEQHVSVTLDTRTAGKTLPAKSEASQNEQKSLDLKGKRTYEFSSALPKDKSSADPQGITALASSSIKTGSAQNTGSIEPKRGYSWIQKSAWRDLVGGTGSASFSISQVLPNNNPAPAVFSNVAGSERSSKSSEATAQLLSSVGTLSTSTADESTDHAIGGEPKESNKPQKVRVVPKITISEVCPFMRNTESQKQWAKAKKAVTGFAKKRNESSTGKGKPSNKQ

SEQ ID NO: 179561 - protein, 1725 aa, Zea Mays
MNVGHAAHLSGQTAHMNQVPGSGVGIGVGGSDGLPQHQPMQEMAALSGMDQQFVMLRTAMRDKISDYIGRKQSPGDWRKRLPELAKRLEEILYRKFPNKHEYYNMMKGPVEPQLQFAIKTLSAQNQHNQQNPQMTRQISSSSSYGAMIPTPGMTQGTSAGSRTPYVTETNALSSSGACMVPQNANMGTSMQGPMSNGYQHLNTNISQNSTTNNVESTMGSVGVQRQLSHMIPTPGFSNQQNVPSNPDYSNGTGYFNGESAVAPHMQHQKQFPSNHNSNQIQHIGGHNNSGIHSSLLDNSSAYGLSDGHMNGGIGVHGSNMQLTNRTTAPEAYMNISSYGNSPKPMQQQFNQHPQQRIPTSVDMAGSGSFYAIGSTPLTTANSQSMNVANLQSRSSMNQMLVSNQLNIQSVQQQSQIKNGPLDQTEKVNFQSTQLTHDQLLHQHPMSQHQVQPNSQFIQNQYHINQQQPNSQHQQAMLRNNSLKQSQMASNHSMQLPEQGTLPHTELVSSQASDPADLPNFQGQYQQRNALDNVKGGQMLGHLSSSQNFLPSASHGSQQLLPSNPQLDNGSNAVSYVLKGSQTEQMLLSQWQPQTMEKAPVATNSSLEKQVQEDCCQRIMSQDGVQQPFSSDWCLSNGTLASVDPAVPKPTAGGFGQVKRNIHYLRQIKWLLLLFHAKTCTYPVGSCKFNGCVQVQELLNHFQNCQRKDCSYRSCTKSKAMSHHYKTCVDEQCPVCSVVRKFLRQSTEQASKQKTLESRKLAQQNVPQRIMNGIEGDRMDVDPMSAEAFEDQPSVPKRLKMHLPSLSGPENDISVVSNHHVNPGFLLQEAQPEQLEHNNRTTYLKREVDAKADIRAPQKPIKISYDIDENVTTSRHNVIPGVPSEMDSHIKQENLSVNKETSETALEVKNETNDLTDATVTKSGKPKIKGVSMIELFYPDEVDVHIDSLKLWVGQSKAKAEKNQAIGHSENENSCQLCRVEKLTFEPPPMYCSPCGARIKRNAPYYAVGTGDTRHYLCIPCYNESRGETIEVEGQTFPKAKLEKKRNEEETEEWWVQCDKCQCWQHQICALFNGRRNGGGQAEYTCPHCYVEEVKCGLRKPLPQSAVLGAKDLPRTVLSDHIEDRLFKRLKQEKQDRAAAAGKSIDEIPGAEGLVVRVVSSVDKKLEVKPRFLEIFQEDNYPTEFPYKSKAVLLFQRIEGVEVCLFGMYVQEFGAECSSPNQRRVYLSYLDSVKYFRPEIKTVSGEALRTYVYHEILIGYLEYCKLRGFTSCYIWACPPLKGEDYILYCHPEIQKTPKSDKLREWYLSMLRKASKEEIVVELTNLYDHFFITMGGCKAKVTASRLPYFDGDYWPGAAEDMINQLRQEEDDRKLQKKSKTKKIITKRALKAAGHTDLSGNASKDAMLMQKLGETIYPMKEDFIMVHLQYSCSHCCTLMVSGRRWVCHQCRSFYICDKCYDAEQQLEDRERHPCNSRDTHMLHPVDIVGVPKDTKDRDDILESEFFDTRQAFLSLCQGNHYQYDTLRRAKHSSIMVLYHLHNPTAPAFVTTCNACCHDIETGQSWRCEICPDFDVCNACFQKGAVTHPHKLTNHPSAADRDAQNAEARQMRVQQLRKMLDLLVHASMCRSGSCQYPHCRKVKGLFRHGMQCKTRASGGCVLCKKMWYMLQLHARACKDSECKVPRCSIMGANGKEGSSGWRRPKSTTSLALNENGSRMRLQRRQRRLR

SEQ ID NO: 179562 - protein, 1146 aa, Zea Mays
MAGSGSFYAIGSTPLTTANSQSMNVANLQSRSSMNQMLVSNQLNIQSVQQQSQIKNGPLDQTEKVNFQSTQLTHDQLLHQHPMSQHQVQPNSQFIQNQYHINQQQPNSQHQQAMLRNNSLKQSQMASNHSMQLPEQGTLPHTELVSSQASDPADLPNFQGQYQQRNALDNVKGGQMLGHLSSSQNFLPSASHGSQQLLPSNPQLDNGSNAVSYVLKGSQTEQMLLSQWQPQTMEKAPVATNSSLEKQVQEDCCQRIMSQDGVQQPFSSDWCLSNGTLASVDPAVPKPTAGGFGQVKRNIHYLRQIKWLLLLFHAKTCTYPVGSCKFNGCVQVQELLNHFQNCQRKDCSYRSCTKSKAMSHHYKTCVDEQCPVCSVVRKFLRQSTEQASKQKTLESRKLAQQNVPQRIMNGIEGDRMDVDPMSAEAFEDQPSVPKRLKMHLPSLSGPENDISVVSNHHVNPGFLLQEAQPEQLEHNNRTTYLKREVDAKADIRAPQKPIKISYDIDENVTTSRHNVIPGVPSEMDSHIKQENLSVNKETSETALEVKNETNDLTDATVTKSGKPKIKGVSMIELFYPDEVDVHIDSLKLWVGQSKAKAEKNQAIGHSENENSCQLCRVEKLTFEPPPMYCSPCGARIKRNAPYYAVGTGDTRHYLCIPCYNESRGETIEVEGQTFPKAKLEKKRNEEETEEWWVQCDKCQCWQHQICALFNGRRNGGGQAEYTCPHCYVEEVKCGLRKPLPQSAVLGAKDLPRTVLSDHIEDRLFKRLKQEKQDRAAAAGKSIDEIPGAEGLVVRVVSSVDKKLEVKPRFLEIFQEDNYPTEFPYKSKAVLLFQRIEGVEVCLFGMYVQEFGAECSSPNQRRVYLSYLDSVKYFRPEIKTVSGEALRTYVYHEILIGYLEYCKLRGFTSCYIWACPPLKGEDYILYCHPEIQKTPKSDKLREWYLSMLRKASKEEIVVELTNLYDHFFITMGGCKAKVTASRLPYFDGDYWPGAAEDMINQLRQEEDDRKLQKKSKTKKIITKRALKAAGHTDLSGNASKDAMLMQKLGETIYPMKEDFIMVHLQYSCSHCCTLMVSGRRWVCHQCRSFYICDKCYDAEQQLEDRERHPCNSRDTHMLHPVLYPFHSQYRAGANRLSRYVLILSFLG

SEQ ID NO: 179563 - protein, 1613 aa, Zea Mays
MMKGPVEPQLQFAIKTLSAQNQHNQQNPQMTRQISSSSSYGAMIPTPGMTQGTSAGSRTPYVTETNALSSSGACMVPQNANMGTSMQGPMSNGYQHLNTNISQNSTTNNVESTMGSVGVQRQLSHMIPTPGFSNQQNVPSNPDYSNGTGYFNGESAVAPHMQHQKQFPSNHNSNQIQHIGGHNNSGIHSSLLDNSSAYGLSDGHMNGGIGVHGSNMQLTNRTTAPEAYMNISSYGNSPKPMQQQFNQHPQQRIPIDMAGSGSFYAIGSTPLTTANSQSMNVANLQSRSSMNQMLVSNQLNIQSVQQQSQIKNGPLDQTEKVNFQSTQLTHDQLLHQHPMSQHQVQPNSQFIQNQYHINQQQPNSQHQQAMLRNNSLKQSQMASNHSMQLPEQGTLPHTELVSSQASDPADLPNFQGQYQQRNALDNVKGGQMLGHLSSSQNFLPSASHGSQQLLPSNPQLDNGSNAVSYVLKGSQTEQMLLSQWQPQTMEKAPVATNSSLEKQVQEDCCQRIMSQDGVQQPFSSDWCLSNGTLASVDPAVPKPTAGGFGQVKRNIHYLRQIKWLLLLFHAKTCTYPVGSCKFNGCVQVQELLNHFQNCQRKDCSYRSCTKSKAMSHHYKTCVDEQCPVCSVVRKFLRQSTEQASKQKTLESRKLAQQNVPQRIMNGIEGDRMDVDPMSAEAFEDQPSVPKRLKMHLPSLSGPENDISVVSNHHVNPGFLLQEAQPEQLEHNNRTTYLKREVDAKADIRAPQKPIKISYDIDENVTTSRHNVIPGVPSEMDSHIKQENLSVNKETSETALEVKNETNDLTDATVTKSGKPKIKGVSMIELFYPDEVDVHIDSLKLWVGQSKAKAEKNQAIGHSENENSCQLCRVEKLTFEPPPMYCSPCGARIKRNAPYYAVGTGDTRHYLCIPCYNESRGETIEVEGQTFPKAKLEKKRNEEETEEWWVQCDKCQCWQHQICALFNGRRNGGGQAEYTCPHCYVEEVKCGLRKPLPQSAVLGAKDLPRTVLSDHIEDRLFKRLKQEKQDRAAAAGKSIDEIPGAEGLVVRVVSSVDKKLEVKPRFLEIFQEDNYPTEFPYKSKAVLLFQRIEGVEVCLFGMYVQEFGAECSSPNQRRVYLSYLDSVKYFRPEIKTVSGEALRTYVYHEILIGYLEYCKLRGFTSCYIWACPPLKGEDYILYCHPEIQKTPKSDKLREWYLSMLRKASKEEIVVELTNLYDHFFITMGGCKAKVTASRLPYFDGDYWPGAAEDMINQLRQEEDDRKLQKKSKTKKIITKRALKAAGHTDLSGNASKDAMLMQKLGETIYPMKEDFIMVHLQYSCSHCCTLMVSGRRWVCHQCRSFYICDKCYDAEQQLEDRERHPCNSRDTHMLHPVDIVGVPKDTKDRDDILESEFFDTRQAFLSLCQGNHYQYDTLRRAKHSSIMVLYHLHNPTAPAFVTTCNACCHDIETGQSWRCEICPDFDVCNACFQKGAVTHPHKLTNHPSAADRDAQNAEARQMRVQQLRKMLDLLVHASMCRSGSCQYPHCRKVKGLFRHGMQCKTRASGGCVLCKKMWYMLQLHARACKDSECKVPRCRDLKEHLRRLQQQSDSRRRAAVNEMMRQRAAEVAAN

SEQ ID NO: 179564 - protein, 1316 aa, Zea Mays
MNVGHAAHLSGQTAHMNQVPGSGVGIGVGGSDGLPQHQPMQEMAALSGMDQQFVMLRTAMRDKISDYIGRKQSPGDWRKRLPELAKRLEEILYRKFPNKHEYYNMMKGPVEPQLQFAIKTLSAQNQHNQQNPQMTRQISSSSSYGAMIPTPGMTQGTSAGSRTPYVTETNALSSSGACMVPQNANMGTSMQGPMSNGYQHLNTNISQNSTTNNVESTMGSVGVQRQLSHMIPTPGFSNQQNVPSNPDYSNGTGYFNGESAVAPHMQHQKQFPSNHNSNQIQHIGGHNNSGIHSSLLDNSSAYGLSDGHMNGGIGVHGSNMQLTNRTTAPEAYMNISSYGNSPKPMQQQFNQHPQQRIPIDMAGSGSFYAIGSTPLTTANSQSMNVANLQSRSSMNQMLVSNQLNIQSVQQQSQIKNGPLDQTEKVNFQSTQLTHDQLLHQHPMSQHQVQPNSQFIQNQYHINQQQPNSQHQQAMLRNNSLKQSQMASNHSMQLPEQGTLPHTELVSSQASDPADLPNFQGQYQQRNALDNVKGGQMLGHLSSSQNFLPSASHGSQQLLPSNPQLDNGSNAVSYVLKGSQTEQMLLSQWQPQTMEKAPVATNSSLEKQVQEDCCQRIMSQDGVQQPFSSDWCLSNGTLASVDPAVPKPTAGGFGQVKRNIHYLRQIKWLLLLFHAKTCTYPVGSCKFNGCVQVQELLNHFQNCQRKDCSYRSCTKSKAMSHHYKTCVDEQCPVCSVVRKFLRQSTEQASKQKTLESRKLAQQNVPQRIMNGIEGDRMDVDPMSAEAFEDQPSVPKRLKMHLPSLSGPENDISVVSNHHVNPGFLLQEAQPEQLEHNNRTTYLKREVDAKADIRAPQKPIKISYDIDENVTTSRHNVIPGVPSEMDSHIKQENLSVNKETSETALEVKNETNDLTDATVTKSGKPKIKGVSMIELFYPDEVDVHIDSLKLWVGQSKAKAEKNQAIGHSENENSCQLCRVEKLTFEPPPMYCSPCGARIKRNAPYYAVGTGDTRHYLCIPCYNESRGETIEVEGQTFPKAKLEKKRNEEETEEWWVQCDKCQCWQHQICALFNGRRNGGGQAEYTCPHCYVEEVKCGLRKPLPQSAVLGAKDLPRTVLSDHIEDRLFKRLKQEKQDRAAAAGKSIDEIPGAEGLVVRVVSSVDKKLEVKPRFLEIFQEDNYPTEFPYKSKAVLLFQRIEGVEVCLFGMYVQEFGAECSSPNQRRVYLSYLDSVKYFRPEIKTVSGEALRTYVYHEILIGYLEYCKLRGFTSCYIWACPPLKGEDYILYCHPEIQKTPKSDKLRTYRCFGKLLRRKLLLS

SEQ ID NO: 179565 - protein, 1161 aa, Zea Mays
MNVGHAAHLSGQTAHMNQVPGSGVGIGVGGSDGLPQHQPMQEMAALSGMDQQFVMLRTAMRDKISDYIGRKQSPGDWRKRLPELAKRLEEILYRKFPNKHEYYNMMKGPVEPQLQFAIKTLSAQNQHNQQNPQMTRQISSSSSYGAMIPTPGMTQGTSAGSRTPYVTETNALSSSGACMVPQNANMGTSMQGPMSNGYQHLNTNISQNSTTNNVESTMGSVGVQRQLSHMIPTPGFSNQQNVPSNPDYSNGTGYFNGESAVAPHMQHQKQFPSNHNSNQIQHIGGHNNSGIHSSLLDNSSAYGLSDGHMNGGIGVHGSNMQLTNRTTAPEAYMNISSYGNSPKPMQQQFNQHPQQRIPTSVDMAGSGSFYAIGSTPLTTANSQSMNVANLQSRSSMNQMLVSNQLNIQSVQQQSQIKNGPLDQTEKVNFQSTQLTHDQLLHQHPMSQHQVQPNSQFIQNQYHINQQQPNSQHQQAMLRNNSLKQSQMASNHSMQLPEQGTLPHTELVSSQASDPADLPNFQGQYQQRNALDNVKGGQMLGHLSSSQNFLPSASHGSQQLLPSNPQLDNGSNAVSYVLKGSQTEQMLLSQWQPQTMEKAPVATNSSLEKQVQEDCCQRIMSQDGVQQPFSSDWCLSNGTLASVDPAVPKPTAGGFGQVKRNIHYLRQIKWLLLLFHAKTCTYPVGSCKFNGCVQVQELLNHFQNCQRKDCSYRSCTKSKAMSHHYKTCVDEQCPVCSVVRKFLRQSTEQASKQKTLESRKLAQQNVPQRIMNGIEGDRMDVDPMSAEAFEDQPSVPKRLKMHLPSLSGPENDISVVSNHHVNPGFLLQEAQPEQLEHNNRTTYLKREVDAKADIRAPQKPIKISYDIDENVTTSRHNVIPGVPSEMDSHIKQENLSVNKETSETALEVKNETNDLTDATVTKSGKPKIKGVSMIELFYPDEVDVHIDSLKLWVGQSKAKAEKNQAIGHSENENSCQLCRVEKLTFEPPPMYCSPCGARIKRNAPYYAVGTGDTRHYLCIPCYNESRGETIEVEGQTFPKAKLEKKRNEEETEEWWVQCDKCQCWQHQICALFNGRRNGGGQAEYTCPHCYVEEVKCGLRKPLPQSAVLGAKDLPRTVLSDHIEDRLFKRLKQEKQDRAAAAGKSIDEFGYSSTMSFVYLPDF

SEQ ID NO: 179566 - protein, 363 aa, Zea Mays
MDPVAGTAEHRGPLEVRARAPGKIILAGEHAVVHGSAAVAAAIDLYTNSSLLLRPTGEGGGAGSGAVELDLRDSGLTFSWPCSRLRGALGEEISANPGAPAPCSPDQLAAIARLLQDQEIPEAKIWLSAGLSAFLFLYASILGCRPGKAVVSSDLPMGAGLGSSAAFCVSMSGALLTAAGAVSVGARRGAEGWEVLEKGALELVNQWAFQGEKIIHGKPSGIDNSVSTFGKMIKFKKGELTNLESWNPVKMLITDTRVGRNTKALVAGVSERASRHPDAMASVFHAVNSISEELSSIVELAAEDEIAITSKEDKLAELMEMNQANWSWWWRLCVDSNTDVIGQYCSGESHHRARISRLSLLQS

SEQ ID NO: 179567 - protein, 191 aa, Zea Mays
MDPVAGTAEHRGPLEVRARAPGKIILAGEHAVVHGSAAVAAAIDLYTNSSLLLRPTGPGEGGGAGSGAVELDLRDSGLTFSWPCSRLRGALGEEISANPGAPAPCSPDQLAAIARLLQDQEIPEAKIWLSAGLSAFLFLYASILGCRPGKAVVSSDLPMGAGLGSSAAFCVSMSGALLTAAGAVSVGEGCS

SEQ ID NO: 179568 - protein, 397 aa, Zea Mays
MDPVAGTAEHRGPLEVRARAPGKIILAGEHAVVHGSAAVAAAIDLYTNSSLLLRPTGEGGGAGSGAVELDLRDSGLTFSWPCSRLRGALGEEISANPGAPAPCSPDQLAAIARLLQDQEIPEAKIWLSAGLSAFLFLYASILGCRPGKAVVSSDLPMGAGLGSSAAFCVSMSGALLTAAGAVSVGARRGAEGWEVLEKGALELVNQWAFQGEKIIHGKPSGIDNSVSTFGKMIKFKKGELTNLESWNPVKMLITDTRVGRNTKALVAGVSERASRHPDAMASVFHAVNSISEELSSIVELAAEDEIAITSKEDKLAELMEMNQGLLQCMGVSHSSIETVLRTTLKYSLVSKLTGAGGGGCVLTLIPTCILFYISPGCIFSFMVLYKINTIQLMCDFC

SEQ ID NO: 179569 - protein, 279 aa, Zea Mays
MCQVVPMENMNGRKRVEEGELCDRRNGRGVDLNRNWSVDWGKKEKDYDPYEENPGIAPFSEPEAQIMRELSRSFKPHIWVNVHSGMENTTPNGASAHSMRSVLENLNRRHFQDSCLVGSGGGSVGYLAHGTTTDYMYDIAKVPMPFTFEIYGDEKASSDDCFKMFNPVDKKTFDRVVNKWCMAFLILFEEGLRNLRDAQIVSQGTLENWVPIGGDIVEINVERKSSIRERRKLEGLDLGMQELRTYFRLFLLSTFLLMFMFCARISKNRNRDSGNLFDP

SEQ ID NO: 179570 - protein, 288 aa, Zea Mays
MCQVVPMENMNGRKRVEEGELCDRRNGRGVDLNRNWSVDWGKKEKDYDPYEENPGIAPFSEPEAQIMRELSRSFKPHIWVNVHSGMEALFMPYDHKNTTPNGASAHSMRSVLENLNRRHFQDSCLVGSGGGSVGYLAHGTTTDYMYDIAKVPMPFTFEIYGDEKASSDDCFKMFNPVDKKTFDRVVNKWCMAFLILFEEGLRNLRDAQIVSQGTLENWVPIGGDIVEINVERKSSIRERRKLEGLDLGMQELRTYFRLFLLSTFLLMFMFCARISKNRNRDSGNLFDP

SEQ ID NO: 179571 - protein, 368 aa, Zea Mays
MDTIKTSNKGYSAELFVVTFNHVKERMDNGSKVHILLSFGQHGRELITSEVALRLLYVLTEKPKIAGVDISSFEKLLENLVIKVVPMENMNGRKRVEEGELCDRRNGRGVDLNRNWSVDWGKKEKDYDPYEENPGIAPFSEPEAQIMRELSRSFKPHIWVNVHSGMEALFMPYDHKNTTPNGASAHSMRSVLENLNRRHFQDSCLVGSGGGSVGYLAHGTTTDYMYDIAKVPMPFTFEIYGDEKASSDDCFKMFNPVDKKTFDRVVNKWCMAFLILFEEGLRNLRDAQIVSQGTLENWVPIGGDIVEINVERKSSIRERRKLEGLDLGMQELRTYFRLFLLSTFLLMFMFCARISKNRNRDSGNLFDP

SEQ ID NO: 179572 - protein, 273 aa, Zea Mays
MENMNGRKRVEEGELCDRRNGRGVDLNRNWSVDWGKKEKDYDPYEENPGIAPFSEPEAQIMRELSRSFKPHIWVNVHSGMENTTPNGASAHSMRSVLENLNRRHFQDSCLVGSGGGSVGYLAHGTTTDYMYDIAKVPMPFTFEIYGDEKASSDDCFKMFNPVDKKTFDRVVNKWCMAFLILFEEGLRNLRDAQIVSQGTLENWVPIGGDIVEINVERKSSIRERRKLEGLDLGMQELRTYFRLFLLSTFLLMFMFCARISKNRNRDSGNLFDP

SEQ ID NO: 179573 - protein, 262 aa, Zea Mays
MPKKGTKSKKEKVDDVPNEQENKLPDYLELQRTRVVCNADAPIHTQGFQYSGAFAAMGIDNSVSVDKFCKNFKIEINRLTEDYMEFDMIGIDASIANAFRRILISEVPTMAIEKVFMADNNSVIADEVLSHRLGLIPLDADPRLFEYISENDVPNERNTIVYKLHVSCPKNSQRITVKSSELEWLPEGSQLSMSAPAQSGDKQKTFTSFSQSQKEILEKPLGVKYKDITIARLGPGQAIELEAHAVKGTGNVHAKWSPVATA

SEQ ID NO: 179574 - protein, 310 aa, Zea Mays
MPKKGTKSKKEKVDDVPNEQENKLPDYLELQRTRVVCNADAPIHVPTMAIEKVFMADNNSVIADEVLSHRLGLIPLDADPRLFEYISENDVPNERNTIVYKLHVSCPKNSQRITVKSSELEWLPEGSQLSMSAPAQSGDKQKTFTSFSQSQKEILEKPLGVKYKDITIARLGPGQAIELEAHAVKGTGNVHAKWSPVATAWYRMLPEVVILKEVEGPQAEELVNKCRVNVFDIEDLANGGKRAVVARPRACTLCRECVMGPNEKQVELRRVRDHFIFTIESTGSMPPEVLFTEAVKILEEKCARVISELS

SEQ ID NO: 179575 - protein, 180 aa, Zea Mays
MSAPAQSGDKQKTFTSFSQSQKEILEKPLGVKYKDITIARLGPGQAIELEAHAVKGTGNVHAKWSPVATAWYRMLPEVVILKEVEGPQAEELVNKCRVNVFDIEDLANGGKRAVVARPRACTLCRECVMGPNEKQVELRRVRDHFIFTIESTGSMPPEVLFTEAVKILEEKCARVISELS

SEQ ID NO: 179576 - protein, 240 aa, Zea Mays
MPKKGTKSKKEKVDDVPNEQENKLPDYLELQRTRVVCNADAPIHTQGFQYSGAFAAMGIDNSVSVDKFCKNFKIEINRLTEDYMEFDMIGIDASIANAFRRILISEVPTMAIEKVFMADNNSVIADEVLSHRLGLIPLDADPRLFEYISENDVPNERNTIVYKLHVSCPKNSQRITVKSSELEWLPEGSQLSMSAPAQSGDKQKTFTSFSQSQKEILEKPLGVKYKDITIARLGPGQVAV

SEQ ID NO: 179577 - protein, 316 aa, Zea Mays
MGIDNSVSVDKFCKNFKIEINRLTEDYMEFDMIGIDASIANAFRRILISEVPTMAIEKVFMADNNSVIADEVLSHRLGLIPLDADPRLFEYISENDVPNERNTIVYKLHVSCPKNSQRITVKSSELEWLPEGSQLSMSAPAQSGDKQKTFTSFSQSQKEILEKPLGVKYKDITIARLGPGQAIELEAHAVKGTGNVHAKWSPVATAWYRMLPEVVILKEVEGPQAEELVNKCRVNVFDIEDLANGGKRAVVARPRACTLCRECVMGPNEKQVELRRVRDHFIFTIESTGSMPPEVLFTEAVKILEEKCARVISELS

SEQ ID NO: 179578 - protein, 539 aa, Zea Mays
MRIAFLVLLVLSLFLLPNGIGKSLAARPSVVNIGSILRLNSTTGGVSDVAIRAAVEDINSDPTVLNGTTLHVQTRDTNCDDGFLGMVQALQFMETDVIAIIGPQCSPIAHIISYVANELQVPLMSFASDATLSSIQFPFFVRTMPSDLYQMAAVAAVIDYYQWKIVTAIYVDDDYGRNGIAALDDELTARRCKISFKIGFRSNAKKSDLLNLLVTVSNMESRVIILHTGSEPGLKLLSLANGLNMMGNGYVWIATDWLSAYLDANSSVSAETINGMQGVLTVRPHTPKSKVKSNLVSKWSSLSKKYNHSDLRTSAYGFYVYDSVWTVARALDAFFDDGGRISFTNDSRLRDETGGTLHLEAMSVFDMGNKLLNKIRNVNFTGVSGQVQFNAQFELIHPAYDIISIIGNGMRTIGFWSNYTRLLSTVLPEDLYSKPPNTSLANQQLYDVIWPGETAQRPRGWAFPSNAKELKIGVPNRFSFKDFVSKDNATGSMKGYCIDVFTQALALLPYPVTYRFIPFGNGTENPHYSQLVQMVADNQ

SEQ ID NO: 179579 - protein, 526 aa, Zea Mays
MRIAFLVLLVLSLFLLPNGIGKSLAARPSVVNIGSILRLNSTTGGVSDVAIRAAVEDINSDPTVLNGTTLHVQTRDTNCDDGFLGMVQALQFMETDVIAIIGPQCSPIAHIISYVANELQVPLMSFASDATLSSIQFPFFVRTMPSDLYQMAAVAAVIDYYQWKIVTAIYVDDDYGRNGIAALDDELTARRCKISFKIGFRSNAKKSDLLNLLVTVSNMESRVIILHTGSEPGLKLLSLANGLNMMGNGYVWIATDWLSAYLDANSSVSAETINGMQGVLTVRPHTPKSKVKSNLVSKWSSLSKKYNHSDLRTSAYGFYVYDSVWTVARALDAFFDDGGRISFTNDSRLRDETGGTLHLEAMSVFDMGNKLLNKIRNVNFTGVSGQVQFNAQFELIHPAYDIISIIGNGMRTIGFWSNYTRLLSTVLPEDLYSKPPNTSLANQQLYDVIWPGETAQRPRGWAFPSNAKELKIGVPNRFSFKDFVSKDNATGSMKGYCIDVFTQALALLPYPVTYSNRGYRNYNEPN

SEQ ID NO: 179580 - protein, 120 aa, Zea Mays
MYFVLYTWCRVSELRVVELLDGLCDKMQDYTLKKLESGEKGWVKVTDWNSFQTENKAAARAHSKKLSTFCGRLLEETEDELSEWIKTTSTESEYVSKALCEDISKHCRSTSATIQIDDEL

SEQ ID NO: 179581 - protein, 270 aa, Zea Mays
MEYERIEKPFPVQGGGFSPKRLRAMLLGVDKRRKGQDGAAEEDEDGGGDYGALPKAHARSGAGDVNFNRHDASTTLQSAATCIPPPTTVRSVSMRDMGTEMTPIASQEPSRTGTPVRATSPNCSQPTTPRRTLGGPSAVGSFISHGGECSSSELSEQELQTKTRREIMLLGTQLGKTSIAAWASKKEEEKDASLSLKPVPMDQSTQNITAIRAAAWEEAEKAKYLARFKREEIKIQAWEDHQKAQIEAEMRKIEVRRLFPVNFPVNNDGR

SEQ ID NO: 179582 - protein, 469 aa, Zea Mays
MEYERIEKPFPVQGGGFSPKRLRAMLLGVDKRRKGQDGAAEEDEDGGGDYGALPKAHARSGAGDGGGGGGATCEEYKDVDVVSTTSEFSSSLETAGGHRPRDAHPVATGSRTRVPPEEDSCDSESVASNFEFHKERRAAASAAASVVPPFSKPAPSKWDDAQKWIASPTANCPGRGGAAPAPKKTEKPGSGIGRLPLPATKVVVEATEEIDTKRMDPSQEKREIGWQKAARWAPPDPCPEAEPCPTKTTLLAVETTVAAASAAVNFNRHDASTTLQSAATCIPPPTTVRSVSMRDMGTEMTPIASQEPSRTGTPVRATSPNCSQPTTPRRTLGGPSAVGSFISHGGECSSSELSEQELQTKTRREIMLLGTQLGKTSIAAWASKKEEEKDASLSLKPVPMDQSTQNITAIRAAAWEEAEKAKYLARFKREEIKIQAWEDHQKAQIEAEMRKIEVRRLFPVNFPVNNDGR

SEQ ID NO: 179583 - protein, 195 aa, Zea Mays
MGGCVGKVRRDDEEKLDFKGGNVHIITSKEGWDQKIAGANRDKKTKGRRSTLSPNKLSIRGHRRRDVFACPWFELGSRHGRLKEFADADLGPKERCCWSSVVVDARDSRQRCLLPALWRETARCEGEGGEGAGMNLPFIASGWGGEQSAGMVASIGVGTRRDDRGVGREGEGEEGEGNERVEIRGPRKGRGNSGL

SEQ ID NO: 179584 - protein, 299 aa, Zea Mays
MGDSADWNEDNTALVCELFAEQVKAHNRSGTHLKKTGYKNVMDKFKEKTGLSYTKMQFKNKWDKMRIEYTNWKRLSKETGLGWDTAKKTWSATNERWKNLNKQYKGIAKFKDGPLLHEEEKAIMYEDIRNTGDDHWAPSSGTTPQILEGETTENTDDKDGDYEANDDKDEDYEECEEVSPTTAKGKRHVSVGRKDKGKKPRSLGGHWVQDQLSKLVTASEKSTASVESLARKEDNGCSIRDVMALVKECGAVPGTKEHFIASQVFVKRAEREMFMTLDTPEERFNWLTMKHDWLTRMSH

SEQ ID NO: 179585 - protein, 337 aa, Zea Mays
METISSCPICNIQVLTAELEWHANSHFDDDQLQMDMELAHQMSVAESSTDAMNDPKHYSGSFTSDSNALGALSSHSGYSHHYSELLDEQISCLVRAQIRSKVQEVEGGILSLLRSCLESEAGSSTSMISCYIDHHQSLSSEDKGWGCGWRNIQMLSSHLLKQRPEAREVLFGGSGFVPDIPSLQRWLEIAWDKKFDTIGSSHFHNKIYGAKKWIGTTECAALFRSFGLRARIVDFDSTESSDLHSNNGSRAASQVRGPMDKFLIKNKPPKSSSELCREDAESTRGQQALVDWVWNYFASERSDRLATQRVTVSNKTLTKEVPFIDHCISNIKVIQGQ

SEQ ID NO: 179586 - protein, 417 aa, Zea Mays
METISSCPICNIQVLTAELEWHANSHFDDDQLQMDMELAHQMSVAESSTDAMNDPKHYSGSFTSDSNALGALSSHSGYSHHYSELLDEQISCLVRAQIRSKVQEVEGGILSLLRSCLESEAGSSTSMISCYIDHHQSLSSEDKGWGCGWRNIQMLSSHLLKQRPEAREVLFGGSGFVPDIPSLQRWLEIAWDKKFDTIGSSHFHNKIYGAKKWIGTTECAALFRSFGLRARIVDFDSTESSDLHSNNGSRAASQVRGPMDKFLIKNKPPKSSSELCREDAESTRGQQALVDWVWNYFASERSDRLATQRVTVSNKTSFKDNSWDSKETGSSWISRTIQPFDFRSGPLRPSKCFPLMPQRTADLERCLRSKKGWQRLVKRGVHTLRKPQYQLCYVDPGIASSEEVERLKTIDGTLVRF

SEQ ID NO: 179587 - protein, 346 aa, Zea Mays
METISSCPICNIQVLTAELEWHANSHFDDDQLQMDMELAHQMSVAESSTDAMNDPKHYSGSFTSDSNALGALSSHSGYSHHYSELLDEQISCLVRAQIRSKVQEVEGGILSLLRSCLESEAGSSTSMISCYIDHHQSLSSEDKGWGCGWRNIQMLSSHLLKQRPEAREVLFGGSGFVPDIPSLQRWLEIAWDKKFDTIGSSHFHNKIYGAKKWIGTTECAALFRSFGLRARIVDFDSTESSDLHSNNGSRAASQVRGPMDKFLIKNKPPKSSSELCREDAESTRGQQALVDWVWNYFASERSDRLATQRVTVSNKTSFKDNSWDSKETGSSWISRTIQPFDFRSGP

SEQ ID NO: 179588 - protein, 886 aa, Zea Mays
MASSSSFAPDDQTDADFFDKLVDDDDPATSLPDDPPIPEPQAPPEGSGKGGAGVHTAVKQVQWASFGGGADDGPDPFAHLSGGAGDDDGFLVTTAGTQTASDHAFFGGTQSLAAEVTDQDFFAGSNSSNQHNVSGQHDQGGGSTAVDSADPMSLEAMYPGWKYDEASQQWYQLDDSVNSTGNAAQVLDNSTRYAQQQQQLHASYLHNSVHSGLETIAEEGTTATGAVSSWGQGAASEYPPNMLFYAEYPGWYFDTNTQQWHSLELYQQAAMQAGTASMGQTVIANDGVAATSSLTGYNAAQNEDLAAHDQVTQHNSFSNSFAHQNQWQITDAFGNNVRSECATENSLASSSYGFQQHRNADSTSSSTNQRAGFNAAETVTDHYGGRKGVESPSIQSGYSTSDIQQSSHKAFEPYTGYQDHYKAFEPATGHHASNNMFKQSTGNQGGYKAFEPAMDNQSGYKAYEPSMGHHSASWEPVPSTGHQTDFKGSGASTVHQAGYKEFETSTGYNTSLKAFEPSSSQHAGYMGSQSNYMGFDTSTNHHGYGDANVVASTQGFVPMQTTYQGQTQAIANSQVHLSNSYLGIDNSMNFNQQQFLGANASNLQFSHSPHDGRAGRPPHALVSFGFGGKLIVMKEASSMPASFNNGIQGNSSGTVSVLNLSEVVMDKIDSSSITNGSALSYFHALCRQPVPGPLVGGSAASKDVNKWIDEMIAWYDSSSELQRSDTRKLLISLLKILSQHYGKLRSPFASDPSQEETDGPEMAVTKLFSSFKSTVNMGDYGSIVSCMKNIPSESQMQAVAQEVQNLLVSGRRKEALQCAQGGQLWGPAIILALQLGDMFYVDTVKKMAHFHFVSGSPLRTLCLLIAGQPADVFNVDNNVNIDYAWS

SEQ ID NO: 179589 - protein, 1085 aa, Zea Mays
MASSSSFAPDDQTDADFFDKLVDDDDPATSLPDDPPIPEPQAPPEGSGKGGAGVHTAVKQVQWASFGGGADDGPDPFAHLSGGAGDDDGFLVTTAGTQTASDHAFFGGTQSLAAEVTDQDFFAGSNSSNQHNVSGQHDQGGGSTAVDSADPMSLEAMYPGWKYDEASQQWYQLDDSVNSTGNAAQVLDNSTRYAQQQQQLHASYLHNSVHSGLETIAEEGTTATGAVSSWGQGAASEYPPNMLFYAEYPGWYFDTNTQQWHSLELYQQAAMQAGTASMGQTVIANDGVAATSSLTGYNAAQNEDLAAHDQVTQHNSFSNSFAHQNQWQITDAFGNNVRSECATENSLASSSYGFQQHRNADSTSSSTNQRAGFNAAETVTDHYGGRKGVESPSIQSGYSTSDIQQSSHKAFEPYTGYQDHYKAFEPATGHHASNNMFKQSTGNQGGYKAFEPAMDNQSGYKAYEPSMGHHSASWEPVPSTGHQTDFKGSGASTVHQAGYKEFETSTGYNTSLKAFEPSSSQHAGYMGSQSNYMGFDTSTNHHGYGDANVVASTQGFVPMQTTYQGQTQAIANSQVHLSNSYLGIDNSMNFNQQQFLGANASNLQFSHSPHDGRAGRPPHALVSFGFGGKLIVMKEASSMPASFNNGIQGNSSGTVSVLNLSEVVMDKIDSSSITNGSALSYFHALCRQPVPGPLVGGSAASKDVNKWIDEMIAWYDSSSELQRSDTRKLLISLLKILSQHYGKLRSPFASDPSQEETDGPEMAVTKLFSSFKSTVNMGDYGSIVSCMKNIPSESQMQEVQNLLVSGRRKEALQCAQGGQLWGPAIILALQLGDMFYVDTVKKMAHFHFVSGSPLRTLCLLIAGQPADVFNVDNNVNIDYGTSHQPMEPGPNGMLDDWEENLAIITANRTKGDDLVITHLGDCLWKEKNEIAAAHSCYLVAELNIDSYSESARLCLIGADHLKCPRTFASPEAIQRTEVYEYAKVLGNSQYILLPFQPYKLIYAYMLVEVGKVSDSLRYCQASMKVLKASGRAPELEVWKQLISSLEERIRTHQQGGYGTNLAPAKLVGKIFTSLDKSISRMMVND

SEQ ID NO: 179590 - protein, 838 aa, Zea Mays
MASSSSFAPDDQTDADFFDKLVDDDDPATSLPDDPPIPEPQAPPEGSGKGGAGVHTAVKQVQWASFGGGADDGPDPFAHLSGGAGDDDGFLVTTAGTQTASDHAFFGGTQSLAAEVTDQDFFAGSNSSNQHNVSGQHDQGGGSTAVDSADPMSLEAMYPGWKYDEASQQWYQLDDSVNSTGNAAQVLDNSTRYAQQQQQLHASYLHNSVHSGLETIAEEGTTATGAVSSWGQGAASEYPPNMLFYAEYPGWYFDTNTQQWHSLELYQQAAMQAGTASMGQTVIANDGVAATSSLTGYNAAQNEDLAAHDQVTQHNSFSNSFAHQNQWQITDAFGNNVRSECATENSLASSSYGFQQHRNADSTSSSTNQRAGFNAAETVTDHYGGRKGVESPSIQSGYSTSDIQQSSHKAFEPYTGYQDHYKAFEPATGHHASNNMFKQSTGNQGGYKAFEPAMDNQSGYKAYEPSMGHHSASWEPVPSTGHQTDFKGSGASTVHQAGYKEFETSTGYNTSLKAFEPSSSQHAGYMGSQSNYMGFDTSTNHHGYGDANVVASTQGFVPMQTTYQGQTQAIANSQVHLSNSYLGIDNSMNFNQQQFLGANASNLQFSHSPHDGRAGRPPHALVSFGFGGKLIVMKEASSMPASFNNGIQGNSSGTVSVLNLSEVVMDKIDSSSITNGSALSYFHALCRQPVPGPLVGGSAASKDVNKWIDEMIAWYDSSSELQRSDTRKLLISLLKILSQHYGKLRSPFASDPSQEETDGPEMAVTKLFSSFKSTVNMGDYGSIVSCMKNIPSESQMQAVAQEVQNLLVSGRRKEALQCAQGGQLWGPAIILALQLGDM

SEQ ID NO: 179591 - protein, 690 aa, Zea Mays
MASSSSFAPDDQTDADFFDKLVDDDDPATSLPDDPPIPEPQAPPEGSGKGGAGVHTAVKQVQWASFGGGADDGPDPFAHLSGGAGDDDGFLVTTAGTQTASDHAFFGGTQSLAAEVTDQDFFAGSNSSNQHNVSGQHDQGGGSTAVDSADPMSLEAMYPGWKYDEASQQWYQLDDSVNSTGNAAQVLDNSTRYAQQQQQLHASYLHNSVHSGLETIAEEGTTATGAVSSWGQGAASEYPPNMLFYAEYPGWYFDTNTQQWHSLELYQQAAMQAGTASMGQTVIANDGVAATSSLTGYNAAQNEDLAAHDQVTQHNSFSNSFAHQNQWQITDAFGNNVRSECATENSLASSSYGFQQHRNADSTSSSTNQRAGFNAAETVTDHYGGRKGVESPSIQSGYSTSDIQQSSHKAFEPYTGYQDHYKAFEPATGHHASNNMFKQSTGNQGGYKAFEPAMDNQSGYKAYEPSMGHHSASWEPVPSTGHQTDFKGSGASTVHQAGYKEFETSTGYNTSLKAFEPSSSQHAGYMGSQSNYMGFDTSTNHHGYGDANVVASTQGFVPMQTTYQGQTQAIANSQVHLSNSYLGIDNSMNFNQQQFLGANASNLQFSHSPHDGRAGRPPHALVSFGFGGKLIVMKEASSMPASFNNGIQGNSSGTVSVLNLSEVVMDKIDSSSITNVNSREVILASCLFHC

SEQ ID NO: 179592 - protein, 1310 aa, Zea Mays
MASSSSFAPDDQTDADFFDKLVDDDDPATSLPDDPPIPEPQAPPEGSGKGGAGVHTAVKQVQWASFGGGADDGPDPFAHLSGGAGDDDGFLVTTAGTQTASDHAFFGGTQSLAAEVTDQDFFAGSNSSNQHNVSGQHDQGGGSTAVDSADPMSLEAMYPGWKYDEASQQWYQLDDSVNSTGNAAQVLDNSTRYAQQQQQLHASYLHNSVHSGLETIAEEGTTATGAVSSWGQGAASEYPPNMLFYAEYPGWYFDTNTQQWHSLELYQQAAMQAGTASMGQTVIANDGVAATSSLTGYNAAQNEDLAAHDQVTQHNSFSNSFAHQNQWQITDAFGNNVRSECATENSLASSSYGFQQHRNADSTSSSTNQRAGFNAAETVTDHYGGRKGVESPSIQSGYSTSDIQQSSHKAFEPYTGYQDHYKAFEPATGHHASNNMFKQSTGNQGGYKAFEPAMDNQSGYKAYEPSMGHHSASWEPVPSTGHQTDFKGSGASTVHQAGYKEFETSTGYNTSLKAFEPSSSQHAGYMGSQSNYMGFDTSTNHHGYGDANVVASTQGFVPMQTTYQGQTQAIANSQVHLSNSYLGIDNSMNFNQQQFLGANASNLQFSHSPHDGRAGRPPHALVSFGFGGKLIVMKEASSMPASFNNGIQGNSSGTVSVLNLSEVVMDKIDSSSITNGSALSYFHALCRQPVPGPLVGGSAASKDVNKWIDEMIAWYDSSSELQRSDTRKLLISLLKILSQHYGKLRSPFASDPSQEETDGPEMAVTKLFSSFKSTVNMGDYGSIVSCMKNIPSESQMQAVAQEVQNLLVSGRRKEALQCAQGGQLWGPAIILALQLGDMFYVDTVKKMAHFHFVSGSPLRTLCLLIAGQPADVFNVDNNVNIDYGTSHQPMEPGPNGMLDDWEENLAIITANRTKGDDLVITHLGDCLWKEKNEIAAAHSCYLVAELNIDSYSESARLCLIGADHLKCPRTFASPEAIQRTEVYEYAKVLGNSQYILLPFQPYKLIYAYMLVEVGKVSDSLRYCQASMKVLKASGRAPELEVWKQLISSLEERIRTHQQGGYGTNLAPAKLVGKIFTSLDKSISRMMGTPSAPLPPLPHGSVSDRESHSMPEAAKFINSQSVMAMSSLMPSASMQSMTEIAENSDGTGRKMAHNRSVSEPDFGRTSKQGGGSDGTQSSAAGSGSSRFGWLVQKTMGLVSKSHRQAKLGDQNKFYYDEKLKRWVEEGAVVPAEEPPLPPPPTKSSFQNGMPDHKLNGHMSVGHAPSGVTEWKSSNYSEQGLGMPPIPPSQNQFSSRGRMGVRSRCIWSGAII

SEQ ID NO: 179593 - protein, 732 aa, Zea Mays
MAVTKLFSSFKSTVNMGDYGSIVSCMKNIPSESQMQAVAQEVQNLLVSGRRKEALQCAQGGQLWGPAIILALQLGDMFYVDTVKKMAHFHFVSGSPLRTLCLLIAGQPADVFNVDNNVNIDYGTSHQPMEPGPNGMLDDWEENLAIITANRTKGDDLVITHLGDCLWKEKNEIAAAHSCYLVAELNIDSYSESARLCLIGADHLKCPRTFASPEAIQRTEVYEYAKVLGNSQYILLPFQPYKLIYAYMLVEVGKVSDSLRYCQASMKVLKASGRAPELEVWKQLISSLEERIRTHQQGGYGTNLAPAKLVGKIFTSLDKSISRMMGTPSAPLPPLPHGSVSDRESHSMPEAAKFINSQSVMAMSSLMPSASMQSMTEIAENSDGTGRKMAHNRSVSEPDFGRTSKQGGGSDGTQSSAAGSGSSRFGWLVQKTMGLVSKSHRQAKLGDQNKFYYDEKLKRWVEEGAVVPAEEPPLPPPPTKSSFQNGMPDHKLNGHMSVGHAPSGVTEWKSSNYSEQGLGMPPIPPSQNQFSSRGRMGVRSRYVDTFNKSGASGAVPSYNKPAAPSVTPPAGAKFFIPTAAPVAADQMMPHQAAEIHSETMQQDERAASPPAGTSFSSTPPPTQFSSPPPHTQFSSPMQSTIHRQSSMANISTPYQSSGVSSLSSDTSFSKSRAASWSGTYSEQFSAFAGTRSPDGQTVRSPLMPGKPSHSRSNSNSSVQLNGLTEDLHEVEL

SEQ ID NO: 179594 - protein, 191 aa, Zea Mays
MPRDRDEPAAVRVYTVCDESRCTPMDAEDSEPYTDVFFVKFSQVNNARFAKRKLDESVFLGNRLQVTYAPQFESPQDTKEKLEVRRKEVLGRIKSSAGRPEGSSPAQGSSSGNHHQMNSNKREYMKTIHASPIEDPRFSHVSSDKDYFPSESMNATVKLVRGKLDKIQSGGDNSSTSAASRKPGVDKRRRI

SEQ ID NO: 179595 - protein, 216 aa, Zea Mays
MPRDRDEPAAVRVYTVCDESRYLIVRNVPSLGCGDDLASLFGTYGPVEECTPMDAEDSEPYTDVFFVKFSQVNNASSSLPAAQVLPSFLAVTYAPQFESPQDTKEKLEVRRKEVLGRIKSSAGRPEGSSPAQGSSSGNHHQMNSNKREYMKTIHASPIEDPRFSHVSSDKDYFPSESMNATVKLVRGKLDKIQSGGDNSSTSAASRKPGVDKRRRI

SEQ ID NO: 179596 - protein, 67 aa, Zea Mays
MKTIHASPIEDPRFSHVSSDKDYFPSESMNATVKLVRGKLDKIQSGGDNSSTSAASRKPGVDKRRRI

SEQ ID NO: 179597 - protein, 161 aa, Zea Mays
MQRTLSPTLTSSSSSSHRFAKRKLDESVFLGNRLQVTYAPQFESPQDTKEKLEVRRKEVLGRIKSSAGRPEGSSPAQGSSSGNHHQMNSNKREYMKTIHASPIEDPRFSHVSSDKDYFPSESMNATVKLVRGKLDKIQSGGDNSSTSAASRKPGVDKRRRI

SEQ ID NO: 179598 - protein, 119 aa, Zea Mays
MQRTLSPTLTSSSSSSHRSTTPASAGRPEGSSPAQGSSSGNHHQMNSNKREYMKTIHASPIEDPRFSHVSSDKDYFPSESMNATVKLVRGKLDKIQSGGDNSSTSAASRKPGVDKRRRI

SEQ ID NO: 179599 - protein, 115 aa, Zea Mays
MPRDRDEPAAVRVYTVCDESRYLIVRNVPSLGCGDDLASLFGTYGPVEECTPMDAEDSEPYTDVFFVKFSQVNNARFAKRKLDESVFLGNRLQHLLADLKDHLQLRDHLVGITTK

SEQ ID NO: 179600 - protein, 540 aa, Zea Mays
MASPHLPFLSFPKTLPPLPPPLKTHAHRTSLAAAPAPPPAPPDGAGPAAPTRGDRFLGRQLATEAAARVLAPEDADRRRRRKEKRRALARKPSGLASCYGCGAPLQTAEEAAPGYVDPDTYQLKKRHHQLRTVLCGRCKLLSHGHMVTAVGGHGGYPGGKKFVSAEQLREKLSYLRHEKALIVKLVDIVDFNGSFLARVRDFAGANPIILVITKVDLLPRDTDLNCIGDWVVESVVKKKLNVLSVHLTSSKSLVGITGVISEIHQERKGRDVYILGSANVGKSAFISAMLRTMAYKDPVAAAAQKYKPIQSAVPGTTLGPIQIEAFLGGGKLYDTPGVHLHHRQAAVIHADDLPSLAPQSRLKGRCFPANDTDVELSGNSLFWAGLVRIDVIKALPRSRLTFYGPKKLKINMVPTTEADQFYETEVGVTLTPPTGKERAEGWTGLQGVRELKIKYEERDRPACDIAISGLGWISVEPSGVPSNSAEEVYDGGELHLVVHVPKPVEVFMRPPLPVGKAASQWYRYQELTEEEEELRPKWHY

SEQ ID NO: 179601 - protein, 270 aa, Zea Mays
MASPHLPFLSFPKTLPPLPPPLKTHAHRTSLAAAPAPPPAPPDGAGPAAPTRGDRFLGRQLATEAAARVLAPEDADRRRRRKEKRRALARKPSGLASCYGCGAPLQTAEEAAPGYVDPDTYQLKKRHHQLRTVLCGRCKLLSHGHMVTAVGGHGGYPGGKKFVSAEQLREKLSYLRHEKALIVKLVDIVDFNGSFLARVRDFAGANPIILVITKVDLLPRDTDLNCIGDWVVESVVKKKLNVLSVHFMAMLESYHLKFYRSSLPLLVLQS

SEQ ID NO: 179602 - protein, 310 aa, Zea Mays
MRGRNILEGVAILHETIHELHRKRLSGVILKIYFEKAYNKVKWPFLFQTLRMKGFAPKWISWVRSFIMGGSVAVNVNDDVGKFFQTKKGLRQVDPLPPILFNIVADMLAILINRAKEHGQVSGVVPHLIDGGLSILQYADDTIIFMENDLEKARNMKLLLGAFEQISGLKINFHKSEVLCFGDAQDSLESYLELFGCKHGDFPLKYLGLPIHFKKLRNSDWKIIEERVEKRLASWKGKHLSIGGRLTLINSVFNSLPLYMMSFFAIPKGVLRKLDYFRSRFFWQGDKSKKKYRLARWTILCQPKDQGGLG

SEQ ID NO: 179603 - protein, 60 aa, Zea Mays
MKLIHGPDGLSSEVEQAHLISRLPRWTMICLFLPVCNVITTPTQQATPTFSVYIHAYVPF

SEQ ID NO: 179604 - protein, 541 aa, Zea Mays
MGSTTMSPPSFPVVLLLLLLATIAAAAGSNMDEEVVDDLQYLIDNSDDIPTNDPDGWPEGDYDDDDLLFQDQDQDLTGHQPEIDETHVVVLAAANFSSFLASSHHVMVEFYAPWCGHCQELAPDYAAAAAHLAAHHHQAHLALAKVDATEETDLAQKYDVQGFPTILFFIDGVPRGYNGARTKEAIVDWINKKLGPAVQNVTSVDEAQSILTGDDKAVLAFLDTLSGAHSDELAAASRLEDSINFYQTSTPDVAKLFHIDAAAKRPSVVLLKKEEEKLTFYDGEFKASAIAGFVSANKLPLVTTLTQETSPSIFGNPIKKQILLFAVASESTKFLPIFKEAAKPFKGKLLFVFVERDSEEVGEPVADYFGITGQETTVLAYTGNEDARKFFLDGEVSLEAIKDFAEGFLEDKLTPFYKSEPVPESIYAPWCGHCQSLEPTYNNLAKHLRSVDSLVVAKMDGTTNEHPRAKSDGYPTILFYPAGKKSFEPITFEGERTVVDLYKFIKKHASIPFKLKRQESRTESTRAEGVKSSGTNSKDEL

SEQ ID NO: 179605 - protein, 232 aa, Zea Mays
MGSTTMSPPSFPVVLLLLLLATIAAAAGSNMDEEVVDDLQYLIDNSDDIPTNDPDGWPEGDYDDDDLLFQDQDQDLTGHQPEIDETHVVVLAAANFSSFLASSHHVMVEFYAPWCGHCQELAPDYAAAAAHLAAHHHQAHLALAKVDATEETDLAQKYDVQGFPTILFFIDGVPRGYNGARTKEAIVDWINKKLGPAVQNVTSVDEAQSILTGDDKAVLAFLDTLSQRSVHP

SEQ ID NO: 179606 - protein, 540 aa, Zea Mays
MGSTTMSPPSFPVVLLLLLLATIAAAAGSNMDEEVVDDLQYLIDNSDDIPTNDPDGWPEGDYDDDDLLFQDQDQDLTGHQPEIDETHVVVLAAANFSSFLASSHHVMVEFYAPWCGHCQELAPDYAAAAAHLAAHHHQAHLALAKVDATEETDLAQKYDVQGFPTILFFIDGVPRGYNGARTKEAIVDWINKKLGPAVQNVTSVDEAQSILTGDDKAVLAFLDTLSGAHSDELAAASRLEDSINFYQTSTPDVAKLFHIDAAAKRPSVVLLKKEEEKLTFYDGEFKASAIAGFVSANKLPLVTTLTQETSPSIFGNPIKKQILLFAVASESTKFLPIFKEAAKPFKGKLLFVFVERDSEEVGEPVADYFGITGQETTVLAYTGNEDARKFFLDGEVSLEAIKDFAEGFLEDKLTPFYKSEPVPESNDGDVKIVVGKNLDLIVFDETKDVLLEIYAPWCGHCQSLEPTYNNLAKHLRSVDSLVVAKMDGTTNEHPRAKLHCLMMDKRIWICSWSAAVCMLQCIYFQPLCRGSMVLHANQYF

SEQ ID NO: 179607 - protein, 54 aa, Zea Mays
MVLVVLSLIKLVHQSMDFYFGTELINQNYEDQPLRSIPKLLQTAKPIPYGFRVR

SEQ ID NO: 179608 - protein, 89 aa, Zea Mays
MSTPHIDCLLDGLKPIQVAALRNNREFLELLLALTIPFLSVSNWSFDGITKYMLSKAAVGESQVKEATSLNSASLAGPQSAGILFCSHK

SEQ ID NO: 179609 - protein, 215 aa, Zea Mays
MSTPHIDCLLDGLKPIQVAALRNNREFLELLLALTIPFLSVSNWSFDGITKYMLSKAAVGESQVKEATSLNSASLAGPQSAGSQVKEATSLNSASLAGPQSAGVSSSAKGDSMEANLRGYDAYKNENYIGAVDAYTQAIDLDPSNATLWSNKSLCWLLLGMAETALEDAKQSRTLRPDSGIACYREGAALHELQPTDNASRFYKWFAEGEEKEVC

SEQ ID NO: 179610 - protein, 193 aa, Zea Mays
MSTPHIDCLLDGLKPIQVAALRNNREFLELLLALTIPFLSVSNWSFDGITKYMLSKAAVGESQVKEATSLNSASLAGPQSAGSQVKEATSLNSASLAGPQSAGVSSSAKGDSMEANLRGYDAYKNENYIGAVDAYTQAIDLDPSNATLWSNKSLCWLLLGMAETALEDAKQSRTLRPDSGIACYREGMLLRRE

SEQ ID NO: 179611 - protein, 197 aa, Zea Mays
MSTPHIDCLLDGLKPIQVAALRNNREFLELLLALTIPFLSVSNWSFDGITKYMLSKAAVGESQVKEATSLNSASLAGPQSAGSQVKEATSLNSASLAGPQSAGVSSSAKGDSMEANLRGYDAYKNENYIGAVDAYTQAIDLDPSNATLWSNKSLCWLLLGMAETALEDAKQSRTLRPDSGIACYREGAALHELQGCC

SEQ ID NO: 179612 - protein, 186 aa, Zea Mays
MFWNGGAIWGTLNVLFGVAEFEGEFFLRGVECNIPKKSCQRLIFGAWMWEKGCGLLDAKSESSVVSLLFSRKENPSGGLFPLFAPTWPPPLPPSHTWSPLPPFPLCWPSSPPMAAPLHGFLLPLDLPPRSKDREEEEHVELKGKRGSRRCSSPSLLAEFLGETLGMDEILVPPCNYMLLEVVDHGN

SEQ ID NO: 179613 - protein, 89 aa, Zea Mays
MLCRPYDLRSTDRVQHNRDQRATLRSRIYGPDFKYPRSTPIRTSSDLRSGFNLEPIWADLIADIHRGSNGWHAIFHLQPTRWQRRPFPA

SEQ ID NO: 179614 - protein, 70 aa, Zea Mays
MRRPRDFILEQGPISGRFWRDAGGPCARFVTRRSSQQEDATAMAVSCGSYSVDRYIRLALRYEAQGPGCQ

SEQ ID NO: 179615 - protein, 65 aa, Zea Mays
MGPRASFLSFCFSFFFFFLFYVQLNSLLNPSFEFSISNKIHNKNSAWCNINFIYIFIYSFIYYST

SEQ ID NO: 179616 - protein, 160 aa, Zea Mays
MARTMLDEYKTSDRFWAEAVNTACYAINRLYLHRILKKTSYELLTGKKPNISYFRVFGSKCFILVKRGRKSKFAPKTVEGFLLGYDSNTRAYRVFNKSTGLVEVSCDVVFDETNGSQIEQVDLDEIGEEETPCIALRNMSIGDVCPKESEEPPIAQDQPS

SEQ ID NO: 179617 - protein, 98 aa, Zea Mays
MGDADMMSALRNCERKLLRNIMTMEYPWNNEVIAQFYATLWVKKVDEESDGYDYPVMYFFIQGVWHRVRYRCFAHILGISDEDIQGDNLKVHDIRLSM

SEQ ID NO: 179618 - protein, 226 aa, Zea Mays
MSRLLSLLIMSPPLAPPLLHVRWTIVGEVEVRARDRVKAGDCLFVWPRVLLVPSPCAAIGQSRSPCTGAGLRRCMRTFIVMPPPRVILCLLGLLRLRPPPTLKTLMSGTNRNMVCHSLLLRMRPRSLMTPTIPRLLLLPIRVRDPFPVNPGHPAPVTFPLLPTQARDPFLVTRGFLALVTTTILLLQEGIDSCALSLLVFGPCYQKGGENLKSKVSQVIFLFLFLF

SEQ ID NO: 179619 - protein, 59 aa, Zea Mays
MVQVHLFPFNPPSRLNQANSSTQLVSKGQVVAHLPLNLCITCKGLVRSWGVHVQLEHHK

SEQ ID NO: 179620 - protein, 75 aa, Zea Mays
MNSYECNAYVLCLHTSKGMKPHRTPPRATYDAKLYQYGRTIGHDKTSDANESCNVYGMLHLSINFTFFRYNTNLK

SEQ ID NO: 179621 - protein, 88 aa, Zea Mays
MNAYECNAYVLCLHTSKGMKPHRTPPRATYDAKLYQYGRTIGHDPTSDASESCNVYGMLHLSIYFTSFTYNTTSNNTSFTFRYNTNLK

SEQ ID NO: 179622 - protein, 210 aa, Zea Mays
MECGRLRMLRVCLGDSSMRLGVPFIAPRQLGAVGDQQGRLRLPSVKWRTGQSGAPLDSHYRQSGADLLPILAQSTIADSWQLAHQTLSDAHRTVLYLLPTVGVGHASPADCAADCCLVDRWLTGQSGAYFAKDDSPDSPVNCSRTPPSSPESGQITLDLSSAPDNVRCTTGQSGAPRPSSSWLYTANSFPIYFLMFLALRHNTLVPKSMY

SEQ ID NO: 179623 - protein, 52 aa, Zea Mays
MFHLTLALLNADACCSSRGVGSSSTSTFTLIIMLPRHSHDLIRNFWSKDVCF

SEQ ID NO: 179624 - protein, 57 aa, Zea Mays
MVRDPLRGLYKVPLAFENPLQFMGRAHARIPRLTAISAKSTREPPCTKSPTALAPFG

SEQ ID NO: 179625 - protein, 115 aa, Zea Mays
MDSLTRSVRSPPTSEARARHAARTTSDPKSARARATADSRRPSIVWARWEIGEPKLTLDGTPPQVHIDCLLVAGAAGPARASRAAGKAAAAVGPAAPRPSGHSPPLLVHGTATVV

SEQ ID NO: 179626 - protein, 706 aa, Zea Mays
MSEDKKTAAEMKLSLDEEKNLGFLIAMSKTNTEKITKEILEGLSEDTGDSDSYDVDSGGEDSEDRPWRPSHSVYGKSTIKESHLVNMRGRYFRDLSIVRADEGEKTCPHPEENEVVIYRSFLKAGLRFPLSSFVVEVLKIFEVYLHQLTPKAIIRLNIFVWAVRSQGLKPDAKSFCNIHELSYETKPWGKEQYHNNFGCYSFVSRSGSRCPVPTFRKRWPGDWMTEWFYVKNDLTIREDIKGIIMRPIWQSFGLRRPKVEMNEAAEECQRAFGVICSFIGTRDLVQEHIAFRVWPLAEKWEMPQETVKEADEGGLIRLKYTFKFGDKFVEPDDDWLKSIENLSDELLGAYSKAEDTAMSAAFGGRKKKRLNRVFDAIGFVYPDYCYPIRRQKRKNTTSAKEEAAIAPSEPEPKRKKIKVLTHRPRYIEPASVPEFTGETSSATEAEKSTEPTLLPEVVESAEVPTKIELEQSKILSSETKEKAEAPSTEKMEEVKEATKGSKTPEVLSSAANIETVKNQKVPAVTPKRKRMANVLDVLETIKSSSTPPKKAAVIRETTAEISGSKAPEQETEAEAVPSEPAKKKSLESEADKITKPTLVEETGAIAPEASLKVRDYIVRHASGKKLSEKEEQEAQHYAQKLKYPKGALIFNGSGEEDFLYCLPDSKEISVCREMSKSFGFPTLEDGLSVLSKNDLADSLAYNSLKV

SEQ ID NO: 179627 - protein, 502 aa, Zea Mays
MGVTTRSRVAHFCEHYSFVSSIESHRIEEALQDLDWVLAMQEELNNFTRNEVWHLVPRPNQNVVGIKWVFRNKQDEHGVVTRNKARLVAKGYSQVEGLDFGETYAPVARLESIRILLAYATYHGFKLYQMDVKSAFLNGPIKEEVYVEQPPGFEDSEYPNHVYKLSKALYGLKQAPRAWYECLRDFLIANGFKVGKADPTLFTKTLANDLFVCQIYVDDIIFGSTNESTCEEFSRIMTQKFEMSMMGELKYFLGFQVKQLQEGTFLSQTKYIQDILTKFGMKDAKPIKTPMGTNGHLDLDMGGKSIDQKVYRSMIGSLIYLCASRPDIMLSVCMCARFQADPKEVHLRAVKRILRYLVYTPKFGLWYPRGSTFDLIGYSDADWAGCKINRKSTSGTCQFLGRSLVSWASKKQNSVALSTAEAEYITAGHCCAQLLWMRQTLRDYGYKLTKVPLLCDNESAIRMADNPVEHSRTKHIAIRYHFLRDHQQKGISRLHMLTPKNN

SEQ ID NO: 179628 - protein, 120 aa, Zea Mays
MLVCKNNSLNLETYLVLDFTLLTHLAHKNLLNMCWTSNHQNTYRNGPFNLPLFGDLCQHIKKQQKKCNINANEDQFPFYLRFGIFGSLFATTWFVFANQIPFPISKSNTLVWANREIFQE

SEQ ID NO: 179629 - protein, 86 aa, Zea Mays
MSVSPHWCLRGLSILHSKSLEKILGILCLGDEGAVLELLHLESQKVSQLAHHGHLELLHHHPVKLLTRLLVSRTKYNVIVIYLANK

SEQ ID NO: 179630 - protein, 91 aa, Zea Mays
MSLDRRSDLSWRDPWCFFLHNLFFLCSPLIMHQCRRRGLILFLQFQWSHISYLHRAHCDRRNFIFIYVIKINLLSWRAISLIKYNVARDFN

SEQ ID NO: 179631 - protein, 80 aa, Zea Mays
MHQSEYPCQHTIPIFILFQSWSRQEKLNLVTSSSQISDLSLSVDSKPTDKNSSVCRLKWIQTDISKGMKPLELLLSSIPH

SEQ ID NO: 179632 - protein, 51 aa, Zea Mays
MEHPMWPRWFSSTFWNTHYYSYHGCPLRIVCDNISLRGKSFISIVLSMMHV

SEQ ID NO: 179633 - protein, 66 aa, Zea Mays
MSNSLNKTCSPSYGLQLLYKHHSPKFYGLATNELQTAYSTLKLHSTIHYLRFHESVNTSLDHLFCW

SEQ ID NO: 179634 - protein, 97 aa, Zea Mays
MTLTKKNGKQQALCQSERRFCYKCGEQGHLSKVCYKGKIPKQVNLSHSHSLRRPKSYTCARSITRSSRTSTKAIWVPKAHLDDHYGPIPRWVPNCAK

SEQ ID NO: 179635 - protein, 74 aa, Zea Mays
MPRLGCPPSRATPRSTAATRILAQTRNNSGVVEFPYLRTSRQWRFDPGSFIGGLGTRARRGLVFIPPRPIPNSH

SEQ ID NO: 179636 - protein, 523 aa, Zea Mays
MCLPSVPDFSSEPSSFTTTPDVLIPITPPSISTSSYYSKPPITQTYIRRSCSIPTAGPDTDPVPDSCANNTESNDVFNQGYRLRDRGTIEPPDRYGFPRASVAIVEPTTYQEASGILEWQLAMVDELAALERTGTWDIVPLPSHVVPITCKWVFKVKTKSDGSIERYKARLVARGFQQTQGLDYDETFAPVAHMTTVRTLIAVAASSSWTISQMDVKNAFLNGDLHEEVYMHPPPGVNTPSGHVCRLRRALYGLKQAPRAWFQRFISVITAAGFSSSEHDPALFVHVSPKGRTLLLLYVDDMLITGDNSDHISHVKKHLSKEFQMSDLGPLSYFLGIEVQQTPKGFYLSQSKYIQDLLDRSGLTDTRTVATPMDIHLQLRPKDGTPLADPTRYRHIVGSLVYLTITRPDIAHDVHILSQFVSTPTSVHYGHLLRVLRYLRGTRSRCLLYASDSPLQLHAYSDATWASDTVDRSSTTGYCILLGSSPIAWKSKKQAAISRSSAEAELRALATTTAEIIWLRWLL

SEQ ID NO: 179637 - protein, 83 aa, Zea Mays
MGRETSSLHLLAPLLLTEGKGADLVIHGNVVLNTLSARSTSTLLRDQICINSPSSRQVPGLAELSYATVFDYSSTQSNGIIVF

SEQ ID NO: 179638 - protein, 97 aa, Zea Mays
MAHRTVRCTPDSPVPLPRHHCRWILAVGASDLWARLGVRCTPDMHCLMSGAPVWAILTSARAARAFNAPQGAVGAAGSRCSAGTPDSPVYTGQSGEL

SEQ ID NO: 179639 - protein, 72 aa, Zea Mays
MGVAHLLDPLFLFNPSCSSSSRSLLRGGRFREEEVLEGCCNGGRGGDQPRGKSEAAKKGEGVAAKKGKRVAT

SEQ ID NO: 179640 - protein, 74 aa, Zea Mays
MFYLLKLIHYLMVVHAKMSIYNISINQRSKSGIYHQNNQPTFLNRENSFNFVLGLLSLKKVINVGFQSVKPILS

SEQ ID NO: 179641 - protein, 58 aa, Zea Mays
MNKITKRRWPRSYKKLGVINVQTISVRHVQCRPDSVAVTMVQCFSLDFGALLCLLGEV

SEQ ID NO: 179642 - protein, 133 aa, Zea Mays
MAQWFIPWFGQVQHLPTPRCGIPTDEDCNQPLSSGPKTHLNTTVFCFHFTISRLRGISTTWSLSPLHFEVHKEARSKGGMSNAHKTRNQSTNTHTSHNKSSQHNRRVHNSNGALVAFTKNQMRGIEVLVLRNA

SEQ ID NO: 179643 - protein, 50 aa, Zea Mays
MIPLNHRSDLSWRCRLCFFLHHMIILCSPLIIRLLLMNLFIVLSWGMHHC

SEQ ID NO: 179644 - protein, 102 aa, Zea Mays
MRSLLEEAMKVDPVDGVASRVHGFRPKALGGLELSKHRPRHVYKCPVLPLYHTILLWCVGSGELVLDSFLLKILLHLKVLELGPILAPYLLHLELKLVLSSL

SEQ ID NO: 179645 - protein, 58 aa, Zea Mays
MNVGDPWDDEFELVNSIALLTYPVHVHSHLRPLMARVGACGPDNLGGLSQRGIGAIPH

SEQ ID NO: 179646 - protein, 85 aa, Zea Mays
MLYLDPLTTITYSHMLCNLPFHSVPPEFIFQILIHLLTSRVYGINCLMSFLEDQFPNRLDIGNIQAVLEPYHTFCIFPKIFASSF

SEQ ID NO: 179647 - protein, 149 aa, Zea Mays
MPYLISSEVVELLLHCHHPIRILESFLYPVWLNRGNKRVMFTKMSNPRSSGYPLMNVAEDGVDGVISLDCLVNSWVWRSWFFLILLFLIICISPLIIAIILRWLVFFIILSLILILSWWRCLHGGGWLILCIWRLFGFLRTHIPNGHVP

SEQ ID NO: 179648 - protein, 62 aa, Zea Mays
MDNNIWIIPCISSLLLSLPTTPPPPASPSPLGVKTGGYGRIVAHPVSYPNVFKTDSGSDTDS

SEQ ID NO: 179649 - protein, 60 aa, Zea Mays
MEDSHPHDGHQAGRLHLGEEEVGEARVEGWRCNHLGKKERDWGGCKSGRERGGAAKGVGE

SEQ ID NO: 179650 - protein, 57 aa, Zea Mays
MSGAHRTVRCLLSENSVGCPVRQLCATGEPTVCHRCANCAPPVSQLCATGAPTVCHR

SEQ ID NO: 179651 - protein, 63 aa, Zea Mays
MQLSSLFIIPWVDQSSRENQSQVCPPGPWCGANDSRTFQYQDAYREEHGFDRTVGNHSLGHSL

SEQ ID NO: 179652 - protein, 112 aa, Zea Mays
MQCVSPLPSYLLEYKTTPSTNTTSMNAYECNAYVLCLHTSKGMKPHRTPPRATYDAKLYRYGRTIGHDKPSDASESCNVYGMLHLSIYFTSFTYNTTSNNTSFTFRYNTNLK

SEQ ID NO: 179653 - protein, 69 aa, Zea Mays
MYPKLVLPCSCQGAEQDVLKVLLPDCWSLHGIWWSGGGFRINGSLFLCILLISVWNFCVCRGPCVSYCW

SEQ ID NO: 179654 - protein, 77 aa, Zea Mays
MASPRGKEGGAAKCGRGGKGWRPSRGKRGKRPPLGFSLREKRSDATDDSDLASNGPQPFSHIHAPNINLWQHFFGIL

SEQ ID NO: 179655 - protein, 134 aa, Zea Mays
MPQNIKEKRKISLTSFKKIGVSHSTPLKKNSSSNSTTPQNIQGTPYSSTMQNMGPLLVLINIRTSTSTNYLRKLQHLTSSKNQHVMKLKPSHRCNQHYDFTTSNLDAAIHQYQCLKTTLFYEGVIRTKHNLYQL

SEQ ID NO: 179656 - protein, 58 aa, Zea Mays
MSCYTFIYDMVLLFSSLLSIIYPLCPKIVFVLALSFLYIFKWVMMNLYIYITHTSSIV

SEQ ID NO: 179657 - protein, 83 aa, Zea Mays
MRNRGPTYAALTALTMPMMMMQRPINDRSSLPSRAVPRAVIVPCFLLRTMLPRITRSAPFPSVSSRGARSCRIPVSLPISTTE

SEQ ID NO: 179658 - protein, 54 aa, Zea Mays
MVHASFMQPICCPNLPVCDQPHKKLGFWRSPSFPYSMKRLKLRRSNKETPICFL

SEQ ID NO: 179659 - protein, 61 aa, Zea Mays
MSHQENYAHGRKKMRYYPQGGKNLRCILARWGKVGIELVLYSRESYDDSCGFSVSHTRRKV

SEQ ID NO: 179660 - protein, 79 aa, Zea Mays
MNRYLQIRIGTTVGEAQRIRRLTQRRSCEQESFGVIAEKETDLKMKRLFRPRWITIELLPNVKGMGVILHGLCPVPINR

SEQ ID NO: 179661 - protein, 73 aa, Zea Mays
MSTADISVLHSTEVLQIYPQVVYPFYPRFARPVFTTEVNGYGSIAGSSQNILSTKPPAKVPTSVLVTLRVRYL

SEQ ID NO: 179662 - protein, 59 aa, Zea Mays
MNFEIKQKKTTQLNTFAYTSIKKEKKYKTKCLDVRGGQQPLAHLPMRDADTPLPLFSNV

SEQ ID NO: 179663 - protein, 56 aa, Zea Mays
MHSAEPRGHMFSGAFFKGRGKRLAAPIYIRLEKIERENTKPKQLEGRRKERKNKKS

SEQ ID NO: 179664 - protein, 57 aa, Zea Mays
MSRDSHSVQGALILIDHYLGDMVGYHYVAFTKIPRVCSRPLVFASRTYTVLLPKVGN

SEQ ID NO: 179665 - protein, 85 aa, Zea Mays
MEKKVKSHDTCQMFNDKLELGFISIRTSIESRLMLVSRFIIFVSVIPNLQFVEDSLRGEMIFLCIYVCCPYLSSHENNTGEQINK

SEQ ID NO: 179666 - protein, 76 aa, Zea Mays
MSLLPFHGLAFFSGSYPIMDLANFWLPIITLIGVVHDLFGKCLIITLYLFSLLKKLGWGALYFCSGALVVVSPLDF

SEQ ID NO: 179667 - protein, 72 aa, Zea Mays
MAILVACCLPDGVVADWLAMAYDGHKVPYDDDEEFPLTRLPPRPVRLITRLHESRRTTAATLQGSGGNRRQP

SEQ ID NO: 179668 - protein, 55 aa, Zea Mays
MVRIAAVGTSSSSTSSQSTTCSLGEPLVSSNTMSLETSTKPDDLLKTLYVFVFES

SEQ ID NO: 179669 - protein, 73 aa, Zea Mays
MEVYDMKYSLIKYWRRHVNDTECSLKRYQLKVNGELERHESSWRFCNGRLLSFSGDFIFLTMRLSQEIDLKRC

SEQ ID NO: 179670 - protein, 58 aa, Zea Mays
MWLSFSVFFFFLFLIPSFSIFKSNLNSSLNSNFMAHHLHYICAVKSNKFKDIYIIYIF

SEQ ID NO: 179671 - protein, 70 aa, Zea Mays
MLMTYYALINFLHLMFYDSTPFCQLFLPLFKSLLTLSYIRQNVSFNAQFLPLCHKSPKKDIKNIKDRNYD

SEQ ID NO: 179672 - protein, 97 aa, Zea Mays
MMCTKYLTELRPRNLMTFWLQCKVFGPPSSSGTLKLLGSTLNFLDIITTDESQFLFNRSKPIFCFQWIFYLGEHWWLRTEELLVEDSNIRIITTMLN

SEQ ID NO: 179673 - protein, 652 aa, Zea Mays
MSCQRKVTSGQAPRLGPLLSCLWKRKMAPKGCVLMQEGRVVAYSSRQLKVHEKNYPIHDLELAAVVHALKTWRHYLYGQKCDVYTDHKSLKYIFTQSELNMRQRRWLELIKDYELEIHYHPGKANVVADALSRKSQVNLMVARTMPYELAKEFDRLSLGFLNNSRGVTVELEPTLEREIKEAQKNDEKISEIRRLILEGKGKDFREDTGGVIWFKDRLCVPNVQSIRELILKEAHETAYSIHPGSEKMYQDLKKKFWWYGMKREIAEHVAMCDSCRRIKAEHQRPAGLLQPLQIPQWKWDEIGMDFIVGLPRTRAGYDSIWVVVDRLTKSAHFIPVKTNYSSAVLAELYMSRIVCLHGVPKKIVSDRGTQFTSHFWQQLHEALGTHLNFSSAYHPQTDGQTERTNQILEDMLRACALQDQSGWDKRLPYAEFSYNNSYQASLKMSPFQALYGRSCRTPLQWDQPGEKQVFGPDILLEAEENIRMVRENLKIAQSRQRSYADTRRRELSFKVGDFVYLKVSPIRGVRRFGVKGKLAPRYIGPYQILSRRREVAYQLSLPENLSAVHDVFHVSQLKKCLRVPEEQLPVEGLEVQEDLTYVEKSVQILEVADRVTRRKTIRTCKVKWNHHSEEEATWEREDDLLAKYPELFASQP

SEQ ID NO: 179674 - protein, 55 aa, Zea Mays
MQSLGLPALTRIQCPCLKHHNKHRMTSQCQVEPTRVQLSTASLTSQRPRCILETN

SEQ ID NO: 179675 - protein, 51 aa, Zea Mays
MVSSLSYVIFYAYLLHLFSCMVYCLFPNLNGWMYVCLQSHRERSGRRARGT

SEQ ID NO: 179676 - protein, 130 aa, Zea Mays
MLSRSHLWCRFFSPEKENPSGGLFPLLPLLGRHPFPPSHTWPPLPPFPLGWPSSPPMAAPLHGFLLPLDLPPRSKDREEEEHVELKGKRGSRRCSSPSLLAEFLGETLGMDEILVPPYNYVLLEVVDHGN

SEQ ID NO: 179677 - protein, 66 aa, Zea Mays
MSIHYYTWLYLENEEEVEEETRTSSPPPPEEHQADSCFYFDICRTEPDSPVKQGKLRCICHLLVPF

SEQ ID NO: 179678 - protein, 107 aa, Zea Mays
MDEGCNQPLSSGPKTHLNTTVFCFHFTISRLRGISTTWSLSPLHFEVHKEARSKGGMSNTHKTRNQSTNTHTSRNKSSQHNLASSQLKWSSNCYRKESNAQNRSLGA

SEQ ID NO: 179679 - protein, 87 aa, Zea Mays
MINCRRFTICFPRHMNNISSRHVINSISPSYISIIHNRRTRSNHSMRIKSIVTSINISRMSPIMIHEGMVLLSITNHRGLPFLLGGD

SEQ ID NO: 179680 - protein, 106 aa, Zea Mays
MKESFGKKENVVFYASLRTKRREGVFFAFGSKKEISSTSKHFSKISERLRIYYKVWTVYMEVLFTFTKVISKVFQVLSAVYYLNLQGASASALFLIISFGFVILHE

SEQ ID NO: 179681 - protein, 81 aa, Zea Mays
MGFLFSLKSVFAQPFCPSHSSIPIQMSDLGMSTTSEVTKCKECGVLTSQNNTINKTADEQTFKTQKDAKPNQQTSDLGKCC

SEQ ID NO: 179682 - protein, 71 aa, Zea Mays
MTEDRCAYAGQTGVHASELGRPGSIRPKRIVFFFFFFFFFFFFVFLFLLFLNLKFEFKHCCEVCTQIKGIN

SEQ ID NO: 179683 - protein, 52 aa, Zea Mays
MGCAGAVLPAGSARPTFPDELRPAGQVPPSRPAPCSFPLVAARPGQCPFSCD

SEQ ID NO: 179684 - protein, 54 aa, Zea Mays
MCPDSSEDDSKVTLMVLAILGIDKDVVDEDYDKLIQFFHEYLIHEVHEKGGCIC

SEQ ID NO: 179685 - protein, 84 aa, Zea Mays
MALAPPSPDWVIDSSASYHTTPTAGMLSRSHPPHSSHPTSVVVGNGSTLPITSVGASVLPGPFYLNDILVAPHITHNLFSVRRF

SEQ ID NO: 179686 - protein, 83 aa, Zea Mays
MTKLSSSLDSSHSRGHFEGLCHACQLSRHTCLPFPTSSSRAEQAFDLVHCDLWTTPVISFSGYKYYLVILDDYSHFLWTFPCD

SEQ ID NO: 179687 - protein, 79 aa, Zea Mays
MRTTDDDPNYSLTALPLSPQRRFQQDADGEVDDGLTTVAGFLCRVKEKGERKWIATELHSSGCCARLLQPRKLTDGSHV

SEQ ID NO: 179688 - protein, 150 aa, Zea Mays
MKHQADKGCSEREFAVGDLVFVKLQPYVQGSVALRACHKLSFKFFGPFEILQRVGLVAYKLKLPEDSNIHPVFHVSQLKKYTSPSTPVSAHVPTTDLALQFPAQILDRRSVSRGGSSVAQVLVRWSGMDTSLASWEDEAPLRMKFPTAAA

SEQ ID NO: 179689 - protein, 214 aa, Zea Mays
MGLQYKIVYKQGKENIAADALSRVGHLMALQTLTKVKPLWVQEVLNSYVTDDEAQRLLAELVLHSPNEQGFSVQKGVIRKGNQIWVAQNSALRTKIIAALHDSIVGGHSGSLATYHRVKRLFWWKGLKTDVKLFVQQCLVCQHAKSERVLSPGLLQPLPIPQGAWQDLTMDFIEGLPKSEGCDTILVVVDRYSKYAHFFALRHPFSAATVAQVF

SEQ ID NO: 179690 - protein, 88 aa, Zea Mays
MNAYECNAYVLCLHTSKGMKPHRTPPRATYDAKLYRYGRTIGHDPTSYASESCNVYGMLHLSIYFTSFTYNTTTNNTSFTFKYNTNLK

SEQ ID NO: 179691 - protein, 54 aa, Zea Mays
MQVNHAMYMACCIYQYTSLPSHTIQPQIILLLPSDTIPTSNNTSFTFRYNTNLK

SEQ ID NO: 179692 - protein, 107 aa, Zea Mays
MGVEHLLDPLFLFNPSCSSSSRSLLRGGRSRGRRKQWRAAARGRGRGGQGWGKGGFGGQEKGKREGATTRVLWEKETTPQMSPDFASNGPQLFPSSTHRRSTFGQYF

SEQ ID NO: 179693 - protein, 61 aa, Zea Mays
MHERRRPSIKFFDRALDKRCTRTSLIFGLTSGIRGSTRSSTEGRGSTGLTTIREGDIYRAA

SEQ ID NO: 179694 - protein, 51 aa, Zea Mays
MEIHIIHDHTFIISLLFTVHDKIIMLIGTWSDHPGKRCYHKDGMGRPWLTN

SEQ ID NO: 179695 - protein, 90 aa, Zea Mays
MTCMGGFMSTIATRFAFFPSTPLSFTVVVVDASTHNLAIPEISQAVLHYPSRRRRDRPPRHLGDLPSHLAPRRRDAHCPHIPTIANMPTS

SEQ ID NO: 179696 - protein, 55 aa, Zea Mays
MSVDEQEGFNGQGNGRDRRTARMELRRGSTDSGADGDGRRRTPATVWASGRERER

SEQ ID NO: 179697 - protein, 75 aa, Zea Mays
MRPNGPNKDTQPKGQLRCRSTEIDYGRRFGPPPCFERPCWPSTPPSPSPCPCWSFPSFLSTINSLGSTLFSNSQE

SEQ ID NO: 179698 - protein, 112 aa, Zea Mays
MLHAKVVELKSCKPSTSNVEHVCICTRCRDVDINAIHDHMSLIKQQNDHIALLDAKIAEHNLENEKFKFARSMLYNGRCPGIKDGIGFQREDNVKLNAPPKNLSNFVKGKAP

SEQ ID NO: 179699 - protein, 229 aa, Zea Mays
MGYNCLFTDVGVTVFRRSNDSIAFKGVLEGQQYLVDFDKAELDTCLIAKTNMGWLWHRRLAHVGMKNLHKLLKGEHILGLTNVHFEKDRICSACQAGKQVGSHHPHKNIMTSDRPLELLHMDLFGPIAYISIGGSKYCLVIVDDYSRFTWVFFLQDKSHTQETLKGFLRRAQNEFGLRIKKIRSDNGTEFKNSQIEGLLEEEGIKHEFSSPYTPQQNGVVERKNRTLLD

SEQ ID NO: 179700 - protein, 231 aa, Zea Mays
MKDAKPIKTPMGTNGHLDLDTGGKSVDQKVYRSMIGSLLYLCASRPDIMLFVCMCARFQADPKESHLTAVKRILRYLAYTPKFGLWYPRGSTFDLIGYSDADWAGCKINRTSTSGTCQFLGRSLVSWASKKQNSVAFSTAEAEYIAAGHCCAQLLWMRQTLRDYGYKLTKVPLLCDNESAIKMADNPVEHSRTKHIAIRYHFLRDHQQKGDIEISYINTKDQLADIFYQAS

SEQ ID NO: 179701 - protein, 173 aa, Zea Mays
MSGAPPDMSGAPEDSNANSPPSGISRGNSAIIHRTVRCTPDSVRCAKEERPQELAGFRNLQRLVRYNSPDMSGVHRTVRCNPGATAIRRQRLPAAHLMRAQRAQKSGAPILAHRTMNRRCPVCTGHPEGPTSQKLQRSESNGSDDVAGAPDMSGVHRTVRCAIEQTASQRPLL

SEQ ID NO: 179702 - protein, 83 aa, Zea Mays
MCGGSMGDEGAIGLALYPRGEGIPATRRICEKVGTSQRATRRRHGLVMNLLWSRCGGEGLADDWDLMSATLDLCEWAAPMRLT

SEQ ID NO: 179703 - protein, 53 aa, Zea Mays
MFHLTLTLLNTGACCSSREVGSSSTSTFTLIITLLRRSHDLIRNFLSKDVVSN

SEQ ID NO: 179704 - protein, 61 aa, Zea Mays
MEMGQREENSAQTAIFFFFFLLFSVSISFSFIFFFIFEFLNLNPNLIANFEFELDVLVQDV

SEQ ID NO: 179705 - protein, 52 aa, Zea Mays
MFHLTLALLNAGACCSSRGVGSSSTYNFTLIITLPRRSHDLIRNFLSKDVCF

SEQ ID NO: 179706 - protein, 99 aa, Zea Mays
MVWSFRRCPGPSVSMCQTVCDAQNRCTRLVPCLRVPLSLEVVMVTFKVSPPLGVFSATTFLQKILLFSSTFCASPMMTSLPLPLSVVLGRIRSFLPSKL

SEQ ID NO: 179707 - protein, 215 aa, Zea Mays
MLEKLATHDVETVPTLFALADKCARAAEGRAWHSAPQIGAAQAGGSGAVAQDGKKRKKKNCGNEKPHSAALVVAAATGGRGDRNKRPRRPRGNSGTCPVHPSGRHSAAECHEIIDLAKRVSAWREQSSGDGSPPRRRLGKEKADDKEVAVAEPDLGYQSPEGVLRMSSLETPIPVKATRRTTRGPRATWPAGPKSAFPPETLLDSPRVQPFDGFV

SEQ ID NO: 179708 - protein, 101 aa, Zea Mays
MTTGGRLQSGCMMKILEVERWQKSANPHEVALLQQQQEEDKIGSTTAQETKSASSPAVRPLGRVALTRIPPANTSAPYPEARKAEGHGECKRSEAWLLPEG

SEQ ID NO: 179709 - protein, 193 aa, Zea Mays
MAASMCAPLRRGPRPRPPTGGDNEAIKSKELEAWWQVALVVSPAEATTSATGSLTSGGDHLSTDDSGHLCTGGLPATAAASPHAERSSPPSSYGGEDKTIQERGRHRRGVQRLVQPPGRRQSSAAGCAGNATDAADLRTARPSLVRWTNSRAPFGGGRQHQSHLSQGARHAAADGACSRSAPRSRSSPPPQGW

SEQ ID NO: 179710 - protein, 103 aa, Zea Mays
MVSNLLRYNQRVSSPRRLMDLRSHGCAGLSERDWKLAVKRRLKSLQSSMQCWGRCRSHCSTSCPRTIGKYALRLLQRLGQQWCRRSASLPDPAWVHICQRWRP

SEQ ID NO: 179711 - protein, 133 aa, Zea Mays
MNSININISTSSANSNMLNGTCRGLQVFNSTILACKIAFSSLRLEMETLQTFKSLALAINFSFSILSLERDAFNLSILAIKLALSFLRLTRESSLSFNFSTLAINLSFSNLRLEMVSWQVLSSLVNFSHFSIS

SEQ ID NO: 179712 - protein, 66 aa, Zea Mays
MSGAPPDMSGAPEDSNANSPPSGISKGDSAIIHRTVRCTPDSVRCAKGGRPQELASFGKMPTASPL

SEQ ID NO: 179713 - protein, 60 aa, Zea Mays
MAQARRELHGWKETRERETRCRGASGKNGAMGASTAAMDSESCARPAEEQGRPRSGELEA

SEQ ID NO: 179714 - protein, 146 aa, Zea Mays
MCSSSSRSLLRGGRSRGRRKPWRGAAMGGESSQPKGKGERGGQVLEGGKGWRPSRGKRGKRPPLGFSLREKRSDATDDSDLAPNGPQPFSHIHAPKINLWQHFFGILHSTPLKKNSSSNSSTPNKTSMVPHITPPFQKHGSIIGLN

SEQ ID NO: 179715 - protein, 128 aa, Zea Mays
MGGESSHPKGKGERGGQVLEGGKGWRPSRGKRGKRPPLGFSLREKRSDATDDSDLASNGPQPFSHIHAPKINLWQHFFGILHSTPLKKNSSSNSSTPNKTSMVPHITPPFQNMGPLLVLINTRTSTSD

SEQ ID NO: 179716 - protein, 106 aa, Zea Mays
MIGELVAMKTEMDRRRESMPGVVGFRRALDSGMNSSLALTIFCRALMARVVFEFGHGAPALPIAGEGAAVGGVPCAVVPYIGERRTRRSRQFSEGWLRLECVNPFA

SEQ ID NO: 179717 - protein, 98 aa, Zea Mays
MNAYECNAYVLCLHTSKGMKPHRTPPRATYDAKLYRYSRTIGHDQLQMQVNHAMYMACCIYQYTSLPSHTIQPQIILHLPSDTIPTSNNTSFTFRGVN

SEQ ID NO: 179718 - protein, 54 aa, Zea Mays
MCSSSSRSLLRGGRSRGRRKPWRGAAMGGEDSQPKGKGERGGQVWEGGKGVAAK

SEQ ID NO: 179719 - protein, 52 aa, Zea Mays
MSLGMTRPLCNMQLGSLCQLAEVEFRVVTEHISTRDLVQEYVANKTFPMSGG

SEQ ID NO: 179720 - protein, 55 aa, Zea Mays
MNVHYYRCISIILCELSFFCILYKLYVPLVMLLSREVLPDFAIVSFSISFLVLHK

SEQ ID NO: 179721 - protein, 50 aa, Zea Mays
MPGLRKVPQVMFKTTEMSQQVPFFCLFSGSILSLSFSFFSFLFFCFYFFT

SEQ ID NO: 179722 - protein, 58 aa, Zea Mays
MLSMFFFMIYVYTLLPLVYAIFQKRCCRNFIYGCQMCSSVAFWGVCGPRGVTKGLDTM

SEQ ID NO: 179723 - protein, 123 aa, Zea Mays
MVGGFHGRRGDGQLREKRGRVAAKRGGGGKRGGHLGFCGRKELTPQMTSAFASNGPQPFPTSTHRRSTFGPKMFLGYYTLPPLKRIRPRIRPLQAKHPRYPITTIQNMGPLLVLINTRTSTLD

SEQ ID NO: 179724 - protein, 64 aa, Zea Mays
MKQPLCILSPFFFCLFSGSILSLSFSFFLFFFLFLFFYVIEGEKQGSGVDSVCGVIKREMVAAR

SEQ ID NO: 179725 - protein, 71 aa, Zea Mays
MAHNPFSHIHAPKINLWQHFFGILHSTPLKKNSSSNSSTPNKTSKVPHIAPPFQNMGPLLVLINTRTSTSD

SEQ ID NO: 179726 - protein, 88 aa, Zea Mays
MNAYECNAYVLCLHTSKGMKPHCTPPRATYDAMLYRYGRTIGHDPTSDASESCNVYGMLHLSIYFTSFTYSTTSNNTSFTFRYNTNLK

SEQ ID NO: 179727 - protein, 60 aa, Zea Mays
MQSFELRNSKYNFNINNASPGHNNIYNNYYYPFVSMCTTSFLEPNSHVKIKFVSTMNFGF

SEQ ID NO: 179728 - protein, 54 aa, Zea Mays
MGSLFLPIIMCFWRLWIMGFEGLEVGLDVGLDFDLEFSFCRMADSTVSVHASFP

SEQ ID NO: 179729 - protein, 54 aa, Zea Mays
MLRWTAPIQIPVCPGAFIYIYFLLYLHGISLILYLICLFYFLSGKLGIKSQFGH

SEQ ID NO: 179730 - protein, 65 aa, Zea Mays
MMEVIIPFIFVEWAFLMKLPVLRHSVLVILSKMMHLFNYFVNLLLKIGQPEHFLLFPLNLLMDCF

SEQ ID NO: 179731 - protein, 89 aa, Zea Mays
MHVLTTFCGFHPLEMSTHPIVLFSAKKEDDPMWKDRVDHAKDVWALYPGHTAHLTVRCMNALYRLQALRGEAMSQLMGLVVLGTCSQML

SEQ ID NO: 179732 - protein, 840 aa, Zea Mays
MRGRYFRDLSIVRADEGEKTCPSPEENEVVVFRSFLKAGLRFPLSSFVVEVLKIFEIYLHQLIPEAIIRMNIFVWAVRSQGLEPDAKSFCNIHELLYKTKPWGKEQYHNNFGCYSFGSRSGSSCPVPTFRKRWPGDWMTEWFYVKNDLKTREDIKGIIMHPIWQSFGLRRPKVEMNEAAKECQRAFGVICSFIETRDLVQEHIAFRVWPLADNWEMSQEIIKETDESGLVRLKYTFKYGDKFVEPDDDWLKSIETVSDELLGAYSKAEDTALSAAFGGRKRKRLNRVFDAIGFVYPDYRYPIRGQKRKVTTSAKEEAVAAPSEPAPKRKRIKVLTHRPRYIEPASVPEFTGETSSATEAEEPTLLPEVAEMAEAPITTELEEPKILLPETKEVAEAPSTEKMEEAKGSTEGSKISEILSPSVEIEAARIKKGPTVTPKRKRMVNVLDVLETIKSSSTTPKKTVETSEAETEIFDTKAPKQQAEVEAGPSEPTKVKSLETEEEKMTEPNLVEEISAVAPEASPKVLDYIIRHASGKKLSEKEKQEAQFYAQKLKYPKGALIFNGSGEEDFLYCLPDSKEISVCREMSKSFGFPTLEDELSVLSKNELADSLAYNSLNVQKMKSLYFFLKPKFFVCLNLLTHTHLSLQGLILSNALRAQKDAEDEGCVMALSNLRSEVIELRNEGLEKDKILHSLINIIKEDEATFKGQAEAQKREIEDLRKQLARAKEERILEETKRELSDQWANHLEGTVEELRSSKKRCYVKSMECVKKMKTSFASVGAFSSEENFTRGNPEGPIEWINHEAEAFEEILNSRGDICAFLGARGIATILEKKGCEHVKIL

SEQ ID NO: 179733 - protein, 52 aa, Zea Mays
MFHLTLALLNAGACCTSREVGSSNTSTFTIIITLLRRSHDLIRSFLSKDVCF

SEQ ID NO: 179734 - protein, 55 aa, Zea Mays
MCAILQSTFREFYFISFLWSPTYLNNRIYLKIIYFVDMYFIYVTIIFEFIIFFNK

SEQ ID NO: 179735 - protein, 73 aa, Zea Mays
MCSRPPTSLPPWPPPLPISSSLNSCSHQTLAAPLSIPSSQGANPCRSDHRRRGASLQSFWWREEGRKERGRIQ

SEQ ID NO: 179736 - protein, 82 aa, Zea Mays
MTCTSHHPSCILKLCRDLMVRPYRYIFSIVRCPMRGTMRLHILRGMKAEVILAFADICTHEVYMKCDITMLLLWFLPARCGD

SEQ ID NO: 179737 - protein, 115 aa, Zea Mays
MLPKVYLRCVDVGKELWAVGCKVKRHLRRRFFLPQNPSGRPPIFPFSWLPTPPFSPPLAAPPPSPCSHPPLLPPPSRSPPTQQGSRRGGARWIEEEERIKEMFYPHLLQIFLEKP

SEQ ID NO: 179738 - protein, 184 aa, Zea Mays
MQNCSIQSSFADRLLSPWSSNGVLDSTESFNISTPSLASESPYVHTKLDYSIWSQLMKIDFKFLQNFTHHFIQRELKPCSEEALKNNNFIISWLWNHFVSGEPYQLIIIFPKYPSFFIKTKSSTFIVDFPNSIWLGLLGLYAIILFIITSNFRISMFSFGNNVILLGNRLFSLLNNQPKVPHYF

SEQ ID NO: 179739 - protein, 55 aa, Zea Mays
MADFTHVSMTREDRTTGLLSPSSMQQNFVEKNLIPSVLRLGILLGNISGAQRGMV

SEQ ID NO: 179740 - protein, 54 aa, Zea Mays
MHNQNIQHDAKFFYFYFYFYFIYIFIALFILSNYFQVYILYPPNICFNEIIYIA

SEQ ID NO: 179741 - protein, 86 aa, Zea Mays
MWMSHTYDVIDYFFPFLILFEHCVMMSMLCNCCVRELLILTRTWFAFGLPSKTGCDIGSGHFADRNPRHARPSNGLQSRIEIRDGT

SEQ ID NO: 179742 - protein, 52 aa, Zea Mays
MKQPYPFSFVVFCFCFFFDVTEGEKQGNDVDSVCFFFCFFFVTEGENQGNGR

SEQ ID NO: 179743 - protein, 102 aa, Zea Mays
MSLHRWSSRRVCWSPCVLGRGRRRALAMLGFLGLTALTFASASTSSQCKTITVAFSSAPTRVHALYHARLYSNESSCHRLHRMEIAVLATRHQLDKINPMGI

SEQ ID NO: 179744 - protein, 82 aa, Zea Mays
MRLRNKCTWQRTRSTSQTTLGQATNAFGEVATMDDGVGGSVTRQRWLTSLQRHAQGARDRARRNGHGRAQQERARAREQGRA

SEQ ID NO: 179745 - protein, 55 aa, Zea Mays
MESKFPLLTGDCLDDAKTHFAAQQLRGPVRTWWDHFRAMLTADHVVTWEEFKTAF

SEQ ID NO: 179746 - protein, 62 aa, Zea Mays
MVEERWCEKTQCDQQQMMRKHTNSTMQIIERRCEAQKGAGIRSNLNFYVVLWTVGEKTLDKL

SEQ ID NO: 179747 - protein, 87 aa, Zea Mays
MVVVVRQILSAQPSPFDKYRTWRHREQFQSSFWSTKTFVSDPDTSCYFLGEWSIGISELHQVSVDVTQELLGLPNGFGTKEHHFHQF

SEQ ID NO: 179748 - protein, 71 aa, Zea Mays
MGVVPGCNSITNSTSLSRGKLGKSSGNTSGNSLTTGISFTSLIVAAYTLSTALLGVDNWISNLELPLGESN

SEQ ID NO: 179749 - protein, 67 aa, Zea Mays
MCPRKKGAPWDGRGARQSEKKQTSEGDGGEVAVDELGEVEETARKGSLRCTDMMGAGASGPRLHGFC

SEQ ID NO: 179750 - protein, 79 aa, Zea Mays
MHPSQRGDDAAWGRWGSSIHSWCSGGGTHGRGRGRWYKGDSGRWRWKRGWHRGRACRGTMVVGAARPWQCERPRSTCCD

SEQ ID NO: 179751 - protein, 54 aa, Zea Mays
MLWPTWLSSTLLVRREKVDPTFLSPSGILMKQYVLKGVIKLVLALSSSFMYIWW

SEQ ID NO: 179752 - protein, 76 aa, Zea Mays
MSKSLPVKLSPLGPYLTKLFQKDKELAKTKKAARPKKQRIITVTEAIEGTPPEASAPKAPAIESTTTTEATNAEAA

SEQ ID NO: 179753 - protein, 147 aa, Zea Mays
MLLSKALKMQQDLEDKKHEVIIGNLESKIKEQSAVIEKKVFELQTTEGLLAEAETKITELNTKLLSQSENFDQEKQKLNAKLEAEVQKSSDLKKSLTSLQNKCLEFSNRCVQRLKHVFYFVGASSEKFTPSAEDLPGAFEHIEGEID

SEQ ID NO: 179754 - protein, 82 aa, Zea Mays
MTCSSHHPSCILKLCRDLMVRPYRYIFSIVRCPRRGTMRLHILRGMKAEVILAFADICTHEVYMKCDITMLLLWFLPARCGD

SEQ ID NO: 179755 - protein, 107 aa, Zea Mays
MLCRSHLWRRFFSPAKKTLVVVFSPFCPYLAATPFPPSHTWPPLSSFPLGWLSSPPMAAPLHGFLLPLDLPLRSKDREEEEHIELKGKKGSGDVLPHLFLQNFLGKP

SEQ ID NO: 179756 - protein, 515 aa, Zea Mays
MCLLAADEPASVEAALEEGCWRDAMIAELKSIEQNKTWAYADLPKDHKAIGLKWVFKVKKDPSGKIVKHKARLVVKGYAQVQGVDYDEVFAPVARMETVRLLLALAAQGEWQVHHMDVKSAFLNDNLEEEVYVHPPPGFSDPKHLGKVLRLKKALYGLKQAPRAWNARLDQELKFLGFNRSVEEHAVYRRGTGNSLILVGVYVDDLIICGPDSKNIVVFKQQMKKSFDMSDLGLFTYYLGLEVKQKPGEITVCQSAYAEKIVEISGMKGCNPADTPMEQHIKLLPGKSELVANATKYRSLVGSLRYLVNSRPDLAYSVGMISRFMETPNSEHWGAMKRIIRYVAGTTKLGCKYVKGALSDLVGFTDSDHAGDLEKRKSTSGVLFFYGGNAVSWSSQKQKVVSLSSCESEYIAAATGACQGVWLSRLVADITCSDVKKFKLFIDNRSAEELSKNPVFHERSKHIDTRYHYIRECVADGVLEVQHVSTEDQLADILTKPLARIRFAEMRRQLGVVNI

SEQ ID NO: 179757 - protein, 89 aa, Zea Mays
MNRPSDGVKLGRWQEFYVTPHFRPSQRERKMMFPPARASGCVREKPPLGDSKGSSSSREREAHNTVGVDEGGDDASDRVTLYPLSYLQY

SEQ ID NO: 179758 - protein, 68 aa, Zea Mays
MPKLVPLARIFAMHTLVEPPPHATLPFLGNLPTKGRLRPLLVHVPKTRLFLCQSEGIMRTFGRVGHQQ

SEQ ID NO: 179759 - protein, 83 aa, Zea Mays
MNAYECNAYVLCLHTSKGMKPHRTPPRATYDAKLYRYGRTIGHDPTSDASESCCIYQYTSLPSHAIQTSNNTSFTFRYNTNLK

SEQ ID NO: 179760 - protein, 56 aa, Zea Mays
MPATSLAAAANEILPLAQNLDHGSCEVPFAPTAATGEGATTGDGTIASCSASNPAP

SEQ ID NO: 179761 - protein, 280 aa, Zea Mays
MAGCQTLLHSIAGWSRAPGLNLFARCARYSLGSCPPASLLVLSGQPRSLSMAELILRASLSLARELSVSLRTAASPLPGRSSSKLLAVRPSTRHFVHGRRPSSSPYVRTSARISSGPRAPLPRPCPPRLSLSGALRWPQIGASRASCSLLAQLSIRRRITYSLSAPSKFPRRALLRRLPLILPLNFRALQRSSSLLLPSPNIIAHSRSREFFPVHARAPLLGPSSFSSSLPHSAVRRHRSVARQADCVSCVTHPRPSSTRRSSSHCVRQYRLFPCPVLAR

SEQ ID NO: 179762 - protein, 152 aa, Zea Mays
MTLHDLLISSYSLTSNNNVSSMESLATFLWIVGGPQSFSQAENNFTRSQTIHTKFHEVLNCLCKLAKDNIKPRDPTFNIEHDRIKEERFWPYFQGAIGATDSSHVLVTVPTDEVVNHTYRHGYTSHNVLAICDFDMRFIFVVVGWPGSAVCT

SEQ ID NO: 179763 - protein, 86 aa, Zea Mays
MISDILTQVIEGLCILQHSAISLSKCQKLIKLSVHDACWYMMPSESGLELSPFHHMVNRLHSKEVVPPCLHGSAKLLGGEPDLRHI

SEQ ID NO: 179764 - protein, 111 aa, Zea Mays
MPCLAELKEARTRDRVGTWGEFTATDTLDNYRRSRITKNTVTAKNRLGDDDRHAREELDAETRHAIASREFSCARQTKKERVVRAQRARQPAAGASRARATRRRATTTGSN

SEQ ID NO: 179765 - protein, 77 aa, Zea Mays
MYLPPATQTAETQGGDQATRKPCVVPWAPSSRAEPCAYTNNGVSKASSVASPRLQEGVRALAGRVWCTVQLAISRRS

SEQ ID NO: 179766 - protein, 51 aa, Zea Mays
MHVNHAMYMACCIYQYTSLSSHTIQPQIILHLPSDTIQTSNSTSFTFRYNT

SEQ ID NO: 179767 - protein, 88 aa, Zea Mays
MNAYECNAYVLCLHTSKGMKPHRTPPRATYDAKLYRYGRTIGHDPTSYASESCNVYGMLHLSIYFTFFTYNTTSNNTSFTFRYNTNLK

SEQ ID NO: 179768 - protein, 76 aa, Zea Mays
MCSRPPPHFSSPLAAAPLPISSSLNSCNHQTLAAPPLNPLLPRCQYLPLGSSSSWCESSIILVEGRREEGKGENPR

SEQ ID NO: 179769 - protein, 82 aa, Zea Mays
MTCTSHHPSCILKLCRDLMVRPYRYIFSIVRCPRRGTMRLHIPRGMKAEVILAFADICTHEEYMKCDITMLLLWFLPARCGN

SEQ ID NO: 179770 - protein, 100 aa, Zea Mays
MTPEEILGKFVSGRMMVKEARYVDDALNSPIPAYEPQPVALKATSSREVLPSKVAQVEAAGLNEDEMALIIKRFKTALKGRKDYSNKSKAKGKALLLQMW

SEQ ID NO: 179771 - protein, 53 aa, Zea Mays
MFHLTLALLNAGACCSSREVGSSSTSTFTLIITLLRRSHDLIRNFLSKDVVSN

SEQ ID NO: 179772 - protein, 55 aa, Zea Mays
MRLRCSNDKGISLGSACGCGDASCKLMTVCFGCTSVIFSHFLFFLFFLLLLEEAV

SEQ ID NO: 179773 - protein, 56 aa, Zea Mays
MDMFLSATHGASSSSNSSRSTCSTWEPLVSSNTMSQETSTNPVDLLKTLYALVFES

SEQ ID NO: 179774 - protein, 111 aa, Zea Mays
MIRSTRHSGSMMHGGPTAMPKHRCGIPGPSCSQGVNPATVSKPGHAPICGDTTRIATPHYACSLVAQLKSNDGDDMNSAATPFSPPLSFLCWIRRSADGKEVIGHGFILAA

SEQ ID NO: 179775 - protein, 67 aa, Zea Mays
MGRAGKLHGHPGAEGDGAAGMRGSERRKKMCSTVEIERRNICTTSQEMSTAETKSRATAAGHRIEEL

SEQ ID NO: 179776 - protein, 294 aa, Zea Mays
MSTEILGNYSKKEDQLMTAAFGTRPKRRLNRVLDAIGFEYPDYERLDKGAEGQKRKRVADALIKDGEDQSKKKKEKFESKVLTSKKRKDSIPEQKSIDEEEKASATSSYAEIEEILKVMTETLPVKLSPLGLHLTKLFHNEKEPAKTKASRPKRQRIVTVTEVIETTPPRAPALKMPSIEIMTATEAVPSEAAAEEARAEDANSEGINLESIAADIDKMLLNMAAEETAAATEETTAAKPEKEGITEDTSEDETFDFRNLVGQELTEAEKEELKEYAISCGYRPRSLLFGGIDD

SEQ ID NO: 179777 - protein, 93 aa, Zea Mays
MAETTMPSGGGGGGDQDGRRRHAGAGGLERVERSRAVTAGERGPGGQILHRKTRGVKLNGTRVVNGESTDRKKIVSDVGSYENIVEVKRPREN

SEQ ID NO: 179778 - protein, 101 aa, Zea Mays
MRGAATPTAALAGAMTTIGRGSRTSGLAGRSPGRRRTGGLAPRRRLSAGRSAVENRGRSGRLIRHGELLEEKLVPHSVEGGEGHAPLDESLHVAIVGAEAT

SEQ ID NO: 179779 - protein, 79 aa, Zea Mays
MMLMVDYLHHHFLLLPLLHLRNLDWEPSCLSFHHMQKHMVLKKLAPLVDPFFATSQMPQSFQSQWSGSFDSSPPCCEEW

SEQ ID NO: 179780 - protein, 104 aa, Zea Mays
MTTLVLIPLRKQGDVSKIPAAPTAVLLQGSGTSLTAMLLRTQGSSTSPTATLACTQGSGTSLLDTLAPSYTPPHCTSGPSPCIYKREVQGLHAEGRAGERANEQ

SEQ ID NO: 179781 - protein, 202 aa, Zea Mays
MSPLACPCTGVRSLRVGLIWQNHLPPENLARLLQMLRADLAFFPFYRDYPATCRSQTAHRLCGPRIPSQNYLLRCVAARVYYITGGDAGIFVPTSSGPGGQINTEPSSWIDHRARSRALCLKPIVRVRVRSVRGENLGACGSPKWALGVHRSPALKIHLGDSLGSVECVVTSALRKFLPTPLGLSIVIGGSSQAAWRRVLDR

SEQ ID NO: 179782 - protein, 105 aa, Zea Mays
MFFLPQTSRTRAHDGAGTSRGGEDTPNPPPVPPTLAEAIAALVNATADNTRFLREMAGNQFQQHGGRGQPQGPRYTTYLEFSETFPPLFIKVEEPLEADEWVRVM

SEQ ID NO: 179783 - protein, 123 aa, Zea Mays
MEVAGAPWEELWRPWKNGAHAMAAERLLPGSGGRPWLLAPKRAQRDGEKKRAAASRHGKESCSPWEPTTMAWRSLGLGWGEETRGRRGGRHGRRGSFLVAVAAVREETGESACVGEKRRRESG

SEQ ID NO: 179784 - protein, 50 aa, Zea Mays
MNRYLRTRAKSMYGVKSMIVTKVGVAPKLHVRELRLNGGKRNRLKGEKAI

SEQ ID NO: 179785 - protein, 69 aa, Zea Mays
MENHPGNSATIRVEWDALGQVIRKGRERISYPKRAIGEASLQSIGRFSGRTVVMAFRTRDSYASFYLKS

SEQ ID NO: 179786 - protein, 69 aa, Zea Mays
MLVRRSTLPASRAKVVLMMLCVASIKLHAPISPIQKLKLLGEGKQSIYTLQHPHSRAAREKDTNMEIKG

SEQ ID NO: 179787 - protein, 97 aa, Zea Mays
MVLLRSVTFIVQKYNCPSQGRNPRAGFEGWGWARVERTGRSSTGSRLGAVPPWLGAARARHQGAPSRDAAVRAQEAGRSARRREQRWQKNSRARQGA

SEQ ID NO: 179788 - protein, 97 aa, Zea Mays
MNVAENGVDGMISLDCLVDSWVWRPWFFLLVLIICVSPLIIVVILRWLICLIFSFINLSLILILSWWRCLRGEGWLILCIWRLFGFLRTHIPNGHIP

SEQ ID NO: 179789 - protein, 76 aa, Zea Mays
MTLRAEGFVWFLSLTVRQVHGLLSTIQCSRWGLKPFQLITDVTGVTVLFIYFQIVPAPVRVGEDEPPPSWVLVPDP

SEQ ID NO: 179790 - protein, 80 aa, Zea Mays
MITHNATFEDLQVFFGHSNDTFHRVIKHFFDIVIPGLSMRFLKPPSNQVHPKIHGDNRLYPYFKVTSFNSYVSILEHPQY

SEQ ID NO: 179791 - protein, 62 aa, Zea Mays
MNDRMCFVPSFHGLMMIRKPRSRKQVRTACCVGCTAKQVATMGSQSTWSMKLDGELELNQQE

SEQ ID NO: 179792 - protein, 59 aa, Zea Mays
MKTSSQITSPNSYHDFFCYNGQSLVNIPKKVHVPLPKISIPLTMIRVDNIWVKFLIIEL

SEQ ID NO: 179793 - protein, 60 aa, Zea Mays
MGKNISLILSPPSIQRAPPLLDPCCAGEDLEGGGSRGEGLPWEERTASPRGKEGGVAKCG

SEQ ID NO: 179794 - protein, 86 aa, Zea Mays
MSLALCLLIILLLLPLVPLVLITIIVGTVSNKMTKLTAFEARTLPLSFGLAWLSLATFKRRLESFDNEGHLFIIKSGCLYLCHPAR

SEQ ID NO: 179795 - protein, 214 aa, Zea Mays
MRLEVVSQLPPRQDHCVQQLLNLWVADLGLGQYFTDEVDWPLDGQCMPLFSPLNHDRGADHLSGSGNVDQEGFFGSGRHQDGRVREERLQVPEGFLGLRVQVKHSAFLKRRYRDRPLSPRREMKRLRAARHPVTLCMPFKSLMGPMLVMAAIFSGLASMPRSETMNPKSMPRGTPKTHFSGLSFTPFALRHRNVTSRLERRSEAFLILTTMSST

SEQ ID NO: 179796 - protein, 163 aa, Zea Mays
MRASTKAKSLGGSRLNPKGTRWESVGTSWSTGGDKVASGADCTVVSGTRVTPSKSFASVLASFVCLELACYGETALIFVSDAKSMPDVSPVGAPSTRSTADEVPPPAWPWLPRLLFRRRGRRRDKPESHSSATWGRRRRFRRRRAGCWPPLSLSRGGGRSIMS

SEQ ID NO: 179797 - protein, 88 aa, Zea Mays
MENRLLKHGNFIIRIRLSHDVCLILLTKTSINNSFKIMGINLIHNMESDKYRRIISNLSKRQNDINHWIDFSFDVRLRISKEKLILYM

SEQ ID NO: 179798 - protein, 76 aa, Zea Mays
MKCDLIITLDVTFYGGMVEAFGRGIDFLLLRRPLSNPQVLDIFFKGFSACHGCSRLKLLHHVLTVILRRLSNAFSF

SEQ ID NO: 179799 - protein, 55 aa, Zea Mays
MVCMAAVGTSSSSTSSRSTTCSLGEPLVSSNTTSLETSTKPDDLLKTLYAFVFES

SEQ ID NO: 179800 - protein, 75 aa, Zea Mays
MNLFINEHGTIRTIKVHSIFYYLPYTWMEREQVATHFVTPKSVVLSIKVRGFTEGNGKQMSIGTLRNTRIIKGKV

SEQ ID NO: 179801 - protein, 66 aa, Zea Mays
MYPAVKEATRRARGVQPSHGCAPPQLRHNWQSNSGDQAHTSCNQHAGYRVQRNLLGAFVFRRSSKT

SEQ ID NO: 179802 - protein, 134 aa, Zea Mays
MFGLDLCNDCHQSVGIPCILVYLLYVNGVSYMVGKPFIPLSSLSEKLCGLCWRSVKMLICSVLLKDSILFPYAARFARSVLMCGCILQMSENRRRGGRRAQQERTAQQDEVPQQQHLPPPPLMSIEQMFLMQTQ

SEQ ID NO: 179803 - protein, 52 aa, Zea Mays
MVTGREPNRSWPDEGTRDCQNLNWLMREYDGRLLIQRQTYFYAHRRDYKVKD

SEQ ID NO: 179804 - protein, 77 aa, Zea Mays
MLLVVSYTYEFEVSVPAENFITAQFPMMQFTHDSLSQFILHIFLYGGQLLIKRRATHRRRCHTLTIGQLIMVTHLLT

SEQ ID NO: 179805 - protein, 52 aa, Zea Mays
MFHLTLALLNAGACCSSRGVGSSSTPTFILIIMLPRRNHDLIRNFLSKDVCF

SEQ ID NO: 179806 - protein, 55 aa, Zea Mays
MRWTCGNTGTYASATPTELWTVTTACSCRQAASCSSQDVPDMDSFFLAGAFGRCV

SEQ ID NO: 179807 - protein, 50 aa, Zea Mays
MIPLNRCSNLGWRCLRCFFLFNLSIMCSPLIMRLHLRYLFVILGWGMHHS

SEQ ID NO: 179808 - protein, 116 aa, Zea Mays
MLKECLVSFSMRLGVPFIAPRQLGAVESISRRQFLPSVAWRTGQSGAPPDTVRCGFLSFFGEADRCRFLAIGAPDSPVPPSDRWLCHASRADSTADRWPGRLLASPDSPVHHQTVR

SEQ ID NO: 179809 - protein, 137 aa, Zea Mays
MTKITSSLDLSCSRGHFEGLCHACQLGRHTRLPFTTSSRAEQAFDLVHCDLWTSPVLSLSGYKYYLVILDDFSHFLWTFPLRLKSDTFTTLTHFFTWVSTQFRRPVRALQCDNGREFDNHASRSFFLTHGVQLRLSC

SEQ ID NO: 179810 - protein, 193 aa, Zea Mays
MLLHASLPPTYWAEGLLTACYLHNRHPSSSIQHEIPYTRLHNQPPTYSHLRVFGSLCYPNMQATSKHKLAPRSTACIFLGYPSSHKGYRCLDLSTRRIIISRHVTFDETTFPFGATSDVSSSASLEFLLDDDMVSVPCPTVVAGGTPSSTLVVAPSHSDVEQLPPDVAASHDSPSATPGEHGPVPPPGPGVVP

SEQ ID NO: 179811 - protein, 132 aa, Zea Mays
MKRLNRLRWRPCCVFIPSKHIGCVCSVPAAGNHPGSVLWGLCHWALAMPGRRDRCSVQFCSPILQTEGAKQRQRLAIRLAPELIRPPPKFSMVLEYWTIRYVLASLWCSGIMFLRLADPRVATAYSATLCSL

SEQ ID NO: 179812 - protein, 68 aa, Zea Mays
MKFFTCVRFPAAVLHRSLAEWLLQEGRHLPVVLVLHVFAASSPENGARRRRGRARPAWFEAAASFPPD

SEQ ID NO: 179813 - protein, 56 aa, Zea Mays
MWQFLNPFYYLNKVVTHETTRASRINQHQHLASLNISPQFDGLVMLTTMYCCFRNS

SEQ ID NO: 179814 - protein, 62 aa, Zea Mays
MEQKRPRRTISLFPFSFYFIFFLFYFLFFIPKFHFKFRFKFNSCAKLSSNYIVKLKIPILEI

SEQ ID NO: 179815 - protein, 50 aa, Zea Mays
MTALSVYIYGLFVTYGYNGNNQGTVFFYSFTKLNPLHCILNPEELYKVAR

SEQ ID NO: 179816 - protein, 53 aa, Zea Mays
MHTQQHKDGHRSGSKESKMGCRCMSHRSRKAIKEVGVGVEALSQVVSRNKWLK

SEQ ID NO: 179817 - protein, 104 aa, Zea Mays
MNAGWELGGRSTTGYLKTPGAAGRRADDDGGIFTGGERRDKARRLMTVEKKSGQRLDLFPFFSSFFPFLITEIADLSGSRFLAMWTDRHATRIHMTCFEFSEPI

SEQ ID NO: 179818 - protein, 127 aa, Zea Mays
MCKILIRLPFFPTCASLVLEFHHSRFSLSPSLLFCSLFNSSIDCIEKEMVRTRSRFPALAIWIFQRIRIYWIHIYSLLLRLLNCFVVPLNFLWHPSVFVQKNKSLKPSVGRLVATTLRTFDLISCLP

SEQ ID NO: 179819 - protein, 118 aa, Zea Mays
MYHDATTRSRRGCRPSTRRGSCLNHRSFPLTCSSSELNFNFQENMPQYPELVLDDLPAAPPPPPAGMVTTARDAYFLWELRKYVLLQATLAASVTYSAGLSPPGGVWPDNNDSTSSAN

SEQ ID NO: 179820 - protein, 60 aa, Zea Mays
MVASHVGSSTLMRMSQPRLLPALSQRRSSAPMAMALRAFIPACWSSSCTTVAWKLRPRQP

SEQ ID NO: 179821 - protein, 59 aa, Zea Mays
MPRLCNHAIGSSFLRFEHRLSCKLPVSCLCAHFFTCVRVFAAIRVLCVLLSLSYYCASL

SEQ ID NO: 179822 - protein, 86 aa, Zea Mays
MSQTTSMYINVIYFFVTHESCVHTIFEPSAKKHLPFFSCFAKKKSPLLCHICYIILLSTKIFLVCKIMTAEGTLCALAHCSIHQIF

SEQ ID NO: 179823 - protein, 107 aa, Zea Mays
MCSSIFWRSFSKVCGDFLAKYCVVGPSLSPLIMASMTISLGIIGAWALNRRNLRTYAWRYSSWSCVHWNKAWAVNCFVWKPWKLVTSMSFSFCHDVIVPDRREEYHV

SEQ ID NO: 179824 - protein, 148 aa, Zea Mays
MPRWCPSGLTRSQKRKLQRLRAKENQEKEAEKIFNDTHPQYPPPQKRWRPKAVEENQTATETENKTTTVQLFAGMSDSPAIKTRPTVQGADRPTTEADSSAIHHDTCNDVPTPMEEDDLQGEDLVDCEATPEHLENSESKVTNWLGPV

SEQ ID NO: 179825 - protein, 63 aa, Zea Mays
MDRTEQKWPRALYSQSFHLQICLLDIDKMHLMCDLFAVTCTLLPRGKRSTYVSISISLSLYLY

SEQ ID NO: 179826 - protein, 76 aa, Zea Mays
MQPSQRGGRRLILAAGSSTCLPRMRPIQAPCRVICRGARRQGLSMDVLSRRGRSSAQTGLEKRRDRDSALGKERPI

SEQ ID NO: 179827 - protein, 87 aa, Zea Mays
MLYSGDKGRAQDTLVVFERALVHKCSFASRAFRYTDIERRSNRQRRPECTSSLEANHGARWARLLPLIVNLEQLVLASQPRREDFSS

SEQ ID NO: 179828 - protein, 63 aa, Zea Mays
MSGSIQQKPDHCMHSLTAVHRAQPVCLLPASSRLEPPYVLTLSVLLFDCLHKGEAGCMSGCKT

SEQ ID NO: 179829 - protein, 98 aa, Zea Mays
MMDSSSSSICSAHLCVFFFFESWLANYNSWIIHSIITTPAAGYVVGAHGLASQLPSARCRSWIRCRVRGPTCQSLVASRVPVKCKGQGPGPRDATPPT

SEQ ID NO: 179830 - protein, 168 aa, Zea Mays
MELGVGWWQEAVAAQRAGGVVVVDPSLEVGAVEEVTAGEAVHHRPRLQPRQAHAVVPRRPTDGTCSGTGPPGWAPSPPFCCRRRRSSSSSCAAPHDGRPRISSAARSSPARIALYSKNPSRLSLGADMLEMPILAVRHRSRSRLGWDWEEDLGGQPREGPMLQFGRRR

SEQ ID NO: 179831 - protein, 84 aa, Zea Mays
MSIGDVCPKESEEPPNARDQPSSSMQASPPTQNEDEAQVDEGQNQEDEPPQDNGNDQGGDENNQEKEDEEEPRPPHPRVHQAIQ

SEQ ID NO: 179832 - protein, 192 aa, Zea Mays
MLRHHSKQLSIPWGEMSIKEKDFILGGESKSSKAKGPDFIFGIILTHSFMTKEEEKHFEGSNDSVFGDSCQKGGEMSPKQKDRTTTTKFKNLVLSKSIYHLVSYCVQKGEKVVFQKWYIKTLLNTKRWISFRGSFVKSKEKHLKQGEKISNLKNALQTLIHLPLTICKRSLKWIYKKNLQKQNMWCKRGPKC

SEQ ID NO: 179833 - protein, 189 aa, Zea Mays
MKAPMLSYRTKWPTGWKSEWFYVKADEKKREKLKTLVLSPLSLSYGLTRPLCRMSSGSPCQQAVAEFRVVTEQIDTRDLVQEFLAYGVFLLLSEWNMPKLKGEKKKNELVRLPYHFKFKKQFKEPCQEWLEMIEAMCNEILGNYTKKEDQLMTAAFGTRPKRRLNRVMDALNFEYPDYERLSKGAEGSK

SEQ ID NO: 179834 - protein, 55 aa, Zea Mays
MRTVRRPWPDGPCRNTGTCAPVDPLAESRMVRPAGPNGPPTPELSNFRLRFNKRL

SEQ ID NO: 179835 - protein, 54 aa, Zea Mays
MNLLNFFTERANSSSLPLSFPSSSLSSFSIALEALALRAIDSPFTFLAKLIASA

SEQ ID NO: 179836 - protein, 67 aa, Zea Mays
MSEEKKMTEEKKMIEEEKLYEEKKVADPFIAGFYESMAKTNTEKITKEIMEDLSEDSDDSDDYNVES

SEQ ID NO: 179837 - protein, 629 aa, Zea Mays
MLELLYETKATGEEQYHNNLGCYGFIACTNASYPVPTFRKRWPGAWIEEWFYVKNNLIERKDIKEIIQRPIWSRFGLRRLKVTIENNDEACQKAFNNVCAFIGTRDLIQEHVAYKVWPLVDSWEMPKETAFGFAEGGLVRLKYTFRFRDQFDEPNDDWLKSIEAISDELLGTYTRAEDGALSSAFGGRGKKRLNMVFDAIGFIYPDYCYPLRRQGKKRKTAASTTTTVPKGKKMKVLTHRPRYIETAVVPELGEGISSAAEGNQAAPAEAEAKGSTAAPKVPIVGSAEAKDDVVKEPELEKTVMMPKILSPPAEAELPKVIKAPATTPKRRRMASVLDAVMETTKALTPAPSKKVAEDVTVQAEAEAGPSAPIETKPAAPEDKAEQQTPDAGMAAGQDMIEKAKSPAPEALSEDVDYIIRHASGKILSKQEILEARHYTQKIKYPKGALVFNGTDEDDFLYCLPDNKEISVCGEIAKSMGFPKLETGLAAMSKDDLADSLAYNSIKVQKLLTLKLEMKYFIVMLNSFFFLQGLILSNAFRAQKNAEDESCTIALNSLRSEVIEMRNEALDKDKILISLVSKVEEDEARYNAQAEAQKDEIEELRKKLAEANENYVVAKASKEISEWSQA

SEQ ID NO: 179838 - protein, 52 aa, Zea Mays
MDISVEDYLVGGVAMFDAHTGRGPIGEFFFVFLFFVFLRSGCLTTLWCRIGG

SEQ ID NO: 179839 - protein, 60 aa, Zea Mays
MSLNHWVLMHDHVRTNSNQHKRKNIRNVEKSDYMHKIVLKTLIMKTSQMKCKFCDSCLGS

SEQ ID NO: 179840 - protein, 60 aa, Zea Mays
MTSGVEASNSAQVNSPSRGPGSYPPRARRPSRKDPPVSPFSPRRSTEWRADTRTPLGSPK

SEQ ID NO: 179841 - protein, 53 aa, Zea Mays
MTRPLEFLQVCPKIGINVWKMRSSVSKPNLGILKQRILQSPKESNAKFNSVRF

SEQ ID NO: 179842 - protein, 94 aa, Zea Mays
MAVRDFEIAQLMSSWVSFLPCREPTNQQCAGFGQGRCPQQDEARRSAPSTYGPIPYLVCFLAVRSYTHGTAALNNIQLQLAETKKKKKGAEYVG

SEQ ID NO: 179843 - protein, 61 aa, Zea Mays
MKYYLRLVLYLKVNEVLFEVVLYVKEVKYIDKCSMSYTLHVEMAKWTARHGPARARPGTAR

SEQ ID NO: 179844 - protein, 59 aa, Zea Mays
MVPRLYFPVRSCPLRPRRLHLHRLVPSVPPCSFPGARLASSSPSAWSSHPPCSLKTVKS

SEQ ID NO: 179845 - protein, 63 aa, Zea Mays
MERINTRWKGKVKFYMIPKLISLNSSRKNTETARLLLFTHHLKFWTATYPDSNGDNFQFITPN

SEQ ID NO: 179846 - protein, 80 aa, Zea Mays
MDGFGGRKATGKLRNNRKLSCMYPGIDCYSKELKMVYVHFFRDQISSICSSRAFCLTHTHTPSDIYWGRYIFDKLISMTN

SEQ ID NO: 179847 - protein, 113 aa, Zea Mays
MVSVCNDPLVLGWLSSRHSVPGGLGLRIVPCLVCAVFVVKQAIESSWLLCPSTTSSSCAVAAALGGITDDEWALQLGVDWLWCAPADDCDCPGRSLAAPVWSRFYWTAEGPWA

SEQ ID NO: 179848 - protein, 89 aa, Zea Mays
MDNGPARKNWPTSYFLFFFFSFLFLILVLLSYSNLTKFLIQIVSAFRPRGVPGPTSKFVAARPSPDGLARDGTQGKTWLVLSRARGVCS

SEQ ID NO: 179849 - protein, 58 aa, Zea Mays
MSGEHAKREITTDEKPEGLGRKNDERTPSKEAGDKHKDKFASSIKSHRKGDKKKKKMK

SEQ ID NO: 179850 - protein, 88 aa, Zea Mays
MTVSTVDIPVLHSAESAHLYPQVMLPICHGVVRAPYTSTKEARQGNTTGPLQSSTSFRKPATVYRKLQCRDFSPDRHRRKINPRTSLH

SEQ ID NO: 179851 - protein, 117 aa, Zea Mays
MELPGQVRRWNGLAATIILMESADGAPPIPSAKLKIRFMVRVIGCGVHLIDRCEEISVRRLELLSEFPRDIHGVSSARELRGLLRRKGEGASNLVGPQVIGCGRASYGPESLTGVGG

SEQ ID NO: 179852 - protein, 152 aa, Zea Mays
MEPDAPSLPLHSHRRRHSFSLLPALATRIRSRGPATPGRAPLPECAERATPPGSPSRDPARRPAALRPDALQPAPLQRPSRPMRLVTPSRRSPCRTRPAPASRTRCSASGRPRPNHSPRRDNTDASAGPEIEAVIPLPSPFLSPLMVIMATL

SEQ ID NO: 179853 - protein, 71 aa, Zea Mays
MGKQKKNKRKKRKLYLGSNSLSRPTTSHPRANVLSATYTWARSASGSLASVRCLCHWSVGPSSQLVSHLLP

SEQ ID NO: 179854 - protein, 72 aa, Zea Mays
MNLLDLFNPCTVGPIYQKLRVSSIRMRTCIKLLYTQCGSRVIYSSEGIRAESGSASPHRGPGLDLTHPHTNT

SEQ ID NO: 179855 - protein, 56 aa, Zea Mays
MGSLFLHIIMCFWRLWIIGIKGLEAGLDVGLGFDLEFSFCGMTDSSISVYCSFLWS

SEQ ID NO: 179856 - protein, 59 aa, Zea Mays
MFHLTLALLNAGACCSSRGVGSSSTYTFTLIIMLARRNHDLIRNFLSKDVCFYLVVHTG

SEQ ID NO: 179857 - protein, 75 aa, Zea Mays
MASGGCARVPGNLTRLSSSPTGTHHPKDLPHNRYITVITFDTHTLEIERKAFTKYTLHSRTQVLQGRKRCIYYKS

SEQ ID NO: 179858 - protein, 61 aa, Zea Mays
MMVTGMSLHNRGATTIRTDYTQLGISNHTTYVALNPCIRQPFPRSPPLHEQVRATREHITY

SEQ ID NO: 179859 - protein, 73 aa, Zea Mays
MRLERRRLGGPHGARRRWQVRLGRLARRAPSHPRIPRHGARPSTGARQGRQMLLEETYTQEHHSHLVHITCLT

SEQ ID NO: 179860 - protein, 62 aa, Zea Mays
MRHASPNFGRIRQSWQFSACRVVTDFLWLQSGALFAASPHPVVLHHIRLNLLFINYALTFIL

SEQ ID NO: 179861 - protein, 61 aa, Zea Mays
MRSGITWEITLTTRPSMPFIQDNIYFLQIRRSCLSNLIVVHSVCILCGTSPATPRFGVQRE

SEQ ID NO: 179862 - protein, 52 aa, Zea Mays
MIRSGNAWPIDGRRSERTGAGARRSPFMRAMWPRSRLALSACEMCVLRCRAL

SEQ ID NO: 179863 - protein, 82 aa, Zea Mays
MEGRGMSIIKDGAKAMIVTDKGENATKVRIGKTPFSNRDGKDDISKGRHKITSWKDLEITKVREVKGKNTPKDRVRTRLATR

SEQ ID NO: 179864 - protein, 135 aa, Zea Mays
MYASDRKDAFGSYHRYFSPHFVQPRDFLAPTSPFFFGKNSIGTRSYSYKNYGVLGVKIVCRTYLTCMVYIKVDLHIISIGCRSFHYHVLNGSINITIHFSQNLYGGSRFHTRRKMANNKEYKYSPACSRKTRNLN

SEQ ID NO: 179865 - protein, 83 aa, Zea Mays
MFADLIVDLIRRKLVFSQLPKRGKMCVCRHKPLAKHWRNHILRGHVVFAQPLFSFEDIFLQLALSQVIMILWNHPSFIHSLLR

SEQ ID NO: 179866 - protein, 199 aa, Zea Mays
MVLFELDPDIIRWGLHHLLPAPAGYSPHCRTQTTPTTPCTAFARPPHQPIGDMGTSSSVEIKVEHVDGVDNDAIIAQALQEELSNVAFAEASGPTSAADNQQHSAVLTQQWLRPRAVHVEPEAGTREEPFSTCSSPGDDNNVQDSQQCLIELMDNFSVIDGEVGKRLNNMVPVPHVPKTNGEIPSVDEAISDHQRLLDR

SEQ ID NO: 179867 - protein, 542 aa, Zea Mays
MNSSRSLLSSPLFASSSPNFRSSASVSSSPSPSRTTVPMIHDTSSSRASTACHYSPSLVAEEQLHGSKDTLTLKGEKALLELLLGMALDQHVDGRKLITQQEAEDSDFESYLREATSRVLYQPTFISEEDDDDDSVSESSSASLAKPAGTLDLGKLTEEPQLDVPQPHRRSVDPNHSYDQVFIRSTRLLERRSKKRNGGHRALDNGVACSGVNSKRKDKFGRVLDPDEPFRLFLRDRETTEFLTAKEEKQMFSQIQNLMKLEGAQRNLQAQCGREPTVEEWAQAVGMSCRELQSCVRTGRRCREKMARSNFRLVIHVARKYEGCGLDIQDLVQDGCCGLMKTFEKFNPSKGCRFPTYAYWWIRQSIKKSIFKNSRLIRLPESVYALLRKVGKARMECIMDGEQPTNEVVARRAGITIEKLAKLRAKTRKVRSMQDRVWSDDGVTYQEITEDPNIEGPEVSVDRLMMRQQVRSFLTGILSPREKEIIEHRFGIHDGQPKTLHVIGDMYGLSKERIRQVQNKALDKLRNSISAQGFHVYFDLLT

SEQ ID NO: 179868 - protein, 543 aa, Zea Mays
MNSSRSLLSSPLFASSSPNFRSSASVSSSPSPSRTTAVPMIHDTSSSRASTACHYSPSLVAEEQLHGSKDTLTLKGEKALLELLLGMALDQHVDGRKLITQQEAEDSDFESYLREATSRVLYQPTFISEEDDDDDSVSESSSASLAKPAGTLDLGKLTEEPQLDVPQPHRRSVDPNHSYDQVFIRSTRLLERRSKKRNGGHRALDNGVACSGVNSKRKDKFGRVLDPDEPFRLFLRDRETTEFLTAKEEKQMFSQIQNLMKLEGAQRNLQAQCGREPTVEEWAQAVGMSCRELQSCVRTGRRCREKMARSNFRLVIHVARKYEGCGLDIQDLVQDGCCGLMKTFEKFNPSKGCRFPTYAYWWIRQSIKKSIFKNSRLIRLPESVYALLRKVGKARMECIMDGEQPTNEVVARRAGITIEKLAKLRAKTRKVRSMQDRVWSDDGVTYQEITEDPNIEGPEVSVDRLMMRQQVRSFLTGILSPREKEIIEHRFGIHDGQPKTLHVIGDMYGLSKERIRQVQNKALDKLRNSISAQGFHVYFDLLT

SEQ ID NO: 179869 - protein, 279 aa, Zea Mays
MVACMHAAQELGVKLLLPAYLGVDLSPEDLLTGVSFASGATGFDPLTPLVVSVISLEQQLAYFDEYRGKLVDIAGEDETARIIDGALFVVCAGTDDVANTYFTTPFRSAEYDIPSYVELLVGGAEEFLRNVSSRGARKIGFVGMPPVGCVPSQRTLGGGLARACEPKRNEAAQLYNARIQEMVADADRDLATTTVVFLDIYRVLDDLMERGDKYGFSETTRGCCGTGTIEVTGLCDSRFVSVCDNVSQHVFFDSYHPTERAYRIIVKDIFDNYGQVLIG

SEQ ID NO: 179870 - protein, 1071 aa, Zea Mays
MAEKLRDLSQPIDVTLLDATVAAFYGTGSKEERSAADQILRDLQNNPDMWLQVVHILQNSQNLNTKFFALQVLESVIKYRWNALPVEQRDGIKNYISDVIVQLSSNEVTFRQERLYVNKLNIILVQVLKHEWPARWSSFVPDLVAAAKSSETICENCMAILKLLSEEIFDFSRGEMTQQKIKELKSSLNSEFRLIHELCLYVLSATQRPQLIRATLATLHAFLSWIPIGFIFESPLLETLLKFFPMAAYQNLTLQCLTEVAALQFGDFYNVQYVKMYTFFMIQLQAILPPEKIPDAYANGSTEEQAFIQNLALFFTSFFKNHMRILETTQENSAALLMGLEYLIGISYVDDTEVFKVCLDYWNVFVLELFEAHNEMEPAAAVSMMGLQTRMVPGMVDGTVTAVHQRRQLYSASLSKLRMLMICRMAKPEEVLIVEDENGNIVRETMKDNDVLVQYKIMRETLIYLSHLDHEDTEQQMLKKLSKQLNGEDWSWNNLNTLCWAIGSISGSMVEEQENRFLVMVIRDLLNLCEITKGKDNKAVIASNIMYVVGQYPRFLRAHWKFLKTVVNKLFEFMHEMHPGVQDMACDTFLKIVQKCKRKFVTQQVGENEPFVSELLSNLATTIADLEPHQIHTFYESVGHMIQAESDNTKRDEYLKRLMSLPNQKWAEIIGQASQSIDILKNQDVIRSVLNILQTNTSVASSLGPHFFPQISLIFLDMLTVYRMYSELVSSTIAEGGPFASRTSFVKLLRSVKRETLKLIETFVDKAEDLPHLGKQFVPPMMDPVLGDYARNVPDARESEVLSLFATIINKYKGEMLEDVPRIFEAVFQCTLEMITKNFEDYPEHRLKFFSLLRAIGTHCFQALIQLSSQQLKLVIDSINWAFRHTERNIAETGLSLLLEILKNFEASGFQNQFYKTYFLTIEQEIFAVLTDTFHKPGFKLHVLVLQHLFYVVDSLTEPLWDSSSVPYQYTDNATFVRDYTIKLLGTSFPNMTVAEVTKFVDGLLSSKLDLPSFKNHIRDFLVQSKEFSAQDNKDLYAEEAAAQRERERQRMLAIPGLIAPSELQDEMVDS

SEQ ID NO: 179871 - protein, 227 aa, Zea Mays
MAGRGGVVANRWDGVVPGDCAPSPAVLRLSPDLRWEEAREPLHAGIDAANHAVGVGPGMAFANALLRSGRAGGAVVGLVPCAVGGTRMAEWGRGTELYAEMLRRARVAVETGGRIGALLWYQGESDTVRWSDATEYGRRMGMLVRDLRADLGIPHLLVIQVGLASGLGQYTQVVRDAQKGIKLRNVRFVDAMGLPLQDGHLHLSTQAQVQLGRMLAQSYLNYGTSQL

SEQ ID NO: 179872 - protein, 145 aa, Zea Mays
MTPRPTRASPAGSTLPSSSAAATTTRRGTTSSATAILPTPPSSTTAAAPRTPTLRAAPLTCTVPTTTPKTSKPLLLPQVGLASGLGQYTQVVRDAQKGIKLRNVRFVDAMGLPLQDGHLHLSTQAQVQLGRMLAQSYLNYGTSQL

SEQ ID NO: 179873 - protein, 385 aa, Zea Mays
MEQRNVLALGEHVLKATVWKRKHKTAMEHPEGNDVMVFSQHDQRKHPVIFDDRAKCKKSKLISCGSGVILESYWNFKTSGLPVRVLFYQHGDWSDFPEDVVNLAQQDFQLKKPITTAVFQNKHILLDFIHMICIDYEMTIDKPLAWVDDNGKRFFPDLSAGLYTSKPSQHENGEADECDGTPTSVAESSSSVSVGEVVSHGKRINDIAEDNMRAHNILYEAVGENISGPSFHLNEYSSGTIQATGKPNDCRRIDSAVRNLLLKGLGQPFSEEDIIGIYRTPLLDQRGQVRCGLFQKEIEETRSRRGNANVRYAWLPCSRYTMEQMAMRGALEIAKPHKGSICGVGTCLAPANCTNSCARYSDFHEDGIIRMMLCRVIMELHRMGC

SEQ ID NO: 179874 - protein, 450 aa, Zea Mays
MICIDYEMTIDKPLAWVDDNGKRFFPDLSAGLYTSKPSQHENGEADECDGTPTSVAESSSSVSVGEVVSHGKRINDIAEDNMRAHNILYEAVGENISGPSFHLNEYSSGTIQATGKPNDCRRIDSAVRNLLLKGLGQPFSEEDIIGIYRTPLLDQRGQVRCGLFQKEIEETRSRRGNANVRYAWLPCSRYTMEQMAMRGALEIAKPHKGSICGVGTCLAPANCTNSCARYSDFHEDGIIRMMLCRVIMGNVEVVLPGSKQFQPSNGSFDNGVDDLQNPQNYIVWDANVHKHIYAEYAVIVQAPLVTNECSGLKDSVPNISEIISSGSRDNLTKEDRFAPCGVEQEAPRLGRAPRAPSSPWMPFSMLFAAISTKVPRSDMELVIRYYEEFKRKRMSRSDLVVRMRQIVGDKILVSTIMRLHHQKKPPSMAAAAAGLARALARGEEGGGVAE

SEQ ID NO: 179875 - protein, 724 aa, Zea Mays
MAPQPQMEHNGTEQCVNDQSLRSSHGCVNIEKPVFHTDNAGVQQETMADVVNESETGNLQKDPPAPTFIFHQPCMPESRSYVPPQEDTIDAVGLGARSSERSPIVEGNMSVGSVLASDGCDVPLQGSITEPFFQQDKHDHTVIVGPKSCKRKSPIPSYCAHGDGADGGGSSNQSSKVSIREGPSTHATVTSGFDRISDVLPTDAPESEHLPECITAQDTTISQPDSRKAHLSALQQERGEKVTQDLEDISANIGSVEKDHIHGDLTLPSASVLLSISCNGANQGSKYETNLQPGTATEDMMAFEEQNADKSHLEVSGINKANQALHDDGGVMKNNTVHGGLIVQTAPVSQNCNVTLHDKTSEQENEKNIQKDNCHTYVPGSSQDRGGESAKKTTNELKSGDISSKICVHFNVQDINDTLEDLSQQGLCIKCGEGGQLLECNGCFLAAHSSCFGSSATFEGTNFFYCPVCLYKKATEAYKKAKKTYCETRKNLVAFLGTAQATNQPDKQLNGAQPGAANRDEEPHDEQHSKGCGASKGAHENEVYNLAHQDEEHHQQRKKQKINAIGKSYPKEVLTEKVIFQNSDPASINKHSVLQNNNKTPVKDPEKKQQAVNEEARKEGGNDNSSHETGASSPRRCDPPSNQDVEADQDDSLTTSNQSGGSDEIEATSSNDSAKQSSPPWRGMGHNKKGLHEKEPAVSSKSGKVPILLRHLEDANNSVGQKKK

SEQ ID NO: 179876 - protein, 895 aa, Zea Mays
MPPPSASASPSASRFAKHWIADVLAGEESVDFSLLKVLVGASSKPLAGAPEATRERVALRSIQEVLSVIAAGGDAAATAGVLSVDGARSCEDGLFRLIREVGSFGELEKDLLPPFSQDIQENICTKKFTLPGISFQLLERVEPWIASMAPQPQMEHNGTEQCVNDQSLRSSHGCVNIEKPVFHTDNAGVQQETMADVVNESETGNLQKDPPAPTFIFHQPCMPESRSYVPPQEDTIDAVGLGARSSERSPIVEGNMSVGSVLASDGCDVPLQGSITEPFFQQDKHDHTVIVGPKSCKRKSPIPSYCAHGDGADGGGSSNQSSKVSIREGPSTHATVTSGFDRISDVLPTDAPESEHLPECITAQDTTISQPDSRKAHLSALQQERGEKVTQDLEDISANIGSVEKDHIHGDLTLPSASVLLSISCNGANQGSKYETNLQPGTATEDMMAFEEQNADKSHLEVSGINKANQALHDDGGVMKNNTVHGGLIVQTAPVSQNCNVTLHDKTSEQENEKNIQKDNCHTYVPGSSQDRGGESAKKTTNELKSGDISSKICVHFNVQDINDTLEDLSQQGLCIKCGEGGQLLECNGCFLAAHSSCFGSSATFEGTNFFYCPVCLYKKATEAYKKAKKTYCETRKNLVAFLGTAQATNQPDKQLNGAQPGAANRDEEPHDEQHSKGCGASKGAHENEVYNLAHQDEEHHQQRKKQKINAIGKSYPKEVLTEKVIFQNSDPASINKHSVLQNNNKTPVKDPEKKQQAVNEEARKEGGNDNSSHETGASSPRRCDPPSNQDVEADQDDSLTTSNQSGGSDEIEATSSNDSAKQSSPPWRGMGHNKKGLHEKEPAVSSKSGKGIGKQDQHMHTSRRKKKMHTCKSAIPILLRHLEDANNSVGQKKK

SEQ ID NO: 179877 - protein, 122 aa, Zea Mays
MTHSSYSHENGRALAVLGLAAAESAAALRALAADADAAPSAVSRAASEAASGPACARAGARIGIPDVVRVSGQTSAAAPTVVCSALRALVGAVAVDANSTDAAGEVFWRLHALTSSAAVAAV

SEQ ID NO: 179878 - protein, 191 aa, Zea Mays
MSTLRLVRSGRFPTNTVLSSLLSSSNASSSSSPAPCAASSGAFLFSPTLDGFSAPRRRSRPASNSSRFRLRRGPSSLLFLFFFEDGSASLASRLGCMGRGVVAGAGVAGGSSVEAFRRNGLSAEKRERMDAAGESPLAASEAGSLCFFAIGGCGSPDAAAGCGGGAREEEGKTPCPPRWVARNRCGVGKAS

SEQ ID NO: 179879 - protein, 136 aa, Zea Mays
MAAAAAAAAFDAYTDKNAIFRRLKAKPENKMCFDCNAKNPTWASVTYGIFLCLDCSAVHRSLGVHITFVRSTNLDSWTPDQLKMMAFGGNNRAHAFFKQHGWTDGGKVEAKYTSRAAELYRQMLNKETHQHRRRRI

SEQ ID NO: 179880 - protein, 418 aa, Zea Mays
MAAAAAAAAFDAYTDKNAIFRRLKAKPENKMCFDCNAKNPTWASVTYGIFLCLDCSAVHRSLGVHITFVRSTNLDSWTPDQLKMMAFGGNNRAHAFFKQHGWTDGGKVEAKYTSRAAELYRQMLNKEVAKSAITDNALPSSPVTASEASKPSDDFPEFKLSDAPAPPAENLNGKHEPKSPKAAPRSPKAATHPTFATSVKKPIGAKKVGGKTGGLGVRKLTTKPNESLYEQKPEEPKPAIPALTAPTAKGGPSLHSRFEYVDNEQSSVSRTGGSGSRVTGHVAPPKSSDFFQEYGMGNGFQKKSSNASKAQIEETDEARKKFSNAKAISSSQFFGTQNREEKEAQLSLQKFAGSSSISSSDLFGRTNVDDSNLDLSAADLINRISFQDLSSLKDIAGETGKKLTSFASNFISDLDRIL

SEQ ID NO: 179881 - protein, 231 aa, Zea Mays
MAQAVEEWYRQMPIITRSYLTAAVVTTVGCTLEIISPYHLYLNPKLVVQHYEIWRLVTNFLYFRKMDLDFLFHMFFLARYCKLLEENSFRGRTADFFYMLLFGATVLTSIVLIGGMIPYISETFARILFLSNSLTFMMVYVWSKHNPFIHMSFLGLFTFTAAYLPWGMIAGHVYYFLEDVYPRMTGRRPLKTPSFIKALFADDNVVVAQPPNAGIGAGARFGAMGLDPQAQ

SEQ ID NO: 179882 - protein, 185 aa, Zea Mays
MAQAVEEWYRQMPIITRSYLTAAVVTTVGCTLEIISPYHLYLNPKLVVQHYEIWRLVTNFLYFRKMDLDFLFHMFFLARYCKLLEENSFRGRTADFFYMLLFGATVLTSIVLIGGMIPYISETFARILFLSNSLTFMMVYVWSKHNPFIHMSFLGLFTFTAAYLPWVNVLLPRFLNATSPYAFTF

SEQ ID NO: 179883 - protein, 160 aa, Zea Mays
MHVRDRDPTLVAPSSKHMGVAVLLLPLRVSEGPQPGSCSGRGCLELSGFSLRFPWSCNLAFPTHGGPGDMEWELVQIIIRAWCRRLQLHQAYELIRTMPAVKVTAKAWELFLLHAGSMGMCGWQRLPGEHCLRSNQRMHEILFRLQTSTRIVACMRMQSG

SEQ ID NO: 179884 - protein, 95 aa, Zea Mays
MQMTRLEDLTPAPSMEHSSRPTLGFPLGTALLLLVIFALSGMFSCCYHWDKLRALLRSRHPDMFLEAQPSRPRSSSREDHRMSGSSGTLRQYLYT

SEQ ID NO: 179885 - protein, 355 aa, Zea Mays
MDTWTTCLLSFLPSIPPCLRPLLTPVGRGAAADCWDCPTPSAQVIFGPFAGDEHHQVCQVDRAMDSLWHLGDELRGQPKVVEDRQWSLMTSKLAEITRSKGERMNTVPDAKQWDKTSYQLHDDSRIGHIGLMNLDLKMNEAAAMKLPFRGMPYNMNQMYLKGSNANSNVNAFKMNVGVNKYSNSPNGKDANGKNNGGSGGNNNNGSANGTSVADKRFKTLPTSEMLPRNEVLGGYIFVCNNDTMQEDLKRQLFGLPARYRDSVRAITPGLPLFLYNYTTHQLHGVFEAASFGGSNIDPTAWEDKKCKGESRFPAQVRICIRKLCKPLEEDSFRPVLHHYDGPKFRLELSIAEMVM

SEQ ID NO: 179886 - protein, 412 aa, Zea Mays
MEGDSTNLDAAIESLLNVEKQMRLAGDVAGTRKAVIDIVELCYKAGAWKTLNDQIVLLSKRRGQLKQAITAMVQKAMDYIDLTPDIDTRVELIKTLSSVSAGKIYVEIERARLIKRLANIKEEQGKIDEAADLMQEVAVETFGSMAKTELSQVRLCLDRQDYVRAQILSRKISTRVFDADPSKEKKKPKEGDNIVQDAPADIPSLLELKRIYYELMIRYYLHNNDYLEICRCYKAIYDIPAIKEDPTKWIPILRKICWYLVLAPHDPMQSSLLNATLEDKNLSEIPNFRLLLKQLVTMEVIQWTALWEFSKHEFENEKNLLGGALGAKAAEDLKLRIIEHEAEKHLSDMVNSKSLTAKIDRPMGVVSFRVVQDCNGTLNSWATNLEQLLDLVEKSCHQIHKETMIHKAVLKA

SEQ ID NO: 179887 - protein, 525 aa, Zea Mays
MEKRVQGATKLLDGSLERCFVDGLEHRDAKVIYNCLRAYAAIDNTSSAEELFRTAVVSPLIQKIIPQNYARAVAGASSDELEEDYQQIKECVQKDCKFILEISSSENSGLHVFDFLGNSILKEVLSTIQKGKPGAFSPGKPKEFLRNYKASLGFLDFLEGYCISKSAVTKFRSELAYTDFMRQWNVGVYFSLRFQEIAGGLDSTLTNTFSPTGLNEAQGKPLLLKQSIKLLESLDSCWSDEVLVFSHCDKFLRLSLQLISRYTTWLSSGLTARKASDGSPNSPADAEWALSIPIEDFIYIMHDVHAVIGELSESGSFIGHVNQLLGSCPIEVFNLVKQSILQAVEPLKERLPAIINVMIGIIVKKSNEDLKHLKGITATYRMTSKLPVRHSPYVSGILHPLKVFLEGDRIRYLSEDDKTKLCRGSTDKITAIYYDLVSEVVTVARKTESSLQRLRQGAQRRVGASTDASDNIISDTDKICMQLFLDIQEYARNLRAIGIDAREIDSYRALWQCVAPKDRQENIQF

SEQ ID NO: 179888 - protein, 717 aa, Zea Mays
MADLATDLFGEPIEAHPPWFKPDAFLRASFDPDAYVAELRSYVPLESLAAELRAHLDALRAELVGLINRDYADFVGLSARLKGVDAAAARMRAPLADLRDKVAAFRAGASAALAALRAGLEQRAAAAAARELLELLLDAFHVVSKVEKLIKELPTAPSDLSNAEVPNSDTGTPNGVAGTGVSETQSILLERIASEMNRLKFYISHAQNLPFIENMEKRVQGATKLLDGSLERCFVDGLEHRDAKVIYNCLRAYAAIDNTSSAEELFRTAVVSPLIQKIIPQNYARAVAGASSDELEEDYQQIKECVQKDCKFILEISSSENSGLHVFDFLGNSILKEVLSTIQKGKPGAFSPGKPKEFLRNYKASLGFLDFLEGYCISKSAVTKFRSELAYTDFMRQWNVGVYFSLRFQEIAGGLDSTLTNTFSPTGLNEAQGKPLLLKQSIKLLESLDSCWSDEVLVFSHCDKFLRLSLQLISRYTTWLSSGLTARKASDGSPNSPADAEWALSIPIEDFIYIMHDVHAVIGELSESGSFIGHVNQLLGSCPIEVFNLVKQSILQAVEPLKERLPAIINVMIGIIVKKSNEDLKHLKGITATYRMTSKLPVRHSPYVSGILHPLKVFLEGDRIRYLSEDDKTKLCRGSTDKITAIYYDLVSEVVTVARKTESSLQRLRQGAQRRVGASTDASDNIISDTDKICMQLFLDIQVCCLPLVQFCSCAHK

SEQ ID NO: 179889 - protein, 425 aa, Zea Mays
MADLATDLFGEPIEAHPPWFKPDAFLRASFDPDAYVAELRSYVPLESLAAELRAHLDALRAELVGLINRDYADFVGLSARLKGVDAAAARMRAPLADLRDKVAAFRAGASAALAALRAGLEQRAAAAAARELLELLLDAFHVVSKVEKLIKELPTAPSDLSNAEVPNSDTGTPNGVAGTGVSETQSILLERIASEMNRLKFYISHAQNLPFIENMEKRVQGATKLLDGSLERCFVDGLEHRDAKVIYNCLRAYAAIDNTSSAEELFRTAVVSPLIQKIIPQNYARAVAGASSDELEEDYQQIKECVQKDCKFILEISSSENSGLHVFDFLGNSILKEVLSTIQKGKPGAFSPGKPKEFLRNYKASLGFLDFLEGYCISKSAVTKFRSELAYTDFMRQWNVGVYFSLRKLRAALILLLQTLLVLLD

SEQ ID NO: 179890 - protein, 490 aa, Zea Mays
MNRLKFYISHAQNLPFIENMEKRVQGATKLLDGSLERCFVDGLEHRDAKVIYNCLRAYAAIDNTSSAEELFRTAVVSPLIQKIIPQNYARAVAGASSDELEEDYQQIKECVQKDCKFILEISSSGYCISKSAVTKFRSELAYTDFMRQWNVGVYFSLRFQEIAGGLDSTLTNTFSPTGLNEAQGKPLLLKQSIKLLESLDSCWSDEVLVFSHCDKFLRLSLQLISRYTTWLSSGLTARKASDGSPNSPADAEWALSIPIEDFIYIMHDVHAVIGELSESGSFIGHVNQLLGSCPIEVFNLVKQSILQAVEPLKERLPAIINVMIGIIVKKSNEDLKHLKGITATYRMTSKLPVRHSPYVSGILHPLKVFLEGDRIRYLSEDDKTKLCRGSTDKITAIYYDLVSEVVTVARKTESSLQRLRQGAQRRVGASTDASDNIISDTDKICMQLFLDIQEYARNLRAIGIDAREIDSYRALWQCVAPKDRQENIQF

SEQ ID NO: 179891 - protein, 542 aa, Zea Mays
MVNITVSHLQNLPFIENMEKRVQGATKLLDGSLERCFVDGLEHRDAKVIYNCLRAYAAIDNTSSAEELFRTAVVSPLIQKIIPQNYARAVAGASSDELEEDYQQIKECVQKDCKFILEISSSENSGLHVFDFLGNSILKEVLSTIQKGKPGAFSPGKPKEFLRNYKASLGFLDFLEGYCISKSAVTKFRSELAYTDFMRQWNVGVYFSLRFQEIAGGLDSTLTNTFSPTGLNEAQGKPLLLKQSIKLLESLDSCWSDEVLVFSHCDKFLRLSLQLISRYTTWLSSGLTARKASDGSPNSPADAEWALSIPIEDFIYIMHDVHAVIGELSESGSFIGHVNQLLGSCPIEVFNLVKQSILQAVEPLKERLPAIINVMIGIIVKKSNEDLKHLKGITATYRMTSKLPVRHSPYVSGILHPLKVFLEGDRIRYLSEDDKTKLCRGSTDKITAIYYDLVSEVVTVARKTESSLQRLRQGAQRRVGASTDASDNIISDTDKICMQLFLDIQEYARNLRAIGIDAREIDSYRALWQCVAPKDRQENIQF

SEQ ID NO: 179892 - protein, 306 aa, Zea Mays
MAAAAAVASATTAEDEARLLRLEEQAEHGGGGAWEYLCLARRLRARRPAHVLRVGLALLNNASARSGLASEQWTLYEQVATAAMDCQRLDVAKDCIGVLSKQFPGSTRVARLEARLFEAKGEWAEAERAYALILENNPFDQIVHKRKIAIAKAQGGMSIVIDYLNKYLELFMADHDAWRELAETYSSLQMYKQAAFCYEELILAQPTIPLYHIAYAEVLYTMGGLENLQTAKKYYASTIQLTGGKNTRALFGCTSAINQLTKGRNKEEEDSELQSLAAEVLLKNYKQQAPSKAPLISSMLKNMKLS

SEQ ID NO: 179893 - protein, 153 aa, Zea Mays
MSIVIDYLNKYLELFMADHDAWRELAETYSSLQMYKQAAFCYEELILAQPTIPLYHIAYAEVLYTMGGLENLQTAKKYYASTIQLTGGKNTRALFGVCLCTSAINQLTKGRNKEEEDSELQSLAAEVLLKNYKQQAPSKAPLISSMLKNMKLS

SEQ ID NO: 179894 - protein, 484 aa, Zea Mays
MAAPSHLHLHLPGCPQTLALPLPSPGGFSAWPGLRSCSRSRQPRIRPVAALGPADAGDLLGRVEAFLYTVADAAVNAEPVAAAADTGTKEAAAGDWLSGITNSMETVLKVLKDGLSALHVPYSYGFAIILLTVLVKAATFPLTKKQVESALAMRSLQPQVKAIQQRYAGDQERIQLETARLYKLSGVDPLAGCLPTLVTIPVWIGLYRALSNVANEGLLTEGFFWIPSLAGPTTIAARQNGQGISWLFPFTDGHPPLGWSDTLAYIVLPVLLVISQYISTQVMQPPQSNDPNQQGAQAVTKFLPLLIGYFALSVPSGLRLYWLTNNILSTAQQVWLQKLGGAKNPVKEYIDKLSREETTTVQKNDSTVQSEPLSKHSKPQPSQEPKPSGPQRGERFRKLKEEESMRKEVMGQGKQSEQSSSESRVTDGTQNSDVSSGDQKDQQGSHENGPVVASINGGVNHIRNEKTQNLSSEKLKIDGIRVER

SEQ ID NO: 179895 - protein, 343 aa, Zea Mays
MLVIRLALNYHARCFSYQWMLLNPHWIASLIRKSCHLGCLPTLVTIPVWIGLYRALSNVANEGLLTEGFFWIPSLAGPTTIAARQNGQGISWLFPFTDGHPPLGWSDTLAYIVLPVLLVISQYISTQVMQPPQSNDPNQQGAQAVTKFLPLLIGYFALSVPSGLRLYWLTNNILSTAQQVWLQKLGGAKNPVKEYIDKLSREETTTVQKNDSTVQSEPLSKHSKPQPSQEPKPSGPQRGERFRKLKEEESMRKEVMGQGKQSEQSSSESRVTDGTQNSDVSSGDQKDQQGSHENGPVVASINGGVNHIRNEKTQNLSSEKEAADDHSPDVHKLTDRENGNDAV

SEQ ID NO: 179896 - protein, 214 aa, Zea Mays
MHPSLQYFSNDPNQQGAQAVTKFLPLLIGYFALSVPSGLRLYWLTNNILSTAQQVWLQKLGGAKNPVKEYIDKLSREETTTVQKNDSTVQSEPLSKHSKPQPSQEPKPSGPQRGERFRKLKEEESMRKEVMGQGKQSEQSSSESRVTDGTQNSDVSSGDQKDQQGSHENGPVVASINGGVNHIRNEKTQNLSSEKNNPSGVHGDHTVTDVGHRA

SEQ ID NO: 179897 - protein, 228 aa, Zea Mays
MAGKGAKATAAKSADKDKGKKAGGPVSRSSRAAPQENSTPKKDVYQLFAEKVRDNKQLESRWAIMQETRVEYFRGKDFNAFIKNYPEVREILGPDKDLEVEDIVNTLLTKNLVIRCDRVMKTVRPGKKKLSSWPAHLEIHNEQVFTENDGFYAWMFLKRRTLWQTVLSFVWPLFALAVCLFPVYPYQCKIVVLYSCAGALLFIVSILLRKISPSLPTVFSFTINITLQ

SEQ ID NO: 179898 - protein, 141 aa, Zea Mays
MAGKGAKATAAKSADKDKGKKAGGPVSRSSRAAPQENSTPKKDVYQLFAEKVRDNKQLESRWAIMQETRVEYFRGKDFNAFIKNYPEVREILGPDKDLEVEDIVNTLLTKNLVIRCDRVMKTVRPGKKKLSSWPAHLEIHN

SEQ ID NO: 179899 - protein, 137 aa, Zea Mays
MYGRKFHMRQYPSSSDDGVFKDNAQTIFSCRQDKRKAKCKAQKANAHPGTSIYLHRVVSLQRVANHDHYCSKRHIPVQPICTSVLLLCTNTLSPIFHFTSSLPDTPRFSPMSRKNSERRRKECANSIPYLHGAAIGT

SEQ ID NO: 179900 - protein, 673 aa, Zea Mays
MRRSLVFVVSLLQPMLSRVRPGRGNGRRERRTAVERPRVHSRGLTRTTRPARRLPSPHQLPSHRRTPLALRFCDYVRDGRLGIGLPRAAASARPPPSRPFAASASALGNRRRSKDALPRGGCGRAPRRPRVPRAPEPRDFRLSTRAVERPEADVVVIGSGLGGLCCAGLLARYGQDVLVLESHDRPGGAAHSFDIKGFNFDSGPSLFSGFQSRGPQANPLAQVLDALGESVPCASYDSWMVYVPEGQFLSRIGPTEFLKDLEMFVGVDAVQEWKKLLDAVIPMSAAAMALPPLSIRGDLGIISTAVGRYTPSLLKSFIQMGPQGALGATKLLRPFKEIVDSLELKNPFVRNWIDLLCFLLAGVKSDGALSAEMVYMFAEWYKPGCLLEYPLGGTGAIIDALVSGIEKFGGRLALRSHVEKILIENGRAVGVKLQSGQVIRAKKAVVSNASMWDTLDLLPPDAVPKSYEDRVKATPQCESFMHLHLGFDAENAREDLGIHHIVVDDWNKGVDGEQNVVLISVPSVLSKDLAPPGKHILHAYTPGTEPFSLWEGLDRKSAEYRRLKEERSEVMWKAVELALGPKFSREKCDVKLVGTPLTHRRFLRRNRGTYGPAIKAGEATFPGQATPIPQLFCCGDSTFPGIGVPAVAASGAIVANTLVPVSQHSELLDAVGI

SEQ ID NO: 179901 - protein, 354 aa, Zea Mays
MGPQGALGATKLLRPFKEIVDSLELKNPFVRNWIDLLCFLLAGVKSDGALSAEMVYMFAEWYKPGCLLEYPLGGTGAIIDALVSGIEKFGGRLALRSHVEKILIENGRAVGVKLQSGQVIRAKKAVVSNASMWDTLDLLPPDAVPKSYEDRVKATPQCESFMHLHLGFDAENAREDLGIHHIVVDDWNKGVDGEQNVVLISVPSVLSKDLAPPGKHILHAYTPGTEPFSLWEGLDRKSAEYRRLKEERSEVMWKAVELALGPKFSREKCDVKLVGTPLTHRRFLRRNRGTYGPAIKAGEATFPGQATPIPQLFCCGDSTFPGIGVPAVAASGAIVANTLVPVSQHSELLDAVGI

SEQ ID NO: 179902 - protein, 236 aa, Zea Mays
MAASALASRALRPPHGRHPPAPSPRPRPRSATAAAPRTRCRAVAADERPADPAFPERQNRGISGLRLLIASQLSTRAVERPEADVVVIGSGLGGLCCAGLLARYGQDVLVLESHDRPGGAAHSFDIKGFNFDSGPSLFSGFQSRGPQANPLAQVLDALGESVPCASYDSWMVYVPEGQFLSRIGPTEFLKDLEMFVGVDAVQEWKKLLLQWLCLRFPFEVIWALYLQLLVDTLLRC

SEQ ID NO: 179903 - protein, 322 aa, Zea Mays
MAASALASRALRPPHGRHPPAPSPRPRPRSATAAAPRTRCRAVAADERPADPAFPERQNRGISGLRLLIASQLSTRAVERPEADVVVIGSGLGGLCCAGLLARYGQDVLVLESHDRPGGAAHSFDIKGFNFDSGPSLFSGFQSRGPQANPLAQVLDALGESVPCASYDSWMVYVPEGQFLSRIGPTEFLKDLEMFVGVDAVQEWKKLLDAVIPMSAAAMALPPLSIRGDLGIISTAVGRYTPSLLKSFIQMGPQGALGATKLLRPFKEIVDSLELKNPFVRNWIDLLCFLLAGVKSDGALSAEMNGTNQDACLSTLWVELEQ

SEQ ID NO: 179904 - protein, 432 aa, Zea Mays
MPHSTGMAYSGQRHAGVGSSSRPANGFKGAANSVEFLGREMLGMRLRDAKPDTDDEREMWSSSDVTDSSSNEAGHVIATTVHGRNGLPKQSVTYIAEHVVGTGSFGVVYQAKCRETGEIVAIKKVLQDKRYKNRELQIMHMLDHPNIIGLKHYFFSTTERDELYLNLVLEFVPETVNRIARQYNRMNQRMPLIYVKLYTYQICRALAYIHNCIGICHRDIKPQNVLVNPHTHQLKICDFGSAKVLVRGEPNISYICSRYYRAPELIFGATEYTTAIDLWSTGCVMAELLLGQALFPGESGVDQLVEIIKVLGTPTREEIKCMNPNYTEFKFPQIKAHPWHKVFQRRLPPEAVDLVSRFLQYSPNLRCTALEACMHPFFDELRDPNTRLPNGRPLPPLFNFRSQELKGVPPEVIDRLVPEHSRRQSLFMALRT

SEQ ID NO: 179905 - protein, 374 aa, Zea Mays
MWSSSDVTDSSSNEAGHVIATTVHGRNGLPKQSVTYIAEHVVGTGSFGVVYQAKCRETGEIVAIKKVLQDKRYKNRELQIMHMLDHPNIIGLKHYFFSTTERDELYLNLVLEFVPETVNRIARQYNRMNQRMPLIYVKLYTYQICRALAYIHNCIGICHRDIKPQNVLVNPHTHQLKICDFGSAKVLVRGEPNISYICSRYYRAPELIFGATEYTTAIDLWSTGCVMAELLLGQALFPGESGVDQLVEIIKVLGTPTREEIKCMNPNYTEFKFPQIKAHPWHKVFQRRLPPEAVDLVSRFLQYSPNLRCTALEACMHPFFDELRDPNTRLPNGRPLPPLFNFRSQELKGVPPEVIDRLVPEHSRRQSLFMALRT

SEQ ID NO: 179906 - protein, 222 aa, Zea Mays
MNQRMPLIYVKLYTYQVNPHTHQLKICDFGSAKVLVRGEPNISYICSRYYRAPELIFGATEYTTAIDLWSTGCVMAELLLGQALFPGESGVDQLVEIIKVLGTPTREEIKCMNPNYTEFKFPQIKAHPWHKVFQRRLPPEAVDLVSRFLQYSPNLRCTALEACMHPFFDELRDPNTRLPNGRPLPPLFNFRSQELKGVPPEVIDRLVPEHSRRQSLFMALRT

SEQ ID NO: 179907 - protein, 247 aa, Zea Mays
MLDKLGGAFAPKPSSGPHKSRECLPLILIIRNRLKYALTYREVISILMQRHVLVDGKVRTDKTYPAGFMDVISIPKTNENYRLLYDTKGRFRLHPIRDEDAKFKLCKVRSVQFGQKGIPYLNTYDGRTIRYPDPLIKANDTIKIDLETNKIVDFIKFDVGNVVMVTGGRNTGRVGVIKNREKHKGSFETIHVEDSLGHQFATRMGNVFTIGKGNKPWVSLPKGKGIKLSIIEEQRKRDAAAQAAANA

SEQ ID NO: 179908 - protein, 277 aa, Zea Mays
MHGWLPQLFVRLLARGLKKHLKRLNAPKHWMLDKLGGAFAPKPSSGPHKSRECLPLILIIRNRLKYALTYREVISILMQRHVLVDGKVRTDKTYPAGFMDVISIPKTNENYRLLYDTKGRFRLHPIRDEDAKFKLCKVRSVQFGQKGIPYLNTYDGRTIRYPDPLIKANDTIKIDLETNKIVDFIKFDVGNVVMVTGGRNTGRVGVIKNREKHKGSFETIHVEDSLGHQFATRMGNVFTIGKGNKPWVSLPKGKGIKLSIIEEQRKRDAAAQAAANA

SEQ ID NO: 179909 - protein, 525 aa, Zea Mays
MADSTHHTIRRAAARPRGWCCSFAGVPESPEHRRALPAPASAADAVPKPPPPPPPKSPLAPSSHGSPSSKLAGLIDTRRILSPGRVSPIDSEGSPAAAPREQAAPFVAVREDEDEGGDGGEAPALDLRLCLRASDGRCVAMDLDSAVLCGSSAFFAGMVPDASAAGGRRVEVDGVDDLEAFKDAVELMFEPDALRWLARAGVSRATAVLQVCSSIAFDKGVESCLKYIEAVPWSESEEEKLKHVFARCTFGESVSKDVLARLQQQCASGSEDLAVQLVESITSGANNGARKEMQSLVSGLLSRSSVYHKDLSGVNKGGLYRICRSCLSSLVELFMEDSDGGQAMAPSGRRPMVERISQQTENLNWLLDILLNNDMAEEYVELWGTQEELIRMHERASPMFRYELSRVSASVFMALGRGRIQCPSDTRSQLFRGWFRPMLVDFGWLQRCSKGLDVRVLEENLGQALLTLPLHLQQSLFVEWFQCFASRGTGGCPNLSRAFQIWFLCLQSWNGSMHAGWIGSARQSA

SEQ ID NO: 179910 - protein, 268 aa, Zea Mays
MPRGSLDKALHGKNDGTEFLVWERRIKIAIDIARALEFLHLGGVTQSVIHGDVKSSNILLSEDFGARLCDFGLAKRVSASTPHLTCTDITGTFGYMAPEYFSHGEVNEKIDVYAFGVVLLEIVSGRRPITPGSAKGQESLVGWAKPLLSSGGIKHLVDPFLGNDYDCDEMERMTLAASLCTRTSWHSRPEMSLVLKLLQGDDETMGWARSASFDGSDEEAIAAGPDLNMQSHLSLALLGVDADDTLSRCSSTERTSADGYWSRSSSFD

SEQ ID NO: 179911 - protein, 877 aa, Zea Mays
MKVSSRKKPPPQQQREETEEQGSSGAAEAMDAAAAAAVQEEAEAEAEAEAEGRTVLVGVRADAESRALLTWVLVNVAAPLDRVVAVHVAPPSAAEAVDFDAMLAVYEGFCNLKQINLNLKICKDSSVRKALVREASLFGAAKVVLGVAKKRRAISSSHSVAKYCAKKLPAKCAVLAVSNGKIEFRRESSVHPDDGEGDATRDFGTKGSELENLSTDQVEIDADPSSTNAEESTVKQGDEISELPGKGASVLYCVLPERSSGSVASTSSRQDQDSVDLPSEGAGELYCLLPPRNGHSVRSIGDSKRSNASQKDDKPANPSLEGDGDLYCRLPRTGRPGRNSGGSNRSAGIRGAVRRSSSFSSDIHLSSETSPIKKDGSVSMTATERSSSAVSTEAEDSPKYTARTAETPSSSPMSLRRMVEGRSDRCHLHRRIFRHQRSSSFEWAKISMVQWAMRLPSRYTSVHPDGKPLKPGASPRLNCDSETESTAAVEPESMFSFAFYDVAWPPSELESLREKYSSVCRMFSYEELKLATSNYSPDMLIGKGGTSQVFKAQLDGGTFAAIKILKPSVDAIHEFVTEVETVTSLQHENIVALRGFSFENYNLVLAYDYMPRGSLDKALHGKNDGTEFLVWERRIKIAIDIARALEFLHLGGVTQSVIHGDVKSSNILLSEDFGARLCDFGLAKRVSASTPHLTCTDITGTFGYMAPEYFSHGEVNEKIDVYAFGVVLLEIVSGRRPITPGSAKGQESLVGWAKPLLSSGGIKHLVDPFLGNDYDCDEMERMTLAASLCTRTSWHSRPEMSLVLKLLQGDDETMGWARSASFDGSDEEAIAAGPDLNMQSHLSLALLGVDADDTLSRCSSTERTSADGYWSRSSSFD

SEQ ID NO: 179912 - protein, 736 aa, Zea Mays
MKVSSRKKPPPQQQREETEEQGSSGAAEAMDAAAAAAVQEEAEAEAEAEAEGRTVLVGVRADAESRALLTWVLVNVAAPLDRVVAVHVAPPSAAEAVDFDAMLAVYEGFCNLKQINLNLKICKDSSVRKALVREASLFGAAKVVLGVAKKRRAISSSHSVAKYCAKKLPAKCAVLAVSNGKIEFRRESSVHPGKVSAEVLPCGDDEMYCVVPFRARQAKGGALSLQENKDDGEGDATRDFGTKGSELENLSTDQVEIDADPSSTNAEESTVKQGDEISELPGKGASVLYCVLPERSSGSVASTSSRQDQDSVDLPSEGAGELYCLLPPRNGHSVRSIGDSKRSNASQKDDKPANPSLEGDGDLYCRLPRTGRPGRNSGGSNRSAGIRGAVRRSSSFSSDIHLSSETSPIKKDGSVSMTATERSSSAVSTEAEDSPKYTARTAETPSSSPMSLRRMVEGRSDRCHLHRRIFRHQRSSSFEWAKISMVQWAMRLPSRYTSVHPDGKPLKPGASPRLNCDSETESTAAVEPESMFSFAFYDVAWPPSELESLREKYSSVCRMFSYEELKLATSNYSPDMLIGKGGTSQVFKAQLDGGTFAAIKILKPSVDAIHEFVTEVETVTSLQHENIVALRGFSFENYNLVLAYDYMPRGSLDKALHGTWRRSIFHTGRSTRRLTSTHSELFCWRLFREGGPSHQGARRVKKAWSVGRSLCCPVAGSSTWSIRFWGTITTAMRWRG

SEQ ID NO: 179913 - protein, 621 aa, Zea Mays
MKVSSRKKPPPQQQREETEEQGSSGAAEAMDAAAAAAVQEEAEAEAEAEAEGRTVLVGVRADAESRALLTWVLVNVAAPLDRVVAVHVAPPSAAEAVDFDAMLAVYEGFCNLKQINLNLKICKDSSVRKALVREASLFGAAKVVLGVAKKRRAISSSHSVAKYCAKKLPAKCAVLAVSNGKIEFRRESSVHPDDGEGDATRDFGTKGSELENLSTDQVEIDADPSSTNAEESTVKQGDEISELPGKGASVLYCVLPERSSGSVASTSSRQDQDSVDLPSEGAGELYCLLPPRNGHSVRSIGDSKRSNASQKDDKPANPSLEGDGDLYCRLPRTGRPGRNSGGSNRSAGIRGAVRRSSSFSSDIHLSSETSPIKKDGSVSMTATERSSSAVSTEAEDSPKYTARTAETPSSSPMSLRRMVEGRSDRCHLHRRIFRHQRSSSFEWAKISMVQWAMRLPSRYTSVHPDGKPLKPGASPRLNCDSETESTAAVEPESMFSFAFYDVAWPPSELESLREKYSSVCRMFSYEELKLATSNYSPDMLIGKGGTSQVFKAQLDGGTFAAIKILKPSVDAIHEFVTEVETVTSLQHENIVALRGFSFENYNLVLAYDYMPRGSLDKALHE

SEQ ID NO: 179914 - protein, 145 aa, Zea Mays
MLSSRRCFAAAANRVRPLARAFCDAPASRADAGASGTPSPQDHAEKVAALKDPPDVLDVAIVGGGMVGLAVACALSNMPLTKHLRVAIIDSNPALKSRSYLDKNSIPDSRVSTVTPATISFFKVATLPIFFQVTSLDFQLCVHLF

SEQ ID NO: 179915 - protein, 445 aa, Zea Mays
MPLTKHLRVAIIDSNPALKSRSYLDKNSIPDSRVSTVTPATISFFKDIGAWEHVQQQRHAFFGKMQVWDYTGLGYTRYNARDVGKEHLGCVVENKVLCNSLLLRLQEELDDIENVIYPTRLVSLTFPLKTRQAGMKPTSREPLSVGHTTEEFHRSHLVKLDLSDGRSLYSKLVIGADGSKSNVRQIAGIKTTSWNYPQSAIICTVEHVVENDCAWQRFLPSGPIALLPIGNNFSNIVWTMSPEESLRHKSMSPEEFVNSVNHALDFGYGPHPHSTALDHYMEQFFSGIGSSAASTKECFEVPPKATRVVSERMAFPLSLMHSHDYVSKRLALVGDAAHTVHPLAGQGVNLGFGDAAALAKVIAEGVSVGSDVGDLTLLQRYEKERKAANVAMAAVLDGFQKMYSVDLGPLNVVRAAAFHGAQYISPLKKNIISYATGDTKWSLFQ

SEQ ID NO: 179916 - protein, 465 aa, Zea Mays
MYIFGGNHNGRYLSDLQALDLKSLTWSKVDAKLQAEPADSTKTTQIAPCAGHSLISWGNKFLSIAGHTKDPSEGVTVKEFDPHTCTWSIVRTYGKPPVSRGGQTVTLVGTTLVLFGGEDAERCLLNDLHILDLETMTWDDVDAIGTPPSPRSDHAAACHADRYLLIFGGGSHATCFNDLHVLDLQTMEWSRPKQQGPTPSPRAGHAGGTVGENWYIVGGGNNKSGVSETLVLNMSTLTWSVVSTVEGRVPLASEGMTLVHSNYGGYDYLISFGGYNGRYNNEVYTLKLSLKSDSQSTLKEETLSDTTSRVIEPEAEIYQDGKIREISVDNADSDLNNRNDEASEQLLADLKAQKEELEATLSREQLQTVQLKEDIARAETRNAELTKELQAVRGQLASEQSRCFKLEVDVAELRQKLQSMDALEKEVELLRRQRAASEQAAMDAKQRQSSGGMWGWLAGSPTPAV

SEQ ID NO: 179917 - protein, 154 aa, Zea Mays
MYIFGGNHNGRYLSDLQALDLKSLTWSKVDAKLQAEPADSTKTTQIAPCAGHSLISWGNKFLSIAGHTKDPSEGVTVKEFDPHTCTWSIVRTYGKPPVSRGGQTVTLVGTTLVLFGGEDAERCLLNDLHILDLETMTWDDVDAIGFYNGSRTEC

SEQ ID NO: 179918 - protein, 385 aa, Zea Mays
MYIFGGNHNGRYLSDLQVSRGGQTVTLVGTTLVLFGGEDAERCLLNDLHILDLETMTWDDVDAIGTPPSPRSDHAAACHADRYLLIFGGGSHATCFNDLHVLDLQTMEWSRPKQQGPTPSPRAGHAGGTVGENWYIVGGGNNKSGVSETLVLNMSTLTWSVVSTVEGRVPLASEGMTLVHSNYGGYDYLISFGGYNGRYNNEVYTLKLSLKSDSQSTLKEETLSDTTSRVIEPEAEIYQDGKIREISVDNADSDLNNRNDEASEQLLADLKAQKEELEATLSREQLQTVQLKEDIARAETRNAELTKELQAVRGQLASEQSRCFKLEVDVAELRQKLQSMDALEKEVELLRRQRAASEQAAMDAKQRQSSGGMWGWLAGSPTPAV

SEQ ID NO: 179919 - protein, 102 aa, Zea Mays
MEWSRPKQQGPTPSPRAGHAGGTVGENWYIVGGGNNKSGVSETLVLNMSTLTWSVVSTVEGRVPLASEGMTLVHSNYGGYDYLISFGGYNGRYNNEILHLGS

SEQ ID NO: 179920 - protein, 52 aa, Zea Mays
MFLFCFPFLSTFDRKTISHRIVNEWYVSDIPFILGTLATQFLSRRATDIQTR

SEQ ID NO: 179921 - protein, 136 aa, Zea Mays
MTPASYSCPTSELLRKFNQKAGRQSPAAQPTSRTNKSPTPTQKRQRECHKDPTFPRRNGGGGGGSSRRGDSRSRRQTRGKSRRGAIRIEPHWAAAPPTPTQKSSDLFFSLPQREHTRSKRRRGGREEEPFGGSASR

SEQ ID NO: 179922 - protein, 478 aa, Zea Mays
MLRSYGSGNLQHEYSGNDCLQLKGHQTYTEVSSLLEHLKLCMFFSKKSFSAFLKFGGYKQEDILIHKARARLMQPSFALVCDKRTKCLLLFIRGAISTKERLTAATSAEVPFHHIILSEGKISNVVLGYAHCGMLAGARWIAKLVIPHLHNKMQEFSGYHIKVIGHSMGAGIGAILTYILHEHYEFLSCSCLAFAPPACMTWELAESGKDFITSLVNRNDVVPAFSKVSSESLRSEVMVSSKLDDVQDHFHHGLFATISQRVAFIRSHMLSISHSTGKIADYGSSISEPLLKDTIPPTANGHGVDCSQQQQVVASEETVVVLVNNNDHFTSLKAADSGVTSQEGSDSNAASSDSPQRPPPPADEAPNQNGTGKDKQKEPVSAGCSSSRQLFPPGRIIHMVALPPQQPDPNSDDGTSSGEVVGIYETPRGLYGKIRLAPNMIKEHYMPSYIRTMESLLEQLQKDDDDGSVCTCTAPSDL

SEQ ID NO: 179923 - protein, 146 aa, Zea Mays
MAELAADFLGTPRPGRRLGSRTKPAVVLPSQICALVVQERSWPPAATVARAPSLASRSRQPPQPRWRPPPRVACKEALTSYNSLDNPAAGAPVEQLNELEEVFKKAAKTDTPAEVLHCLTQYFISLCWFCLSGLSLTTQPILFAGT

SEQ ID NO: 179924 - protein, 299 aa, Zea Mays
MGHAPANGKRSPPPPPLGRCHFWLPNKRRHCANSPLPSSQYCGNHLPESAPGAGRRVPCPVDPSHTVLEENLEAHVGKCPLKKQVAALTAQPYYSKGINSGTPEAGCGVTSAEKRAAVYRLTEEEFRLLLGKIRSVHAAVAAPIRESNLITAACDKWMSGQVDRKMPYQERHVAQQASIVGNMEAFGLLQKASHEVVDGENAAVSAQAVVEFGAGRGYLTQVLVDCYGIRNVFLVERRSYKLKADRSLRQNEDVTLERLRIDIEDLKLHGIEALRGLQYLAIGKHLCGPATDDHDVLSS

SEQ ID NO: 179925 - protein, 587 aa, Zea Mays
MAAASCPVALAFFSSSCILLLLQTICCSGVFVELSYDSTQVKVQPFACRDKPCGSESTAGSFISDVLGPDRRLNVSGIVVTATGTRQLGALLRTLRSLQASLGDAGLAERVKVSPELSMSSLRVVGKDLARATKKRRWGKVLEFVRRTRSLVFVRVDTEAGANGEVVAVIEEAAAQVAAVLGADVGVVLHIKSRAVPSAAAMEKLTGRGEKRSLGVLVDVSFPRRDRELGEARATAHDEFSPVSNPATTPVSNPVTVPATNPVANPMSPGFVTVPSTNPGNGFASNTNLPPLYPEPTTAPVTMPTPDPTTTMPPPVTVPSPFANPVAAPTTTMPGTVTNPATTPSQFPPVTNPVTTYPYPQQGGMPGTTPEVYQPPATTTPGTAQQSAPSVTGQGQAWCVAKSGLMDAALQDGIDYACGAGGADCSAIQPMGTCYNPNTLQAHASYAFNSYFQRNPSATSCDFGGAGMLVNVNPSSGTCVYQTSAGFGAGYSPGTTTGGGGVPSGYTPGMPGAGYGAAGGGVSGTMGGGSGSTVLNANNPGGNSMYGGYDNTAGLTAGSAPLPCGGGGWAVLCLVWMVTFAFVKEKV

SEQ ID NO: 179926 - protein, 534 aa, Zea Mays
MAAASCPVALAFFSSSCILLLLQTICCSGVFVELSYDSTQVKVQPFACRDKPCGSESTAGSFISDVLGPDRRLNVSGIVVTATGTRQLGALLRTLRSLQASLGDAGLAERVKVSPELSMSSLRVVGKDLARATKKRRWGKVLEFVRRTRSLVFVRVDTEAGANGEVVAVIEEAAAQVAAVLGADVGVVLHIKSRAVPSAAAMEKLTGRGEKRSLGVLVDVSFPRRDRELGEARATAHDEFSPVSNPATTPVSNPVTVPATNPVANPMSPGFVTVPSTNPGNGFASNTNLPPLYPEPTTAPVTMPTPDPTTTMPPPVTVPSPFANPVAAPTTTMPGTVTNPATTPSQFPPVTNPVTTYPYPQQGGMPGTTPEVYQPPATTTPGTAQQSAPSVTGQGQAWCVAKSGLMDAALQDGIDYACGAGGADCSAIQPMGTCYNPNTLQAHASYAFNSYFQRNPSATSCDFGGAGMLVNVNPSSGTCVYQTSAGSAPVTARVRRRAAVACPAVTLRGCRAPVTAQREEGCRAPWEGAPARRC

SEQ ID NO: 179927 - protein, 219 aa, Zea Mays
MGIKGLTKLLAQHAPTAAVQRRVEDYRGRVIAVDASVSIYQFLAVVGRKGSELLTNEAGEITSHLQGMLNRTIRMLEAGIKPVFVFDGEPPEMKKKELAKRSLKRDDAIKDLNRAMEIGDENAIEKFSKRTVKVTGRHNDDCKRLLRLMGVPVVEAPGEAEAQCAALCENHQVYAVASEDMDTLTFGARRFLRHLTDLGYKKSPVTEFDVSKVSEDKEP

SEQ ID NO: 179928 - protein, 114 aa, Zea Mays
MGIKAVVGRKGSELLTNEAGEITSHLQGMLNRTIRMLEAGIKPVFVFDGEPPEMKKKELAKRSLKRDDAIKDLNRAMEIGDENAIEKFSKRTVKVTGRHNDDCKRLLRSDSAFY

SEQ ID NO: 179929 - protein, 231 aa, Zea Mays
MGIKGLTKLLAQHAPTAAVQRRVEDYRGRVIAVDASVSIYQFLAVVGRKGSELLTNEAGEITSHLQGMLNRTIRMLEAGIKPVFVFDGEPPEMKKKELAKRSLKRDDAIKDLNRAMEIGDENAIEKFSKRTVKVTGRHNDDCKRLLRLMGVPVVEAPGEAEAQCAALCENHQVYAVASEDMDTLTFGARRFLRHLTDLGYKKSPVTEFDVSKMIIFPLVEMTIYRASWAIW

SEQ ID NO: 179930 - protein, 273 aa, Zea Mays
MGIKGLTKLLAQHAPTAAVQRRVEDYRGRVIAVDASVSIYQFLAVVGRKGSELLTNEAGEITSHLQGMLNRTIRMLEAGIKPVFVFDGEPPEMKKKELAKRSLKRDDAIKDLNRAMEIGDENAIEKFSKRTVKVTGRHNDDCKRLLRLMGVPVVEAPGEAEAQCAALCENHQVYAVASEDMDTLTFGARRFLRHLTDLGYKKSPVTEFDVSKVLEELGLTMDQFIDLCILSGCDYCENIRGIGGQRALKLIRQHGCIEEVLQNLNQTRNPSAY

SEQ ID NO: 179931 - protein, 186 aa, Zea Mays
MTTRQSKEGIYTNMFSIGGQRALKLIRQHGCIEEVLQNLNQTRFSVPEDWPYQEVRTLFKEPNVCAGIPDFTWTSPDPEGLMDFLSTENSFSPDRVTKAVEKIKVARDRYSPGRMKHLTPVASLRGSHTEKEPQCILGSPGQTLKVMSSPQVCKSPSSGFRYGSSKPFMLGRQSGFHGMPYALSFI

SEQ ID NO: 179932 - protein, 124 aa, Zea Mays
MQGPSAQKNLLKNGRPSSILTSNSIILSGDFCITASLQDHRSWKLSSQLPNNCFRAFSFPCQIVSYVIVHPNVSCNILCNSLAPICGFFISSGRALAATQAPVGVVVLRLPLDVHVCSSFKTIT

SEQ ID NO: 179933 - protein, 433 aa, Zea Mays
MASWPAASRRRSSGGMKSAELSGSGASYGYGRTSSSPDACGYGRQFSAYSARSSQVSRSGSFSAAAQRVAGAFTGCFVPRRQVKAGEEEEEEEKKSKRSMDSGSYHGWNEANLSAAAGSWQEGRALTIADVSKATSNFSEKNVIRQGRSSTMYRGKLRDGSQIAVKCVTKSPTAELWRELEKIQHRNLARLFGFFERAADSLVVVEYVGNGSLREHLDESCGNGLELAQRLNIAIDVAQAITYLHEYKERPIIHGGIRSSGVLLTDALAAKVAGFGLAGTAASGSGSGSDATPARSAAGYVDPEYLITYQLTDKSDVYAFGVLLVELATGRPPVERSRGGEARLTTKWALQKCRAGEAVVAMDPRMRRSPASVAAVERTLALAAQSVAAARDERPSMRRCSELLWTIRRDYHRQEEPRCGAVAAERSDEWVIR

SEQ ID NO: 179934 - protein, 444 aa, Zea Mays
MASWPAASRRRSSGGMKSAELSGSGASYGYGRTSSSPDACGYGRQFSAYSARSSQVSRSGSFSAAAQRVAGAFTGCFVPRRQVKAGEEEEEEEKKSKRSMDSGSYHGWNEANLSAAAGSWQEGRALTIADVSKATSNFSEKNVIRQGRSSTMYRGKLRDGSQIAVKCVTKLNDQSPTAELWRELEKIQHRNLARLFGFFERAADSLVVVEYVGNGSLREHLDESCGNGLELAQRLNIAIDVAQAITYLHEYKERPIIHGGIRSSGVLLTDALAAKVAGFGLAGTAASGSGSGSDATPARSAAGYVDPEYLITYQLTDKSDVYAFGVLLVELATGRPPVERSRGGEARLTTKWALQKCRAGEAVVAMDPRMRRSPASVAAVERTLALAAQSVAAARDERPSMRRCSELLWTIRRDYHRQEEPRCGAVAAERSDEWVIRQEIMLLC

SEQ ID NO: 179935 - protein, 85 aa, Zea Mays
MISLFFEKSTIIIPLALRPLPQRCRPWINLFRGLDFTCMSTVPLRVLGIGVLYKCFAVLFVVLLAHPYFYVTQNIICCFIWIITK

SEQ ID NO: 179936 - protein, 74 aa, Zea Mays
MCLPSEGTCHVYPSCSDIFIISTPLSCYECIYCSSTWPGLDLIELLAVVTAAKKELPAGCSPPIHRRLQVVQVQ

SEQ ID NO: 179937 - protein, 463 aa, Zea Mays
MTRLSLPIFTGSKIEGEGSLSITIALVDALTRQIVAPGKEFQIKVEIVVLEGDFESGEDDDWTAQEFNNNIVKEREGKRPLISGDAFIALVDGIGTVGELSFTDNSSWTRSRKFRLGARTEDGSFNGVRVREAKTESFVVKDHRGELYKKHHPPFLEDEVWRLEKIGKEGAFHKRLNRENICTVKDFLTLLNLDASRLRKILGGGMSTKMWEATVEHAKTCVLTDKVHHYYPDGLNKAGVVFNVVGEVRGLISDKYVFVDDFTEKEKAEARAAVKQAYEHWKDVHTCDNETLVENPSHPFNLGSPSLHENQYNQLPTQVSTDGFSLSNSAILSPNIFSMEPSSALDPCSILETEESSANQFQSVLPPVGGHEVPREPQTLDKFSNSLVYDDCSAHPSFSESYYSTVDPSMSFDTQDLGAALKGFIATISKPKAAYRGWRTLSYVLGWIFYTKRIVARRKKHGK

SEQ ID NO: 179938 - protein, 258 aa, Zea Mays
MSTKMWEATVEHAKTCVLTDKVHHYYPDGLNKAGVVFNVVGEVRGLISDKYVFVDDFTEKEKAEARAAVKQAYEHWKDVHTCDNETLVENPSHPFNLGSPSLHENQYNQLPTQVSTDGFSLSNSAILSPNIFSMEPSSALDPCSILETEESSANQFQSVLPPVGGHEVPREPQTLDKFSNSLVYDDCSAHPSFSESYYSTVDPSMSFDTQDLGAALKGFIATISKPKAAYRGWRTLSYVLGWIFYTKRIVARRKKHGK

SEQ ID NO: 179939 - protein, 128 aa, Zea Mays
MRTQALFFLALALIGAVLAQSSNRHHHHYHHAHVQGKGQGAGGGGGELASRAKAAARAWPCCDSCGGCTRSEPPRCQCLDAAPRGCHPACRDCVKSSLSADPPVYQCMDRVPNFCQRRCTAAAAAAAH

SEQ ID NO: 179940 - protein, 559 aa, Zea Mays
MATIGLVPSTVVASTAIRAPAPAALTRASNRQPPHARRLLDLGRRAPAMDALRVSGAAEPLLRPAAAGGHPRLRVRTRAQQGDGGAAAEGDAAFSWAPVVLPFLFPALGGLLFGYDIGATSGATISVQSPDLSGTDWFSLSSLQLGLVASGSLYGALGGSLLAYRIADFLGRRIELVTAAALYILGALVTGFAPNFVALIIGRVLYGIGIGLAMHGAPLYIAETSPSQIRGTLISLKELFIVLGILLGYLVGSLEIDNVGGWRYMFGFSAPLAAIMAIGMWTLPSSPRWLLLRAVQGKASLEDNKKKAIQALRTLRGRTASEKVLADDVDDTIVSIKAAYAGQEAEGNVWDVFEGASLKAFTIGGGLVLFQQITGQPSVLYYAASILQTAGFSAASDAAKVAILIGLFKLLMTGVAVFKVDDVGRRPLLIGGVGGIALSLFLLAAYYKILNNFPFVAVGALLLYVGAYQVSFGPISWLMVSEIFPLRTRGRGISLAVLTNFGSNALVTFAFSPLKELLGPANIFFLFGVIAVLSLVFVILVVPETKGLSLEEIESKILK

SEQ ID NO: 179941 - protein, 586 aa, Zea Mays
MATIGLVPSTVVASTAIRAPAPAALTRASNRQPPHARRLLDLGRRAPAMDALRVSGAAEPLLRPAAAGGHPRLRVRTRAQQGDGGAAAEGDAAFSWAPVVLPFLFPALGGLLFGYDIGATSGATISVQSPDLSGTDWFSLSSLQLGLVASGSLYGALGGSLLAYRIADFLGRRIELVTAAALYILGALVTGFAPNFVALIIGRVLYGIGIGLGMICLDETWTSHVSLTVSNKELRKTAMAMHGAPLYIAETSPSQIRGTLISLKELFIVLGILLGYLVGSLEIDNVGGWRYMFGFSAPLAAIMAIGMWTLPSSPRWLLLRAVQGKASLEDNKKKAIQALRTLRGRTASEKVLADDVDDTIVSIKAAYAGQEAEGNVWDVFEGASLKAFTIGGGLVLFQQITGQPSVLYYAASILQTAGFSAASDAAKVAILIGLFKLLMTGVAVFKVDDVGRRPLLIGGVGGIALSLFLLAAYYKILNNFPFVAVGALLLYVGAYQVSFGPISWLMVSEIFPLRTRGRGISLAVLTNFGSNALVTFAFSPLKELLGPANIFFLFGVIAVLSLVFVILVVPETKGLSLEEIESKILK

SEQ ID NO: 179942 - protein, 483 aa, Zea Mays
MATIGLVPSTVVASTAIRAPAPAALTRASNRQPPHARRLLDLGRRAPAMDALRVSGAAEPLLRPAAAGGHPRLRVRTRAQQGDGGAAAEGDAAFSWAPVVLPFLFPALGGLLFGYDIGATSGATISVQSPDLSGTDWFSLSSLQLGLVASGSLYGALGGSLLAYRIADFLGRRIELVTAAALYILGALVTGFAPNFVALIIGRVLYGIGIGLVSICRAVQGKASLEDNKKKAIQALRTLRGRTASEKVLADDVDDTIVSIKAAYAGQEAEGNVWDVFEGASLKAFTIGGGLVLFQQITGQPSVLYYAASILQTAGFSAASDAAKVAILIGLFKLLMTGVAVFKVDDVGRRPLLIGGVGGIALSLFLLAAYYKILNNFPFVAVGALLLYVGAYQVSFGPISWLMVSEIFPLRTRGRGISLAVLTNFGSNALVTFAFSPLKELLGPANIFFLFGVIAVLSLVFVILVVPETKGLSLEEIESKILK

SEQ ID NO: 179943 - protein, 394 aa, Zea Mays
MATIGLVPSTVVASTAIRAPAPAALTRASNRQPPHARRLLDLGRRAPAMDALRVSGAAEPLLRPAAAGGHPRLRVRTRAQQGDGGAAAEGDAAFSWAPVVLPFLFPALGGLLFGYDIGATSGATISVQSPDLSGTDWFSLSSLQLGLVASGSLYGALGGSLLAYRIADFLGRRIELVTAAALYILGALVTGFAPNFVALIIGRVLYGIGIGLAMHGAPLYIAETSPSQIRGTLISLKELFIVLGILLGYLVGSLEIDNVGGWRAVQGKASLEDNKKKAIQALRTLRGRTASEKVLADDVDDTIVSIKAAYAGQEAEGNVWDVFEGASLKAFTIGGGLVLFQQLNSYLADNRSTECSILCCFNTSDCWILSCIRCCQSSNLDWVVQVANDRCCGI

SEQ ID NO: 179944 - protein, 228 aa, Zea Mays
MATIGLVPSTVVASTAIRAPAPAALTRASNRQPPHARRLLDLGRRAPAMDALRVSGAAEPLLRPAAAGGHPRLRVRTRAQQGDGGAAAEGDAAFSWAPVVLPFLFPALGGLLFGYDIGATSGATISVQSPDLSGTDWFSLSSLQLGLVASGSLYGALGGSLLAYRIADFLGRRIELVTAAALYILGALVTGFAPNFVALIIGRVLYGIGIGLVSICRYRCFFISFFLK

SEQ ID NO: 179945 - protein, 538 aa, Zea Mays
MATIGLVPSTVVASTAIRAPAPAALTRASNRQPPHARRLLDLGRRAPAMDALRVSGAAEPLLRPAAAGGHPRLRVRTRAQQGDGGAAAEGDAAFSWAPVVLPFLFPALGGLLFGYDIGATSGATISVQSPDLSGTDWFSLSSLQLGLVASGSLYGALGGSLLAYRIADFLGRRIELVTAAALYILGALVTGFAPNFVALIIGRVLYGIGIGLAMHGAPLYIAETSPSQIRGTLISLKELFIVLGILLGYLVGSLEIDNVGGWRYMFGFSAPLAAIMAIGMWTLPSSPRWLLLRAVQGKASLEDNKKKAIQALRTLRGRTASEKVLADDVDDTIVSIKAAYAGQEAEGNVWDVFEGASLKAFTIGGGLVLFQQITGQPSVLYYAASILQLLMTGVAVFKVDDVGRRPLLIGGVGGIALSLFLLAAYYKILNNFPFVAVGALLLYVGAYQVSFGPISWLMVSEIFPLRTRGRGISLAVLTNFGSNALVTFAFSPLKELLGPANIFFLFGVIAVLSLVFVILVVPETKGLSLEEIESKILK

SEQ ID NO: 179946 - protein, 223 aa, Zea Mays
MSNGLCFVKKGMICLDETWTSHVSLTVSNKELRKTAMAMHGAPLYIAETSPSQIRGTLISLKELFIVLGILLGYLVGSLEIDNVGGWRYMFGFSAPLAAIMAIGMWTLPSSPRWLLLRAVQGKASLEDNKKKAIQALRTLRGRTASEKVLADDVDDTIVSIKAAYAGQEAEGNVWDVFEGASLKAFTIGGGLVLFQQVNRVFYIMLLQYFRLLDSQLHQMLPK

SEQ ID NO: 179947 - protein, 220 aa, Zea Mays
MSNGLCFVKKGMICLDETWTSHVSLTVSNKELRKTAMAMHGAPLYIAETSPSQIRGTLISLKELFIVLGILLGYLVGSLEIDNVGGWRYMFGFSAPLAAIMAIGMWTLPSSPRWLLLRAVQGKASLEDNKKKAIQALRTLRGRTASEKVLADDVDDTIVSIKAAYAGQEAEGNVWDVFEGASLKAFTIGGGLVLFQQITGQPSVLYYAASILQLHQMLPK

SEQ ID NO: 179948 - protein, 223 aa, Zea Mays
MALNHYGALCQAMHGAPLYIAETSPSQIRGTLISLKELFIVLGILLGYLVGSLEIDNVGGWRYMFGFSAPLAAIMAIGMWTLPSSPRWLLLRAVQGKASLEDNKKKAIQALRTLRGRTASEKVLADDVDDTIVSIKAAYAGQEAEGNVWDVFEGASLKAFTIGGGLVLFQQITGQPSVLYYAASILQTAGFSAASDAAKVAILIGLFKVLRYLKLTMLEGAHY

SEQ ID NO: 179949 - protein, 57 aa, Zea Mays
MPMSRNWGQNWQSSAILVGQALSFRVTGSDRRTSTSWNAAPRDWRFGQTFEGKNFRV

SEQ ID NO: 179950 - protein, 581 aa, Zea Mays
MSSATCRRGFNGKFRRIASAPSPLLHRTGLSPPADCGARAAEQHCLHLLERSSAPAAVLQSLAFLLKSGLHANPLVLTRLFASSAAAAPALLEPLVAALLVPSVPIDAFLANTLIRAHAASPLPSARLRAASFFPLMLRSATLPNKFTFPFLLKACAAFPGVGVQAHAAALKFGFTTDQYVSNTLIHMYSCFGGEFLGDARNVFDRMAKSSAVTWSAMIGGYVRSGLSSDAVGLFREMQASGVRPDEVTMIGVLAAAADLGALELARWVGRFVEKEGIGKSVTLCNALIDALAKCGDLDGAMAVFQGMKERTIVSWTSVIDALAMEGRGKEAVAVFEEMKTAGVRPDDVAFIGVLTACSHAGMVDEGYGYFESMRMAYGIDPKIEHYGCMVDMFGRAGMVERAMEFVHKMPMKPNPIIWRTLVAACRAHGRLELGETITRNLLNEYPAHEANYVMLSNVYALTRRWKEKSEIRREMSKRGIKKVPGCSLVELDGEVHEFIAGDESHPQWKEIYMMVEEMARELRRAGHISATSEVLLDLDEEDKEVALQWHSEKLAIAFVLLRTPPGTQVPSLQEWLLLVQ

SEQ ID NO: 179951 - protein, 129 aa, Zea Mays
MILPKWNDALLEVFRIDYVGSSPYITCNPSLYHHRLSTRDRFLILSSDGLYQYFTNEEAVAQVEMFIATTPEGDPAQHLVEEVLFRAANKAGMDFHELIEIPHGDRRRYHDDVSVIVISLEGRIWRSCV

SEQ ID NO: 179952 - protein, 174 aa, Zea Mays
MPLLFLSVTTTVSELSSKRDDEPDNNTEHSETNELASTSGTSDAADGTKEIVQENWLVLLFRELEKQGITLPERFTEDELRRFYVAANGDFSSLLSSVKKTIRWRETFHILTLQELDKWSHLVFWHGFDTMLRPCLVIRLGLACSSIPPCDRPRFGQAVGNCQHSNQFPVTQFT

SEQ ID NO: 179953 - protein, 166 aa, Zea Mays
MPLLFLSVTTTVSELSSKRDDEPDNNTEHSETNELASTSGTSDAADGTKEIVQENWLVLLFRELEKQGITLPERFTEDELRRFYVAANGDFSSLLSSVKKTIRWRETFHILTLQELDKWSHLVFWHGFDTMLRPCLVIRLGLACSSIPPCDRPRFGQAFLKLTMVL

SEQ ID NO: 179954 - protein, 84 aa, Zea Mays
MSLAMSRASVQRRLWLQRYTYRVARSVISCAASVVSQGTSAATAWPPSSVTHVAGGGTCLTSARRQGFLIAGSAGSESLSPLCF

SEQ ID NO: 179955 - protein, 121 aa, Zea Mays
MYQSTLTQHFRLIPYLSWCLGGCGNKGMLACLMGYLRVSATFCKRFMRMLSFGEWQEQKILDSCGINLDGVVGVVPPPPFSLLFLVSFIFVLLFFLFVPLFSSAAFSGTLFSWSTWDLFSS

SEQ ID NO: 179956 - protein, 588 aa, Zea Mays
MGGTSASGRRRWARRSCRTGGQAGGVVRRTIAAPTAPRVTEGFAHVDKQRRVHGALSDFRCNSGSTVHLSLDIEEFKHKGSHKSSVRCLPSSQRNVTEISHMQPVARGLQVDKSFSDKGLCHASRTVSGMPIRPKYYLSSPNNNLKSPPTVKSCSQMSDFSYRLVRSAKRSASPGMGLTSTNYSLYEKMSLLRQRRHGDNHQNQNRINALNRRHKIMNPRGAADLLSKDKVHEHLNSSLERHSQALLNNALIREKQLCCSDILNQKAPEQIWSSVSSESEKILCFSSGDSIDDLQGSYSSETSDSSNLSSLGAVAGDEWNTAFKKTACMDSTSVMYTKEVGQASPISVLKPLSEDCSDSENIRREPADPYDLQLRLELGTFAPTETAAEASSIGRTSDCLSSEVQPSDDKPIQLVEDILEELEDDEEREFSYLLDILIASGIHGTVEDQMYKVCQSTEYPASDDVFEKVEKKYTKVVQWSRSDRKLLFDMVNTILSQILAPCLNMRPWVNTTRNLAPLWGAEGLLEKVLQVLTQRREQLAPSETKPEKKGLDPKWPDLADWIDRAGRDIERMIKDDMLEELALELLFS

SEQ ID NO: 179957 - protein, 393 aa, Zea Mays
MGGTSASGRRRWARRSCRTGGQAGGVVRRTIAAPTAPRVTEGFAHVDKQRRVHGALSDFRCNSGSTVHLSLDIEEFKHKGSHKSSVRCLPSSQRNVTEISHMQPVARGLQVDKSFSDKGLCHASRTVSGMPIRPKYYLSSPNNNLKSPPTVKSCSQMSDFSYRLVRSAKRSASPGMGLTSTNYSLYEKMSLLRQRRHGDNHQNQNRINALNRRHKIMNPRGAADLLSKDKVHEHLNSSLERHSQALLNNALIREKQLCCSDILNQKAPEQIWSSVSSESEKILCFSSGDSIDDLQGSYSSETSDSSNLSSLGAVAGDEWNTAFKKVYYPQTACMDSTSVMYTKEVGQASPISVLKPLSEDCSDSENIRREPADPYAETGAWHICTNRNCCGGK

SEQ ID NO: 179958 - protein, 385 aa, Zea Mays
MGGTSASGRRRWARRSCRTGGQAGGVVRRTIAAPTAPRVTEGFAHVDKQRRVHGALSDFRCNSGSTVHLSLDIEEFKHKGSHKSSVRCLPSSQRNVTEISHMQPVARGLQVDKSFSDKGLCHASRTVSGMPIRPKYYLSSPNNNLKSPPTVKSCSQMSDFSYRLVRSAKRSASPGMGLTSTNYSLYEKMSLLRQRRHGDNHQNQNRINALNRRHKIMNPRGAADLLSKDKVHEHLNSSLERHSQALLNNALIREKQLCCSDILNQKAPEQIWSSVSSESEKILCFSSGDSIDDLQGSYSSETSDSSNLSSLGAVAGDEWNTAFKKVYYPQTACMDSTSVMYTKEVGQASPISVLKPLSEDCSDSENIRREPADPYAERRQTHTAC

SEQ ID NO: 179959 - protein, 93 aa, Zea Mays
MAVPEVVVDGVVFPPAARPPGSAGSHFLGGAGVRGLEIGGNFVKFTAIGVYLEDAAVPALARKWAGKTAGELASDAAFFRDVVTGGFEKFRAG

SEQ ID NO: 179960 - protein, 147 aa, Zea Mays
MAPLLFRDMKGLSCSSQASTATCPSLERHPAPRPHKASAGASPLAPVPAAEPRTRTHRLDGKKGQQPQHKAAVVPANAGGGLVSPAGSSRYLLLSGRFAAVAEEIQEVLEPAPAVDAIAKREEASDAADAKTAQAQEQVRANSPPLT

SEQ ID NO: 179961 - protein, 265 aa, Zea Mays
MEPCSKSKKKSLKKTVKPRDEVVAVNGRNSTGNVKASLSSNEQNKSLPLITAKQYACRAAHLSSLVVSWSPVVSLSDRTSCLLRHWCILAVGSKSGNISFWKLYKPEYYTIDAGVVTSDPMLIGVLHAHESWVNAITWQVLSAGSSKSSLLLATGCSDGSVKIWLGNIEGLNQCAIGEEVPFVLVAEVAANLSAPVSSISLGIPARSQHEVSLAIGRVSGLLEIWIWNASTNKIESSSAWHAHDQVVYDGLSMAIVYSAAVRPPG

SEQ ID NO: 179962 - protein, 502 aa, Zea Mays
MATHYQAATLIASPSYPNAIAWSSDNLVAVASGHIVTILNPAALDGPRGLVGLRHSDPFPIGVVKREDLLEPCLLPTSLARETEPCARSISWSQQGFAPNYGCLLAVCTVNDHVKLYRSPIWELCDEWVEVADISQLLFNYYKIINFGEDNGSHLTSSKNTNSGEAEVLGSTCRSEESLYFRGPGQRKIKPARVGGFIYDGNEVDLDASKDADFSMEPCSKSKKKSLKKTVKPRDEVVAVNGRNSTGNVKASLSSNEQNKSLPLITAKQYACRAAHLSSLVVSWSPVVSLSDRTSCLLRHWCILAVGSKSGNISFWKLYKPEYYTIDAGVVTSDPMLIGVLHAHESWVNAITWQVLSAGSSKSSLLLATGCSDGSVKIWLGNIEGLNQCAIGEEVPFVLVAEVAANLSAPVSSISLGIPARSQHEVSLAIGRVSGLLEIWIWNASTNKIESSSAWHAHDQVVYDGLSMAIVYSAAVRTILHVVGYLTKTTLKNFFCIQNFQS

SEQ ID NO: 179963 - protein, 375 aa, Zea Mays
MATHYQAATLIASPSYPNAIAWSSDNLVAVASGHIVTILNPAALDGPRGLVGLRHSDPFPIGVVKREDLLEPCLLPTSLARETEPCARSISWSQQGFAPNYGCLLAVCTVNDHVKLYRSPIWELCDEWVEVADISQLLFNYYKIINFGEDNGSHLTSSKNTNSGEAEVLGSTCRSEESLYFRGPGQRKIKPARVGGFIYDGNEVDLDASKDADFSMEPCSKSKKKSLKKTVKPRDEVVAVNGRNSTGNVKASLSSNEQNKSLPLITAKQYACRAAHLSSLVVSWSPVVSLSDRTSCLLRHWCILAVGSKSGNISFWKLYKPEYYTIDAGVVTSDPMLIGVLHAHESWVNAITWQVLSAGSSKSSLLLATGCSDGR

SEQ ID NO: 179964 - protein, 501 aa, Zea Mays
MATHYQAATLIASPSYPNAIAWSSDNLVAVASGHIVTILNPAALDGPRGLVGLRHSDPFPIGVVKREDLLEPCLLPTSLARETEPCARSISWSQQGFAPNYGCLLAVCTVNDHVKLYRSPIWELCDEWVEVADISQLLFNYYKIINFGEDNGSHLTSSNTNSGEAEVLGSTCRSEESLYFRGPGQRKIKPARVGGFIYDGNEVDLDASKDADFSMEPCSKSKKKSLKKTVKPRDEVVAVNGRNSTGNVKASLSSNEQNKSLPLITAKQYACRAAHLSSLVVSWSPVVSLSDRTSCLLRHWCILAVGSKSGNISFWKLYKPEYYTIDAGVVTSDPMLIGVLHAHESWVNAITWQVLSAGSSKSSLLLATGCSDGSVKIWLGNIEGLNQCAIGEEVPFVLVAEVAANLSAPVSSISLGIPARSQHEVSLAIGRVSGLLEIWIWNASTNKIESSSAWHAHDQVVYDGLSMAIVYSAAVRTILHVVGYLTKTTLKNFFCIQNFQS

SEQ ID NO: 179965 - protein, 287 aa, Zea Mays
MEPCSKSKKKSLKKTVKPRDEVVAVNGRNSTGNVKASLSSNEQNKSLPLITAKQYACRAAHLSSLVVSWSPVVSLSDRTSCLLRHWCILAVGSKSGNISFWKLYKPEYYTIDAGVVTSDPMLIGVLHAHESWVNAITWQVLSAGSSKSSLLLATGCSDGSVKIWLGNIEGLNQCAIGEEVPFVLVAEVAANLSAPVSSISLGIPARSQHEVSLAIGRVSGLLEIWIWNASTNKIESSSAWHAHDQVVYDGLSMAIVYSAAVRTILHVVGYLTKTTLKNFFCIQNFQS

SEQ ID NO: 179966 - protein, 867 aa, Zea Mays
MGKTRGMGAGRKLKTHRRNQRWADKAYKKSHLGNEWKKPFAGSSHAKGIVLEKIGIEAKQPNSAIRKCARVQLVKNGKKIAAFVPNDGCLNYIEENDEVLIAGFGRKGHAVGDIPGVRFKVVKRTTFFYPVANPGELAKQCKSGNRDLIAERQNRRLGPVPYRIPIIARSAAYPAAPARSTPPAPTSARRMDMAPASVYFNPRSVEEIFKDFSGRRAGLVRALTSDVDDFCRLCDPDKENLCLYGLPNGSWEVSPPAEEVPPELPEPALGINFARDGMQRRDWLTLVAVHSDSWLISVAFFYGARLNGNDRKRLFSMMSDLPSVLEAFADRKHGRDRSGVDSSGKSRHSSKRGKDGHAKSFRAAAPAAKEYDEDDDEEDEEEHTETFCGSCGGLYNASEFWIGCDICERWFHGKCVRITPAKADHIKHYKCPDCSSKKMRQIYDAVIKTGTESNAGKAALDALGAELTTPLVADVLHRLRYEEKLAFRFFAWASQQDGYNHEPTTYNDIIDILSGTRYKSRQFGVLCNVLDHMKRHGSRSVPVEDLLEILRAYTEKHLTHMRKLAKKRRVRMRTPPETDALNVLLDAFCKCGMVKEAEAVFGRVKRKLLGNAETYSTLFFGWCRARDPKKAMKVLEEMIQMKHTPESFTYVAAIISFCSAGLVSEARELFEFMRTEGLTISSPTAKTYSIMIVALAKADRMEECFELLSDMRSCGCMPDVTTYKDLIEGMCLVGKLDAAYRVLDEMGRAGFPPDIVTHRKADDALELCERMIEAHCEPSVHTYNMMMMMFFEMGEAHRALDICLEMDKRRCQRAIDTYEIMIYGLFDCGETEYATALLDEVINRDMKLSYKKFDAIMLRSLFKGSEG

SEQ ID NO: 179967 - protein, 287 aa, Zea Mays
MASGEEGKGETVLVTGASGFIGSTLVRGLLGRGYNVRAGVLDPDDRAETDHLLALAAGAGRLSFFRCDLLDGAALLDAARGCSGVFHLASPCTVDPVKDPQLMVPAVEGTLNVVRAAKDAGGVRRVVVTSSISAVVPNPGWPAGEVVDERCWTDIDYCEKNGVWYPASKTLAEKAAWKFAEENGLDVVVVNPGTVLGPMIPPAINASMAMFCRLLQGCTEEYADFFLGPVHVEDVAMAHILVFESASASGRHLCVHSICHWSDFAAKVAELYPDYKVPKHCAVLLYL

SEQ ID NO: 179968 - protein, 326 aa, Zea Mays
MASGEEGKGETVLVTGASGFIGSTLVRGLLGRGYNVRAGVLDPDDRAETDHLLALAAGAGRLSFFRCDLLDGAALLDAARGCSGVFHLASPCTVDPVKDPQLMVPAVEGTLNVVRAAKDAGGVRRVVVTSSISAVVPNPGWPAGEVVDERCWTDIDYCEKNGVWYPASKTLAEKAAWKFAEENGLDVVVVNPGTVLGPMIPPAINASMAMFCRLLQGCTEEYADFFLGPVHVEDVAMAHILVFESASASGRHLCVHSICHWSDFAAKVAELYPDYKVPKFPMDTQPGLVRQEVGSKKLTALGLQITPMEKIIRDAVESLKSRGHIS

SEQ ID NO: 179969 - protein, 370 aa, Zea Mays
MAARRGPHVIKLHDPNPPLLGRAPGTAPAAIPAPSRDEGILAQHPRAAPSSASASHPAFALIEERLVARDQDIQELLVDNQRFAATHVALQQQLIAAQHELRAVSVAATRARAEREVEVRALADQAAHIEAEARAVAAARAEVDQVHADVQVLVAARTDLVNRLQGLREKLAHKKAEASKTDSVRAQIETMRREIQKGRAAVDFEKKAHSDNLEQSKAMEKNMIAVASEIERLRGELANAEKGATAVNPAAAGMLRLMAILSQHILQCMAILMQHILHRPILMLITLIRLTCTLVPVPITRVNHFPMDNTRASTPISKDDCRHKIALTRLPSHSRCKRIVAESTGLSMLEKSVASERWNSSWSCLLFFSG

SEQ ID NO: 179970 - protein, 89 aa, Zea Mays
MQEASLRLIEVVVVVVSSLVASLQVQGHHRPRPASARPRPIQVSHPAGSMHACRHDYFSSISVCRRMRCVCARSPVARVIMHACNLQEL

SEQ ID NO: 179971 - protein, 151 aa, Zea Mays
MSESGPAADGGAGGGPADAGGVRSMVQRWKMDGAPARARLLLRALAWLFSLLALVVMASNQHGGSQDFREYPEYNYCLGISIVAWLYATAQVLRDVHRLGSGRDLIAARKASAVVDFAGDQVVGSSGRRLLLDIGHVRGGAGDGLHAPGGG

SEQ ID NO: 179972 - protein, 80 aa, Zea Mays
MSESGPAADGGAGGGPADAGGVRSMVQRWKMDGAPARARLLLRALAWLFSLLALVVMASNQHGGSQDFREYPEYKSSLTS

SEQ ID NO: 179973 - protein, 1003 aa, Zea Mays
MQGHMLQALCIPAVIVFASALVLVAAVLCAVAVRALRRAAAREMALNVDLARQKEALRQAERKSMNKSNAFASASHDIRSALSAIAGLVDMSRQEAQSLPAVMENLDQMGVCTNKLFDILNSILDTSKVESGKMQLEEAEFSMADVLQESVDMAYVTGVRRGVEVVWDPCDFSVLRCAAVLGDSKRLKQILDNLLGNALKFTDEGHVVLRSWATRPITGSNVRAPSRFVHPRHGGGGFLGCLFRARKRPGDQDHVQNDPNLVEFYFEVVDTGIGIPQEKKMSVFENYVQVNNGQGGTGLGLGIVQSFVRLMGGEISIKDKEPGERGTCFAFNVLLRISEVQQPQDIEEGPSVPLGTLNRSISIASAFQEASNFKGVHCVLYVHGYETRRILQTWMESIEVKVWLVPQAEFIGSTLEKVQSNSTATATAECGSADRCFSSKEMVNLLRNNSSPRRAILGGIPSGILVVIDVSGGETEEICQEMAKLSRIKHQAPCKVVLLEDIKTPSNDLRRLKDMGCDLVLRKPVHGSRQFTLLMTLRDLQVLDAQAQSSHVGPEIAGNSQQQDLPDVVVPCVEDTVASTEASCLAQKPGDDKPLAGMRILLAEDNLVLQSIQRKIMNQLGAFVTVAQNGTMAVNLLREALEQANASEEDIVSLPYHVIFMDCQMPGMDGYEATKLIREEEQRYGIHAPIIALTAHDMEEDLQKAIDAGMDLHLAKPISRKKIVDAVRSFCKFSLSSSRQECPPSSEISESPSSCPSPDRSRTSPASRSMFFVPLHVIPAGGGSTVWENDAPPLRQYGRTVAPVVAWPHLQSQAHRLIDDDEVHRGYRDGFILVVFFGDKSTGGSSPASSSPSRTASPRRQPTPRPSTSDVIFFLVNLPAFDTNVDYHRHQTQAARQRFVRRRSSTKCLTLPWLMAQRDAAEKAAHTVPGMEMTTLFSAYRRAVFSPIDHLRPSVGTSGWIPSFRLLRTREPRRQSELNKVSTLIGIAVICSCLHNIIPTKFC

SEQ ID NO: 179974 - protein, 174 aa, Zea Mays
MASGGAAISAGPTPPSATASSVEWHQRPPNPKNPVVFFDVTIGSIAAGRIKMELFADIAPKTAENFRQFCTGEHRKNALPQGYKGCQFHRVIKDFMIQGGDFLKNDGTGCTSIYGTKFDDENFIAKHTGPGLLSMANSGINSNGSQFFITCAKCDWLDNKHVVFGECLETVCSS

SEQ ID NO: 179975 - protein, 519 aa, Zea Mays
MEGLNATDAVIKKPRSVAFRKPRSMKQLTVECNGICLPSRSARHDDDTGVEAGGQRRKELHLNSPEMKGSMTHRSDVPSKIRRDDKSGGDYDGHGRSRKTKDAAKHGSESVLALECTARNIESLDNPQLVPRDDSLPGENRPRKVKFKFNRTQRTKNGQDDGGSGIPATSACFINQYKQKDSGGHTTKDTHGNRAEGKHGNKHGNSLSPDLVCKSKRIPKKRTLDEDSDDGDGEIRYLQKLKGAKVAPDPVNTGHKAYDFVDDALKKKELTKLSKNKSIPYEVDEDFRMSRSGRNGRKKLGDDNEFIEDEESEMEEKSGLKKADSPQDVKIETPGLTTRQRALQSRVTNYVIEQKEKLSDVELQAKKAEAAQRRKMQVEKAEKEQQAEAMRKILGLDSEKKKEEKKLKERENREKQAKLEECKKNCVRTVMGPTGTVITFPESMGLPSIFNSKPVSYPPPREKCAGPSCTNPYKYRDSKTLLPLCSLACYKAVQGRPPDQGTDAAQGSGGGQESAGKQA

SEQ ID NO: 179976 - protein, 367 aa, Zea Mays
MPRGSSSRGARGGVGRNQGRGARGKDSGGHTTKDTHGNRAEGKHGNKHGNSLSPDLVCKSKRIPKKRTLDEDSDDGDGEIRYLQKLKGAKVAPDPVNTGHKAYDFVDDALKKKELTKLSKNKSIPYEVDEDFRMSRSGRNGRKKLGDDNEFIEDEESEMEEKSGLKKADSPQDVKIETPGLTTRQRALQSRGGNVTNYVIEQKEKLSDVELQAKKAEAAQRRKMQVEKAEKEQQAEAMRKILGLDSEKKKEEKKLKERENREKQAKLEECKKNCVRTVMGPTGTVITFPESMGLPSIFNSKPVSYPPPREKCAGPSCTNPYKYRDSKTLLPLCSLACYKAVQGRPPDQGTDAAQGSGGGQESAGKQA

SEQ ID NO: 179977 - protein, 231 aa, Zea Mays
MSRSGRNGRKKLGDDNEFIEDEESEMEEKSGLKKADSPQDVKIETPGLTTRQRALQSRVTNYVIEQKEKLSDVELQAKKAEAAQRRKMQVEKAEKEQQAEAMRKILGLDSEKKKEEKKLKERENREKQAKLEECKKNCVRTVMGPTGTVITFPESMGLPSIFNSKPVSYPPPREKCAGPSCTNPYKYRDSKTLLPLCSLACYKAVQGRPPDQGTDAAQGSGGGQESAGKQA

SEQ ID NO: 179978 - protein, 251 aa, Zea Mays
MSRSGRNGRKKLGDDNEFIEDEESEMEEKSGLKKADSPQDVKIETPGLTTRQRALQSRGGNGESFIEFPDGLPAASSRITNYVIEQKEKLSDVELQAKKAEAAQRRKMQVEKAEKEQQAEAMRKILGLDSEKKKEEKKLKERENREKQAKLEECKKNCVRTVMGPTGTVITFPESMGLPSIFNSKPVSYPPPREKCAGPSCTNPYKYRDSKTLLPLCSLACYKAVQGRPPDQGTDAAQGSGGGQESAGKQA

SEQ ID NO: 179979 - protein, 245 aa, Zea Mays
MSRSGRNGRKKLGDDNEFIEDEESEMEEKSGLKKADSPQDVKIETPGLTTRQRALQSRGGNGESFIEFPDGLPAASSRKQKEKLSDVELQAKKAEAAQRRKMQVEKAEKEQQAEAMRKILGLDSEKKKEEKKLKERENREKQAKLEECKKNCVRTVMGPTGTVITFPESMGLPSIFNSKPVSYPPPREKCAGPSCTNPYKYRDSKTLLPLCSLACYKAVQGRPPDQGTDAAQGSGGGQESAGKQA

SEQ ID NO: 179980 - protein, 261 aa, Zea Mays
MVMPATVAQYLKIIQNPTYAELQMAANQGRRCTWEKLSAIRANCAIELVLDESIAVLNHKRRLKRSMEMTAAASQVHSNYVRLKTPRRIPSWSCISRENSSESLSEEIVSTPTLAHHAQRNSYDGSKSESETIDLNSWTRSGGPLMRTSSADKFISFIHNLEIDTELTRACTVEGNAAGIWSEPTFPSDPPPNNSSSVTMPGRCTENSETEACNTANTRASQASTPTSMAVCEGDLLQPESTSNGILLNIVKRKGMPYGLV

SEQ ID NO: 179981 - protein, 474 aa, Zea Mays
MASATSPAMAANLAGKSGVRVVVIGDPGTGKSSLIVALATEQFPENVPRVMPPTRLPADYFPDRVPITIIDTSSSPEQKPKLIAECQAADAVVLTYACDRPATLERLSSFWLPELRRLQLKAPVIVVGCKLDLRDEQQVSLEQVMAPIMQSFREIETCIECSALRQIQVPEVFYYAQKAVLHPTAPLFDQELQSLKPRCVRALKRIFIICDNDKDGALSDVELNEFQVRCFSAPLQPTEISGVKRVVQEKMPEGVNETGLTLTGFLFLHALFIEKGRLETTWTVLRKFGYDNDIKLRDDLIAVPIKRAPDQTLELTSEVVDFLRGIFNMFDIDNDGALLPAELEDLFSTAPENPWSCDPYKDCAEKNVLGGLSLEGFLSKWALMTLLDPTNSYANLVYVGYPGEFSSAFTVTRKRRVDRKKQQTQRNIFQCFVFGARGSGKTSLLQSFIGRQPSDALPSNSERFATNSVEMADL

SEQ ID NO: 179982 - protein, 264 aa, Zea Mays
MTLLDPTNSYANLVYVGYPGEFSSAFTVTRKRRVDRKKQQTQRNIFQCFVFGARGSGKTSLLQSFIGRQPSDALPSNSERFATNSVEMADGTRKTLILREIPEGDVRSILSDRESLAPCDVAVFVYDSCDEYSWQRARDLLVQVATHGENTGYEVPCLIVAAKDDLDQSSQALQESTRVSQDMGIETPIPISVKLRDLNNIFCRIVHAAQLPHLSIPETEAGKTRRQYRQLLNRSLMVVSVGAAVAVVGLAAYRVYAARKNSSS

SEQ ID NO: 179983 - protein, 133 aa, Zea Mays
MTLLDPTNSYANLVYVGYPGEFSSAFTVTRKRRVDRKKQQTQRNIFQCFVFGARGSGKTSLLQSFIGRQPSDALPSNSERFATNSVEMADGTRKTLILREIPEAVMNIHGKELETCLCKWLHMEKILATKFRA

SEQ ID NO: 179984 - protein, 180 aa, Zea Mays
MGYLSVGTRKTLILREIPEGDVRSILSDRESLAPCDVAVFVYDSCDEYSWQRARDLLVQVATHGENTGYEVPCLIVAAKDDLDQSSQALQESTRVSQDMGIETPIPISVKLRDLNNIFCRIVHAAQLPHLSIPETEAGKTRRQYRQLLNRSLMVVSVGAAVAVVGLAAYRVYAARKNSSS

SEQ ID NO: 179985 - protein, 133 aa, Zea Mays
MQLGKTLPLEASWTSGKISCFLPGDYFATSAGSMLADFRSWGFYPEGNQRFCTDMSSAIIYPVNWCFRFYINGRHHSAPLNAVSDNLLPKLAQLNIVVTTLCFCSLGVLALAVVWYWNFFSLANMLRHLVERT

SEQ ID NO: 179986 - protein, 170 aa, Zea Mays
MSELPIWIPWAVYGLVCKLSYFHKPVVNVTGMPCRDFFMFVFLLQGGWENDETVEEAAAREAIEEAGVRGDIVHFLGSYDFKSKTHQDACCPEGMCRAAVFALHVKEELNSWPEQSTRQRTWLTVPEAASRCRYQWMEEALLTGFSDWHDKWSIGDGGGGGANCVTRPNC

SEQ ID NO: 179987 - protein, 147 aa, Zea Mays
MCDLVARTGRHQQRCIPFRYRANNDETSGDKTKKVVEVLMINSQSGPGLLFPKGGWENDETVEEAAAREAIEEAGVRGDIVHFLGSYDFKSKTHQDACCPEGMCRAAVFALHVKEEALLTGFSDWHDKWSIGDGGGGGANCVTRPNC

SEQ ID NO: 179988 - protein, 239 aa, Zea Mays
MKRGKKTGHPHGELPTSYRPPLSSAAQISPPPLALAALGAAKPPPDREDEKRRGCGRSGRHVRPGGPHGPAPAAVCIPFRYRANNDETSGDKTKKVVEVLMINSQSGPGLLFPKGGWENDETVEEAAAREAIEEAGVRGDIVHFLGSYDFKSKTHQDACCPEGMCRAAVFALHVKEELNSWPEQSTRQRTWLTVPEAASRCRYQWMEEALLTGFSDWHDKWSIGDGGGGGANCVTRPNC

SEQ ID NO: 179989 - protein, 139 aa, Zea Mays
MINSQSGPGLLFPKGGWENDETVEEAAAREAIEEAGVRGDIVHFLGSYDFKSKTHQDACCPEGMCRAAVFALHVKEELNSWPEQSTRQRTWLTVPEAASRCRYQWMEEALLTGFSDWHDKWSIGDGGGGGANCVTRPNC

SEQ ID NO: 179990 - protein, 104 aa, Zea Mays
MTIDAYMLLAFICHSISRKCLLQHIVLACIMLFAFGFQHFLGSYDFKSKTHQDACCPEGMCRAAVFALHVKEEALLTGFSDWHDKWSIGDGGGGGANCVTRPNC

SEQ ID NO: 179991 - protein, 116 aa, Zea Mays
MKTELPYCFVKTMEWPPPSTSPSPSLVVRSPRQTVSLIRNRRPHRDWAPSSRSPSFAARDHGPKPSEVYGFVGSITTVIATAVYLAWAYTPEPVLRSLGITYYPSTGHWRCHRSWL

SEQ ID NO: 179992 - protein, 424 aa, Zea Mays
MGFERVELRCPRELDPRPSWTLGDVLAELDALDATRRAAPPTPLKQPPDWANGGGEKAFVMRVDDDDEDDTEDEDDGTSGGKSRALVAKGARFSCNDLASSDSEDELDGQVAPYHLMEKRDLAKSILLELEHEHHLKVQEEVRSKLASLEVCHQNEIRRTISAFARLQKYAESRKEIDRRLDVHFQRRIAEVLDKHLSMVQRDHEQKSQIVERRIRDDAALEEAKRKEQAVKEEKLRQERAQQEAEARQKEAAKLAAEARKTAFEAAKKEAAEKEAAEKEAAKLRDAAASQPSPNSQNNTAEGIKVFGDKYALEAESRRHALVQNQVPENIHHSKEFSKYDRQIAKSISKLMPTTDSVRTRASELVKALNGQDCPRPISCCLFANKIISIVKSRNTKDKTFGNLAFACGYVMLLVTNQTQWIIF

SEQ ID NO: 179993 - protein, 333 aa, Zea Mays
MVQRDHEQKSQIVERRIRDDAALEEAKRKEQAVKEEKLRQERAQQEAEARQKEAAKLAAEARKTAFEAAKKEAAEKEAAEKEAAKLRDAAASQPSPNSQNNTAEGIKVFGDKYALEAESRRHALVQNQVPENIHHSKEFSKYDRQIAKSISKLMPTTDSVRTRASELVKALNGQDCPRPISCCLFANKIISIVKSRNTKDKTFGNLAFACGYVMLLVTNQVPDAMDYLLAEFNRVCIYTVPKHMHALNAQARNRDYYRLIGYQEENGQLESTESYLTYVVAYVKLYAAMIQTEIKGVRHPHGLAEGWKWLAMFLNSLPATTATACALHAFLKL

SEQ ID NO: 179994 - protein, 291 aa, Zea Mays
MVQRDHEQKSQIVERRIRDDAALEEAKRKEQAVKEEKLRQERAQQEAEARQKEAAKLAAEARKTAFEAAKKEAAEKEAAEKEAAKLRDAAASQPSPNSQNNTAGIKVFGDKYALEAESRRHALVQNQVPENIHHSKEFSKYDRQIAKSISKLMPTTDSVRTRASELVKALNGQDCPRPISCCLFANKIISIVKSRNTKDKTFGNLAFACGYVMLLVTNQVPDAMDYLLAEFNRVCIYTVPKHMHALNAQARNRDYYRLIGYQEENGQLESTESYLTYVVAYVKLYAAMIQI

SEQ ID NO: 179995 - protein, 292 aa, Zea Mays
MVQRDHEQKSQIVERRIRDDAALEEAKRKEQAVKEEKLRQERAQQEAEARQKEAAKLAAEARKTAFEAAKKEAAEKEAAEKEAAKLRDAAASQPSPNSQNNTAEGIKVFGDKYALEAESRRHALVQNQVPENIHHSKEFSKYDRQIAKSISKLMPTTDSVRTRASELVKALNGQDCPRPISCCLFANKIISIVKSRNTKDKTFGNLAFACGYVMLLVTNQVPDAMDYLLAEFNRVCIYTVPKHMHALNAQARNRDYYRLIGYQEENGQLESTESYLTYVVAYVKLYAAMIQI

SEQ ID NO: 179996 - protein, 509 aa, Zea Mays
MGFERVELRCPRELDPRPSWTLGDVLAELDALDATRRAAPPTPLKQPPDWANGGGEKAFVMRVDDDDEDDTEDEDDGTSGGKSRALVAKGARFSCNDLASSDSEDELDGQVAPYHLMEKRDLAKSILLELEHEHHLKVQEEVRSKLASLEVCHQNEIRRTISAFARLQKYAESRKEIDRRLDVHFQRRIEQHLRHQAFLILFQYLYPNAEVLDKHLSMVQRDHEQKSQIVERRIRDDAALEEAKRKEQAVKEEKLRQERAQQEAEARQKEAAKLAAEARKTAFEAAKKEAAEKEAAEKEAAKLRDAAASQPSPNSQNNTAEGIKVFGDKYALEAESRRHALVQNQVPENIHHSKEFSKYDRQIAKSISKLMPTTDSVRTRASELVKALNGQDCPRPISCCLFANKIISIVKSRNTKDKTFGNLAFACGYVMLLVTNQVPDAMDYLLAEFNRVCIYTVPKHMHALNAQARNRDYYRLIGYQEENGQLESTESYLTYVVAYVKLYAAMIQI

SEQ ID NO: 179997 - protein, 157 aa, Zea Mays
MAAASSPAASAASPGRGAGDPPAAAAAATARTAGCPCPICLEAFKDEAYLDTCFHSFCYRCICQWVRIVASKHAEPLSSVRCPLCKTENLSVIHAFDGESFERWYINQEPRKRRLSDAHELVSQFYNMKGLMLAELSRDHKQHFWGAAILGATKISP

SEQ ID NO: 179998 - protein, 157 aa, Zea Mays
MAAASSPAASAASPGRGAGDPPAAAAAATARTAGCPCPICLEAFKDEAYLDTCFHSFCYRCICQWVRIVASKHAEPLSSVRCPLCKTENLSVIHAFDGESFERWYINQEPRKRRLSDAHELVSQFYNMKGPQATFLGCSNTGSNKDISVRKFGFKPG

SEQ ID NO: 179999 - protein, 163 aa, Zea Mays
MKETTSNISGVQQYWEQQRYLRKKIWLQTWLRREIQALTRDENVEVIVHHIHGVMGSFMKRLEKEHTSSRWTTSPEKRREEFRRLVSDAARPFLLGRTERFVAEVELFLASDLNMEAYNKLRVQRFRESSSHLTREQDALPRDRSLEEHYMYFLCNDTDCDEM

SEQ ID NO: 180000 - protein, 112 aa, Zea Mays
MCIPCSHRFLDKLPVVHWHLLTDKSIDPTYLVVMTATAAVGAATLLQRVIQIRTKPTPPNPRRPSSVQAFHSSTSCAGHQSRAIRKAVAQSAVHRFSAFKLLKRFSRVSSKN

SEQ ID NO: 180001 - protein, 157 aa, Zea Mays
MLSHRGCCEIRLCKMEVLKKSHTSVEDSDHIFLESSGLQDGLSCKKDLHSCGTKASDEEISDRLQENHDNTQPSDNHNYSVDQTQLPFLQALLRVQMKRSHRFLDKLPVVHWHLLTDKSIDPTYLVVMTATAAVGAATLLQRVIQIRMCLAIFLFPS

SEQ ID NO: 180002 - protein, 116 aa, Zea Mays
MLSHRGCCEIRLCKMEVLKKSHTSVEDSDHIFLESSGLQDGLSCKKDLHSCGTKASDEEISDRLQENHDNTQPSDNHNYSVDQTQLPFLQALLRVQMKRRCVYSSITHLNFPQQPL

SEQ ID NO: 180003 - protein, 621 aa, Zea Mays
MVVVVSTSLCSFLPAHPFSLARPRRPHPTNPTAKPLSRTLSIRCIATTAAGPPPLPPPKLVRCPALDRQAARASRLRFARKLLTLLLSKPRHFLPLRVLNRCRRFLGLPRRGRPLIPMVLRYPTLFRLFQAHTSLPLSPSLSTLAVALTPAAEALAADLAALRATGTGAGALAAKIHRLLLMTPRRNIPVNRLVHLAPDLGFSMDFRATLCPRHPDLFRLVNTSRGHALQLADPPPTPPPPPLSLRPAAPPDRLMDRPRRFPHLPLRRGLNLRRVHRDYLLRFHSLPEVSPFEPLDEGASLEMLERRACAVVREVLAMTVEKRTLVDHLTHFRKDLGLPNRLRAMLVRHPELFYVSVKGVRHSVFLVEAFDDDGRLLVEDEMLVGRDRLEELVREGKRMRRARKKGVLTFDGDSDEDEDDDAAEEEGSLKVDDEFGDLFEDGVIGEDWEEVGDGGGSDAYEEYDAESGDMEEFWVKKAVAQGLVGNGNEQDVWRYCSKVKEQCSADMIHAEDAFKSSWIYHAEVMMAEFCTVCIEKNLIDKMIDLPWDSEEDKHLHKFLFNSAREVRMKPNDSLLVVYYLGIQVSGYAEKPFILNGTGVAQNGPAKRSVSGYAGYQPRITS

SEQ ID NO: 180004 - protein, 494 aa, Zea Mays
MVVVVSTSLCSFLPAHPFSLARPRRPHPTNPTAKPLSRTLSIRCIATTAAGPPPLPPPKLVRCPALDRQAARASRLRFARKLLTLLLSKPRHFLPLRVLNRCRRFLGLPRRGRPLIPMVLRYPTLFRLFQAHTSLPLSPSLSTLAVALTPAAEALAADLAALRATGTGAGALAAKIHRLLLMTPRRNIPVSPFEPLDEGASLEMLERRACAVVREVLAMTVEKRTLVDHLTHFRKDLGLPNRLRAMLVRHPELFYVSVKGVRHSVFLVEAFDDDGRLLVEDEMLVGRDRLEELVREGKRMRRARKKGVLTFDGDSDEDEDDDAAEEEGSLKVDDEFGDLFEDGVIGEDWEEVGDGGGSDAYEEYDAESGDMEEFWVKKAVAQGLVGNGNEQDVWRYCSKVKEQCSADMIHAEDAFKSSWIYHAEVMMAEFCTVCIEKNLIDKMIDLPWDSEEDKHLHKFLFNSAREVRMKPNDSLLVVYYLGVNILIFFPFLCI

SEQ ID NO: 180005 - protein, 117 aa, Zea Mays
MSFVYLSTVLLIAFGFHGFCLHYLIFVMHPHFLCRRHALLLPKISCTETHPKIAQLLEHHKPNVSLLMLKCAECDSFSATENFEKDGVSSLKEAATVSVLELNVPSCQKRLCIIGGT

SEQ ID NO: 180006 - protein, 296 aa, Zea Mays
MTKSGALQLARSTGGSLSKDQVKSAVDQYVKYHDLHGGEQESRKSNYADLANKYYDLVTGFYEYGWGDSFHFAGGYPGETSREAIKRHQHFMALQLGLKKGMKVLDVGCGIGGPLIEIARFSSTSITGLTNNDYHVSRGKEHIFSAGLSEQCCSLKGDFMNMPIADNTFDAAYAIQATCYAPEAQGVYSEVYRVLKPGQYFALDEWCLTDRFDPNNAKHLTAKAEIELGDGLPDIRTTRQCVQAMKDAGFEVIFAKDLAQDFPCPWYQTMDPNYFSWANFQCTRPGRIITRAILIL

SEQ ID NO: 180007 - protein, 262 aa, Zea Mays
MALQLGLKKGMKVLDVGCGIGGPLIEIARFSSTSITGLTNNDYHVSRGKEHIFSAGLSEQCCSLKGDFMNMPIADNTFDAAYAIQATCYAPEAQGVYSEVYRVLKPGQYFALDEWCLTDRFDPNNAKHLTAKAEIELGDGLPDIRTTRQCVQAMKDAGFEVIFAKDLAQDFPCPWYQTMDPNYFSWANFQCTRPGRIITRAIVNTLEFLRIAPAGSVGAYNVLTSASDGLLKGGREGIFTASFFVLGRKPLKESEIVNGGNL

SEQ ID NO: 180008 - protein, 333 aa, Zea Mays
MTKSGALQLARSTGGSLSKDQVKSAVDQYVKYHDLHGGEQESRKSNYADLANKYYDLVTGFYEYGWGDSFHFAGGPILPCLYFRYPGETSREAIKRHQHFMALQLGLKKGMKVLDVGCGIGGPLIEIARFSSTSITGLTNNDYHVSRGKEHIFSAGLSEQCCSLKGDFMNMPIADNTFDAAYAIQATCYAPEAQGVYSEVYRVLKPGQYFALDEWCLTDRFDPNNAKHLTAKAEIELGDGLPDIRTTRQCVQAMKDAGFEVIFAKDLAQDFPCPWYQTMDPNYFSWANFQCTRPGRIITRAILILFLSGQYTRVPPYCPSRQRGSLQRPNECL

SEQ ID NO: 180009 - protein, 351 aa, Zea Mays
MQTVLPSAAARTSFDELPEPAEHNRRYVKYHDLHGGEQESRKSNYADLANKYYDLVTGFYEYGWGDSFHFAGGYPGETSREAIKRHQHFMALQLGLKKGMKVLDVGCGIGGPLIEIARFSSTSITGLTNNDYHVSRGKEHIFSAGLSEQCCSLKGDFMNMPIADNTFDAAYAIQATCYAPEAQGVYSEVYRVLKPGQYFALDEWCLTDRFDPNNAKHLTAKAEIELGDGLPDIRTTRQCVQAMKDAGFEVIFAKDLAQDFPCPWYQTMDPNYFSWANFQCTRPGRIITRAIVNTLEFLRIAPAGSVGAYNVLTSASDGLLKGGREGIFTASFFVLGRKPLKESEIVNGGNL

SEQ ID NO: 180010 - protein, 326 aa, Zea Mays
MYVKYHDLHGGEQESRKSNYADLANKYYDLVTGFYEYGWGDSFHFAGGYPGETSREAIKRHQHFMALQLGLKKGMKVLDVGCGIGGPLIEIARFSSTSITGLTNNDYHVSRGKEHIFSAGLSEQCCSLKGDFMNMPIADNTFDAAYAIQATCYAPEAQGVYSEVYRVLKPGQYFALDEWCLTDRFDPNNAKHLTAKAEIELGDGLPDIRTTRQCVQAMKDAGFEVIFAKDLAQDFPCPWYQTMDPNYFSWANFQCTRPGRIITRAIVNTLEFLRIAPAGSVGAYNVLTSASDGLLKGGREGIFTASFFVLGRKPLKESEIVNGGNL

SEQ ID NO: 180011 - protein, 398 aa, Zea Mays
MAKSGALELARSTGGSLSKDQVKSAVDQGCLCRTTPLLASSNRSSSRPDVAAPNTATRLFLPHAALAPFSWYVKYHDLHGGKQESRKSNYTDLANKYYDLVTGFYEYGWGDSFHLAGGYPGETSREAIKRHQHFLALQLGLKKGMKVLDVGCGIGGPLIEIARFSSTSITGLNNNDYHISRGKELIFSAGLSEQCCFLKGDFMDMPISDNTFDAAYAIQATCHAPDAQGVYSEVYRVLKPGQYFALDEWCLTDRFDPNNAKHLAIKAEIELGDGLPDIRTTRQCVQAMKDAGFEVVFAKDLAQVFPCPWYRVMDPTYFSWAHFQCTRPGRIVTRAIVNTLEFLRIAPAGSMGAYNVLMSASDGLLKGGREGIFTATFFVLGRKPLKEVDIVSLSRKLI

SEQ ID NO: 180012 - protein, 222 aa, Zea Mays
MRPMQYRLHVMHQMQYVSCHTCVRVKVKVSQEYHRFSVCLRFFSSNPWLPQQGVYSEVYRVLKPGQYFALDEWCLTDRFDPNNAKHLAIKAEIELGDGLPDIRTTRQCVQAMKDAGFEVVFAKDLAQVFPCPWYRVMDPTYFSWAHFQCTRPGRIVTRAIVNTLEFLRIAPAGSMGAYNVLMSASDGLLKGGREGIFTATFFVLGRKPLKEVDIVSLSRKLI

SEQ ID NO: 180013 - protein, 362 aa, Zea Mays
MEAAAASAAAVGGSGAGLTRWQAAALAALAGWVWAASFYDLTRRARALVQPWVTRRVHAETPAILRFQDMVSAPRPCSPPIRRVTATEDEKENAMEYGLPSSHALNTVCLTGYLLHYVLTYGEHGSLTVAAGLSLALLLVMLVGIARIYLGMHSLTDVVAGIGFGIVILAFWLAVHDHVDAFVVSGQNVATFWAGLALLMCFAYPKPEFPTPSFEFHTAFNGVAFGIVYGIQQTYFHFHAPDAPIVFSAELPFLAFAGRVLVGIPTILAVKSCSKALSRWLLPVMCSTLGIPIVSSCYVPALKIDGGSSKSRQAAGGHLQRLLSHFPQKAYDVDTGIRFVQYASLAWSVVDLVPAIFAHLDL

SEQ ID NO: 180014 - protein, 231 aa, Zea Mays
MEKSMVADNDSGKSVASQARTSSGTFLAKREDEIVSAIEKRVAAWTFLPEENAESLQVLRYETGQKYDAHFDYFHDRNNLKLGGQRVATVLMYLTDVNKGGETVFPNAEGSHLQYKDETWSECSRSGLAVKPKKGDALLFFNLHVNATADTGSLHGSCPVIEGEKWSATKWIHVRSFDNPPDVRTDAPCSDDKELCPRWAAIGECHRNPTYMVGTKDTLGFCRKSCGICDA

SEQ ID NO: 180015 - protein, 194 aa, Zea Mays
MAPPLALLLLAAIVLSRAVSHAHGGGGGFYDPASVTQLSSRPRAFLYSGFLSDTECDHLVSLAKGSMEKSMVADNDSGKSVASQARTSSGTFLAKREDEIVSAIEKRVAAWTFLPEENAESLQVLRYETGQKYDAHFDYFHDRNNLKLGGQRVATVLMYLTDVNKGGETVFPNAEGSHLQYKDETWSECSRSGL

SEQ ID NO: 180016 - protein, 91 aa, Zea Mays
MARSAVAVRRAALAIVFGGLLLMSLVMDDVKKAAIGGRRMLARGDGRGQSTLEDFQAADVPFQDSKRRVPNGPDPIHNRGTGKSGRSPGRA

SEQ ID NO: 180017 - protein, 586 aa, Zea Mays
MCPAAATTSSAKPSKKRKQPVIAPPESDSEEESVYDTASDDDEEEEETQELESEDVDEEVEEGSEGGEENEIGDDSEVEEEEVKEKKEKEETVKEKKEKKDMKQEGKKAKKQEEKKAKKDKKEEEKKVMEDKKEEEKKAKKKSEGSGILSNKLFSELPLSELTAKAIREMNYTHLTQIQARSIPHLLEGNDVMGAAKTGSGKTLAFLIPAIEMLYHTHFSPRNGTGAIVVCPTRELAIQTHNVAKELMKYHSQTLRYVIGGNNRRSEADQLAKGINLLVATPGRLLDHLQNTKSFIYRRLKCLVIDEADRILEQNFEEDMKQIFKRLPQNRQTVLFSATQTPEVEKFAKLSFEKNEESKKKPVYVGVDDDKSKATVEGLQQGYCVISSDKRFLVLYAFLRKKRNKKIMVFFSSCNSVKFHAELLNFLGIECSDIHGKQKQQKRTTTFFSFCKAEKGILLCTNVAARGLDIPDVDYILQYDPPDEPKDYIHRVGRTARGEKGKGSALLFLLPEELKFLIYLKAAKVTLTEYEFNQKNVPNLQSQLENIVGENYFLNQSAKEAYRSYVLAYDSHSMKDIFNVHQLDLK

SEQ ID NO: 180018 - protein, 646 aa, Zea Mays
MCPAAATTSSAKPSKKRKQPVIAPPESDSEEESVYDTASDDDEEEEETQELESEDVDEEVEEGSEGGEENEIGDDSEVEEEEVKEKKEKEETVKEKKEKKDMKQEGKKAKKQEEKKAKKDKKEEEKKVMEDKKEEEKKAKKKSEGSGILSNKLFSELPLSELTAKAIREMNYTHLTQIQARSIPHLLEGNDVMGAAKTGSGKTLAFLIPAIEMLYHTHFSPRNGTGAIVVCPTRELAIQTHNVAKELMKYHSQTLRYVIGGNNRRSEADQLAKGINLLVATPGRLLDHLQNTKSFIYRRLKCLVIDEADRILEQNFEEDMKQIFKRLPQNRQTVLFSATQTPEVEKFAKLSFEKNEESKKKPVYVGVDDDKSKATVEGLQQGYCVISSDKRFLVLYAFLRKKRNKKIMVFFSSCNSVKFHAELLNFLGIECSDIHGKQKQQKRTTTFFSFCKAEKGILLCTNVAARGLDIPDVDYILQYDPPDEPKDYIHRVGRTARGEKGKGSALLFLLPEELKFLIYLKVTLTEYEFNQKNVPNLQSQLENIVGENYFLNQSAKEAYRSYVLAYDSHSMKDIFNVHQLDLQKVAASFGFKNPPKVNLDLDSSAAKHRKKMRRVDGGKRHGISASNPYGRKDKGGAGDKRQLARF

SEQ ID NO: 180019 - protein, 646 aa, Zea Mays
MCPAAATTSSAKPSKKRKQPVIAPPESDSEEESVYDTASDDDEEEEETQELESEDVDEEVEEGSEGGEENEIGDDSEVEEEEVKEKKEKEETVKEKKEKKDMKQEGKKAKKQEEKKAKKDKKEEEKKVMEDKKEEEKKAKKKSEGSGILSNKLFSELPLSELTAKAIREMNYTHLTQIQARSIPHLLEGNDVMGAAKTGSGKTLAFLIPAIEMLYHTHFSPRNGTGAIVVCPTRELAIQTHNVAKELMKYHSQTLRYVIGGNNRRSEADQLAKGINLLVATPGRLLDHLQNTKSFIYRRLKCLVIDEADRILEQNFEEDMKQIFKRLPQTVLFSATQTPEVEKFAKLSFEKNEESKKKPVYVGVDDDKSKATVEGLQQGYCVISSDKRFLVLYAFLRKKRNKKIMVFFSSCNSVKFHAELLNFLGIECSDIHGKQKQQKRTTTFFSFCKAEKGILLCTNVAARGLDIPDVDYILQYDPPDEPKDYIHRVGRTARGEKGKGSALLFLLPEELKFLIYLKAAKVTLTEYEFNQKNVPNLQSQLENIVGENYFLNQSAKEAYRSYVLAYDSHSMKDIFNVHQLDLQKVAASFGFKNPPKVNLDLDSSAAKHRKKMRRVDGGKRHGISASNPYGRKDKGGAGDKRQLARF

SEQ ID NO: 180020 - protein, 153 aa, Zea Mays
MRRWHFGAASDQAGDNIADGLFMAFRAKAFFHYRCAAPVACWVDRTACVSISGMRSNCSFYKRNSFYKRKRRAEENENEKQRRAHTLRRHRSKAPDTATPIPSGSLEQRLSQNAHSHKGAIEICICYCFRARLVYNFACVQKLYKILGQCADC

SEQ ID NO: 180021 - protein, 84 aa, Zea Mays
MTCGVHGIYLKFGSFNGIDPIVPFIKGILFIKGREEQKRMRMKSKGGHTLYDDTGARLPTRRHPFHLEVWNRGYPRMPTATRVP

SEQ ID NO: 180022 - protein, 344 aa, Zea Mays
MQHQGPAREKEKRGKERNELRDLVGKNLHVLGQIDGVDLDMYKETVLPRILEQVVNCKDDLAQFYLMDCIIQVFPDEYHLQTLETLLSAFPQLQPSVDIKTVLSQLMDRLSNYAASSPELLPEFLQVEAFAKFSNAIGKVIEAQPDMPVVGAITLYKLSGKAKLEDSRATKQIVALLSAPLEKYSNIVTALELSNYPRVMDYLDNATTKVMAVVIIQSIMKNTTCISTSDKIEALFDLIKGLIKDMDGAQDDELDEEDFKEEQNSVARLIHMLHNDDPEEMLKILCTVQKHILQGGPKRLTFTVPSLVFSSLKLVRRLQGQDGDVTGEDVPATPKKIFQILHQS

SEQ ID NO: 180023 - protein, 454 aa, Zea Mays
MPVVGAITLYVSLLTFTLRVHPDRLDYVDQVLGACVKKLSGKAKLEDSRATKQIVALLSAPLEKYSNIVTALELSNYPRVMDYLDNATTKVMAVVIIQSIMKNTTCISTSDKIEALFDLIKGLIKDMDGAQDDELDEEDFKEEQNSVARLIHMLHNDDPEEMLKILCTVQKHILQGGPKRLTFTVPSLVFSSLKLVRRLQGQDGDVTGEDVPATPKKIFQILHQTIEALSCVPSPELALRLYLQCAEAANDCDLEPVAYEFFTQAFILYEEEITDSKAQITAIHLIIGTLQRMNIFGVENRDTLTHKTTGYSAKLLKKPDQCRAVYACSHLFWTDDQDGIMDGERVLLCLKRALRIANAAQQMASATRGSSGSVTLFIEILNKYLYFFEKGIPQITNTVIQDLIELIRTEKQSDNSVADPSTEAFFSSTLRYIEFQKQKGGTIGEKYEQIKTSS

SEQ ID NO: 180024 - protein, 375 aa, Zea Mays
MYKETVLPRILEQVVNCKDDLAQFYLMDCIIQVFPDEYHLQTLETLLSAFPQLQPSVDIKTVLSQLMDRLSNYAASSPELLPEFLQVEAFAKFSNAIGKVIEAQPDMPVVGAITLYVSLLTFTLRVHPDRLDYVDQVLGACVKKLSGKAKLEDSRATKQIVALLSAPLEKYSNIVTALELSNYPRVMDYLDNATTKVMAVVIIQSIMKNTTCISTSDKIEALFDLIKGLIKDMDGAQDDELDEEDFKEEQNSVARLIHMLHNDDPEEMLKILCTVQKHILQGGPKRLTFTVPSLVFSSLKLVRRLQGQDGDVTGEDVPATPKKIFQILHQVFIIILHASNFGYSIITDAYTVNMFSVFLTFCPWKSLGITHVFRH

SEQ ID NO: 180025 - protein, 118 aa, Zea Mays
MSSSLWKSKVLLCLKRALRIANAAQQMASATRGSSGSVTLFIEILNKYLYFFEKGIPQITNTVIQDLIELIRTEKQSDNSVADPSTEAFFSSTLRYIEFQKQKGGTIGEKYEQIKTSS

SEQ ID NO: 180026 - protein, 319 aa, Zea Mays
MVAEKGSEKSRGFGFVQFATVQDADRALQQKNGSPVAGRKIRVKLAMNRAPLKERLQKGNMQVKDSDAKDEADEISPAEKHKGKSHKTDPEQLHLLSNDAKVSKEAPIGDSEKVKNSEKQRVAKTVIFGGLQDSAMATEVFRQAREIGSVVSVNYPLPKEEMRFNGLARDGCTSDMAAVLFASVKSAWDSVVQLHNKEVKGATVWARQLGGEGSKIRKWRAIVRNLPFKITEKEIVDMFSSAGFVWDVTIPHKSDEGISKGFAFVSFTRKQDAENAIKNINGKDVAKRPVAVDWAVPKKVYTVAAKVDAKDNGNRVIFC

SEQ ID NO: 180027 - protein, 144 aa, Zea Mays
MAAVLFASVKSAWDSVVQLHNKEVKGATVWARQLGGEGSKIRKWRAIVRNLPFKITEKEIVDMFSSAGFVWDVTIPHKSDEGISKGFAFVSFTRKQDAENAIKNINGKDVAKRPVAVDWAVPKKVYTVAAKVDAKDNGNRVIFC

SEQ ID NO: 180028 - protein, 724 aa, Zea Mays
MAEYENELSTSDPAKAHKLFNSKAKDFSFQKRKIDSVKNLYYAMRKRVRNDPRNSGDLGFLVPCSCTAIGSECICGGLPNNIEPELNSVSRYGQVGSRYTIGHSYSEMNEHAFHTKHTESMTRDGDGTSNVVYGYSDVGQLYEHHAYTANNHGNREGNNLSLKSITNFQDSMQFQQLDNNQCGNGVVDSKALVIPNHFSGSVQEPMPLQMIGQPEGSEAPGGAILSLQRSDRLALADDKDVKSEDRDPLTFEAHLDGGISGLDHATEFMDFPYFTNSEDLDILNSENLLNSPSEGIQEDLDDTALVVHGVRSTMQNLVHADEANMSCDQIDLGDVKNNVDASGIILFPTSLVVPCPGLYVECKLNTEDTEIPCNDDVSTPTEYPLECCTSTFGQKSENTIYSVSPAISPPSIAEQPNPSTSEQKEDSVAHDEGGVLGAKPSEGALTVGGLLPGNIDTNDANTCMLALPSFSTAGFGEGSPCSLGPHESFDNSHGLTLQNSVQAPDQMQHNSLDGKPELGDKAALQNCMPSNALPDLDIQNTIANAPTPAQAEECPDYEKDVPNYYDLEALILDQDLIPWDQDSDFMHPEVTGFPHPESRKALIRLEQGARSCMNRAIMSHGAFAVIYGLHLRCYIKDPEVTLGRETEDIKVDIDLGKEGRANKISRRQNTGKCPIFVNSKEIPSCKRINLSSDSLIEIKDMRFIFHVNQEAVRQYIDRDLKPER

SEQ ID NO: 180029 - protein, 826 aa, Zea Mays
MGAMSASISSVNWLVEDDILLKNAVEHGTSSSPVSEAATGDLPQAGASLESLARGAVCFSRKFTLHEIQDRWNSLLYDPDISTQAASRMAEYENELSTSDPAKAHKLFNSKAKDFSFQKRKIDSVKNLYYAMRKRVRNDPRNSGDLGFLVPCSCTAIGSECICGGLPNNIEPELNSVSRYGQVGSRYTIGHSYSEMNEHAFHTKHTESMTRDGDGTSNVVYGYSDVGQLYEHHAYTANNHGNREGNNLSLKSITNFQDSMQFQQLDNNQCGNGVVDSKALVIPNHFSGSVQEPMPLQMIGQPEGSEAPGGAILSLQRSDRLALADDKDVKSEDRDPLTFEAHLDGGISGLDHATEFMDFPYFTNSEDLDILNSENLLNSPSEGIQEDLDDTALVVHGVRSTMQNLVHADEANMSCDQIDLGDVKNNVDASGIILFPTSLVVPCPGLYVECKLNTEDTEIPCNDDVSTPTEYPLECCTSTFGQKSENTIYSVSPAISPPSIAEQPNPSTSEQKEDSVAHDEGGVLGAKPSEGALTVGGLLPGNIDTNDANTCMLALPSFSTAGFGEGSPCSLGPHESFDNSHGLTLQNSVQAPDQMQHNSLDGKPELGDKAALQNCMPSNALPDLDIQNTIANAPTPAQAEECPDYEKDVPNYYDLEALILDQDLIPWDQDSDFMHPEVTGFPHPESRKALIRLEQGARSCMNRAIMSHGAFAVIYGLHLRCYIKDPEVTLGRETEDIKVDIDLGKEGRANKISRRQAVIKMDESGYFHIKNTGKCPIFVNSKEIPSCKRINLSSDSLIEIKDMRFIFHVNQEAVRQYIDRDLKPER

SEQ ID NO: 180030 - protein, 718 aa, Zea Mays
MAGASLESLARGAVCFSRKFTLHEIQDRWNSLLYDPDISTQAASRMAEYENELSTSDPAKAHKLFNSKAKDFSFQKRKIDSVKNLYYAMRKRVRNDPRNSGDLGFLVPCSCTAIGSECICGGLPNNIEPELNSVSRYGQVGSRYTIGHSYSEMNEHAFHTKHTESMTRDGDGTSNVVYGYSDVGQLYEHHAYTANNHGNREGNNLSLKSITNFQDSMQFQQLDNNQCGNGVVDSKALVIPNHFSGSVQEPMPLQMIGQPEGSEAPGGAILSLQRSDRLALADDKDVKSEDRDPLTFEAHLDGGISGLDHATEFMDFPYFTNSEDLDILNSENLLNSPSEGIQEDLDDTALVVHGVRSTMQNLVHADEANMSCDQIDLGDVKNNVDASGIILFPTSLVVPCPGLYVECKLNTEDTEIPCNDDVSTPTEYPLECCTSTFGQKSENTIYSVSPAISPPSIAEQPNPSTSEQKEDSVAHDEGGVLGAKPSEGALTVGGLLPGNIDTNDANTCMLALPSFSTAGFGEGSPCSLGPHESFDNSHGLTLQNSVQAPDQMQHNSLDGKPELGDKAALQNCMPSNALPDLDIQNTIANAPTPAQAEECPDYEKDVPNYYDLEALILDQDLIPWDQDSDFMHPEVTGFPHPESRKALIRLEQGARSCMNRAIMSHGAFAVIYGLHLRCYIKDPEVTLGRETEDIKVDIDLGKEGRANKISRRQEMANA

SEQ ID NO: 180031 - protein, 141 aa, Zea Mays
MGSFLSSLVTPPPAADDPNCAVVAAHSKATYDEQWAAHKSSSKLMVIDFSASWCGPCRFIEPAFKELASRFSDAIFVKVDVDELAEVARTWKVEAMPTFVLVKDGKEEHGACTIHHPLPEETRNVSVSEQRVRDSNYGPPL

SEQ ID NO: 180032 - protein, 158 aa, Zea Mays
MSDCKPCSTPVDTQTKLSEDDGPPVVDATSYRSLTGALQHLTFSRPDIVYAVQQVCLHMHTPREPHLTALKRILRYLRGLLDYGLLLRPSSTSDLVVYTDVDWVGCLETRRSTSGYAVFLGANLVSWAAKRQPVISRSSADAEYRAVANGVAEASWMR

SEQ ID NO: 180033 - protein, 53 aa, Zea Mays
MCLIHRVLNAIHERVQRCVLAQPAPPPHNTLLTHTVFNEVCSCLMKYNIYFPN

SEQ ID NO: 180034 - protein, 59 aa, Zea Mays
MYDKLWRRHRLDVVQSGCSVLSIVKQGDFMVVANIGDSRVVLGTAFSDDAITSSSSSST

SEQ ID NO: 180035 - protein, 109 aa, Zea Mays
MIVLQDIIDVLARFENHNRDSRGKLFDKNDNDRAMIFILKTIVIFAESFRFRSIYLVVRLRIRDDENSSEIDCNYWLLLHDCGHYLRHLMALCQEGSLSGLNTVAIAYF

SEQ ID NO: 180036 - protein, 1038 aa, Zea Mays
MAYRGGGGRGGGGRDGDQQRPPHVHGRGAGGPGGGRTFVWPPPPSSTPRPVPPYHHHHHHQVPMGYRAPIVLPHQAAYGVPMAVYRGAPAPAYRVPAPASPRPRVSFSPAPPASPVTIRAPPPSPTTPPAAPTTPAPPRQPAPAPAPEPAPAPPPAPSLAALAKEVEKKLFVSETALAPAAAAAAAAAAQGTAGAGADDAASDVDLAPVSKKGLAHPARPALATVGRNVFVRANHFLVHVADNNLFHYDVAINPESKSRATNREVLNELIKLHGKTSLGGKLPAYDGRKSLYTAGSLPFESEEFVVTLVDPEKKEKERVEREYKITIRIAGRTDFYHLQQFLLGRQRDMPQETIQVLDVVLRESPSWNYVTVSRSFFSTTFGHRGDIGEGLECWRGYYQSLRPTQMGLSLNIDISATSFFKPVTIIKFVEEFLNLRDTSRPLFDRDRVKIKKALRGVRIETTHQQDQIRRYKITGITPIPMSQLIFPVDDKGTRKTVVQYFLDKYDYRLKYVSWPCLQAGSDSRPVYLPMEVCKIVEGQRYSKKLNDRQVTNILRATCKRPQEREKSIRDMVLHNKYADDKFAQEFGIEVSSDLVTVPARVLPPPLLKYHDSGREKTCAPSVGQWNMINKKMINGGTIDNWTCLNFSRMRPDEVQRFCMDLTHMCNATGMVVNPRPFIEVRSAAPNHIENALRDVHKRATQILAQQAVGNQLQLLIVILPEVSGSYGKIKRVCETDIGIVSQCCLPKHASRPNKQYLENVALKINVKVGGRNTVLERAFSHDGIPFVSEVPTIIFGADVTHPPPGEDSASSIAAVVASMDWPEITKYRGLVSAQPHRQEIIEDLFTVSKDPQMGHNVNGGMIRDGVSEGQFSHVLLHEMDAIRKKRHHTRLFPEVHGRRDMTDKSGNILPGTVVDQMICHPTEFDFYLCSHAGIQGTSRPTHYHVLYDENEFTADALQSLTNNLCYTYARCTRAVSVVPPAYYAHLAAFRARYYVEGESSDGGSTPGSSGQTVAREGPVEVRQLPKIKDNVKDVMFYC

SEQ ID NO: 180037 - protein, 586 aa, Zea Mays
MGLSLNIDISATSFFKPVTIIKFVEEFLNLRDTSRPLFDRDRVKIKKALRGVRIETTHQQDQIRRYKITGITPIPMSQLIFPVDDKGTRKTVVQYFLDKYDYRLKYVSWPCLQAGSDSRPVYLPMEVCKIVEGQRYSKKLNDRQVTNILRATCKRPQEREKSIRDMVLHNKYADDKFAQEFGIEVSSDLVTVPARVLPPPLLKYHDSGREKTCAPSVGQWNMINKKMINGGTIDNWTCLNFSRMRPDEVQRFCMDLTHMCNATGMVVNPRPFIEVRSAAPNHIENALRDVHKRATQILAQQAVGNQLQLLIVILPEVSGSYGKIKRVCETDIGIVSQCCLPKHASRPNKQYLENVALKINVKVVASMDWPEITKYRGLVSAQPHRQEIIEDLFTVSKDPQMGHNVNGGMIRDGVSEGQFSHVLLHEMDAIRKKRHHTRLFPEVHGRRDMTDKSGNILPGTVVDQMICHPTEFDFYLCSHAGIQGTSRPTHYHVLYDENEFTADALQSLTNNLCYTYARCTRAVSVVPPAYYAHLAAFRARYYVEGESSDGGSTPGSSGQTVAREGPVEVRQLPKIKDNVKDVMFYC

SEQ ID NO: 180038 - protein, 65 aa, Zea Mays
MGQILFSRDQLHTDTSQRRAYQSIRQQDVDKKVKSICYCDMIFFRWLLILFGSRMLNVLSAKHPV

SEQ ID NO: 180039 - protein, 124 aa, Zea Mays
MALGDSATTSSVAKLSISGADLTVLLHSCLSCNQRLKQPPLRPCFAPAHAIGRSLGLHRHRCHDDPSCPRALLVVLFPVLSHPWVHAFVSLIMFPCFLVPHMVHARRLIQCSCLSDAIGGRGGG

SEQ ID NO: 180040 - protein, 104 aa, Zea Mays
MNRCPSEWYFQKFLEEAVLDSPGPVAGVGRSSGQAGVEAAESKPLGAAAPASVSSSVVDPVEYNAMLKQKLEKDLAAIAMWRVRPLAFSCSSPAILFASNSQSS

SEQ ID NO: 180041 - protein, 50 aa, Zea Mays
MTRQCYADRPRRSKCWCAFPSDALGSGAVADGCTLLPTIDTAGFVSKFQL

SEQ ID NO: 180042 - protein, 69 aa, Zea Mays
MTIKLAFGITRGIQTQFMFGCTKHGIEFVKRSSECRSDSPQNAELVLDSISSFEFCTSKTGIRAVQYQL

SEQ ID NO: 180043 - protein, 78 aa, Zea Mays
MVLMVFSLIQIFFPLGKISVMIYGGLASLIFCGYIIYDTDNIIKRHTYDQYIWAAVSLYLDVINLFLSLLQLLRAADS

SEQ ID NO: 180044 - protein, 52 aa, Zea Mays
MTRQCYADRPRRSKCWCAFPSDALGSGAVADGCTLLPTIDTVAAGFVSKFQL

SEQ ID NO: 180045 - protein, 232 aa, Zea Mays
MFGYRKADPDLEAGGSSLLYPGMTESPELRWAFVRKIYVILTVQLAMTAAVSAFVVKVPAVSNFFVSSNAGIALYIFLIVLPFIVLCPLHYYHQKHPINLLLLGLFTVAISFAVGMTCAFTSAVVVNSLTAYTFWAAKRGHDFNFLGPFLIAAIMVLMVFSLIQIFFPLGKISVMIYGGLASLIFCGYIIYDTDNIIKRHTYDQYIWAAVSLYLDVINLFLSLLQLLRAADS

SEQ ID NO: 180046 - protein, 124 aa, Zea Mays
MFGYRKADPDLEAGGSSLLYPGMTESPELRWAFVRKIYVILTVQLAMTAAVSAFVVKVPAVSNFFVSSNAGIALYIFLIVLPFIVLCPLHYYHQKHPINLLLLGLFTVAISFAVGMTSTFSAPS

SEQ ID NO: 180047 - protein, 542 aa, Zea Mays
MAAALASSPLVHLSTSRLRLPRPRASSSSAPGCSIGVCLGWRLKVGWRALRRCDRLRCFSTDGDGVEEGEKRGEEEASATAAPAPDPAPAETQVGAAEELASERSRSGSFSSSSSSGNPGVSSEPPLLSFSVDNIDTVKLLELLGPEKVDPVDVMAIKEKLFGYTTFWLTKEEPFGDLGEGVLFIGNLRGKREEIFAKLQRQLRELAGEKYNLFMVEEPNSEGDDPRGGPRVSFGLLRKEVSEPGPTTLWQYVISLSLFLLTMFSCVELGIASKISSLPPEIVSYFTDPNSTGPPPDMQLLLPFVESALPVAYGVLAIQLFHEIGHFLAAFPKNVKLGIPFFIPNFTLGTFGAITQFKSILPDRKTMFDISMAGPVAGAALSFSMFFVGLLLSSNPVGASDLVEVPSQLFQGSLLLGLISRATLGYRAMHAATVSIHPLVIAGWCGLTTTAFNMLPVGCLDGGRALQGAFGKDALFGFGLTTYSLLGLGVRTPEKPCLNDVSDIGGWRRTALIASVFLVVLTLIPLWDELAEELGVGLVTSF

SEQ ID NO: 180048 - protein, 572 aa, Zea Mays
MAAALASSPLVHLSTSRLRLPRPRASSSSAPGCSIGVCLGWRLKVGWRALRRCDRLRCFSTDGDGVEEGEKRGEEEASATAAPAPDPAPAETQVGAAEELASERSRSGSFSSSSSSGNPGVSSEPPLLSFSVDNIDTVKLLELLGPEKVDPVDVMAIKEKLFGYTTFWLTKEEPFGDLGEGVLFIGNLRGKREEIFAKLQRQLRELAGEKYNLFMVEEPNSEGDDPRGGPRVSFGLLRKEVSEPGPTTLWQYVISLSLFLLTMFSCVELGIASKISSLPPEIVSYFTDPNSTGPPPDMQLLLPFVESALPVAYGVLAIQLFHEIGHFLAAFPKNVKLGIPFFIPNFTLGTFGAITQFKSILPDRKTMFDISMAGPVAGAALSFSMFFVGLLLSSNPVGASDLVEVPSQLFQGSLLLGLISRATLGYRAMHAATVSIHPLVIAGWCGLTTTAFNMLPVGCLDGGRALQVMMLLLRKNRTLEGAFGKDALFGFGLTTYSLLGLGVLGGPLSLPWGLYVLICQRTPEKPCLNDVSDIGGWRRTALIASVFLVVLTLIPLWDELAEELGVGLVTSF

SEQ ID NO: 180049 - protein, 511 aa, Zea Mays
MAAALASSPLVHLSTSRLRLPRPRASSSSAPGCSIGVCLGWRLKVGWRALRRCDRLRCFSTDGDGVEEGEKRGEEEASATAAPAPDPAPAETQVGAAEELASERSRSGSFSSSSSSGNPGVSSEPPLLSFSVDNIDTVKLLELLGPEKVDPVDVMAIKEKLFGYTTFWLTKEEPFGDLGEGVLFIGNLRGKREEIFAKLQRQLRELAGEKYNLFMVEEPNSEGDDPRGGPRVSFGLLRKEVSEPGPTTLWQYVISLSLFLLTMFSCVELGIASKISSLPPEIVSYFTDPNSTGPPPDMQLLLPFVESALPVAYGVLAIQLFHEIGHFLAAFPKNVKLGIPFFIPNFTLGTFGAITQFKSILPDRKTMFDISMAGPVAGAALSFSMFFVGLLLSSNPVGASDLVEVPSQLFQGSLLLGLISRATLGYRAMHAATVSIHPLVIAGWCGLTTTAFNMLPVGCLDGGRALQECSVLSRTSRYERVHPYVHDAANSLVIVCELISPHPPTAWPSQN

SEQ ID NO: 180050 - protein, 106 aa, Zea Mays
MLPVGCLDGGRALQGAFGKDALFGFGLTTYSLLGLGVLGGPLSLPWGLYVLICQRTPEKPCLNDVSDIGGWRRTALIASVFLVVLTLIPLWDELAEELGVGLVTSF

SEQ ID NO: 180051 - protein, 74 aa, Zea Mays
MNLYRGASTAGTKLDLASTWAPLGCCLDCSLTNPRSLIWLTVIPISDCATSRPRVLLARMLCLDLASQHTRCLD

SEQ ID NO: 180052 - protein, 86 aa, Zea Mays
MAIAELKTGCFWQGCFVWIWPHNILVAWTRSAWRTTVSSLGFVRANLPENTGETMLERRKRYWRLEEDGLDSFSVSCCFDSHPVVG

SEQ ID NO: 180053 - protein, 184 aa, Zea Mays
MDYSRPHSIEVPESDIGFHFGTLLDTQEGVDVIFSVAGEKFHAHKLVLAARSPFFRSEFFDHELGEEKNGTDTGDEIKEIVIDDMDPVVFKAVLHFIYRDNLVNDDELSASSSDCSIFDRLSGKLMAAADKYELPRLRLLCESYLCKHISVNSVATTLALADRHHAMELKSVCLKFAAENLSDA

SEQ ID NO: 180054 - protein, 850 aa, Zea Mays
MCMSIFSALVKADKAANRPAPPAGFSKLTSSEAEKAVSGNLCRCTGYRPIVDACKSFAADVDLEDLGLNCFWKKGDEPADVSKLPGYNSGDVCTFPDFLKSEIKSSIQQANSAPVPVSDDGWYRPRSIDELHRLFQSSSFDENSVKIVASNTGSGVYKDQDLYDKYIDIKGIPELSVINRSSKGIELGSVVSISKAIEVLSDGNLVFRKIAGHLNKVASPFVRNTATIGGNIVMAQRLPFASDIATILLAAGSTVTIQVASKRLCFTLEEFLQQPPCDSRTLLLSIFIPEWGSNDVTFETFRAAPRPLGNAVSYVNSAFLARTSLDAASKDHLIEDICLAFGAYGADHAIRTRKVEDYLKGKTVSSSVILEAVRLLKGSIKPSEGSTHPEYRISLAVSFLFTFLSSLANSLNESAKVNGTNEHSPEKQLKLDINDLPIRSRQEIFFTDAYKPVGKAIKKAGVEIQASGEAVYVDDIPAPKDCLYGAFIYSTHPHAHVKSINFKPSLASQKIITVITAKDIPSGGQNVGYSFPMIGEEALFADPVAEFAGQNIGVVIAQTQKYAYMAAKQAVIEYSTENLQPPILTIEDAIERSSFFQTLPFVAPKPVGDYDKGMSEADHKILSAEVKIESQYFFYMEPQVALAIPDEDNCITIYSSTQLPESTQNVVAKCVGIPFHNVRVITRRVGGGFGGKALKSMHVACACAVAALKLQRPVRMYLDRKTDMIMAGGRHPMKVKYSVGFKSNGKITALHLDLGINGGISPDMSPMIAAPVIGSLKKYNWGNLAFDTKVCKTNVSSKSSMRAPGDAQGSFIAEAIIEHVASALSADTNTIRRKNLHDFESLAVFFGDSA

SEQ ID NO: 180055 - protein, 261 aa, Zea Mays
MRQPCSVSRRAAFVGGKKCPQISGVSQERFTNWSYCLKNLPGGSSGIWISFGTTQRATADRPWLEATMACSTQVHLNQTLTIIVLCCGTASCMGTKVLSTLDGIQRHKQDPCLRTLREKLGRDRSAPDQPGRHQHEPHLRDEPRRARPERKEEGEQDVRRPHHPCRARRSSSRAHETGVPSNSQGREPAEPAAAAERQRPGNRRRRGDPGAGARAGGGDAAHNRGPLLYRVCSRPQLLRSCVPVARVFDWIFFQPFSVCIS

SEQ ID NO: 180056 - protein, 194 aa, Zea Mays
MACSTQVHLNQTLTIIVLCCGTASCMGTKVLSTLDGIQRHKQDPCLRTLREKLGRDRSAPDQPGRHQHEPHLRDEPRRARPERKEEGEQDVRRPHHPCRARRSSSRAHETGVPSNSQGREPAEPAAAAERQRPGNRRRRGDPGAGARAGGGDAAHNRGPLLYRVCSRPQLLRSCVPVARVFDWIFFQPFSVCIS

SEQ ID NO: 180057 - protein, 251 aa, Zea Mays
MCWQHISMKDPMSQELLEAVEQERNIRANPSRNTAVFHHQMLGDFEIPVGADDAELEERIIQHLAAAAAVRRSHRHHNRRDGHQSRSEASSHPQFLVLSADERTISGQEGDYEQASAVASGRPLRTLVEQERTRGLADASSPSLRCSTPADSTGRSNNRISGIESTPVDQDGTGPSALQSMAVQGFHNQSASGWRERWFSRSNSLLDLGSEVRREVNAGIAAVSRMMEWHDARDGTGAGPSPTSASRSGSQ

SEQ ID NO: 180058 - protein, 76 aa, Zea Mays
MARCKGRDGSGAFSYLCIKIWFSVKHSALERTDANVKIKASCWKRRAKWLGSSVSGRDSQAASRRRRGCDTERRTN

SEQ ID NO: 180059 - protein, 223 aa, Zea Mays
MGISARWLKSLVGLRKVEQQPRKESADVGRMNQRSQDDSSIAAQEEIPEVPYGNDPPEDDSNAPSCLEPTYSSADVPLFQTEEELKEIWAATIIQTTFRAFLARRAHRALKGLVRLQALVRGHIVRKQADTTLRCMQALVRVQARVRARRVRMALENQTDQQNTSPEHTTVARVREIEDGWCDSIGSVEDIQAKLLKRQEAAAKRERAMAYALAHQVQKLVDT

SEQ ID NO: 180060 - protein, 335 aa, Zea Mays
MGISARWLKSLVGLRKVEQQPRKESADVGRMKSDVADQFHFQNQRSQDDSSIAAQEEIPEVPYGNDPPEDDSNAPSCLEPTYSSADVPLFQTEEELKEIWAATIIQTTFRAFLARRAHRALKGLVRLQALVRGHIVRKQADTTLRCMQALVRVQARVRARRVRMALENQTDQQNTSPEHTTVARVREIEDGWCDSIGSVEDIQAKLLKRQEAAAKRERAMAYALAHQWQASSRQITAFEPDKNSWGWNWLERWMAVRPWESRFLGTYTADGIFVVNETKQPDRSATKTPYRKPVKKHDSTLQSNMLNQKGFPSNSEGVGSSANRPSGLVQKLVDT

SEQ ID NO: 180061 - protein, 227 aa, Zea Mays
MGISARWLKSLVGLRKVEQQPRKESADVGRMFHFQNQRSQDDSSIAAQEEIPEVPYGNDPPEDDSNAPSCLEPTYSSADVPLFQTEEELKEIWAATIIQTTFRAFLARRAHRALKGLVRLQALVRGHIVRKQADTTLRCMQALVRVQARVRARRVRMALENQTDQQNTSPEHTTVARVREIEDGWCDSIGSVEDIQAKLLKRQEAAAKRERAMAYALAHQVQKLVDT

SEQ ID NO: 180062 - protein, 208 aa, Zea Mays
MGISARWLKSLVGLRKVEQQPRKESADVGRMKSDVADQFHFQNQRSQDDSSIAAQEEIPEVPYGNDPPEDDSNAPSCLEPTYSSADVPLFQTEEELKEIWAATIIQTTFRAFLARRAHRALKGLVRLQALVRGHIVRKQADTTLRCMQALVRVQARVRARRVRMALENQTDQQNTSPEHTTVARVREIEYWFCGRYPSKTFKEAGSSS

SEQ ID NO: 180063 - protein, 160 aa, Zea Mays
MGISARWLKSLVGLRKVEQQPRKESADVGRMNQRSQDDSSIAAQEEIPEVPYGNDPPEDDSNAPSCLEPTYSSADVPLFQTEEELKEIWAATIIQTTFRAFLLWSGFRPVLEQGEFAWLWKTRLISKILHQSTRPWHVSEKLRMAGVIVLVLWKISKQNF

SEQ ID NO: 180064 - protein, 324 aa, Zea Mays
MGISARWLKSLVGLRKVEQQPRKESADVGRMNQRSQDDSSIAAQEEIPEVPYGNDPPEDDSNAPSCLEPTYSSADVPLFQTEEELKEIWAATIIQTTFRAFLARRAHRALKGLVRLQALVRGHIVRKQADTTLRCMQALVRVQARVRARRVRMALENQTDQQNTSPEHTTVARVREIEDGWCDSIGSVEDIQAKLLKRQEAAAKRERAMAYALAHQWQASSRQITAFEPDKNSWGWNWLERWMAVRPWESRFLGTYTADGIFVVNETKQPDRSATKTPYRKPVKKHDSTLQSNMLNQKGFPSNSEGVGSSANRPSGLVQKLVDT

SEQ ID NO: 180065 - protein, 164 aa, Zea Mays
MGISARWLKSLVGLRKVEQQPRKESADVGRMFHFQNQRSQDDSSIAAQEEIPEVPYGNDPPEDDSNAPSCLEPTYSSADVPLFQTEEELKEIWAATIIQTTFRAFLLWSGFRPVLEQGEFAWLWKTRLISKILHQSTRPWHVSEKLRMAGVIVLVLWKISKQNF

SEQ ID NO: 180066 - protein, 125 aa, Zea Mays
MMNDCQRVTLWGNQWTDQSVRLCLYNHVGRLVLCMCGAQRQWSMAEVKVMRARAYGPGAMEDKYWVLTDGLEQPDNQPWWLTIGTSTDVVEWTALPAWLRTSGTRVWSWRTRTWCGTHGVFGGLC

SEQ ID NO: 180067 - protein, 63 aa, Zea Mays
MRSQRSTHRFSILHVETTKDLLNIILLAQVQQSRLPIPDYLYAKDFLCSTQILHIKFATKLCL

SEQ ID NO: 180068 - protein, 210 aa, Zea Mays
MENPPPSSAGPYSAPAPAAQHQDAAKEDQDVAQLVLNLCIPELREKAIIILSKKREKCEDLALLLWHSFGTMAALLQEIVSIYRLLSPPQLSFDQSTRVCNVLVLLKCVASHPDTRMPFLNAQFPLYLYPFLNTTYKTREYEFLRISSLSVIGALVKSDDHEVIVNLLCSEIVPLCLRAIEMGSELSKKVFTNLPNHYSKHNDLSCLLLC

SEQ ID NO: 180069 - protein, 217 aa, Zea Mays
MENPPPSSAGPYSAPAPAAQHQDAAKEDQDVAQLVLNLCIPELREKAIIILSKKREKCEDLALLLWHSFGTMAALLQEIVSIYRLLSPPQLSFDQSTRVCNVLVLLKCVASHPDTRMPFLNAQFPLYLYPFLNTTYKTREYEFLRISSLSVIGALVKSDDHEVIVNLLCSEIVPLCLRAIEMGSELSKKLYLHCRWPLLFSKRLCLTTQGLPFPEDA

SEQ ID NO: 180070 - protein, 108 aa, Zea Mays
MENPPPSSAGPYSAPAPAAQHQDAAKEDQDVAQLVLNLCIPELREKAIIILSKKREKCEDLALLLWHSFGTMAALLQEIVSIYRLLSPPQLSFDQSTRVCNVLVLLKV

SEQ ID NO: 180071 - protein, 117 aa, Zea Mays
MENPPPSSAGPYSAPAPAAQHQDAAKEDQDVAQLVLNLCIPELREKAIIILSKKREKCEDLALLLWHSFGTMAALLQEIVSIYRLLSPPQLSFDQSTRVCNVLVLLKHSFHCTCTLS

SEQ ID NO: 180072 - protein, 221 aa, Zea Mays
MENPPPSSAGPYSAPAPAAQHQDAAKEDQDVAQLVLNLCIPELREKAIIILSKKREKCEDLALLLWHSFGTMAALLQEIVSIYRLLSPPQLSFDQSTRVCNVLVLLKCVASHPDTRMPFLNAQFPLYLYPFLNTTYKTREYEFLRISSLSVIGALVKSDDHEVIVNLLCSEIVPLCLRAIEMGSELSKKVATFILQKIMLDDTGLALPRGRLRTQSAATSG

SEQ ID NO: 180073 - protein, 189 aa, Zea Mays
MFPLYLYPFLNTTYKTREYEFLRISSLSVIGALVKSDDHEVIVNLLCSEIVPLCLRAIEMGSELSKKVATFILQKIMLDDTGLAYVCASSERFCAVANVLAQMVEALAEQPSPRTLKNTIRCYLRLTDDRRACQALRDYLPIALRDGTFNGLIEVDLTARLWLHQLLHNVMMSDSGGGPRPAPGPVMGM

SEQ ID NO: 180074 - protein, 78 aa, Zea Mays
MVHQLILATILIFKLYVIFIGHVFLEHLFGTGTQRVAGALANCNTPSNIGPTVLTPGRSLGGYIVSTYQHVSFVHTLS

SEQ ID NO: 180075 - protein, 251 aa, Zea Mays
MPKHRSKAQPRSRSFSYGLRCRCVWVGQGFEGFLDLREKVFFLLKCPGAVLPPQVEFQAAAHRSPDLDSRLELDDSQSQFLSSATAKSKTLAAGAELARASGPARFVCFAACGHASQPAAAPESIAATTRLRATTGWLRRRLSAEGYPAVVSRGWPVRAAKRQVHLPSAAPPSEAALPLNPSSIWYLSIICRIINLKIIDYSQLKVEVYYVMLLTILCETCGLIVVSISFFLKKNCSYFPSLARVLLFVKF

SEQ ID NO: 180076 - protein, 197 aa, Zea Mays
MKSCRLSELSNAEVSSLKARPRIDSSSMSIFGTVNPIVEGVCVRGDAADKQYQVKNCRWRPTFALETDGPSNTDGQDFDEDSGFLGRTRLGRLIQAAARELLDKLNSARTNSPTKIFLVLLGFYTANALATILGQTGDWDVLVAGVVVAAIEGIGMLMYRKPIARPPGRFQSLISMVNYWKAGVCLGLFVDAFKLGS

SEQ ID NO: 180077 - protein, 433 aa, Zea Mays
MAIKSTQRTNEIGINSDVTYTVCVQFGQFIAKFDDGSCVLVPHKYDEWVVDYQRCSLASLQKDFAARVNWGSNQEVEVSVFDKSINLETRLENDSVLRAFFDRCVDRRLYLFADVVDKSAQVISNSGLTVVSHSGVESAAYACSNSQLESASNVISPNVDVPFVDWDALEIVPITEELVGSIVPVVDEDNFYEHIGLRAEDERVEKGKDRLPDEVACEGALDVEGAAIPCTDTIPGEDAIFYDKEDPPMTVGSTYASMNEFRSAVRQHAIKGQFEVWTRKSDTCRFRGYCIAKGCPWFIVARLMHDEKSVRVTMNNFDHLCASTGRVKTRMTTYRWIAEKSIPFLKKDPNMGAKKLQEELEDKYNVKLGYSTVWAGRQKAVEQIFGTWEESFADLYRFKAEIDAKMPGSVVDLETVFERRLHSAQWQMEWAVF

SEQ ID NO: 180078 - protein, 448 aa, Zea Mays
MFPSDVDRINSDVTYTVCVQFGQFIAKFDDGSCVLVPHKYDEWVVDYQRCSLASLQKDFAARVNWGSNQEVEVSVFDKSINLETRLENDSVLRAFFDRCVDRRLYLFADVVDKSAQVISNSGLTVVSHSGVESAAYACSNSQLESASNVISPNVDVPFVDWDALEIVPITEELVGSIVPVVDEDNFYEHIGLRAEDERVEKGKDRLPDEVACEGALDVEGAAIPCTDTIPGEDAIFYDKEDPPMTVGSTYASMNEFRSAVRQHAIKGQFEVWTRKSDTCRFRGYCIATYRWIAEKSIPFLKKDPNMGAKKLQEELEDKYNVKLGYSTVWAGRQKAVEQIFGTWEESFADLYRFKAEIDAKMPGSVVDLEVQEEEDGVYFRRFFCCFKPSIDGFLNGCRPFLSVDSTALNGRWNGQFSEKEESRQTRATIRISKYLHAQKAKSCAKRVN

SEQ ID NO: 180079 - protein, 175 aa, Zea Mays
MTVGSTYASMNEFRSAVRQHAIKGQFEVWTRKSDTCRFRGYCIAKGCPWFIVARLMHDEKSVRVTMNNFDHLCASTGRVKTRMTTYRWIAEKSIPFLKKDPNMGAKKLQEELEDKYNVKLGYSTVWAGRQKAVEQIFGTWEESFADLYRFKAEIDAKMPGSVVDLEVQEEEDDRF

SEQ ID NO: 180080 - protein, 423 aa, Zea Mays
MAIKSTQRTNEIGINSDVTYTVCVQFGQFIAKFDDGSCVLVPHKYDEWVVDYQRCSLASLQKDFAARVNWGSNQEVEVSVFDKSINLETRLENDSVLRAFFDRCVDRRLYLFADVVDKSAQVISNSGLTVVSHSGVESAAYACSNSQLESASNVISPNVDVPFVDWDALEIVPITEELVGSIVPVVDEDNFYEHIGLRAEDERVEKGKDRLPDEVACEGALDVEGAAIPCTDTIPGEDAIFYDKEDPPMTVGSTYASMNEFRSAVRQHAIKGQFEVWTRKSDTCRFRGYCIAKGCPWFIVARLMHDEKSVRVTMNNFDHLCASTGRVKTRMTTYRWIAEKSIPFLKKDPNMGAKKLQEELEDKYNVKLGYSTVWAGRQKAVEQIFGTWEESFADLYRFKAEIDAKMPGSVVDLEVQEEEDDRF

SEQ ID NO: 180081 - protein, 273 aa, Zea Mays
MDPKVGVALTLSLVGGLSTSLGALLAILNHAPNNRTLGILQGFATGLMLSMSFFDLAYDAVNAIGFLRGNLWFFAGALLFSTIADVFPEPDCSAADENGKQQGGKELMMRHRRRVIFSVIVTAIVAGVSLQNFPVGTAAFLGTTKGFRVGLNLALAIALHYIPEGISVALPAYFATSSKWQAFKLATLSGFAEPLGVIIVAYLFPSNLNPEILEGLLGLVGGVMAFLTLYEMLPLAFEYAGRKDAVKAVFVGMAFMSMSLYFLDASLPKEMSA

SEQ ID NO: 180082 - protein, 297 aa, Zea Mays
MDPKVGVALTLSLVGGLSTSLGALLAILNHAPNNRTLGILQGFATGLMLSMSFFDLAYDAVNAIGFLRGNLWFFAGALLFSTIADVFPEPDCSAADENGKQQVYFINVKTNIHRVSRFMSSFKKNKGGKELMMRHRRRVIFSVIVTAIVAGVSLQNFPVGTAAFLGTTKGFRVGLNLALAIALHYIPEGISVALPAYFATSSKWQAFKLATLSGFAEPLGVIIVAYLFPSNLNPEILEGLLGLVGGVMAFLTLYEMLPLAFEYAGRKDAVKAVFVGMAFMSMSLYFLDASLPKEMSA

SEQ ID NO: 180083 - protein, 283 aa, Zea Mays
MDPKVGVALTLSLVGGLSTSLGALLAILNHAPNNRTLGILQGFATGLMLSMSFFDLAYDAVNAIGFLRGNLWFFAGALLFSTIADVFPEPDCSAADENGKQQGGKELMMRHRRRVIFSVIVTAIVAGVSLQNFPVGTAAFLGTTKGFRVGLNLALAIALHYIPEVIYSALAFVKGISVALPAYFATSSKWQAFKLATLSGFAEPLGVIIVAYLFPSNLNPEILEGLLGLVGGVMAFLTLYEMLPLAFEYAGRKDAVKAVFVGMAFMSMSLYFLDASLPKEMSA

SEQ ID NO: 180084 - protein, 97 aa, Zea Mays
MINFVPDQPPGQGEAHQVVFSVHPEGEDQGHSRAQWTRSYTRAQTLQLCRVEGLQGMLACISACALMLMTMSLKSLRSSIISSRYWTDILAVYVSWI

SEQ ID NO: 180085 - protein, 59 aa, Zea Mays
MNQRREGWPQNQVRLQLTSTQPPQSGGQVARARAPPAPTRCGPSGRRRGCGGSRGSAGK

SEQ ID NO: 180086 - protein, 225 aa, Zea Mays
MSLVLAAPCREAFQLNSSIPSSSMEAMPRPSVAPSLQLQARPCPRWPRRKHCPPSSVASRRVACSASAADADVVDLFDAAKLTVDKFVTSGMVVGLGSGPASALAIQYLGTRLRRGSLAGITAVTSSVLSASEADKAGIRANSYQEGTQIDFAFTDAEAIEEGTLAAVIGRRKTESGEPSFMAEKAMAKSAHKLAFITGNDKYVTTGVEGSIPVLIKSAIFRGTG

SEQ ID NO: 180087 - protein, 194 aa, Zea Mays
MSLVLAAPCREAFQLNSSIPSSSMEAMPRPSVAPSLQLQARPCPRWPRRKHCPPSSVASRRVACSASAADADVVDLFDAAKLTVDKFVTSGMVVGLGSGPASALAIQYLGTRLRRGSLAGITAVTSSVLSASEADKAGIRANSYQEGTQRSRRARWPQSSGGGRPRAESPLSWRRRRWLNQLTSLPSSLETTST

SEQ ID NO: 180088 - protein, 142 aa, Zea Mays
MSLVLAAPCREAFQLNSSIPSSSMEAMPRPSVAPSLQLQARPCPRWPRRKHCPPSSVASRRVACSASAADADVVDLFDAAKLTVDKFVTSGMVVGLGSGPASALAIQYLGTRLRRGSLAGITAVTSQVRAQCERGRQGRDTG

SEQ ID NO: 180089 - protein, 135 aa, Zea Mays
MAKSAHKLAFITGNDKYVTTGVEGSIPVLIKSGNWIDTAEEIDDLFLGDAEVWRRPSFGTAGPLGGDHPLVTKEGHHVLDVIFTTPIQDLGQVAEKLDKVDGVVDHGIICSNQPYAVIASKGEVQVLDEKSSVIQ

SEQ ID NO: 180090 - protein, 202 aa, Zea Mays
MEAMPRPSVAPSLQLQARPCPRWPRRKHCPPSSVASRRVACSASAADADVVDLFDAAKLTVDKFVTSGMVVGLGSGPASALAIQYLGTRLRRGSLAGITAVTSSVLSASEADKAGIRANSYQEGTQRSRRARWPQSSGGGRPRAESPLSWRRSQQPWRLSVQAMAKSAHKLAFITGNDKYVTTGVEGSIPVLIKSAIFRGTG

SEQ ID NO: 180091 - protein, 140 aa, Zea Mays
MAEKAMAKSAHKLAFITGNDKYVTTGVEGSIPVLIKSGNWIDTAEEIDDLFLGDAEVWRRPSFGTAGPLGGDHPLVTKEGHHVLDVIFTTPIQDLGQVAEKLDKVDGVVDHGIICSNQPYAVIASKGEVQVLDEKSSVIQ

SEQ ID NO: 180092 - protein, 191 aa, Zea Mays
MMGCLFGCFRASGDGGDAKGAGDRNTSLAPATTTTIQQDGTGRRIRPPSRNALSAVFQREDEGSRAAQAASSWAEQTGESKRMDQELEPQTIIQKNCGALLQTTNNIQSVLRDADSVHQKETHSGCLPVMSDDVHFMEAPKVENCETPPRSHQSSTVPDATRVKNNNKLWILLRILKNVGFQKKISSPLKN

SEQ ID NO: 180093 - protein, 221 aa, Zea Mays
MASLLARQAAQALRARQTLGPAASAMQGHLRTYMNAGIPKRFKEDEEKEQLAKDLAKDWNAVFERSINTLFLTEMVRGLMLTLKYFFDRNVTINYPFEKGPLSPRFRGEHALRRYESGEERCIACKLCEAICPAQAITIEAEEREDGSRRTTRYDIDMTKCIYCGFCQEACPVDAIVEGPNFEFATETHEELLYDKEKLLENGDRWETEIAENLRSESLYR

SEQ ID NO: 180094 - protein, 168 aa, Zea Mays
MASLLARQAAQALRARQTAQLGPAASAMQGHLRTYMNAGIPKRFKEDEEKEQLAKDLAKDWNAVFERSINTLFLTEMICPAQAITIEAEEREDGSRRTTRYDIDMTKCIYCGFCQEACPVDAIVEGPNFEFATETHEELLYDKEKLLENGDRWETEIAENLRSESLYR

SEQ ID NO: 180095 - protein, 83 aa, Zea Mays
MPHLNPVGHQSTNWMVRFVLMVATAAFTSLGTTSPRYIRQQAMYLPCRGSHLTIMEAGSNALLVISATDSCSWKAFAEEITGA

SEQ ID NO: 180096 - protein, 466 aa, Zea Mays
MAARSPNVRLQKVISRKKQSSMLKCPHSAPPKPPRARFARLSATTEAAEKAPAKPKPRVQRICALRASPIRIKAERVECPSERKKALTTPRSKAVRPSQELFHSVKHQKEPFTAAARKGKVVKALFMSTPKKAPAQTPAADRSKEAGSEACSKLRKLNLACREVPSRYMSQLKNPKTVKKGEETTVAKSEKRGQESKTNAKKKILGRSLKCTHAEPDGENRNGCSSTDADENSFAEIAASDQERKVVLQELRIEVDTSRADNSNDNKENLSSAPSEEALNNSHSENGNRQLENNENVPLNENVALKVAKLQSKVHQEQAGKLKKTTNPRPFRLRTDERGVLKEAKPEKRQPFTENNSTAVLKDANRGVTPMDKHTHGKGRDKPACGKKQKKRSTQIVTAQQLDESSSRPAVNSIQCRAVKPERVSRLASSTRTAKTASGLMAPSSRTGKKRKAATVKLSRIQTPAA

SEQ ID NO: 180097 - protein, 235 aa, Zea Mays
MSQREEEGTDDAAEQGRPAEPGTVSQREAPEGTVHRCSQEGEGRQGPVHEHAKKGACPDAGGRQEQGGGVRGMFQAEEAELGVPGGAEQVHVSAEESEDCQERGRDHGVLKEAKPEKRQPFTENNSTAVLKDANRGVTPMDKHTHGKGRDKPACGKKQKKRSTQIVTAQQLDESSSRPAVNSIQCRAVKPERVSRLASSTRTAKTASGLMAPSSRTGKKRKAATVKLSRIQTPAA

SEQ ID NO: 180098 - protein, 370 aa, Zea Mays
MAPCSGLWGGKAGGDAYRGTPVVVKMENPNWSISEISSPEDDDDDEDILAAAGGRRRKGARTKNAKQIRWVLLLKAHRAAGCLASLASAAVALGAAARRRVAAGRTDADADADAGVLAVAGESPVVRSGFYAFIRAFLVVSLLLLAVEVAAYINGWDLAASALALPALGLESLYASWLRFRAAYVAPGIQFLTDACVVLFLVQSADRLILCLGCFYIRVKRIKPEPKSPALPDAEDPDAGYYPMVLVQIPMCNEKEVYQQSIAAVCNLDWPKSSFLVQVLDDSDDLLTQALIREEVAKWQQQGARIVYRHRVLRDGYKAGNLKSAMSCSYVKDYEFVAIFDADFQPQPDFLKRTVLHFKDNDELGLVQAR

SEQ ID NO: 180099 - protein, 371 aa, Zea Mays
MAPCSGLWGGKAGGDAYRGTPVVVKMENPNWSISEISSPEDDDDDEDILAAAGGRRRKGARTKNAKQIRWVLLLKAHRAAGCLASLASAAVALGAAARRRVAAGRTDADADADAGVLAVAGESPVVRSGFYAFIRAFLVVSLLLLAVEVAAYINGWDLAASALALPALGLESLYASWLRFRAAYVAPGIQFLTDACVVLFLVQSADRLILCLGCFYIRVKRIKPEPKSPALPDAEDPDAGYYPMVLVQIPMCNEKEVYQQSIAAVCNLDWPKSSFLVQVLDDSDDLLTQALIREEVAKWQQQGARIVYRHRVLRDGYKAGNLKSAMSCSYVKDYEFVAIFDADFQPQPDFLKRTVLHFKDNDELGLVQASR

SEQ ID NO: 180100 - protein, 648 aa, Zea Mays
MAPCSGLWGGKAGGDAYRGTPVVVKMENPNWSISEISSPEDDDDDEDILAAAGGRRRKGARTKNAKQIRWVLLLKAHRAAGCLASLASAAVALGAAARRRVAAGRTDADADADAGVLAVAGESPVVRSGFYAFIRAFLVVSLLLLAVEVAAYINGWDLAASALALPALGLESLYASWLRFRAAYVAPGIQFLTDACVVLFLVQSADRLILCLGCFYIRVKRIKPEPKSPALPDAEDPDAGYYPMVLVQIPMCNEKEVYQQSIAAVCNLDWPKSSFLVQVLDDSDDLLTQALIREEVAKWQQQGARIVYRHRVLRDGYKAGNLKSAMSCSYVKDYEFVAIFDADFQPQPDFLKRTVLHFKDNDELGLVQARWSFVNKDENLLTRLQYINLCFHFEVEQQVNGVFLNFFGFNGTAGVWRIKALEDSGGWMERTTVEDMDIAVRAHLHGWKFIFLNDVEMAFWKKGNLILLFFLLRKLILPLYSFTLFCIILPTAMFVPEAELPDWVVCYVPALMSLLNVLPSPRSFPFVIPYLLFENTMSVTKFNAMVSGLFQLGSAYEWVVTKKSGSGPRSSEVAGDLVSLAAAAPTAKKKKKKKHNRIYKKELALSMLLLTAAARSLLSKQGIHFYFLLFQGVSFLLVGLDLIGEQVE

SEQ ID NO: 180101 - protein, 684 aa, Zea Mays
MAPCSGLWGGKAGGDAYRGTPVVVKMENPNWSISEISSPEDDDDDEDILAAAGGRRRKGARTKNAKQIRWVLLLKAHRAAGCLASLASAAVALGAAARRRVAAGRTDADADADAGVLAVAGESPVVRSGFYAFIRAFLVVSLLLLAVEVAAYINGWDLAASALALPALGLESLYASWLRFRAAYVAPGIQFLTDACVVLFLVQSADRLILCLGCFYIRVKRIKPEPKSPALPDAEDPDAGYYPMVLVQIPMCNEKEVYQQSIAAVCNLDWPKSSFLVQVLDDSDDLLTQALIREEVAKWQQQGARIVYRHRVLRDGYKAGNLKSAMSCSYVKDYEFVAIFDADFQPQPDFLKRTVLHFKDNDELGLVQARWSFVNKDENLLTRLQYINLCFHFEVEQQVNGVFLNFFGFNGTAGVWRIKALEDSGGWMERTTVEDMDIAVRAHLHGWKFIFLNDVECELPESYEAYRKQQHRWHSGPMQLFRLCLPDIIKCKMAFWKKGNLILLFFLLRKLILPLYSFTLFCIILPTAMFVPEAELPDWVVCYVPALMSLLNVLPSPRSFPFVIPYLLFENTMSVTKFNAMVSGLFQLGSAYEWVVTKKSGSGPRSSEVAGDLVSLAAAAPTAKKKKKKKHNRIYKKELALSMLLLTAAARSLLSKQGIHFYFLLFQGVSFLLVGLDLIGEQVE

SEQ ID NO: 180102 - protein, 434 aa, Zea Mays
MPSSSSLIHGISISVSDDDEATGKVRVRVRRKRSRGPASASARRRRILFRAARLGVPLLLAALAVCLLLYESYRLTPSRSSTLPPPSFADISRLSRNARAADGARKSCLKFLDPEKLQNLELPEIPETNLSMKEVLYRSSLPHIVNDTPPHTENSRFNLFTGYQTLTEREESFKMKKSVTVHCGFYNENGGFRVSDVDREYMRSCEVVVATCAFGGGDDLHQPIGMTENSIRKVCYVAFWDEVTRAAQEEEGHTISEDLVIGLWRIILVSDLPFSDQRLNGKIPKLISHRLFPMARYSIWVDSKSQFRRDPLGVLEALLWRSNSSLALSEHGARSSLYDEAKAIVKKHKATPEEVEVQLDQYRRDGIPDEKRFNGKKGTWDAESQKHFSNKENNIEHFVQPCLVFMRKKKCAVQLLSCSCTKGTSNKVGPVARV

SEQ ID NO: 180103 - protein, 323 aa, Zea Mays
MKEVLYRSSLPHIVNDTPPHTENSRFNLFTGYQTLTEREESFKVNFLSIYISMKKSVTVHCGFYNENGGFRVSDVDREYMRSCEVVVATCAFGGGDDLHQPIGMTENSIRKVCYVAFWDEVTRAAQEEEGHTISEDLVIGLWRIILVSDLPFSDQRLNGKIPKLISHRLFPMARYSIWVDSKSQFRRDPLGVLEALLWRSNSSLALSEHGARSSLYDEAKAIVKKHKATPEEVEVQLDQYRRDGIPDEKRFNGKKALAEASVIVRNHAPLTNLFMCAWFNEVVRFTSRDQLSFPYVLRRLRPPGVHLFPVCARKVKPLVKDTT

SEQ ID NO: 180104 - protein, 325 aa, Zea Mays
MKEVLYRSSLPHIVNDTPPHTENSRFNLFTGYQTLTEREESFKMKKSVTVHCGFYNENGGFRVSDVDREYMRSCEVVVATCAFGGGDDLHQPIGMTENSIRKVCYVAFWDEVTRAAQEEEGHTISEDLVIGLWRIILVSDLPFSDQRLNGKIPKLISHRLFPMARYSIWVDSKSQFRRDPLGVLEALLWRSNSSLALSEHGARSSLYDEAKAIVKKHKATPEEVEVQLDQYRRDGIPDEKRFNGKKALAEASVIVRNHAPLTNLFMCAWFNEVVRFTSRDQLSFPYVLRRLRPPGVHLFPVCARKDLVNSFGHKRKVKPLVKDTT

SEQ ID NO: 180105 - protein, 597 aa, Zea Mays
MRSDKLISLCHGMEVEALEKGYTAFAKAVKSFTSSERYKRSESRSYFEDMYGTDALRSSDKTIVLPMPEAVKAKVKGDISKEAQPGRGAQSTLRKEILELEKHFREQQVVSGALENALGPNAGSVNFSPENPMPKAANELIREIATLELEVKNMEQYLLTLYRKAFEQQAPALSPPDCREASKPSVSSRFGQLRETPVAAKSCKSGGGDAALRTSYPPPAHKKLNDPLADCCTSARSHRAVDSDVLRCQSALSYRGVCSSRVLPSEEDDDSLARALRSCHSQPFSFAEEGEGAGASGGAISLAEYLGTNVADHIPETPNNLSEEMVRCMAGIYCRLADPPLVHHGSSSSPTLSFSSTTSAVSPQYVGDDMWSPSYRRREATTLDSRLINPFHVEGLKEFSGPYNTMVEVPTISRDGRRMKEAEDLLQTYRLVLYRLEAVDLRTMTNEEKIAFWVNVHNALLMHAYLENGVPQNKTSLLAKAACKIAGRSINAAVIQSVVLGCTTHCPGQWLRRTLLYPRTKSKVSKAGHEWRAFAVAQPEPLLRFALCSGSHSDPAVSNNFPRPAGVVASKQQVPNLFVCHHVRNLTLLHQSTLLLP

SEQ ID NO: 180106 - protein, 656 aa, Zea Mays
MRSDKLISVEALEKGYTAFAKAVKSFTSSERYKRSESYFEDMYGTDALRSSDKTIVLPMPEAVKAKVKGDISKEAQPGRGAQSTLRKEILELEKHFREQQVVSGALENALGPNAGSVNFSPENPMPKAANELIREIATLELEVKNMEQYLLTLYRKAFEQQAPALSPPDCREASKPSVSSRFGQLRETPVAAKSCKSGGGDAALRTSYPPPAHKKLNDPLADCCTSARSHRAVDSDVLRCQSALSYRGVCSSRVLPSEEDDDSLARALRSCHSQPFSFAEEGEGAGASGGAISLAEYLGTNVADHIPETPNNLSEEMVRCMAGIYCRLADPPLVHHGSSSSPTLSFSSTTSAVSPQYVGDDMWSPSYRRREATTLDSRLINPFHVEGLKEFSGPYNTMVEVPTISRDGRRMKEAEDLLQTYRLVLYRLEAVDLRTMTNEEKIAFWVNVHNALLMHAYLENGVPQNKTSLLAKAACKIAGRSINAAVIQSVVLGCTTHCPGQWLRRTLLYPRTKSKVSKAGHEWRAFAVAQPEPLLRFALCSGSHSDPAVRVYTPKRLFHQLEAAKEEFIRATAGVWKEQKLLLPKLVEAYAKDVRLSPQGLVDMVQRHLPETMRVAVQRCQQGGRASSGKVVVDWVPHNPAFRYLLARDLAFPHLS

SEQ ID NO: 180107 - protein, 652 aa, Zea Mays
MEVEALEKGYTAFAKAVKSFTSSERYKRSESRSYFEDMYGTDALRSSDKTIVLPMPEAVKAKVKGDISKEAQPGRGAQSTLRKEILELEKHFREQQVVSGALENALGPNAGSVNFSPENPMPKAANELIREIATLELEVKNMEQYLLTLYRKAFEQQAPALSPPDCREASKPSVSSRFGQLRETPVAAKSCKSGGGDAALRTSYPPPAHKKLNDPLADCCTSARSHRAVDSDVLRCQSALSYRGVCSSRVLPSEEDDDSLARALRSCHSQPFSFAEEGEGAGASGGAISLAEYLGTNVADHIPETPNNLSEEMVRCMAGIYCRLADPPLVHHGSSSSPTLSFSSTTSAVSPQYVGDDMWSPSYRRREATTLDSRLINPFHVEGLKEFSGPYNTMVEVPTISRDGRRMKEAEDLLQTYRLVLYRLEAVDLRTMTNEEKIAFWVNVHNALLMHAYLENGVPQNKTSLLAKAACKIAGRSINAAVIQSVVLGCTTHCPGQWLRRTLLYPRTKSKVSKAGHEWRAFAVAQPEPLLRFALCSGSHSDPAVRVYTPKRLFHQLEAAKEEFIRATAGVWKEQKLLLPKLVEAYAKDVRLSPQGLVDMVQRHLPETMRVAVQRCQQGGRASSGKVVVDWVPHNPAFRYLLARDLAFPHLS

SEQ ID NO: 180108 - protein, 469 aa, Zea Mays
MEVEALEKGYTAFAKAVKSFTSSERYKRSESYFEDMYGTDALRSSDKTIVLPMPEAVKAKVKGDISKEAQPGRGAQSTLRKEILELEKHFREQQVVSGALENALGPNAGSVNFSPENPMPKAANELIREIATLELEVKNMEQYLLTLYRKAFEQQAPALSPPDCREASKPSVSSRFGQLRETPVAAKSCKSGGGDAALRTSYPPPAHKKLNDPLADCCTSARSHRAVDSDVLRCQSALSYRGVCSSRVLPSEEDDDSLARALRSCHSQPFSFAEEGEGAGASGGAISLAEYLGTNVADHIPETPNNLSEEMVRCMAGIYCRLADPPLVHHGSSSSPTLSFSSTTSAVSPQYVGDDMWSPSYRRREATTLDSRLINPFHVEGLKEFSGPYNTMVEVPTISRDGRRMKEAEDLLQTYRLVLYRLEAVDLRTMTNEEKIAFWVNVHNALLMLIWRTASHRTKHPCLLRPPAK

SEQ ID NO: 180109 - protein, 115 aa, Zea Mays
MIEGAGVESNPLLKANKRDGAKPEATDRTVHPMLHLTPPGQPPTLADAPMVANQPQQTSFPTVATSPISYPTVLLPSSVLPPIQAHKPVLLHTNQPFQFILSRCLHFVLIFGHCD

SEQ ID NO: 180110 - protein, 82 aa, Zea Mays
MIEGAGVESNPLLKANKRDGAKPEATDRTVHPMLHLTPPGQPPTLADAPMVEQQLLAYLLLLVDFTESELWRVLIAIQFLLI

SEQ ID NO: 180111 - protein, 380 aa, Zea Mays
MAIRITVSYSGYLAQNLAASFGLRCTAAAAAGAGAAPGPGCRFLQDALSRPFCLFASSRHVDPHHDAEDQNHPKPGPKALSPAVAARGDGYSLLLPRSCSAKAPPPVDDPPASLAVGLLSVFASGMGSTGGIAGASSLVASPSISTGLNPASLLPFLQASKWLPCSDIVAAATTSRSSGRPAGATAAPTPRTAAPSPRPAPRAAAPSPRPAPCAAVPSPRHVPVPSPAVAAPSKVGIQALVDSASIASGSAGIGRGVIASGAAGMVKKSGASLPVGAGVGRKTGWLSRSMFPTFDVGDRILAEKISYIFREPEILDIVIFRAPPVLQALGYSAGDVFIKRVVAKGGDIVEVRDGNLIVNGVVQEEEFVLEPADYEMDPLV

SEQ ID NO: 180112 - protein, 441 aa, Zea Mays
MAIRITVSYSGYLAQNLAASFGLRCTAAAAAGAGAAPGPGCRFLQDALSRPFCLFASSRHVDPHHDAEDQNHPKPGPKALSPAVAARGDGYSLLLPRSCSAKAPPPVDDPPASLAVGLLSVFASGMGSTGGIAGASSLVASPSISTGLNPASLLPFLQASKWLPCSDIVAAATTSRSSGRPAGATAAPTPRTAAPSPRPAPRAAAPSPRPAPCAAVPSPRHVPVPSPAVAAPSKVGIQALVDSASIASGSAGIGRGVIASGAAGMVKKSGASLPVGAGVGRKTGWLSRSMFPTFDVGDRILAEKISYIFREPEILDIVIFRAPPVLQALGYSAGDVFIKRVVAKGGDIVEVRDGNLIVNGVVQEEEFVLEPADYEMDPLTVPEGYVFVLGDNRNNSFDSHNWGPLPVKNILGRSVLRYWPPSRITDTIYQHDMVQHTAVAS

SEQ ID NO: 180113 - protein, 343 aa, Zea Mays
MAIRITVSYSGYLAQNLAASFGLRCTAAAAAGAGAAPGPGCRFLQDALSRPFCLFASSRHVDPHHDAEDQNHPKPGPKALSPAVAARGDGYSLLLPRSCSAKAPPPVDDPPASLAVGLLSVFASGMGSTGGIAGASSLVASPSISTGLNPASLLPFLQASKWLPCSDIVAAATTSRSSGRPAGATAAPTPRTAAPSPRPAPRAAAPSPRPAPCAAVPSPRHVPVPSPAVAAPSKVGIQALVDSASIASGSAGIGRGVIASGAAGMVKKSGASLPVGAGVGRKTGWLSRWVSSCSDDAKTVFAAVTVPLLYKSSLAEPRSIPSRSMFPTFDVGDRILAEKASNV

SEQ ID NO: 180114 - protein, 393 aa, Zea Mays
MAIRITVSYSGYLAQNLAASFGLRCTAAAAAGAGAAPGPGCRFLQDALSRPFCLFASSRHVDPHHDAEDQNHPKPGPKALSPAVAARGDGYSLLLPRSCSAKAPPPVDDPPASLAVGLLSVFASGMGSTGGIAGASSLVASPSISTGLNPASLLPFLQASKWLPCSDIVAAATTSRSSGRPAGATAAPTPRTAAPSPRPAPRAAAPSPRPAPCAAVPSPRHVPVPSPAVAAPSKVGIQALVDSASIASGSAGIGRGVIASGAAGMVKKSGASLPVGAGVGRKTGWLSRWVSSCSDDAKTVFAAVTVPLLYKSSLAEPRSIPSRSMFPTFDVGDRILAEKISYIFREPEILDIVIFRAPPVLQALGYSAGDVFIKRVVAKGGDIVEVSFYPNGT

SEQ ID NO: 180115 - protein, 68 aa, Zea Mays
MSCYPIHALLHYSQQSQQYSQYMTSQKNSIYFMCHQSFHLVFFIELHLFQFKQSESYIHFYLRKPPSI

SEQ ID NO: 180116 - protein, 286 aa, Zea Mays
MAGPAPDRAALTVGPGMDMPIMHDSDRYELVRDIGSGNFGVARLMRDRRTTELVAVKYIERGEKIDENVQREIINHRSLKHPNIIRFKEVILTPTHLAIVMEYASGGELFERICKNVRFSEDEARYFFQQLISGVSYCHSMQVCHRDLKLENTLLDGSDAPRLKICDFGYSKSSVLHSQPKSTVGTPAYIAPEVLLKKEYDGKIADVWSCGVTLYVMAVGAYPFEDPEEPKNFRKTIQRILNVQYAIPDYVNISPECRHLISRIFVGDPAMASPCSYNRALILIHE

SEQ ID NO: 180117 - protein, 278 aa, Zea Mays
MAGPAPDRAALTVGPGMDMPIMHDSDRYELVRDIGSGNFGVARLMRDRRTTELVAVKYIERGEKIDENVQREIINHRSLKHPNIIRFKEVILTPTHLAIVMEYASGGELFERICKNVRFSEDEARYFFQQLISGQVCHRDLKLENTLLDGSDAPRLKICDFGYSKSSVLHSQPKSTVGTPAYIAPEVLLKKEYDGKIADVWSCGVTLYVMAVGAYPFEDPEEPKNFRKTIQRILNVQYAIPDYVNISPECRHLISRIFVGDPAMASPCSYNRALILIQ

SEQ ID NO: 180118 - protein, 369 aa, Zea Mays
MAGPAPDRAALTVGPGMDMPIMHDSDRYELVRDIGSGNFGVARLMRDRRTTELVAVKYIERGEKIDENVQREIINHRSLKHPNIIRFKEVILTPTHLAIVMEYASGGELFERICKNVRFSEDEARYFFQQLISGVSYCHSMQVCHRDLKLENTLLDGSDAPRLKICDFGYSKSSVLHSQPKSTVGTPAYIAPEVLLKKEYDGKIADVWSCGVTLYVMAVGAYPFEDPEEPKNFRKTIQRILNVQYAIPDYVNISPECRHLISRIFVGDPAMASPCSYNRALILIHWFLKNLPADLMDDDSMSNQYEEPDQPMQTMDQIMQILTEATIPPACSRSINVLADGLDMDDDMDDLDSDSDLDVDSSGEIVYAM

SEQ ID NO: 180119 - protein, 248 aa, Zea Mays
MEQNFDGCTDGNEQAQDLFGQDQWANGFTAALQDFDDAQPTQYNMASFDQSSQMYEHDSDSNIDMENVDAPSKKSQKGTKKSQKGGKQKVVSRRGGSFTKEEDIVICSAFLNVSKDPITGVNQNSGGYYKRMHEYFNKRKPEGSNRSQISIQHRWGAIQKAVNKFCALKSSVDRRNESGKSEQDRIDDAVFMYEKGEPFVFMHCWKLLRNEAKWNNRFLETISKPPSSQVPPEAGSTCAPSDPSGVDD

SEQ ID NO: 180120 - protein, 220 aa, Zea Mays
MASFDQSSQMYEHDSDSNIDMENVDAPSKKSQKGTKKSQKGGKQKVVSRRGGSFTKEEDIVICSAFLNVSKDPITGVNQNSGGYYKRMHEYFNKRKPEGSNRSQISIQHRWGAIQKAVNKFCALKSSVDRRNESGKSEQDRIDDAVFMYEKGEPFVFMHCWKLLRNEAKWNNRFLETISKPPSSQVPPEAANREGAGLISKLITVLGKRFHMCSIRSFWS

SEQ ID NO: 180121 - protein, 260 aa, Zea Mays
MEQNFDGCTDGNEQAQDLFGQDQWANGFTAALQDFDDAQPTQYNMASFDQSSQMYEHDSDSNIDMENVDAPSKKSQKGTKKSQKGGKQKVVSRRGGSFTKEEDIVICSAFLNVSKDPITGVNQNSGGYYKRMHEYFNKRKPEGSNRSQISIQHRWGAIQKAVNKFCALKSSVDRRNESGKSEQDRIDDAVFMYEKGEPFVFMHCWKLLRNEAKWNNRFLETISKPPSSQVPPEAANREGAGLISKLITVLGKRLHNKIHD

SEQ ID NO: 180122 - protein, 83 aa, Zea Mays
MLGQSFIHLEHINGIDIEDLLQSLIRQNLPPIVLVLQIIFSNICPKLLDNLKANKHSKKEISGIIIFMINWYHIQCKIDMEGQ

SEQ ID NO: 180123 - protein, 729 aa, Zea Mays
MCWWKRYSSPSLSSSSMPASPARASTLRPIFGWGSGPSSRRDGSGGSSEPQPRLIRARWMRYVVDDLEVGVSALGVDSPVRRDAAAGFGLATVSSTPISKSPSNMEVAPARPSSTPVLLPHPLPLPSPAPRMLDGEWNGPAADAPGVLETGSERMTALLARRVVAQTLPKAHEHNNFRLNATTCYQQRKGFKEKFKGKNCAETLNFRLNIPAKSAPSSGFSSPAQSTQGLSNVDFSSTAISIRDTNVWSAWSYDAMGSSPPSDSPDKFAGRQERSPLSSPLRSPVLRSRNPSARPSPTHPKLFLVNHVCRPDGNGSASFHPLPLPPSVSPKQINASHQLIPKAEMSSVAGQWQKGKLLGSGTFGCVYEATNRHTGALCAMKEVNIIPDDAKSAESLKQLEQEIKFLSQFKHENVVQYYGSETIEDRFYIYLEYVHPGSIHKYVHQHCGSLTESVICNFTRHILKGLSFLHSQKIMHRDIKGANLLVDINGVVKLADFGMAKHLSAAAPNLSLKGTPYWMAPEVVRATLDKRAGYDLAVDIWSLGCTIIEMFTGKPPWSGLEGPAAMFKVLHTDPPIPDNMSPEGKDFLRCCLKRNPTERPTATKLLEHPFIRTSNHYSPRNSILGIKSPDTVRSAARDKVPWKNDSCKRGKHANGETSSARSSGSLTYRLMTPLPNLGTNSLSPPPLSSASNSGSAAHTPKIMHFSVAYHRPSPLPKPNGKEAINLISH

SEQ ID NO: 180124 - protein, 560 aa, Zea Mays
MCWWKRYSSPSLSSSSMPASPARASTLRPIFGWGSGPSSRRDGSGGSSEPQPRLIRARWMRYVVDDLEVGVSALGVDSPVRRDAAAGFGLATVSSTPISKSPSNMEVAPARPSSTPVLLPHPLPLPSPAPRMLDGEWNGPAADAPGVLETGSERMTALLARRVVAQTLPKAHEHNNFRLNATTCYQQRKGFKEKFKGKNCAETLNFRLNIPAKSAPSSGFSSPAQSTQGLSNVDFSSTAISIRDTNVWSAWSYDAMGSSPPSDSPDKFAGRQERSPLSSPLRSPVLRSRNPSARPSPTHPKLFLVNHVCRPDGNGSASFHPLPLPPSVSPKQINASHQLIPKAEMSSVAGQWQKGKLLGSGTFGCVYEATNRHTGALCAMKEVNIIPDDAKSAESLKQLEQEIKFLSQFKHENVVQYYGSETIEDRFYIYLEYVHPGSIHKYVHQHCGSLTESVICNFTRHILKGLSFLHSQKIMHRDIKGANLLVDINGVVKLADFGMAKHLSAAAPNLSLKGTPYWMAPEPAAALTLTQQPAATRKRTASGSTIVTIIFLDSLDICIN

SEQ ID NO: 180125 - protein, 434 aa, Zea Mays
MGSSPPSDSPDKFAGRQERSPLSSPLRSPVLRSRNPSARPSPTHPKLFLVNHVCRPDGNGSASFHPLPLPPSVSPKQINASHQLIPKAEMSSVAGQWQKGKLLGSGTFGCVYEATNRHTGALCAMKEVNIIPDDAKSAESLKQLEQEIKFLSQFKHENVVQYYGSETIEDRFYIYLEYVHPGSIHKYVHQHCGSLTESVICNFTRHILKGLSFLHSQKIMHRDIKGANLLVDINGVVKLADFGMAKHLSAAAPNLSLKGTPYWMAPEPAAMFKVLHTDPPIPDNMSPEGKDFLRCCLKRNPTERPTATKLLEHPFIRTSNHYSPRNSILGIKSPDTVRSAARDKVPWKNDSCKRGKHANGETSSARSSGSLTYRLMTPLPNLGTNSLSPPPLSSASNSGSAAHTPKIMHFSVAYHRPSPLPKPNGKEAINLISH

SEQ ID NO: 180126 - protein, 304 aa, Zea Mays
MGDDYEVVRKVGRGKYSEVFEGINVNNNEKCIIKILKPVKKKKIKREIKILQNLCGGPNIVKLLDIVRDQHSKTPSLIFEFVNNTDFKVLYPTLTDYDIRYYIYELLKALDYCHSQGIMHRDVKPHNVMIDHELRKLRLIDWGLAEFYHPGKEYNVRVASRYFKGPELLVDLQDYDYSLDMWSLGCMFAGMIFRKEPFFYGHDNHDQLVKIAKVLGTDGLNSYLNKYHIELDPQLEALVGRHSRKPWLKFMNGDNQHLVSPEAIDFLDKLLRYDHQDRLTAREAMAHPYFLQVRAVENSRTRAQ

SEQ ID NO: 180127 - protein, 113 aa, Zea Mays
MRQHGTHGIFFDTYGEYYEDMREFHQHLPKLLKPGGIYSYFNGLCGDNAFFHAVYCQLVALELANLGYSTQFIPLPVKDCLAEEVWKGVKRKYWQLDTYYLPACQSESESTIK

SEQ ID NO: 180128 - protein, 160 aa, Zea Mays
MSNVSRSIGDFYLKKPEYSLDPLFRQVGAPIALKRPALSAEPSVQVRKLKPNDLFLIFASDGLWEHLSDDAAVQIVFKNPRTGIASRLVKAALKEATRKREVRYRDLRTIERGVRRHFHDDISVVVVYLDGHRERRHTRVVDSSSNCTSAPVDIHSSNSR

SEQ ID NO: 180129 - protein, 1002 aa, Zea Mays
MGALLPFVRRVTRAVRLSPLQRSAEDRFATRMGAKVERESYMPGYYATGDLNLEPNGRWSPYYEEMTSNDQLCNGFTTKPTNDYSEFDKEILKHQILEHEAVFRQQPHNPLAIQVYELHRVYKIQKDMMKQHQSKEVYSYPTLAVASHTNSPSQVPQNGAKMMWQMPVPPMSTTYRKAIGEHNDTNQSSMKFLREGSVQSSPNGFISSDVGPRSRQGTFDLQLPADHYIDDDGTSDNKPIDFLGLASDTKPRNDAELTLVSAEGLGKFSDNSSSSGLQTTNNLGPRQVTDLNESNTGFHMGRANGSVSRGLPRTLENSWNQPILRANTTNFSFSKKHSKEKHTDEGKQVSSVTFLAPRYNDADPPKYFKAVDGRPATASYNHFVYQGQNSSVGWIAQSPLEPSVINNFARVDRPHHLNMGTFTAPVSIPQIDNPSIVSPMGSCTADPRSSVINNPALIPRFNGFSTVNSYTSLSAVTQSIGTSIPKLINVDNVDKRYRGFPLDSFSVSHSRHQVAVSSNLEQKNSQKLEDSDQQSHGKGMKNFNLNETLSDCQEDGLVEQDGRCASSFQHDKDGGSVLGISWLKKKLMSADPTAVEKPGKIFGHSLGTAIELKNTKDQNEPAVTIRNLSDSASTSVGCAIKKDRPSDNIVTGTLPVCNKAQEGATCLPLSCQKHVPKDGQAAEGATKKSGAPIRNFIDLNDDVPNDDNSEESVVSHECHVEPSRNNHPKRAFVIDLEVPACEEDASWDIDQECAQPKPDAYQEVDDGSDTSALAAAENIVALSRNTPTAAEASDDTLQWFADLAVLNINDLAEQAELQACTNDSSNYESDSFESLTLKLEETKIDDLWSRPLEPETATDEQTVSAAHLLTKPRRGQQRRRRQKRDFQRDVLPGLSSLSRPEITEDVQLLEGLVQASGGSWESSLTRRGRCGGRARGRKPRKTVVTVIVEEEEEEEVEVSPPPKPAGTGELEADGRGMIGWGRTTRRCRRARCPSGNSMATAS

SEQ ID NO: 180130 - protein, 402 aa, Zea Mays
MSFTPVPRFRGAAYSQLCPQSSSCAEHLVNVDGASAKDLSVDPSTFCIPQDANQGFCSRALQYTSSVSKQGFAAQGLPVNAAEFGLNNDSSLVGGYQQFDYLLGPPQTEVCEGMWMKNINTSIIHRRRPSNASCLDHTEELTSYENDEGAISFGSSCSTGIASYPYSTPLQRNSHISDTRDGTWDALVQMQEALEASNSDNGLNEECSDLTFNHAELSGGNAVKHKVVWDNGSLNSPSFTSNLLSFPGDTETTLTSASTVYCTFQNFADLQHKMNNNEQNKLSSEVELPRQKVPMTNHVNGSGGEMHSAEWGTNPGLIESSGFMPSNEDRQNDISHQPSSSFVYSADGTVDHCSKKSPLMYECEEQMEIDSLLNSFGVSTDSFSQTYGMFERSISLLLKHVA

SEQ ID NO: 180131 - protein, 737 aa, Zea Mays
MSFTPVPRFRGAAYSQLCPQSSSCAEHLVNVDGASAKDLSVDPSTFCIPQDANQGFCSRALQYTSSVSKQGFAAQGLPVNAAEFGLNNDSSLVGGYQQFDYLLGPPQTEVCEGMWMKNINTSIIHRRRPSNASCLDHTEELTSYENDEGAISFGSSCSTGIASYPYSTPLQRNSHISDTRDGTWDALVQMQEALEASNSDNGLNEECSDLTFNHAELSGGNAVKHKVVWDNGSLNSPSFTSNLLSFPGDTETTLTSASTVYCTFQNFADLQHKMNNNEQNKLSSEVELPRQKVPMTNHVNGSGGEMHSAEWGTNPGLIESSGFMPSNEDRQNDISHQPSSSFVYSADGTVDHCSKKSPLMYECEEQMEIDSLLNSFGVSTDSFSQTYGMFERSNNLVEFDMKTELDESGSAACFNNNAPYMQTGPPESAISDGSSYPEQYQSTSQTCGLVYASASQWQNMSSSGLPLLDCRKSIGEPTSIISLGGNGKGHLLPTSEDTLLQKPQSVAPDARLEMTDNVADCYLESAASLDGHSCPLGASACHDEAMAAKDLQTAQHGVVTDCTFGIHTSNHAGHSDMLLPITQTTSVQEPGLSLSKDLNSSCIRGTEVKKVDLTATYNSERHGILRLKSFEQKTPESMGMKTYIYHCGDHSQIVDPQQSIILAASKPSHSSVLPVDKSDGKVVSQQKKRKRAAENLLAWHDHIMPGHGSMHRRRTPELDWARATKRLVEKTSCRKCY

SEQ ID NO: 180132 - protein, 735 aa, Zea Mays
MADAAHVFLLVAVAAALAGRSDGAWCVCRPELADSALQKALDYACGAGADCKPILQSGACFAPDTVKAHCSYAVNSFYQRNSQNPQACVFSGTATLSNSDPSGNGCTYPATPREARGQVPPKPVPFETLHGGSAIRFLVSVYATAQNIYDMTKEVGQGSGSERMGGYDQFISLLFCILQIIYILYMHLYCFIYSKEFISSVLLPYNVLYLFVLILQSCCLCFYLLIFNCSVSLHVYRIYMIYIIHMLYVLMIHIVMDIFDVMINYILYVIIIMLIYGIKMTWKMPIILTFQKPNVRHFSVRGFAAVLKPDPFDGKNFLIWKAKMELWLTAMSCFHVAESKPANLPPEDEAKFKAEDNLFRGAVISALDTKFQKSYIILPTGKELWDALVGKFGVTDAGSELYLMEQLYDYKMVENRSVVEQAHEFQALAKELELFPCPLPDKFVAGGIIAKLPPSWKDFATSLKHKRQEFNVEELIGTLDVEERARSKDNGKGVETSTANVVQKRNFRKFNKKKNQNKPENANKPVQTAQFKKKNNNNKGKGGCFVCGSDQHWARECPDRKFTQDKKSANVVTTETEDGTSGYGNSLPFVLSVCNSPEWWMDSGANIHVCADASMFSSYQVGRSGALLMGNGSRAHVLGVGTVILKFTSGKTVPLKSVQHVPSIKKNLVSASMLCRDGYKVVLESNKCVVSKHGIFVGKGYDCGGLFRLSLHDVCNKLVNSVHFSDESDLWHSRF

SEQ ID NO: 180133 - protein, 403 aa, Zea Mays
MQWTPDGYVAVVTMFNYQQFRHIGAPGWQLGWTWAKKEVIWSMVGAQTTEQGDCSKFKGNTPHCCKKDPTIVDLLPGTPYNMQIANCCKAGVINTFNQDPANAASSFQISVGLAGTTNKTVKVPKNFTLKTPGPGYTCGRAIVGRPTKFFSADGRRVTQALMTWNVTCTYSQFLAQKTPSCCVSLSSFYNDTIVNCPTCSCGCQNPSGSNCVNEDSPNLQAAIDGPGKWTGQPLVQCTSHMCPIRIHWHVKLNYKEYWRVKITITNFNFRMNYTQWNLVAQHPNFDNITQLFSFNYKPLTPYGGGINDTAMFWGVKFYNDLLMQAGKLGNVQSELLLRKDSRTFTFEKGWAFPRRVYFNGDNCVMPSPENYPWLPNASPLTKQALTLPLLIFWVALAVLLAYA

SEQ ID NO: 180134 - protein, 79 aa, Zea Mays
MFYKNDFYHQYCITKTIRTSWQCRNSHESVYFHRKNTGNKGEKSYNPNETLYVLMHKFAIIHYNHKRIMVEYVLMHMFT

SEQ ID NO: 180135 - protein, 154 aa, Zea Mays
MQNNYQEYVKLKARVEVLQHSQRNLLGEELAPLSPSELDQLESQVDKTLKQIRSRKTQVLLDELCDLKRKEQMLQDANRVLKRKLHEFEAEAASPPQLAWQGGGGMLSHDPPQPEHFFVALESNAPLQPTYHTMDMNQQPEPAPGGCYPPAWMA

SEQ ID NO: 180136 - protein, 82 aa, Zea Mays
MLQDANRVLKRKLHEFEAEAASPPQLAWQGGGGMLSHDPPQPEHFFVALESNAPLQPTYHTMDMNQQPEPAPGGCYPPAWMA

SEQ ID NO: 180137 - protein, 328 aa, Zea Mays
MSGSSAAGEDIVQHLSSNSNPSSSKLAKLEARMAGKAVSAPSSPPHHPMAAPASAPAISFMDQEELPETSSSDDDNCEEFLIQKNTLKRPRSPDGDNISALGNFEGSSNEAAKILDVTDTRPSLDNSNRKKQGRGRGRAGTGRGRGSKTVDQPRLTLISSAVVTNGQLDKLTNKEPQSSVQLGHDDRAALQEELSMLHGKVAFLEEELSKSRQDATNYHQLSDRVAKELKDLKDHDQQMRSKQMKVLSDLLIAVSKAERQEARMRIRQESFRLGNVGVMRAGTIISEIWEDGQAIKDLNSHLKSLLETKETIERHRKSLKKRQSGRNM

SEQ ID NO: 180138 - protein, 115 aa, Zea Mays
MELTSQGAGTYWYLPPECFDLSKTPFISSKVDVWSAGVMFYQMLYGRRPFGHDQTQERILREDTIINARRVEFPSKPAVSNEAKDLIRRCLTYNQSERPDVLTITQDHYLSYAKK

SEQ ID NO: 180139 - protein, 174 aa, Zea Mays
MFDTFYFEPQLLQQATTNTNNYKDMFSHRKQKGLVYLNKRGQKIIHYDLKPGNVLFDEGMELTSQGAGTYWYLPPECFDLSKTPFISSKVDVWSAGVMFYQMLYGRRPFGHDQTQERILREDTIINARRVEFPSKPAVSNEAKDLIRRCLTYNQSERPDVLTITQDHYLSYAKK

SEQ ID NO: 180140 - protein, 405 aa, Zea Mays
MSSSRFSPALQASDLNDFIAPSQDCIISLNKNTSSSSRRPQNKQKETTVSSKPPEEAVKISLKDCLACSGCITSAETVMLEKQSLGDFIDRINSDKAVIVSVSPQSRASLAAFFGLSQSQVLRKLTSLFKSIGVKAVFDTSSSRDLSLIEACNEFVSRYQRSQPSSGQEAGANLPLISSACPGWICYAEKTLGSYILPYISSVKSPQQAIGAAIKHHVAERLGLKLTNVDEEGHLYGVSGGSGGYAETIFRYVAHVIYKREIEGPLDFRILRNSDFREITLEVEGKPVLKFALCYGFRNLQNVVRKIKMGKCEYHFIEVMACPSGCLNGGGQLKPVEGQSAKELIQQLESVYTQDILISDPFRNPIAKKLYDEWLGQPGSENAKKYLHTEYHPVVKSVASQLQNW

SEQ ID NO: 180141 - protein, 294 aa, Zea Mays
MSSSRFSPALQASDLNDFIAPSQDCIISLNKNTSSSSRRPQKETTVSSKPPEEAVKISLKDCLACSGCITSAETVMLEKQSLGDFIDRINSDKAVIVSVSPQSRASLAAFFGLSQSQVLRKLTSLFKSIGVKAVFDTSSSRDLSLIEACNEFVSRYQRSQPSSGQEAGANLPLISSACPGWICYAEKTLGSYILPYISSVKSPQQAIGAAIKHHVAERLGLKPYHVYHVTVMPCYDKKLEAVRDDFTFSVDGKEVTEVDSVLTTGEVLDLIQVATWFFFLLVVCGFEKQGRHLL

SEQ ID NO: 180142 - protein, 292 aa, Zea Mays
MSSSRFSPALQASDLNDFIAPSQDCIISLNKNTSSSSRRPQNKQKETTVSSKPPEEAVKISLKDCLACSGCITSAETVMLEKQSLGDFIDRINSDKAVIVSVSPQSRASLAAFFGLSQSQVLRKLTSLFKSIGVKAVFDTSSSRDLSLIEACNEFVSRYQRSQPSSGQEAGANLPLISSACPGWICYAEKTLGSYILPYISSVKSPQQAIGAAIKHHVAERLGLKPYHVYHVTVMPCYDKKLEAVRDDFTFSVDGKEVTEVDSVLTTGEVLDLIQSKSIDFKTVEESSLDRL

SEQ ID NO: 180143 - protein, 496 aa, Zea Mays
MSSSRFSPALQASDLNDFIAPSQDCIISLNKNTSSSSRRPQNKQKETTVSSKPPEEAVKISLKDCLACSGCITSAETVMLEKQSLGDFIDRINSDKAVIVSVSPQSRASLAAFFGLSQSQVTTWACHIHSPVRIMVDTLLQVFTVLRKLTSLFKSIGVKAVFDTSSSRDLSLIEACNEFVSRYQRSQPSSGQEAGANLPLISSACPGWICYAEKTLGSYILPYISSVKSPQQAIGAAIKHHVAERLGLKPYHVYHVTVMPCYDKKLEAVRDDFTFSVDGKEVTEVDSVLTTGEVLDLIQSKSIDFKTVEESSLDRLLTNVDEEGHLYGVSGGSGGYAETIFRYVAHVIYKREIEGPLDFRILRNSDFREITLEVEGKPVLKFALCYGFRNLQNVVRKIKMGKCEYHFIEVMACPSGCLNGGGQLKPVEGQSAKELIQQLESVYTQDILISDPFRNPIAKKLYDEWLGQPGSENAKKYLHTEYHPVVKSVASQLQNW

SEQ ID NO: 180144 - protein, 353 aa, Zea Mays
MVLRKLTSLFKSIGVKAVFDTSSSRDLSLIEACNEFVSRYQRSQPSSGQEAGANLPLISSACPGWICYAEKTLGSYILPYISSVKSPQQAIGAAIKHHVAERLGLKPYHVYHVTVMPCYDKKLEAVRDDFTFSVDGKEVTEVDSVLTTGEVLDLIQSKSIDFKTVEESSLDRLLTNVDEEGHLYGVSGGSGGYAETIFRYVAHVIYKREIEGPLDFRILRNSDFREITLEVEGKPVLKFALCYGFRNLQNVVRKIKMGKCEYHFIEVMACPSGCLNGGGQLKPVEGQSAKELIQQLESVYTQDILISDPFRNPIAKKLYDEWLGQPGSENAKKYLHTEYHPVVKSVASQLQNW

SEQ ID NO: 180145 - protein, 279 aa, Zea Mays
MSSSRFSPALQASDLNDFIAPSQDCIISLNKNTSSSSRRPQNKQKETTVSSKPPEEAVKISLKDCLACSGCITSAETVMLEKQSLGDFIDRINSDKAVIVSVSPQSRASLAAFFGLSQSQVLRKLTSLFKSIGVKAVFDTSSSRDLSLIEACNEFVSRYQRSQPSSGQEAGANLPLISSACPGWICYAEKTLGSYILPYISSVKSPQQAIGAAIKHHVAERLGLKPYHVYHVTVMPCYDKKLEAVRDDFTFSVDGKEVTEVDSVLTTGEVLDLIQVNKC

SEQ ID NO: 180146 - protein, 438 aa, Zea Mays
MEDNAVEEPELSGAAEFAPALVAAHPHGNSVAVAIGPELRVFDLRAGHPVSLSDDCGGHSHSDAIRAICFSVSGALFASAGDDKLVKVWKTDSWRCIQTITSEKRVSAVVISNDDLYVSFADKFGVVWLVTLREDSAEQVSVDNKPVSILGHYCSIITSMKFSPDGRFIATADRDFKIRVTLFPKNPLKGAHEIQSFCLGHTDFVSCITFTSISENQSFLISGGGDSTVRLWDYVNGCLLDTFQAKDKSYLQMAELLGPNETDDSSLAITDICPSNDGSLVAVAIQSFSGIMLLACDLVGKKLSFLKVITMEKSYIPTSLASSPSSELLWTVMGASNMPSQASSHLLTRLRIITCFQKDRLSSSDAGPATLEDGDVPHGEKLLLALQGSLDVAKQEEVLASVLAALKVSMHKMLVKKHYSEERREQRKRGRNDKKMKN

SEQ ID NO: 180147 - protein, 116 aa, Zea Mays
MTSSRSGSSSRLRRPRALCSGRAPWTAASSSASRTRARGCPSAAAASPRRRRRPTRARSGRRRRTTRASSPAGPTRGRCTSSATASWRRRRRRRRRARRGRSVCRRERIPVHARVA

SEQ ID NO: 180148 - protein, 231 aa, Zea Mays
MFLRSKIQEMILRRRSRSMNSAGAQRGHVPDQAPSSSTVPCDDDSAGAGVVAFARSPAAEPEPETASSLSPTSVLDAAAAYVPRTGKRRRPWRARDNNGGLADVLDCTDDQQQERIVLAATSSSRSLLRSCSLDRRVEFGVKNKSSWLPLRGRGEPAAPAPADPREIGPSSEDYTCVISRGPNPRTVHIFGDRVVEAEAETETESSPRPISLPTRTDPRPRTRSLMSDDAA

SEQ ID NO: 180149 - protein, 77 aa, Zea Mays
MGDAMLLFAQSPVLRRPVEAVAWLLGRLLRVLFTLLRLRAAHSYRRSARRTLEDFIQVGDIVLPPPPWAKGSCQRIH

SEQ ID NO: 180150 - protein, 96 aa, Zea Mays
MKGRARGAARTLAMGDGMAGVAFGAARHVGLLFVPSPVCRLPLNMQYRQQKTLPLAAPKPFLRVSRERVLRSQVHRRRSSPVSSNKVVEMFGLYPH

SEQ ID NO: 180151 - protein, 396 aa, Zea Mays
MRAARRLARVRREALAACMTCPLCRGLLREATAVALCLHTFCRDCIVEKINDDDADCCPVCNIDLGCDPEEKLRPDHNLQDIRNKVFPIKKINADSPKSLTTLPAKRKQRSLSSLVVDTPRSVVKRTGLTGKRTKAKRKTVASSAASPINNGTMQLPTKFENRDQKTDKSCASQSTNVASAANKTENQDLKKTRKTSAKQSTRAATSANRKQQNTDVDVSSKPSSENRKNGTTADKDELRKYSKIPRSTPKIHAVNEEQIKKKEDELPTRKAEADNKVVIPGTTVREHSNNSNLKEKDNGSSPESSPLKDKTTADDDSYQCLLGSASDVRDPITTPVWFLLISLPNQKEDPQLPQLSKSYMRIKDRSLQISSVQRYIMKKLDLANENERDCLRVWS

SEQ ID NO: 180152 - protein, 373 aa, Zea Mays
MRAARRLARVRREALAACMTCPLCRGLLREATAVALCLHTFCRDCIVEKINDDDADCCPVCNIDLGCDPEEKLRPDHNLQDIRNKVFPIKKINADSPKSLTTLPAKRKQRSLSSLVVDTPRSVVKRTGLTGKRTKAKRKTVASSAASPINNGTMQLPTKFENRDQKTDKSCASQSTNVASAANKTENQDLKKTRKTSAKQSTRAATSANRKQQNTDVDVSSKPSSENRKNGTTADKDELRKYSKIPRSTPKIHAVNEEQIKKKEDELPTRKAEADNKVVIPGTTVREHSNNSNLKEKDNGSSPESSPLKDKTTADDDSYQCLLGSASDVRDPITTPERRSTTASVIKELHENQRPQFADFFCTEVHHEEAGSS

SEQ ID NO: 180153 - protein, 304 aa, Zea Mays
MQLPTKFENRDQKTDKSCASQSTNVASAANKTENQDLKKTRKTSAKQSTRAATSANRKQQNTDVDVSSKPSSENRKNGTTADKDELRKYSKIPRSTPKIHAVNEEQIKKKEDELPTRKAEADNKVVIPGTTVREHSNNSNLKEKDNGSSPESSPLKDKTTADDDSYQCLLGSASDVRDPITTPVWFLLISLPNQKEDPQLPQLSKSYMRIKDRSLQISSVQRYIMKKLDLANENEVEIICHGEPICPSSTLHGLMELWHRRQPAEPVEALVGAPAKEFVIELGFRRRRHPYLAPGTVAVPPEPS

SEQ ID NO: 180154 - protein, 392 aa, Zea Mays
MRAARRLARVRREALAACMTCPLCRGLLREATAVALCLHTFCRDCIVEKINDDDADCCPVCNIDLGCDPEEKLRPDHNLQDIRNKVFPIKKINADSPKSLTTLPAKRKQRSLSSLVVDTPRSVVKRTGLTGKRTKAKRKTVASSAASPINNGTMQLPTKFENRDQKTDKSCASQSTNVASAANKTENQDLKKTRKTSAKQSTRAATSANRKQQNTDVDVSSKPSSENRKNGTTADKDELRKYSKIPRSTPKIHAVNEEQIKKKEDELPTRKAEADNKVVIPGTTVREHSNNSNLKEKDNGSSPESSPLKDKTTADDDSYQCLLGSASDVRDPITTPVWFLLISLPNQKEDPQLPQLSKSYMRIKDRSLQISSVQRYIMKKLDLANENELIFG

SEQ ID NO: 180155 - protein, 880 aa, Zea Mays
MNALEQLASIDLIELCKEARIERCRATRDLSSCGRYVHHVLNSCGHASLCAECSQRCDVCPICRSPIPDNGNRVQLRLYYKCLEEGLISKQHDERFQEKEDHGNPVSMDVQQLHSLFDVAVQNNLTSLICHYRSGLETMRSRLSQLQKFATQLAGIYSILEVMVSSFNEAVSAHVNDLHQLIENTLKAKQHLEAMIWCIRHRFIQDICSRYTDHTSWSSDVIQRKAYAEERKWPGFSDKGSDINEANQTTLFIEQALQNLGIEQNYRDKEEDITITCLQNEQSSSMFCSTITTDHCSIDRYPFKNLREAVDVLFLHGASDMVIAKQAILLYYLFDRHWSRPDSEWRYLVDDFATTFGITNRTLLECLVFCLLDDHSSEALKEACSLLPKIFSKETHPKIAQVLLERQRPDMALLVLKCTGRDSFSATENFEKDGISSLSEAVTAVRVRIECGLLTEAFMYHRSYCSKVKEQHSANMTHTEDAFEGSWIYHVEMMMVEFCTICIERNLVDKMIDLPWDSEEEKHLHKSLFESAHEAPMDPIGSLLVVYYLRRYRYLEAYGVDRSLQKFEQKELENATEEIASKIRAIAQWRESLVAKCLDMLPEVQRENVKAINSGEQIQFARTAQISSPAHVGKSQNPVMDLSTTFTSVLQNKSSLFSKNNALTDSSGLIRSSHSERKVPSALQTRAPPHGSPISNMRSTVGGKFPTVGQNVDSPFLRGAKGISSRKGETGFKEGIKYADHDPLPMYLNLSSGDTPTKDYRTSLLKAEANKTTYFQGQDSVGKGEFHFGSRAVKPFNLNGTGAGQNGLAKISGYAGFREDYKVPTKENILSFSKKSSVGGAEASKGVSRWRSDESSEEERTNRESGAPLVTRRRPRFSRR

SEQ ID NO: 180156 - protein, 274 aa, Zea Mays
MDRYQRVERPRNESTIEENEIRITAQGLIRNYVSYATSLLQERRIKEIVLKAMGQAISKSVAVAEIIKKRIPGLHQDTNISSVSITDVWEPIEEGLVPLEMTRHVSMISITLSPRELDKHTPGYQAPVYIEQPRQQQVPPPQRQPRRPPAQFQQLEYEDSYARGRGRGRGRGRGWGRGGYGGYGGYGNNQGGYHQGGGYYDNQGGYNGYDNQGGYSGYDNQGGYGGGYGYNQGRYGNYQENGGYNRGRGSGMRGRGNWGYRGDSSAGGSLGLVK

SEQ ID NO: 180157 - protein, 277 aa, Zea Mays
MDRYQRVERPRNESTIEENEIRITAQGLIRNYVSYATSLLQERRIKEIVLKAMGQAISKSVAVAEIIKKRIPGLHQDTNISSVSITDVWEPIEEGLVPLEMTRHVSMISITLSPRELDKHTPGYQAPVYIEQPRQQQVPPPQRQPRRPPAQFQQLEYEDSYARGRGRGRGRGRGWGRGGYGGYGGYGNNQGGYHQGGGYYDNQGGYNGYDNQGGYSGYEGGRVYEGGRGGGYEGGRGGGYEGGRGGGYEGGRGGSAQGGRGYGGRGRGRMGGRGRGN

SEQ ID NO: 180158 - protein, 255 aa, Zea Mays
MTRHVSMISITLSPRELDKHTPGYQAPVYIEQPRQQQVPPPQRQPRRPPAQFQQLEYEDSYARGRGRGRGRGRGWGRGGYGGYGGYGNNQGGYHQGGGYYDNQGGYNGYDNQGGYSGYDNQGGYGGGYGYNQGRYGNYQENGGYNRGRGSGMRGRGNWGYRGGYEGGRGGGYGGGRGGGYEGGRGGGYEGGRGGGYEGGRVYEGGRGGGYEGGRGGGYEGGRGGGYEGGRGGSAQGGRGYGGRGRGRMGGRGRGN

SEQ ID NO: 180159 - protein, 228 aa, Zea Mays
MPLGTSPVVAEAEAWTWENAAAGAAAGFATVAALHPLDVVRTRFQVSGGRGWSEVPPYRNTAHAVYTITRSEGLRGLYAGFYPAVLGSTVSWGLYFFLGRMTSFIQSIISSQLQKQVSLFTNPIWLVKTRLQLQTAKHHTSQYSGFSDALKTILREEGFLALYRGIGPGLLLVTHGAIQFTAYEELRKAMIFFKSAQSRADDAGGGESLVVTDQMCVWVLNIDFSMVQ

SEQ ID NO: 180160 - protein, 161 aa, Zea Mays
MQDFIPQFLDQLFPGAYISFSITELNKGTYRGRMTSFIQSIISSQLQKQVSLFTNPIWLVKTRLQLQTAKHHTSQYSGFSDALKTILREEGFLALYRGIGPGLLLVTHGAIQFTAYEELRKAMIFFKSAQSRADDAGGGESLVVTDQMCVWVLNIDFSMVQ

SEQ ID NO: 180161 - protein, 177 aa, Zea Mays
MPLGTSPVVAEAEAWTWENAAAGAAAGFATVAALHPLDVVRTRFQVSGGRGWSEVPPYRNTAHAVYTITRSEGLRGLYAGFYPAVLGSTVSWGLYFFFYNRAKQRYLQRKNDQLHPVHHLISAAEAGALVSLFTNPIWLVKTRLQLQTAKHHTSQYSGFSARCFENYSKRGGISCTL

SEQ ID NO: 180162 - protein, 207 aa, Zea Mays
MTSFIQSIISSQLQKQVSLFTNPIWLVKTRLQLQTAKHHTSQYSGFSDALKTILREEGFLALYRGIGPGLLLVTHGAIQFTAYEELRKAMIFFKSAQSRADDAGGGESLLNSIDFAALGAGSKVAAILLTYPYQVIRARLQQRPGTDGTPKYSNSWHVVKETAKYEGVRGFYRGITSNLLKNLPAASLTFVVYENVIKLFKATKEKT

SEQ ID NO: 180163 - protein, 430 aa, Zea Mays
MNPAPVANGAAAGAGVGMNRLGGRLWYAAAGALIVALLAVAVSYRSFPDIPSSSPGSCGCPAARKYTGMVEDCCCDYETVDAINEEVLHPILQELVKLPFFSMMCQEGKPQAAVDKTLDSKVFKRWVETDNPWTSDDETDNNEMTYVNLQLNPERYTGYTGDSARRIWDAIYKENCPKYPSEELCHEKKVLYKLISGLHSSISVHIAYDYLLDESTNSWGQNLSLLYDRVLKYPERVQNLYFTYLFVLRAVTKAADYLEQAEYNTGNPEDDLKTESLVKQLLYNSQLRSACPLPFDEAKLWQGENGPELKQEIQKQFRNISAIMDCVGCEKCRLWGKLQVLGLGTALKILFSVDGDSHLNQPLQLQRNEVIALFNLLNRLSESVKFVHEKGSSVEEVINEQSPSTVQKGASKTNLKGLFGYSQYTWIGWD

SEQ ID NO: 180164 - protein, 162 aa, Zea Mays
MQGVSVVALLRHFGCPCCWELASVLRDTKERFDSAGVKLIAVGVGTPAKARILAERLPFPLEYLYADPDRKAYNLLGLYFGVGRTFFNPASAKVFSRFDSLKEAVKNYTIEATPDDRAGVLQQGGMFVFKGKELLYARKDEGTGDHAPLDDVLNICCKVPVT

SEQ ID NO: 180165 - protein, 265 aa, Zea Mays
MAYNGQYGFGSYGMGLEDKLGLYPSSSGTLSQDIQMSEEHSGVVKKRKGVEDCVTLLHDAGDQQTKGSPQPERNSVEEGNRKISPKMQSKEDSSDGDGTKEDYVHIRAKRGQATNSHSLAERLRRKKISERMKLLQDLVPGCSKITGKAVMLDEIINYVQSLQRQVEIISKQMLLSQDRHLAFYGVEPGSSGLTGPFNQGIMQPELMCTIANPVDVLHGAIHDASTMNHIPSMWEGLQNMPQMNFNPGVAADSGTNNSGSMKIEQ

SEQ ID NO: 180166 - protein, 261 aa, Zea Mays
MAYNGQYGFGSYGMGLEDKLGLYPSSSGTLSQDIQMSEEHSGVVKKRKGVEDCVTLLHDAGDQQTKGSPQPERNSVEEGNRKISPKMQSKEDSSDGDGTKEDYVHIRAKRGQATNSHSLAERLRRKKISERMKLLQDLVPGCSKITGKAVMLDEIINYVQSLQRQVEIISKQVKPPTRSPYLPLGSSGLTGPFNQGIMQPELMCTIANPVDVLHGAIHDASTMNHIPSMWEGLQNMPQMNFNPGVAADSGTNNSGSMKIEQ

SEQ ID NO: 180167 - protein, 208 aa, Zea Mays
MAYNGQYGFGSYGMGLEDKLGLYPSSSGTLSQDIQMSEEHSGVVKKRKGVEDCVTLLHDAGDQQTKGSPQPERNSVEEGNRKISPKMQSKEDSSDGDGTKEDYVHIRAKRGQATNSHSLAERLRRKKISERMKLLQDLVPGCSKITGKAVMLDEIINYVQSLQRQVEFLSMKLATVNPELGFDIEQIISKQDQAALLAHLTKESCSQN

SEQ ID NO: 180168 - protein, 222 aa, Zea Mays
MAYNGQYGFGSYGMGLEDKLGLYPSSSGTLSQDIQMSEEHSGVVKKRKGVEDCVTLLHDAGDQQTKGSPQPERNSVEEGNRKISPKMQSKEDSSDGDGTKEDYVHIRAKRGQATNSHSLAERLRRKKISERMKLLQDLVPGCSKITGKAVMLDEIINYVQSLQRQVEFLSMKLATVNPELGFDIEQIISKQCKLLLADAAFTRQTSCFLWSRTRIKRPYWPI

SEQ ID NO: 180169 - protein, 198 aa, Zea Mays
MQSKEDSSDGDGTKEDYVHIRAKRGQATNSHSLAERLRRKKISERMKLLQDLVPGCSKITGKAVMLDEIINYVQSLQRQVEFLSMKLATVNPELGFDIEQIISKQMLLSQDRHLAFYGVEPGSSGLTGPFNQGIMQPELMCTIANPVDVLHGAIHDASTMNHIPSMWEGLQNMPQMNFNPGVAADSGTNNSGSMKIEQ

SEQ ID NO: 180170 - protein, 294 aa, Zea Mays
MDSPVPATLARAPARPQARAGEEACADTRQDAPAEAEPPPRRPAAFYSSVFAQIEEIGWKQLVSATGDGVSCLTFRVVDEPGRMHLLEITLPMGYPESPPSISADVPYLPKIHWSKNSRLKDVICQFQAHLKILQEFWNTMDEIDKVLWIVDPTKPSYAMSHRRIALGDDCYILLQVDARKPNSLPECRFLGTDGKLDQLIINWRKNRKKWDTKKKFHENLAAVLDFALPSPPSVGDKAKDDEQADCGICYAKHLPVVLASLIRQMTNSVPTAGVRRTTCVRTPAAAEPSIPCA

SEQ ID NO: 180171 - protein, 182 aa, Zea Mays
MDEIDKVLWIVDPTKPSYAMSHRRIALGDDCYILLQVDARKPNSLPECRFLGTDGKLDQLIINWRKNRKKWDTKKKFHENLAAVLDFALPSPPSVGDKAKDDEQADCGICYAKHLPVDDELGAHSGCATDYMCENPSCSRAFHSVCLRDWLRSITTTRQSFDVLFGNCPYCSDPVAVKITGH

SEQ ID NO: 180172 - protein, 700 aa, Zea Mays
MEFSALLTSAGINIAVCVLFLSLYSILRKQPHNFSVYFGRRLAEERFQRQDDYFSFERLLPTAGWIVKAYWCTEEEIRQVAGLDSVVFLRLFIFRLWVHCSALYVITISACILLFHEYKYISRKRLAHVTGYPPNPGLFTVLVRSIPRFDNELLDDTIRNFFVNYHGSSYLSHQMIFRKGHFQKFVDRAERAYRRFVRVRLSVSERNGRSSMSRCGVCGVRASSFQLYRNKFIEAKKSDLTNPEVVEAQKNCPGALVFFKTRYAAVVASRVFQSSNPMLWVTDLAPEPRDVYWSNLWIPYRQIWLRKLATLAASIVFMFVFIVPVAFVQSMMQLEQLKRMFPSLTGLLNKSFFARVITGYLPSVTLLLSLYTVPPLMMLFSSIEGSISRSGRKRSGCLKILFFNIWNVFFVNVLSGSVLNQLNVFSRPKDMPTMLAELVPKQATFFITYVLTSGWASLCSEILQVFNLVYNFFSRFVCCCHRQNKEYVYSFPYHTEVPKVLLFNLLGFTFSIMAPLILPFLLVYFCLGYLVYRNQILNVYYPKYEMGGKLWPVMHNAIVFSLVLTQVIALGVFTIKRSPVTAGFTILLLVGTVLFNEYCRHRFSRIFEAYSAQDVIELDRDDEQSGRMQEIHQHLLDAYSQTPPGEGSSRGGSQVPIELIMEDPAQEASESSQELCDTVQEVSGAIHDHDHVVEDKAHSV

SEQ ID NO: 180173 - protein, 431 aa, Zea Mays
MGCAASRLEDEEAVKMCRDRRDLIKQALEQHNRFASSHIAYIESLKRVSVALQRFVAGDDHHELIFDTFISPIKQQKPEMLGLPYGSYEKRTIHVSRYLRSGPNPSVSIEEHPRPVETVRVESNYPMDNDSGMVDRFLPTHSSPVRSSSYYPPPYNRPSYQPPLDQETVRNSSYCMPYDRPSYAPPSPQETMRTSYYASYDRPSYPPPSPQEPLRNSYHVPYDRPSYPPPSPQEQESSPWDFFWNPFSSLDSFTYPRPRSSYDNVVTDDELVRLQRVREEEGIPELEEEDDECQEHVQMDRKEEKEEHDNADDDEDDDEDDGEECEHSDECMVSNVNFDANMKQETKGFESKGIQCTEAPEPCKTVELEIKAHKKELMRNRVANAEETPGFTVYLNRRPASLVEAMKDIDCQFSGICDAARKISVMLERRC

SEQ ID NO: 180174 - protein, 364 aa, Zea Mays
MGCAASRLEDEEAVKMCRDRRDLIKQALEQHNRFASSHIAYIESLKRVSVALQRFVAGDDHHELIFDTFISPIKQQKPEMLGLPYGSYEKRTIHVSRYLRSGPNPSVSIEEHPRPVETVRVESNYPMDNDSGMVDRFLPTHSSPVRSSSYYPPPYNRPSYPPPSPQEQESSPWDFFWNPFSSLDSFTYPRPRSSYDNVVTDDELVRLQRVREEEGIPELEEEDDECQEHVQMDRKEEKEEHDNADDDEDDDEDDGEECEHSDECMVSNVNFDANMKQETKGFESKGIQCTEAPEPCKTVELEIKAHKKELMRNRVANAEETPGFTVYLNRRPASLVEAMKDIDCQFSGICDAARKISVMLERRC

SEQ ID NO: 180175 - protein, 178 aa, Zea Mays
MASSVSGNYPRFKSADIDERAIRREEPEQLVKALAEAKAEAIKQKLQGDSAPVTDGDQPARLLITSDQVMVSKGVIRERPRSAEEAREFINGYSGDRAFAVNFVLVTDLSTGTTRGGWDVPEVTDGMPETFLKTETLSEVFAPQIITTTSVLLCVAFCRSGFSTYRTSSSTKWLIRAT

SEQ ID NO: 180176 - protein, 93 aa, Zea Mays
MVSKGVIRERPRSAEEAREFINGYSGDRAFAVNFVLVTDLSTGTTRGGWDVPEIRFQHIPDEFIDQVVNLRHTTDAVLLPVVQCLHSKPFVQG

SEQ ID NO: 180177 - protein, 213 aa, Zea Mays
MASSVSGNYPRFKVILGSSSPARREILADMGYEFTVMSADIDERAIRREEPEQLVKALAEAKAEAIKQKLQGDSAPVTDGDQPARLLITSDQVMVSKGVIRERPRSAEEAREFINGYSGDRAFAVNFVLVTDLSTGTTRGGWDVPEIRFQHIPDEFIDQVVNQGDMTCVAGGLKLTHPSVQPFVKELVGTVDSVRGLPRELTEKLIRESLQGK

SEQ ID NO: 180178 - protein, 1226 aa, Zea Mays
MEEDDEFGDLYTDILIPTHTPASTSALSNPVLVETLHRPPPHPNPTPVAAAAEEVDDDWLLGGSEPIPGVDPTGDWADEDDDGGEPAPPAKRSTSADDIDPLMGGGAGDSGPVIPGLSSSSAAGAAGSDEWDSDSEDDIQIVLNETDGRPGLVEDEGDDEDGEDLVIVADGPAMEEQDWGEDPAAAGAEGERKDGCEPGKTVAAPTGRIGYSGGGPGFHQQHHSMFKYVRPGAPGASVGGVPGGPGQFRPPGPLGPFSGRGRGEWRPAAGRGMNKSFHSGYGITPWGGSGRNFGGGLDFALPPHKTIFDIDVETAFEEKPWKFPGADISDFFNFGLDEEKWKDFCKQLDQLRLESTMQSRIRVYESGRSEQDYDPDLPPELAAVTGHPDISADSRNKMVNGHTDFSAQGRGPANVRTPLMTGRPIQVETNYTDRFPSVDSRSHRMRESDSVIEIVCQGRDSMDDETVDQTEKDSQGVKKTQHKGQLPVSSESDMLSMDANTHSPPSYKTRGSPRGAWPLKGSSLGQNSIREIESSNEVIPRQSSSKRCHDSQKENLIEGSENKADSDSEGSLAANDDVADKLSTEDHFDDAGGGGGGDDDKLTLVGRVEMDVDDATSDPNMPSDANHDDNLVHSDTKQKHISVVEQPTEHNSSEPDELRNTENSKGRSGSSKDQQKHLESGEEVLQDKQLRRVNNVRMHHDAEEHKLRQKDEHSRDAKSDLERSRLPSRGREDIHQSYANRDRVDIQGRSYNKVRETEILPRRDDGVHSRRAKEEDLRLEYNVEGGARHRNKVRPIDRNDRDEDHSRKRLDDGDRRGSRQRERGDVVLNRRESDDSLIKRKKDDENLRRLKPENEDMVATHGYKARDDSNRRKKERDDGIDQKRRDDSGRLREKDDDRYHVKQKDGNWRQREREDRQRPKQENTLTVQREEGRGTGRGSRMMDDKLVSGGRKKDEPRSSLLSKDTQERTRQNEPSRRGQGVEENNMQNKGRFDDNSNSERNSRQEKQNNNRLSGSSDARHAGRDKHRESTRKGRGSELAEHDLHRSSKRRCEDHESHRSGKVETKEVNEQESSRGHAALSKKGQNPQPDNSLLNEVEEDAISDDENHEDSRRGRSKLERWTSHKEIEYSNIDDDSTQTFPTIKADVEADETSDKMTEECERDRHLDTVERLKRRSERFKLPMPGEKDAPQSKKVDTEVQPPQNESSAVDMEVKPERPARKRRWTGS

SEQ ID NO: 180179 - protein, 1249 aa, Zea Mays
MEEDDEFGDLYTDILIPTHTPASTSALSNPVLVETLHRPPPHPNPTPVAAAAEEVDDDWLLGGSEPIPGVDPTGDWADEDDDGGEPAPPAKRSTSADDIDPLMGGGAGDSGPVIPGLSSSSAAGAAGSDEWDSDSEDDIQIVLNETDGRPGLVEDEGDDEDGEDLVIVADGPAMEEQDWGEDPAAAGAEGERKDGCEPGKTVAAPTGRIGYSGGGPGFHQQHHSMFKYVRPGAPGASVGGVPGGPGQFRPPGPLGPFSGRGRGEWRPAAGRGMNKSFHSGYGITPWGGSGRNFGGGLDFALPPHKTIFDIDVETAFEEKPWKFPGADISDFFNFGLDEEKWKDFCKQLDQLRLESTMQSRIRVYESGRSEQDYDPDLPPELAAVTGHPDISADSRNKMVNGHTDFSAQGRGPANVRTPLMTGRPIQVETNYTDRFPSVDSRSHRMRESDSVIEIVCQGRDSMDDETVDQTEKDSQGVKKTQHKGQLPVSSESDMLSMDANTHSPPSYKTRGSPRGAWPLKGSSLGQNSIREIESSNEVIPRQSSSKRCHDSQKENLIEGSENKADSDSEGSLAANDDVADKLSTEDHFDDAGGGGGGDDDKLTLVGRVEMDVDDATSDPNMPSDANHDDNLVHSDTKQKHISVVEQPTEHNSSEPDELRNTENSKGRSGSSKDQQKHLESGEEVLQDKQLRRVNNVRMHHDAEEHKLRQKDEHSRDAKSDLERSRLPSRGREDIHQSYANRDRVDIQGRSYNKVRETEILPRRDDGVHSRRAKEEDLRLEYNVEGGARHRNKVRPIDRNDRDEDHSRKRLDDGDRRGSRQRERGDVVLNRRESDDSLIKRKKDDENLRRLKPENEDMVATHGYKARDDSNRRKKERDDGIDQKRRDDSGRLREKDDDRYHVKQKDGNWRQREREDRQRPKQENTLTVQREEGRGTGRGSRMMDDKLVSGGRKKDEPRSSLLSKDTQERTRQNEPSRRGQGVEENNMQNKGRFDDNSNSERNSRQEKQNNNRLSGSSDARHAGRDKHRESTRKGRGSELAEHDLHRSSKRRCEDHESHRSGKVETKEVNEQESSRGHAALSKKGQNPQPDNSLLNEVEEDAISDDENHEDSRRGRSKLERWTSHKEIEYSNIDDDSTQTFPTIKADVEADEVGKSQVSAAAGNSDINSNVDTGQTSDKMTEECERDRHLDTVERLKRRSERFKLPMPGEKDAPQSKKVDTEVQPPQNESSAVDMEVKPERPARKRRWTGS

SEQ ID NO: 180180 - protein, 1067 aa, Zea Mays
MEEDDEFGDLYTDILIPTHTPASTSALSNPVLVETLHRPPPHPNPTPVAAAAEEVDDDWLLGGSEPIPGVDPTGDWADEDDDGGEPAPPAKRSTSADDIDPLMGGGAGDSGPVIPGLSSSSAAGAAGSDEWDSDSEDDIQIVLNETDGRPGLVEDEGDDEDGEDLVIVADGPAMEEQDWGEDPAAAGAEGERKDGCEPGKTVAAPTGRIGYSGGGPGFHQQHHSMFKYVRPGAPGASVGGVPGGPGQFRPPGPLGPFSGRGRGEWRPAAGRGMNKSFHSGYGITPWGGSGRNFGGGLDFALPPHKTIFDIDVETAFEEKPWKFPGADISDFFNFGLDEEKWKDFCKQLDQLRLESTMQSRIRVYESGRSEQDYDPDLPPELAAVTGHPDISADSRNKMVNGHTDFSAQGRGPANMTGRPIQVETNYTDRFPSVDSRSHRMRESDSVIEIVCQGRDSMDDETVDQTEKDSQGVKKTQHKGQLPVSSESDMLSMDANTHSPPSYKTRGSPRGAWPLKGSSLGQNSIREIESSNEVIPRQSSSKRCHDSQKENLIEGSENKADSDSEGSLAANDDVADKLSTEDHFDDAGGGGGGDDDKLTLVGRVEMDVDDATSDPNMPSDANHDDNLVHSDTKQKHISVVEQPTEHNSSEPDELRNTENSKGRSGSSKDQQKHLESGEEVLQDKQLRRVNNVRMHHDAEEHKLRQKDEHSRDAKSDLERSRLPSRGREDIHQSYANRDRVDIQGRSYNKVRETEILPRRDDGVHSRRAKEEDLRLEYNVEGGARHRNKVRPIDRNDRDEDHSRKRLDDGDRRGSRQRERGDVVLNRRESDDSLIKRKKDDENLRRLKPENEDMVATHGYKARDDSNRRKKERDDGIDQKRRDDSGRLREKDDDRYHVKQKDGNWRQREREDRQRPKQENTLTVQREEGRGTGRGSRMMDDKLVSGGRKKDEPRSSLLSKDTQERTRQNEPSRRGQGVEENNMQNKGRFDDNSNSERNSRQEKQNNNRLSGSSDARHAGRDKHRESTRKGRGSELAEHDLHRSSKRRCEDHESHRSGKVCSCSLTLLHM

SEQ ID NO: 180181 - protein, 969 aa, Zea Mays
MEACCWSRHEQKFSFRLWNHSMGWFRAQFWWWTRFCTSSSQDQLRLESTMQSRIRVYESGRSEQDYDPDLPPELAAVTGHPDISADSRNKMVNGHTDFSAQGRGPANVRTPLMTGRPIQVETNYTDRFPSVDSRSHRMRESDSVIEIVCQGRDSMDDETVDQTEKDSQGGNKGAHCIEGKPYSSDKINNSDHNSNSVKKTQHKGQLPVSSESDMLSMDANTHSPPSYKTRGSPRGAWPLKGSSLGQNSIREIESSNEVIPRQSSSKRCHDSQKENLIEGSENKADSDSEGSLAANDDVADKLSTEDHFDDAGGGGGGDDDKLTLVGRVEMDVDDATSDPNMPSDANHDDNLVHSDTKQKHISVVEQPTEHNSSEPDELRNTENSKGRSGSSKDQQKHLESGEEVLQDKQLRRVNNVRMHHDAEEHKLRQKDEHSRDAKSDLERSRLPSRGREDIHQSYANRDRVDIQGRSYNKVRETEILPRRDDGVHSRRAKEEDLRLEYNVEGGARHRNKVRPIDRNDRDEDHSRKRLDDGDRRGSRQRERGDVVLNRRESDDSLIKRKKDDENLRRLKPENEDMVATHGYKARDDSNRRKKERDDGIDQKRRDDSGRLREKDDDRYHVKQKDGNWRQREREDRQRPKQENTLTVQREEGRGTGRGSRMMDDKLVSGGRKKDEPRSSLLSKDTQERTRQNEPSRRGQGVEENNMQNKGRFDDNSNSERNSRQEKQNNNRLSGSSDARHAGRDKHRESTRKGRGSELAEHDLHRSSKRRCEDHESHRSGKVETKEVNEQESSRGHAALSKKGQNPQPDNSLLNEVEEDAISDDENHEDSRRGRSKLERWTSHKEIEYSNIDDDSTQTFPTIKADVEADEVGKSQVSAAAGNSDINSNVDTGQTSDKMTEECERDRHLDTVERLKRRSERFKLPMPGEKDAPQSKKVDTEVQPPQNESSAVDMEVKPERPARKRRWTGS

SEQ ID NO: 180182 - protein, 414 aa, Zea Mays
MEEDDEFGDLYTDILIPTHTPASTSALSNPVLVETLHRPPPHPNPTPVAAAAEEVDDDWLLGGSEPIPGVDPTGDWADEDDDGGEPAPPAKRSTSADDIDPLMGGGAGDSGPVIPGLSSSSAAGAAGSDEWDSDSEDDIQIVLNETDGRPGLVEDEGDDEDGEDLVIVADGPAMEEQDWGEDPAAAGAEGERKDGCEPGKTVAAPTGRIGYSGGGPGFHQQHHSMFKYVRPGAPGASVGGVPGGPGQFRPPGPLGPFSGRGRGEWRPAAGRGMNKSFHSGYGITPWGGSGRNFGGGLDFALPPHKTIFDIDVETAFEEKPWKFPGADISDFFNFGLDEEKWKDFCKQLDQLRLESTMQSRIRVYESGRSEQDYDPDLPPELAAVTGHPDISADSRNKMVNGHTDFSAQGRGPAN

SEQ ID NO: 180183 - protein, 419 aa, Zea Mays
MEEDDEFGDLYTDILIPTHTPASTSALSNPVLVETLHRPPPHPNPTPVAAAAEEVDDDWLLGGSEPIPGVDPTGDWADEDDDGGEPAPPAKRSTSADDIDPLMGGGAGDSGPVIPGLSSSSAAGAAGSDEWDSDSEDDIQIVLNETDGRPGLVEDEGDDEDGEDLVIVADGPAMEEQDWGEDPAAAGAEGERKDGCEPGKTVAAPTGRIGYSGGGPGFHQQHHSMFKYVRPGAPGASVGGVPGGPGQFRPPGPLGPFSGRGRGEWRPAAGRGMNKSFHSGYGITPWGGSGRNFGGGLDFALPPHKTIFDIDVETAFEEKPWKFPGADISDFFNFGLDEEKWKDFCKQLDQLRLESTMQSRIRVYESGRSEQDYDPDLPPELAAVTGHPDISADSRNKMVNGHTDFSAQGRGPANVRTPL

SEQ ID NO: 180184 - protein, 437 aa, Zea Mays
MEVALVERLEAAVKIGGKVLDATKVLAEAFAVAKDMLVQAKQHQKPASMADAQGFVKPLSDVMAKATAMTEGRRPDYFNHLKSVADSLPALAWVAFLGKDCGMSFPTAHVEESWQMAEFYNNKVLVEYRNKDPDHVEWAKALKDLYMPGLRDYVKKHYPLGPVWGPAGGAVVSQPKAAAPTPKAPAVKAPPPPAPPAAPLFSTEKSPKSSKPKEGMSAVFQEISSKPVTAGLRKVTDDMKSKNRADRSGVVSSTAPAPAAAPEKTSRAGSFSFKSGPPKLELQMGRKWVVENQVGKKTLAIDDCDSRQSVYVYGCKDSVLQVNGKVNNITVDKCTKFGIVFKDVVAAFEIVNCNGVEVQCQGTSPTISIDNTSGCQLYLSKDSLGASITSAKSSEINVMVPSGGADGDWVEHALPQQYIHSFKDGQFTTSPVSHSGA

SEQ ID NO: 180185 - protein, 469 aa, Zea Mays
MEVALVERLEAAVARLEAAVASGASLASTAPRDFDALEARSDPAIMAYDEFVAEAVGRLTAAAEKIGGKVLDATKVLAEAFAVAKDMLVQAKQHQKPASMADAQGFVKPLSDVMAKATAMTEGRRPDYFNHLKSVADSLPALAWVAFLGKDCGMSFPTAHVEESWQMAEFYNNKVLVEYRNKDPDHVEWAKALKDLYMPGLRDYVKKHYPLGPVWGPAGGAVVSQPKAAAPTPKAPAVKAPPPPAPPAAPLFSTEKSPKSSKPKEGMSAVFQEISSKPVTAGLRKVTDDMKSKNRADRSGVVSSTAPAPAAAPEKTSRAGSFSFKSGPPKLELQMGRKWVVENQVGKKTLAIDDCDSRQSVYVYGCKDSVLQVNGKVNNITVDKCTKFGIVFKGTSPTISIDNTSGCQLYLSKDSLGASITSAKSSEINVMVPSGGADGDWVEHALPQQYIHSFKDGQFTTSPVSHSGA

SEQ ID NO: 180186 - protein, 380 aa, Zea Mays
MEVALVERLEAAVARLEAAVASGASLASTAPRDFDALEARSDPAIMAYDEFVAEAVGRLTAAAEKIGGKVLDATKVLAEAFAVAKDMLVQAKQHQKPASMADAQGFVKPLSDVMAKATAMTEGRRPDYFNHLKSVADSLPALAWVAFLGKDCGMSFPTAHVEESWQMAEFYNNKVLVEYRNKDPDHVEWAKALKDLYMPGLRDYVKKHYPLGPVWGPAGGAVVSQPKAAAPTPKAPAVKAPPPPAPPAAPLFSTEKSPKSSKPKEGMSAVFQEISSKPVTAGLRKVTDDMKSKNRADRSGVVSSTAPAPAAAPEKTSRAGSFSFKSGPPKLELQMGRKWVVENQVGKKTLAIDDCDSRQSVYVYGCKDSVLQVNGCCSSF

SEQ ID NO: 180187 - protein, 81 aa, Zea Mays
MELIEPFVVSVALLSPIAVESPDSLALLVFGSTKEQSSLETLLMPDSWWSFCDMDELFFFSTDKDLPSFSLISFFSVSIEF

SEQ ID NO: 180188 - protein, 109 aa, Zea Mays
MEITCKNGFLTRLKKILGVYFFPQKTPHRGRFCWRLTVAGRRRSSEGRIRLYDTAAATSAYPAVNHQRLRRPLAPHGNAKNVRLERSNRGDAPQRRHGGGGRVEAACYR

SEQ ID NO: 180189 - protein, 94 aa, Zea Mays
MVQEITGLPFPAPLLLRCLGGCHRRSAQMDACARVCAPELNLDTSAFSLLDRALVIEHKPYDRRADVFSFAIVLWELLTHKGIKQFFVAVKKEE

SEQ ID NO: 180190 - protein, 198 aa, Zea Mays
MVQEITGLPFPAPLLLRCLGGCHRRSAQMDACARVCAPELNLDTSAFSLLDRALVIEHKPYDRRADVFSFAIVLWELLTHKEPIEERTSTICIIKYHLRHHYWALLYDHVIRSPYNIKNIEKKKYSLYSVLMGLILSLNIFQNHFGANIVVTRGPLSCHDGSYPPYYAANITSTYFFTVRTLSVGSKRMMRRMSTIEE

SEQ ID NO: 180191 - protein, 906 aa, Zea Mays
MPFPTARWRRRREGTASRWCGILVLALVALAAGATAETSPLDVAAMRAVAKALGADKTLGWDVAGDPCSPKRWDGVSCDSSGRVTAIQVGARGLTGTLPPEVGDLTELTRLEVFDNKLSGPLPSLPGLSSLQVLLAHNSSFASIPSDFFKGLTGLTAVAIDYNPFASWSLPTDLAACASLANFSAVSANVSGTLPDFLGEMPALQRLSLSLNQLSGPVPASLAGAPLVQLWLNGAHLNGSISFVSNMTSLEQLWLHSNDFTGPMPDFSRFDNLWDLQLRDNELTGPVPESLFKLKALKNVTLTNNLLQGPMPQIPNQLHADIKADSERFCVQEAGKPCDPRVSLLLEVAAGFMYPKALATDWKGNDPCVFPGVSCIQEVDLSNNNLYGKLPTFASKSAVVKTAGNPNIGKDAPAPTAGSGGSNDSLSGGGSSGSIGNNGGSSPSSVGVIVGSVAGTVVGLGLVAALGFYCYKRKQKPFGRVQSPHAMVIHPRHSGSDDMVKITVAGGNANDGARASETYSQASNGPRDIHVVESGNMVISIQVLRNVTNNFSEENILGRGGFGTVYKGELHDGTKIAVKRMEAGVMGNKGLNEFKSEIAVLTKVRHRNLVSLLGYCLDGNERILVYEYMPQGALSQHLFEWSEKNLRPLEWKKRLSIALDVARGVEYLHSLAQQTFIHRDLKPSNILLGDDMKAKVADFGLVRLAPADGKCVSVETRLAGTFGYLAPEYAVTGRVTTKADVFSFGVILMELITGRKALDETQPEDSMHLVTWFRRTQLNKETFRKAIDPVIDLDEETYASVSTVSELAGHCCAREAHQRPDMGHAVNVLSTLSEVWKPADPDSDDSYGIDLNMSLPQALKRWQAFEDSSHFDGATSSFVASLDNTQTSIPTRPPGFADSFTSADGR

SEQ ID NO: 180192 - protein, 158 aa, Zea Mays
MELITGRKALDETQPEDSMHLVTWFRRTQLNKETFRKAIDPVIDLDEETYASVSTVSELAGHCCAREAHQRPDMGHAVNVLSTLSEVWKPADPDSDDSYGIDLNMSLPQALKRWQAFEDSSHFDGATSSFVASLDNTQTSIPTRPPGFADSFTSADGR

SEQ ID NO: 180193 - protein, 548 aa, Zea Mays
MLDALAGWFAQSLSPDTAARRPSRHRLRRLLPGLPLASSASRPPRATTSRPASPPPSTSRIFSAAGAQARRRCRRRRRPPSRLRLRHHQGDLLQLLLTTPPLIQAQSPRPRAARSDFPARWESLLPSIVSSLGTAVNAGDITATNSLLAAVVSLFSRFRNAFDNNALRLDLKYCLDIFAAPLLEVFLFASRRLQAAATTANPLELRPVFECLRLCCEIFYSLNSIDLPEFFEDNMRQWMTEFQAFLTTSYPPPVEADGAPDALRAAVCDNLQLYMEKYEEEFRGYLKEFVEAVWGLLMAQTASPSRVQLAVTAIRFLTTVAESVHHALFGSPEAMKQICDSVVVPNLRLRDEDEELFEGNWVEYVRRDSEGSDADTLRRAACRLLRGLAANYQEQVAALVSAQVQQMLVAYAANRSNNWKEKDAAIYLVIALMQKPGATGGGTPVVDMESFFTSVIVPELQAPDWQSEPMLKATVLRFLKEFKDQIPKATALALLQSVMRFLMHESNVVHSYAATFIENLLIIKDAVPVPGVTTVISPCALVLHQLSD

SEQ ID NO: 180194 - protein, 167 aa, Zea Mays
MMIILCLIALIELFTHVPVLRNFVEHLKRKNFNVCAVYLLDSQFVSDVTKYISGCMASLSAMIQLELPHINILSKMDLVSNKKDVEEYLDPNAQVLLSQLNRQMAPRFGKLNKCLAELVDDYSMVNFIPLDLRKESSIQYVLSSIDTCIQYGEDADVKVRDFEEDED

SEQ ID NO: 180195 - protein, 305 aa, Zea Mays
MALSALISTLLAAAICFVGPTILATSPADSLRSTRPRVTMGYAQLVIGPAGSGKSTYCSSLYDHCQTVGRTIHIVNLDPAAEHFDYPVDMDIRELISLDDVMEEIGLGPNGGLIYCMEHLEDSLDDWFDEQLENYLDDDYLVFDCPGQIELFTHVPVLRNFVEHLKRKNFNVCAVYLLDSQFVSDVTKYISGCMASLSAMIQLELPHINILSKMDLVSNKKDVEEYLDPNAQVLLSQLNRQMAPRFGKLNKCLAELVDDYSMVNFIPLDLRKESSIQYVLSSIDTCIQYGEDADVKVRDFEEDED

SEQ ID NO: 180196 - protein, 191 aa, Zea Mays
MGYAQLVIGPAGSGKSTYCSSLYDHCQTVGRTIHIVNLDPAAEHFDYPVDMDIRELISLDDVMEEIGLGPNGGLIYCMEHLEDSLDDWFDEQLENYLDDDYLVFDCPGQIELFTHVPVLRNFVEHLKRKNFNVCAVYLLDSQFVSDVTKYISGCMASLSAMIQLELPHINILSKMDLVSNKKDVEEFFFHS

SEQ ID NO: 180197 - protein, 312 aa, Zea Mays
MPARIVVTIWRVMKTRKFRRPNAADLSDYGCFVVLALGVASLQMIDISLIYHVIRGQGTIKLYVVYNVLEIFDKLCQSFGEDVLQVLFNSAEGLSACSTDNVTFELMRFILDEAIAVVAFVVHSFVLLAQAITLSTCIIAHNNALLALLVSNNFAEIKSNVFKRVSKENLHNLVYYDIIERFHIMAFLLFVLAQNILEAEGPWFDSFLIPVAYSEFLEDLCKQILNDKPDDRQKDLTFIPLAPACVVIRVLTPVYATLLPAGPFIWRIFWILLWSVLTYFMLAIFKIIVGLILRCLANWYVNLRLTRKQHVD

SEQ ID NO: 180198 - protein, 571 aa, Zea Mays
MSLRSGGRQLSFELLAGDLTADDPDDISPRSLPDTSSDGQRRRRRRSKRKRGFRSPPIQEAVSEGEQQPRVEGGGNSAAAFRVLDLKSTAETVCESSDAERSAASCVTYVGVELRQRSVSGGGRVVAASADDGTSSCGSSTRESAAAAAAVADVAAMAWRPEANGGMKKKLEKESSLDWEKYMKDNNKILGEFERLDKSPFRYFLGELYGGNSLRSTIAVGNEKKRQRVYNTMFHVPWRCERLIVAGFFVCLDSFLSLLTIMPARIVVTIWRVMKTRKFRRPNAADLSDYGCFVVLALGVASLQMIDISLIYHVIRGQGTIKLYVVYNVLEIFDKLCQSFGEDVLQVLFNSAEGLSACSTDNAITLSTCIIAHNNALLALLVSNNFAEIKSNVFKRVSKENLHNLVYYDIIERFHIMAFLLFVLAQNILEAEGPWFDSFLINASLVFLCEVLIDAIKHSFLAKFNEIKPVAYSEFLEDLCKQILNDKPDDRQKDLTFIPLAPACVVIRVLTPVYATLLPAGPFIWRIFWILLWSVLTYFMLAIFKIIVGLILRCLANWYVNLRLTRKQHVD

SEQ ID NO: 180199 - protein, 268 aa, Zea Mays
MSLRSGGRQLSFELLAGDLTADDPDDISPRSLPDTSSDGQRRRRRRSKRKRGFRSPPIQEAVSEGEQQPRVEGGGNSAAAFRVLDLKSTAETVCESSDAERSAASCVTYVGVELRQRSVSGGGRVVAASADDGTSSCGSSTRESAAAAAAVADVAAMAWRPEANGGMKKKLEKESSLDWEKYMKDNNKILGEFERLDKSPFRYFLGELYGGNSLRSTIAVGNEKKRQRVYNTMFHVPWRCERDSSSAWIPFCHCLQLCLHELSLPSGG

SEQ ID NO: 180200 - protein, 399 aa, Zea Mays
MSLRSGGRQLSFELLAGDLTADDPDDISPRSLPDTSSDGQRRRRRRSKRKRGFRSPPIQEAVSEGEQQPRVEGGGNSAAAFRVLDLKSTAETVCESSDAERSAASCVTYVGVELRQRSVSGGGRVVAASADDGTSSCGSSTRESAAAAAAVADVAAMAWRPEANGGMKKKLEKESSLDWEKYMKDNNKILGEFERLDKSPFRYFLGELYGGNSLRSTIAVGNEKKRQRVYNTMFHVPWRCERLIVAGFFVCLDSFLSLLTIMPARIVVTIWRVMKTRKFRRPNAADLSDYGCFVVLALGVASLQMIDISLIYHVIRGQGTIKLYVVYNVLEIFDKLCQSFGEDVLQVLFNSAEGLSACSTDNVTFELMRFILDEAIAVVAFDILFCRLHQLIFLLVTVG

SEQ ID NO: 180201 - protein, 298 aa, Zea Mays
MPARIVVTIWRVMKTRKFRRPNAADLSDYGCFVVLALGVASLQMIDISLIYHVIRGQGTIKLYVVYNVLEIFDKLCQSFGEDVLQVLFNSAEGLSACSTDNVTFELMRFILDEAIAVVAFVVHSFVLLAQAITLSTCIIAHNNALLALLVSNNFAEIKSNVFKRVSKENLHNLVYYDIIERFHIMAFLLFVLAQNILEAEGPWFDSFLIILNDKPDDRQKDLTFIPLAPACVVIRVLTPVYATLLPAGPFIWRIFWILLWSVLTYFMLAIFKIIVGLILRCLANWYVNLRLTRKQHVD

SEQ ID NO: 180202 - protein, 559 aa, Zea Mays
MSLRSGGRQLSFELLAGDLTADDPDDISPRSLPDTSSDGQRRRRRRSKRKRGFRSPPIQEAVSEGEQQPRVEGGGNSAAAFRVLDLKSTAETVCESSDAERSAASCVTYVGVELRQRSVSGGGRVVAASADDGTSSCGSSTRESAAAAAAVADVAAMAWRPEANGGMKKKLEKESSLDWEKYMKDNNKILGEFERLDKSPFRYFLGELYGGNSLRSTIAVGNEKKRQRVYNTMFHVPWRCERLIVAGFFVCLDSFLSLLTIMPARIVVTIWRVMKTRKFRRPNAADLSDYGCFVVLALGVASLQMIDISLIYHVIRGQGTIKLYVVYNVLEIFDKLCQSFGEDVLQVLFNSAEGLSACSTDNVTFELMRFILDEAIAVVAFVVHSFVLLAQAITLSTCIIAHNNALLALLVSNNFAEIKSNVFKRVSKENLHNLVYYDIIERFHIMAFLLFVLAQNILEAEGPWFDSFLIILNDKPDDRQKDLTFIPLAPACVVIRVLTPVYATLLPAGPFIWRIFWILLWSVLTYFMLAIFKIIVGLILRCLANWYVNLRLTRKQHVD

SEQ ID NO: 180203 - protein, 206 aa, Zea Mays
MRFILDEAIAVVAFVVHSFVLLAQAITLSTCIIAHNNALLALLVSNNFAEIKSNVFKRVSKENLHNLVYYDIIERFHIMAFLLFVLAQNILEAEGPWFDSFLIPVAYSEFLEDLCKQILNDKPDDRQKDLTFIPLAPACVVIRVLTPVYATLLPAGPFIWRIFWILLWSVLTYFMLAIFKIIVGLILRCLANWYVNLRLTRKQHVD

SEQ ID NO: 180204 - protein, 155 aa, Zea Mays
MAFLLFVLAQNILEAEGPWFDSFLINASLVFLCEVLIDAIKHSFLAKFNEIKPVAYSEFLEDLCKQILNDKPDDRQKDLTFIPLAPACVVIRVLTPVYATLLPAGPFIWRIFWILLWSVLTYFMLAIFKIIVGLILRCLANWYVNLRLTRKQHVD

SEQ ID NO: 180205 - protein, 488 aa, Zea Mays
MAFLARALRQSNSRLSSCPSVAASCRWISRTAAAGSPEAGAAVAPADPELPPPREPVGGARVELPPNPEDALEVFVDGHAVRIPKGFTVLQACEVAGVDIPRFCYHSRLSIAGNCRMCLVEVEKSPKPVASCAMPALPGMKIKTNTPVAKKAREGVMEFLLMNHPLDCPICDQGGECDLQDQSMAFGADRGRFTEMKRSVVDKNLGPLVKTVMTRCIQCTRCVRFATEVAGVQDLGMLGRGSGEEIGTYVEKLMTSELSGNVIDICPVGALTSKPFAFKARNWELKGTETIDVTDAVGSNIRVDSRGPEVMRIVPRLNEDINEEWISDKTRFCYDGLKRQRLNDPMIRGPDGRFKAVTWRDALAVVAEVLHQVKPEEITGVAGKLSDAESMMALKDFVNRMGSDKVLCEGNGPNPPADLRSNYLMNTSIAGLEKADVFLLVGTQDHRPLLRLQRVVILSVQYCNLPRTLSSLLELDYLNGKTKMPYSQ

SEQ ID NO: 180206 - protein, 52 aa, Zea Mays
MVYQNYNISKLHSQQAHDIFRIFRQYHGFLRYHDTLYNEMFFVLQNILFAKP

SEQ ID NO: 180207 - protein, 247 aa, Zea Mays
MRRGGTCEGPSEEEGARARDPAKRRTPTKGGSHGEQGTEQRGCSRPAPSRRAGNGAQASSIMDPSLAGDLGEVAAVGSQLEIAAAMGAGGRASCVRGLVPAEQGARRPERKQREEEQRLLWRKQGEEDGGVGFLRRGMTAKLSTSADASASVRLSAAVQAAAIQPSSPRFFCSSLAGTNPTSPASPLPEAGREQDGVGEEGVREHGEGEREDEAGGEQREGARSRAPDRRRDADQLRCAQRREVARR

SEQ ID NO: 180208 - protein, 219 aa, Zea Mays
MVLTGNITSGKTPLNWDLRSSIALAAARGVEYIHSTSSTASHGNIKSSNVLLGESYQAHVSDNGLTALVGPSSSPSRATGYRAPEVIDPRRVSQKADVYSFGVLLLELVTGKAPSQAALNDEGVNLPRWVQSVSRSEWGSEVFDIELMRHEAGEEPMAQLVLLALDCVAQVPEARPSMGHVVTRIEEIRKSSLTTNMEEEVDDQSSKAESEVPTNPFAS

SEQ ID NO: 180209 - protein, 490 aa, Zea Mays
MRGQRGRTRDGRRHGGGLAGREEEVDGVGHGCGVAGRALGGGVTRGGESGCTSGETRGSTGGWVSSVDMPGERESAMRRWGREGVLAYARLGREWHREHWRRVLWPGKGAPAVKPSAQRNHSGDLRTPTHIPEAACVYDPCETPKESESPRFKAIMQATSAPRKRLPADIKSFSHELNSKGVCPFPFWKPRGIYNLKEVIKVIQMRFEKAKEEVNSDLAVFAGDLVSVMEKYADSHPEWKETLEDMLILARTCCVMTPGEFWLQCEVIVQDLDDHRQELSMGVLKKLYTRMLFILTRCTRLLQFHKESGFAEDEVVIHQRDKIIQSADRQVLTQPGADGTISRASKSEARKSYSQEQHNLKWKRSQEIKPVKLLPPLDTDVKKDAVSPSKERISSWKPFPSPNTKVPKESIPTKSESPNKKTDAHSTVSSHVELSSQVESLPQQQLPDKHQHKTSWGHWSDQPNISEEGSIMCRICEEYVPTHYVEDHSK

SEQ ID NO: 180210 - protein, 531 aa, Zea Mays
MATSSAGSMTPRSPITTPRSNHIDMLLAGKNAINESDDLPQIVELADIARCIANTPLDEESALSQMVTCIEDLQEIVNCRKHESLTVQTFGTRIEKLHREKYLQLCDSVDMDKVDSASTIMDEEDNVVRSLRASPVHPIKDRTSIDDFEIIKPISRGAFGRVFLAKKRTTGDLFAIKVLRKADMIRKNAVESILAERDILITVRNPFVVRFFYSFTSRDNLYLVMEYLNGGDLYSLLRNLGCLDEDVVRVYLAEVLTDFGLSKVGLINNTYDLSRPVVSGASLYGDDEPQMNEFEQMDHRARRQNRSAVGTPDYLAPEILLGTGHGCSADWWSVGVILFELIVGIPPFNAEHPQTIFDNILNCKIPWPHVPEEMSFDAQDLIDKLLTEDPHQRLGANGASEVKQHPFFKDISWDTLARQKAAFVPSSDSAFDTSYFTSRYSWNPSDGNIYEAYEFEDSSDNGSLSGSSSCVSNRQDDMGEDSDGLNEFESSANVNYSFSNFSFKNLSQLASINYDMLTKGLKDDPPPRTET

SEQ ID NO: 180211 - protein, 329 aa, Zea Mays
MFHRYKEKTEKELQAAVRLQTAARGFLARRQVQSLRGEKHLAVASRATPWPSSHEQAVVRLQAAVRGFLVRRAVRKLHLLISSSLHQLAACVPNHQVSSILFEPPAEVEIWVCSPPARPKRVVSFIRAPALVLDRPNIRTGWFLLHLSSNVKAAIQLFPWDPGGQEDIAAVQIYILVPQLFYIFVLNNKGKPRCKRLNLKSCQVSLWQLEDKLVLKGGGDVMGIIGSGHSCGVALMCAKSERPQGALAAARARKARALAAAHARKAWQRKARTRKAWQRKAWQRKARTRKAWQRKARARKAWQRKVTDLVAKLIDLNLGEMISISHLPN

SEQ ID NO: 180212 - protein, 356 aa, Zea Mays
MVTCIEDLQEIVNCRKHESLTVQTFGTRIEKLHREKYLQLCDSVDMDKVDSASTIMDEEDNVVRSLRASPVHPIKDRTSIDDFEIIKPISRGAFGRVFLAKKRTTGDLFAIKVLRKADMIRKNAVESILAERDILITVRNPFVVRFFYSFTSRDNLYLVMEYLNGGDLYSLLRNLGCLDEDVVRVYLAEVVLALEYLHSMHIVHRDLKPDNLLIAHDGHIKLTDFGLSKVGLINNTYDLSRPVVSGASLYGDDEPQMNEFEQMDHRARRQNRSAVGTPDYLAPEILLGTGHGCSADWWSVGVILFELIVGIPPFNAEHPQTIFDNILNCKIPWPHVPEEMSFDAQDLIDKLLASQT

SEQ ID NO: 180213 - protein, 379 aa, Zea Mays
MIRKNAVESILAERDILITVRNPFVVRFFYSFTSRDNLYLVMEYLNGGDLYSLLRNLGCLDEDVVRVYLAEVVLALEYLHSMHIVHRDLKPDNLLIAHDGHIKLTDFGLSKVGLINNTYDLSRPVVSGASLYGDDEPQMNEFEQMDHRARRQNRSAVGTPDYLAPEILLGTGHGCSADWWSVGVILFELIVGIPPFNAEHPQTIFDNILNCKIPWPHVPEEMSFDAQDLIDKLLTEDPHQRLGANGASEVKQHPFFKDISWDTLARQKAAFVPSSDSAFDTSYFTSRYSWNPSDGNIYEAYEFEDSSDNGSLSGSSSCVSNRQDDMGEDSDGLNEFESSANVNYSFSNFSFKNLSQLASINYDMLTKGLKDDPPPRTET

SEQ ID NO: 180214 - protein, 392 aa, Zea Mays
MTTPTPSGDGSPPGSSDLVPPSYPEMIVAAITALAEENGSSQAAIARRIEAQARGDLPASHPALVAAHLSRMSAAGELVAVAGGKYALPPPPAQPAPESPADDGEDDDCADEVDEEEEAPEPLPVPVPQPPAKRGRGRPPKPRTADLRCIANTPLDEESALSQMVTCIEDLQEIVNCRKHESLTVQTFGTRIEKLHREKYLQLCDSVDMDKVDSTSTIMDEEDDVVRSLRASPVHPIKDRTSIDDFEIIKPISRGAFGRVFLAKKRTTGDLFAIKVLRKADMIRKNAVESILAERDILITVRNPFVVRFFYSFTSRDNLYLVMEYLNGGDLYSLLRNLGCLDEDVVRVYLAEVVLALEYLHSMHIVHRDLKPDNLLIAHDGHIKVLGCPRLV

SEQ ID NO: 180215 - protein, 501 aa, Zea Mays
MTTPTPSGDGSPPGSSDLVPPSYPEMIVAAITALAEENGSSQAAIARRIEAQARGDLPASHPALVAAHLSRMSAAGELVAVAGGKYALPPPPAQPAPESPADDGEDDDCADEVDEEEEAPEPLPVPVPQPPAKRGRGRPPKPRTADLRCIANTPLDEESALSQMVTCIEDLQEIVNCRKHESLTVQTFGTRIEKLHREKYLQLCDSVDMDKVDSTSTIMDEEDDVVRSLRASPVHPIKDRTSIDDFEIIKPISRGAFGRVFLAKKRTTGDLFAIKVLRKADMIRKNAVESILAERDILITVRNPFVVRFFYSFTSRDNLYLVMEYLNGGDLYSLLRNLGCLDEDVVRVYLAEVVLALEYLHSMHIVHRDLKPDNLLIAHDGHIKLTGFGLSKVGLINNTYDLSRPVVSGASLYGDDEPQMNEFEQMDHRARRQNRSAVGTPDYLAPEIILGTGHGCSADWWSVGVILFELIVGIPPFNAEHPQIIDRRSSSTTRSKWRLRG

SEQ ID NO: 180216 - protein, 159 aa, Zea Mays
MRSGRGSRTHICEPRRRPSPAFTNPPPPVPYSSSCTHHDDDDDDCADEVDEEEEAPEPLLVPVPVPQPPAKRGRGRPPKPRPAGFPIGVPGAAASPAAAPRRRGRPPKPRDPHAPPKIPRPRGRPRKNPLPEGMAPRPRPGAPASAKAARPQFAEVGFV

SEQ ID NO: 180217 - protein, 1876 aa, Zea Mays
MEALNELCDLVAAHPDLLLADKLAWLSSRCAAAPGAAAPQRASRAHLHSLLALARLLPAGGAGAGAEGDAAPPAPLLFFLASHAFLSPAFWPQSFAPAPFLARLLPLLAAAPSSPALSSALSAALLAALDVADPTSAPLARAFLSAAAAAAPLPLLPADAAPIAARLLLEFLGSEEEPIRAKGKGEDTLGEENGGAKEVVRRFEEEEVDELERKEVAFRLTVHMLGGEGGLETEQIGKVRNAAARQVRSLTDFLKIRKRDWREQGTQLRARINTKLMCCQAAVGVLVRSVSTMDTDIKSSKDMLQQTLAWFIEATKSCILSSWRKLKICEELFCTLLNGISQITVSRGGQLLPVLLIPLKPLVVSTCSQADMAGSSPGALFEAVVKLSCEIIEFGWTKDRALVDTFVMRLAAYVRERNDYEEEDGKGKEAVPVIRLNVIRLLAELCVCLKKWEVVDMILPLFIEHLEEGDASSPSSLRLRLLDAISRVACLGFEKSYRESIVLMTRSYLDKVKALGASENNTVPSEATTERTETLPAGFLLVASNLTSTKLRSDYRHRLLSLCSDVGLVAESKSGRSGADLMGPLLPAVADICSDFDPVSTVEPSLLKLFRNLWFYVVLFGLAPPIQNNEAPTKPVSTSLGTAESSSAIALQAVAGPYMWNSQWSVAVQRIAQGTPPLVVSSVKWLEDELELNTLHNPGSRGGNGNENSAVGQRAALSAALGGRVEVAAMNTISGVKATYLLAVAFLEILRFSCNGGILSATSTLNRSNSAFSCVFEYLLTPNLTPAVTQCLTAVAHRAFETVLSWLDDRISDIGEGADVRESVLSVHACFLIKSMSQRDEHVRDVSVKLLTQLKEKFPQENFCKPSGVQRTQHTADVVSLLSEIRICSGKNDWNGIRTANVPAVMDSAAAASGAKKEAPDFTLEVLSTAVVSATVKCNHAGEIAGMRRLFSTMGGINMGMSPPGTQSLHPHQSFDEVFVSKFVSLLQNFVVAAEKQPIDNSQFRETCSQATALLLDHMVSDSRANLEGFSQLIRLLCWCPAYISTPDAMETGIYIWTWLVSAAPSLGPLVLAELVDAWLWTIDTKRGLFASDMNYCGPDAKLRPHLIAGEPEAPPEKDPVEAIIAHRLWLGFFIDRFEVVRHDSIEQLLLLGRMLQGTMKSPAHFSHHPAATGTFFTAMLLGLKFCSCQSQSNLQKCNMGLQLLEDRVYRAALGWFSYAPEWYESPNKTYAQREAQSVSVFVHFLQNERTSGPVDSVSKLQGREGEPSMADHIHPVWGCVDNYTNAREKRKQLLLTLSQNEADRLEVWAQPIHTKDTTTFRGKISSDKWIDHVRTAFAVDPRIALSMPLRFPTNATMQSEITQLVQTRLLELRTIPEALPFFITPKAVDENSVLLQQLPHWAPCSVTQALEFLTPPYKGHPRVMAYVLRVLETYPPETVTFFMPQLVQSLRYDEGKLVEGYLLGATRRSNIFAHILIWHLQGEYVDESEKDAAALKGSAFQSLLPAVKDKIIESFTPEARDMFEREFDFFDKVTSISGVLFPLPKDERRAGIRRELEKISIPGDDLYLPTATNKLVRGIQLDSGIPLQSAAKVPIMITFNVVDRDGDPNDVKPQACIFKVGDDCRQDVLALQVIALLRDVFQAVGLNLYLFPYGVLPTGPGRGIIEVVPDTRSRNQMGETTDGGLLEIFQQDYGPVGSPSFETAREMFMISSAGYAVASLLLQPKDRHNGNLLFDSHGRLVHIDFGFILEISPGGNMGFESAHFKLSHEMTQLLDPSGTMKSDTWNQFLRLCVKGYLAARRHMNGILSTVNLMVDSGLPCFSRGDPINNLRKRFHPEMNEREAANFMVRTCADAYNKWTTAGYDLIQYLQQGIEK

SEQ ID NO: 180218 - protein, 1759 aa, Zea Mays
MEALNELCDLVAAHPDLLLADKLAWLSSRCAAAPGAAAPQRASRAHLHSLLALARLLPAGGAGAGAEGDAAPPAPLLFFLASHAFLSPAFWPQSFAPAPFLARLLPLLAAAPSSPALSSALSAALLAALDVADPTSAPLARAFLSAAAAAAPLPLLPADAAPIAARLLLEFLGSEEEPIRAKGKGEDTLGEENGGAKEVVRRFEEEEVDELERKEVAFRLTVHMLGGEGGLETEQIGKVRNAAARQVRSLTDFLKIRKRDWREQGTQLRARINTKLMCCQAAVGVLVRSVSTMDTDIKSSKDMLQQTLAWFIEATKSCILSSWRKLKICEELFCTLLNGISQITVSRGGQLLPVLLIPLKPLVVSTCSQADMAGSSPGALFEAVVKLSCEIIEFGWTKDRALVDTFVMRLAAYVRERNDYEEEIASTPIQIVKLIMVEDGKGKEAVPVIRLNVIRLLAELCVCLKKWEVVDMILPLFIEHLEEGDASSPSSLRLRLLDAISRVACLGFEKSYRESIVLMTRSYLDKVKALGASENNTVPSEATTERTETLPAGFLLVASNLTSTKLRSDYRHRLLSLCSDVGLVAESKSGRSGADLMGPLLPAVADICSDFDPVSTVEPSLLKLFRNLWFYVVLFGLAPPIQNNEAPTKPVSTSLGTAESSSAIALQAVAGPYMWNSQWSVAVQRIAQGTPPLVVSSVKWLEDELELNTLHNPGSRGGNGNENSAVGQRAALSAALGGRVEVAAMNTISGVKATYLLAVAFLEILRFSCNGGILSATSTLNRSNSAFSCVFEYLLTPNLTPAVTQCLTAVAHRAFETVLSWLDDRISDIGEGADVRESVLSVHACFLIKSMSQRDEHVRDVSVKLLTQLKEKFPQVLWNSSCLDLLLISVHNELTSGPVSDPAWVATVRSLYQKIAREWLTSALSYAPCTTQGLIQENFCKPSGVQRTQHTADVVSLLSEIRICSGKNDWNGIRTANVPAVMDSAAAASGAKKEAPDFTLEVLSTAVVSATVKCNHAGEIAGMRRLFSTMGGINMGMSPPGTQSLHPHQSFDEVFVSKFVSLLQNFVVAAEKQPIDNSQFRETCSQATALLLDHMVSDSRANLEGFSQLIRLLCWCPAYISTPDAMETGIYIWTWLVSAAPSLGPLVLAELVDAWLWTIDTKRGLFASDMNYCGPDAKLRPHLIAGEPEAPPEKDPVEAIIAHRLWLGFFIDRFEVVRHDSIEQLLLLGRMLQGTMKSPAHFSHHPAATGTFFTAMLLGLKFCSCQSQSNLQKCNMGLQLLEDRVYRAALGWFSYAPEWYESPNKTYAQREAQSVSVFVHFLQNERTSGPVDSVSKLQGREGEPSMADHIHPVWGCVDNYTNAREKRKQLLLTLSQNEADRLEVWAQPIHTKDTTTFRGKISSDKWIDHVRTAFAVDPRIALSMPLRFPTNATMQSEITQLVQTRLLELRTIPEALPFFITPKAVDENSVLLQQLPHWAPCSVTQALEFLTPPYKGHPRVMAYVLRVLETYPPETVTFFMPQLVQSLRYDEGKLVEGYLLGATRRSNIFAHILIWHLQGEYVDESEKDAAALKGSAFQSLLPAVKDKIIESFTPEARDMFEREFDFFDKVTSISGVLFPLPKDERRAGIRRELEKISIPGDDLYLPTATNKLVRGIQLDSGIPLQSAAKVPIMITFNVVDRDGDPNDVKPQACIFKVGDDCRQDVLALQVIALLRDVFQAVGLNLYLFPYGVLPTGPGRGIIEILEVEIKWVKQLMVVY

SEQ ID NO: 180219 - protein, 1937 aa, Zea Mays
MEALNELCDLVAAHPDLLLADKLAWLSSRCAAAPGAAAPQRASRAHLHSLLALARLLPAGGAGAGAEGDAAPPAPLLFFLASHAFLSPAFWPQSFAPAPFLARLLPLLAAAPSSPALSSALSAALLAALDVADPTSAPLARAFLSAAAAAAPLPLLPADAAPIAARLLLEFLGSEEEPIRAKGKGEDTLGEENGGAKEVVRRFEEEEVDELERKEVAFRLTVHMLGGEGGLETEQIGKVRNAAARQVRSLTDFLKIRKRDWREQGTQLRARINTKLMCCQAAVGVLVRSVSTMDTDIKSSKDMLQQTLAWFIEATKSCILSSWRKLKICEELFCTLLNGISQITVSRGGQLLPVLLIPLKPLVVSTCSQADMAGSSPGALFEAVVKLSCEIIEFGWTKDRALVDTFVMRLAAYVRERNDYEEEDGKGKEAVPVIRLNVIRLLAELCVCLKKWEVVDMILPLFIEHLEEGDASSPSSLRLRLLDAISRVACLGFEKSYRESIVLMTRSYLDKVKALGASENNTVPSEATTERTETLPAGFLLVASNLTSTKLRSDYRHRLLSLCSDVGLVAESKSGRSGADLMGPLLPAVADICSDFDPVSTVEPSLLKLFRNLWFYVVLFGLAPPIQNNEAPTKPVSTSLGTAESSSAIALQAVAGPYMWNSQWSVAVQRIAQGTPPLVVSSVKWLEDELELNTLHNPGSRGGNGNENSAVGQRAALSAALGGRVEVAAMNTISGVKATYLLAVAFLEILRFSCNGGILSATSTLNRSNSAFSCVFEYLLTPNLTPAVTQCLTAVAHRAFETVLSWLDDRISDIGEGADVRESVLSVHACFLIKSMSQRDEHVRDVSVKLLTQLKEKFPQVLWNSSCLDLLLISVHNELTSGPVSDPAWVATVRSLYQKIAREWLTSALSYAPCTTQGLIQENFCKPSGVQRTQHTADVVSLLSEIRICSGKNDWNGIRTANVPAVMDSAAAASGAKKEAPDFTLEVLSTAVVSATVKCNHAGEIAGMRRLFSTMGGINMGMSPPGTQSLHPHQSFDEVFVSKFVSLLQNFVVAAEKQPIDNSQFRETCSQATALLLDHMVSDSRANLEGFSQLIRLLCWCPAYISTPDAMETGIYIWTWLVSAAPSLGPLVLAELVDAWLWTIDTKRGLFASDMNYCGPDAKLRPHLIAGEPEAPPEKDPVEAIIAHRLWLGFFIDRFEVVRHDSIEQLLLLGRMLQGTMKSPAHFSHHPAATGTFFTAMLLGLKFCSCQSQSNLQKCNMGLQLLEDRVYRAALGWFSYAPEWYESPNKTYAQREAQSVSVFVHFLQNERTSGPVDSVSKLQGREGEPSMADHIHPVWGCVDNYTNAREKRKQLLLTLSQNEADRLEVWAQPIHTKDTTTFRGKISSDKWIDHVRTAFAVDPRIALSMPLRFPTNATMQSEITQLVQTRLLELRTIPEALPFFITPKAVDENSVLLQQLPHWAPCSVTQALEFLTPPYKGHPRVMAYVLRVLETYPPETVTFFMPQLVQSLRYDEGKLVEGYLLGATRRSNIFAHILIWHLQGEYVDESEKDAAALKGSAFQSLLPAVKDKIIESFTPEARDMFEREFDFFDKVTSISGVLFPLPKDERRAGIRRELEKISIPGDDLYLPTATNKLVRGIQLDSGIPLQSAAKVPIMITFNVVDRDGDPNDVKPQACIFKVGDDCRQDVLALQVIALLRDVFQAVGLNLYLFPYGVLPTGPGRGIIEVVPDTRSRNQMGETTDGGLLEIFQQDYGPVGSPSFETAREMFMISSAGYAVASLLLQPKDRHNGNLLFDSHGRLVHIDFGFILEISPGGNMGFESAHFKLSHEMTQLLDPSGTMKSDTWNQFLRLCVKGYLAARRHMNGILSTVNLMVDSGLPCFSRGDPINNLRKRFHPEMNEREAANFMVRTCADAYNKWTTAGYDLIQYLQQGIEK

SEQ ID NO: 180220 - protein, 1019 aa, Zea Mays
MLHENFCKPSGVQRTQHTADVVSLLSEIRICSGKNDWNGIRTANVPAVMDSAAAASGAKKEAPDFTLEVLSTAVVSATVKCNHAGEIAGMRRLFSTMGGINMGMSPPGTQSLHPHQSFDEVFVSKFVSLLQNFVVAAEKQPIDNSQFRETCSQATALLLDHMVSDSRANLEGFSQLIRLLCWCPAYISTPDAMETGIYIWTWLVSAAPSLGPLVLAELVDAWLWTIDTKRGLFASDMNYCGPDAKLRPHLIAGEPEAPPEKDPVEAIIAHRLWLGFFIDRFEVVRHDSIEQLLLLGRMLQGTMKSPAHFSHHPAATGTFFTAMLLGLKFCSCQSQSNLQKCNMGLQLLEDRVYRAALGWFSYAPEWYESPNKTYAQREAQSVSVFVHFLQNERTSGPVDSVSKLQGREGEPSMADHIHPVWGCVDNYTNAREKRKQLLLTLSQNEADRLEVWAQPIHTKDTTTFRGKISSDKWIDHVRTAFAVDPRIALSMPLRFPTNATMQSEITQLVQTRLLELRTIPEALPFFITPKAVDENSVLLQQLPHWAPCSVTQALEFLTPPYKGHPRVMAYVLRVLETYPPETVTFFMPQLVQSLRYDEGKLVEGYLLGATRRSNIFAHILIWHLQGEYVDESEKDAAALKGSAFQSLLPAVKDKIIESFTPEARDMFEREFDFFDKVTSISGVLFPLPKDERRAGIRRELEKISIPGDDLYLPTATNKLVRGIQLDSGIPLQSAAKVPIMITFNVVDRDGDPNDVKPQACIFKVGDDCRQDVLALQVIALLRDVFQAVGLNLYLFPYGVLPTGPGRGIIEVVPDTRSRNQMGETTDGGLLEIFQQDYGPVGSPSFETAREMFMISSAGYAVASLLLQPKDRHNGNLLFDSHGRLVHIDFGFILEISPGGNMGFESAHFKLSHEMTQLLDPSGTMKSDTWNQFLRLCVKGYLAARRHMNGILSTVNLMVDSGLPCFSRGDPINNLRKRFHPEMNEREAANFMVRTCADAYNKWTTAGYDLIQYLQQGIEK

SEQ ID NO: 180221 - protein, 1356 aa, Zea Mays
MGPLLPAVADICSDFDPVSTVEPSLLKLFRNLWFYVVLFGLAPPIQNNEAPTKPVSTSLGTAESSSAIALQAVAGPYMWNSQWSVAVQRIAQGTPPLVVSSVKWLEDELELNTLHNPGSRGGNGNENSAVGQRAALSAALGGRVEVAAMNTISGVKATYLLAVAFLEILRFSCNGGILSATSTLNRSNSAFSCVFEYLLTPNLTPAVTQCLTAVAHRAFETVLSWLDDRISDIGEGADVRESVLSVHACFLIKSMSQRDEHVRDVSVKLLTQLKEKFPQVLWNSSCLDLLLISVHNELTSGPVSDPAWVATVRSLYQKIAREWLTSALSYAPCTTQGLIQENFCKPSGVQRTQHTADVVSLLSEIRICSGKNDWNGIRTANVPAVMDSAAAASGAKKEAPDFTLEVLSTAVVSATVKCNHAGEIAGMRRLFSTMGGINMGMSPPGTQSLHPHQSFDEVFVSKFVSLLQNFVVAAEKQPIDNSQFRETCSQATALLLDHMVSDSRANLEGFSQLIRLLCWCPAYISTPDAMETGIYIWTWLVSAAPSLGPLVLAELVDAWLWTIDTKRGLFASDMNYCGPDAKLRPHLIAGEPEAPPEKDPVEAIIAHRLWLGFFIDRFEVVRHDSIEQLLLLGRMLQGTMKSPAHFSHHPAATGTFFTAMLLGLKFCSCQSQSNLQKCNMGLQLLEDRVYRAALGWFSYAPEWYESPNKTYAQREAQSVSVFVHFLQNERTSGPVDSVSKLQGREGEPSMADHIHPVWGCVDNYTNAREKRKQLLLTLSQNEADRLEVWAQPIHTKDTTTFRGKISSDKWIDHVRTAFAVDPRIALSMPLRFPTNATMQSEITQLVQTRLLELRTIPEALPFFITPKAVDENSVLLQQLPHWAPCSVTQALEFLTPPYKGHPRVMAYVLRVLETYPPETVTFFMPQLVQSLRYDEGKLVEGYLLGATRRSNIFAHILIWHLQGEYVDESEKDAAALKGSAFQSLLPAVKDKIIESFTPEARDMFEREFDFFDKVTSISGVLFPLPKDERRAGIRRELEKISIPGDDLYLPTATNKLVRGIQLDSGIPLQSAAKVPIMITFNVVDRDGDPNDVKPQACIFKVGDDCRQDVLALQVIALLRDVFQAVGLNLYLFPYGVLPTGPGRGIIEVVPDTRSRNQMGETTDGGLLEIFQQDYGPVGSPSFETAREMFMISSAGYAVASLLLQPKDRHNGNLLFDSHGRLVHIDFGFILEISPGGNMGFESAHFKLSHEMTQLLDPSGTMKSDTWNQFLRLCVKGYLAARRHMNGILSTVNLMVDSGLPCFSRGDPINNLRKRFHPEMNEREAANFMVRTCADAYNKWTTAGYDLIQYLQQGIEK

SEQ ID NO: 180222 - protein, 1279 aa, Zea Mays
MWNSQWSVAVQRIAQGTPPLVVSSVKWLEDELELNTLHNPGSRGGNGNENSAVGQRAALSAALGGRVEVAAMNTISGVKATYLLAVAFLEILRFSCNGGILSATSTLNRSNSAFSCVFEYLLTPNLTPAVTQCLTAVAHRAFETVLSWLDDRISDIGEGADVRESVLSVHACFLIKSMSQRDEHVRDVSVKLLTQLKEKFPQVLWNSSCLDLLLISVHNELTSGPVSDPAWVATVRSLYQKIAREWLTSALSYAPCTTQGLIQENFCKPSGVQRTQHTADVVSLLSEIRICSGKNDWNGIRTANVPAVMDSAAAASGAKKEAPDFTLEVLSTAVVSATVKCNHAGEIAGMRRLFSTMGGINMGMSPPGTQSLHPHQSFDEVFVSKFVSLLQNFVVAAEKQPIDNSQFRETCSQATALLLDHMVSDSRANLEGFSQLIRLLCWCPAYISTPDAMETGIYIWTWLVSAAPSLGPLVLAELVDAWLWTIDTKRGLFASDMNYCGPDAKLRPHLIAGEPEAPPEKDPVEAIIAHRLWLGFFIDRFEVVRHDSIEQLLLLGRMLQGTMKSPAHFSHHPAATGTFFTAMLLGLKFCSCQSQSNLQKCNMGLQLLEDRVYRAALGWFSYAPEWYESPNKTYAQREAQSVSVFVHFLQNERTSGPVDSVSKLQGREGEPSMADHIHPVWGCVDNYTNAREKRKQLLLTLSQNEADRLEVWAQPIHTKDTTTFRGKISSDKWIDHVRTAFAVDPRIALSMPLRFPTNATMQSEITQLVQTRLLELRTIPEALPFFITPKAVDENSVLLQQLPHWAPCSVTQALEFLTPPYKGHPRVMAYVLRVLETYPPETVTFFMPQLVQSLRYDEGKLVEGYLLGATRRSNIFAHILIWHLQGEYVDESEKDAAALKGSAFQSLLPAVKDKIIESFTPEARDMFEREFDFFDKVTSISGVLFPLPKDERRAGIRRELEKISIPGDDLYLPTATNKLVRGIQLDSGIPLQSAAKVPIMITFNVVDRDGDPNDVKPQACIFKVGDDCRQDVLALQVIALLRDVFQAVGLNLYLFPYGVLPTGPGRGIIEVVPDTRSRNQMGETTDGGLLEIFQQDYGPVGSPSFETAREMFMISSAGYAVASLLLQPKDRHNGNLLFDSHGRLVHIDFGFILEISPGGNMGFESAHFKLSHEMTQLLDPSGTMKSDTWNQFLRLCVKGYLAARRHMNGILSTVNLMVDSGLPCFSRGDPINNLRKRFHPEMNEREAANFMVRTCADAYNKWTTAGYDLIQYLQQGIEK

SEQ ID NO: 180223 - protein, 1102 aa, Zea Mays
MSQRDEHVRDVSVKLLTQLKEKFPQVLWNSSCLDLLLISVHNELTSGPVSDPAWVATVRSLYQKIAREWLTSALSYAPCTTQGLIQENFCKPSGVQRTQHTADVVSLLSEIRICSGKNDWNGIRTANVPAVMDSAAAASGAKKEAPDFTLEVLSTAVVSATVKCNHAGEIAGMRRLFSTMGGINMGMSPPGTQSLHPHQSFDEVFVSKFVSLLQNFVVAAEKQPIDNSQFRETCSQATALLLDHMVSDSRANLEGFSQLIRLLCWCPAYISTPDAMETGIYIWTWLVSAAPSLGPLVLAELVDAWLWTIDTKRGLFASDMNYCGPDAKLRPHLIAGEPEAPPEKDPVEAIIAHRLWLGFFIDRFEVVRHDSIEQLLLLGRMLQGTMKSPAHFSHHPAATGTFFTAMLLGLKFCSCQSQSNLQKCNMGLQLLEDRVYRAALGWFSYAPEWYESPNKTYAQREAQSVSVFVHFLQNERTSGPVDSVSKLQGREGEPSMADHIHPVWGCVDNYTNAREKRKQLLLTLSQNEADRLEVWAQPIHTKDTTTFRGKISSDKWIDHVRTAFAVDPRIALSMPLRFPTNATMQSEITQLVQTRLLELRTIPEALPFFITPKAVDENSVLLQQLPHWAPCSVTQALEFLTPPYKGHPRVMAYVLRVLETYPPETVTFFMPQLVQSLRYDEGKLVEGYLLGATRRSNIFAHILIWHLQGEYVDESEKDAAALKGSAFQSLLPAVKDKIIESFTPEARDMFEREFDFFDKVTSISGVLFPLPKDERRAGIRRELEKISIPGDDLYLPTATNKLVRGIQLDSGIPLQSAAKVPIMITFNVVDRDGDPNDVKPQACIFKVGDDCRQDVLALQVIALLRDVFQAVGLNLYLFPYGVLPTGPGRGIIEVVPDTRSRNQMGETTDGGLLEIFQQDYGPVGSPSFETAREMFMISSAGYAVASLLLQPKDRHNGNLLFDSHGRLVHIDFGFILEISPGGNMGFESAHFKLSHEMTQLLDPSGTMKSDTWNQFLRLCVKGYLAARRHMNGILSTVNLMVDSGLPCFSRGDPINNLRKRFHPEMNEREAANFMVRTCADAYNKWTTAGYDLIQYLQQGIEK

SEQ ID NO: 180224 - protein, 452 aa, Zea Mays
MAYVLRVLETYPPETVTFFMPQLVQSLRYDEGKLVEGYLLGATRRSNIFAHILIWHLQGEYVDESEKDAAALKGSAFQSLLPAVKDKIIESFTPEARDMFEREFDFFDKVTSISGVLFPLPKDERRAGIRRELEKISIPGDDLYLPTATNKLVRGIQLDSGIPLQSAAKVPIMITFNVVDRDGDPNDVKPQACIFKVGDDCRQDVLALQVIALLRDVFQAVGLNLYLFPYGVLPTGPGRGIIEVVPDTRSRNQMGETTDGGLLEIFQQDYGPVGSPSFETAREMFMISSAGYAVASLLLQPKDRHNGNLLFDSHGRLVHIDFGFILEISPGGNMGFESAHFKLSHEMTQLLDPSGTMKSDTWNQFLRLCVKGYLAARRHMNGILSTVNLMVDSGLPCFSRGDPINNLRKRFHPEMNEREAANFMVRTCADAYNKWTTAGYDLIQYLQQGIEK

SEQ ID NO: 180225 - protein, 461 aa, Zea Mays
MQKLHESAQSQLFELRTQSEEDRAAKEVEVSLLMDEVERAQARLVSLEREKGDLRSQLQTTNEDASKSSDYLESSDILESSLNAKEKIISELNAELRNIESTLSSEREMHVNELKKLTTLLTEQESALMELKKELQERPTQKLVDDLKKKVQILQAVGYNSIEAEDWELATNGEEMSKLEALLLDKNRKMEHELTQLKVKISEKTSVLEEAEKRIVELTSKVEEQQKLILKLEDDILKGYSSTDRRGSLLNDWDIQEIGSSEASEGSDPRHASADQDQSSMLKVICNQRDRFRARLRETEEELRRLKEKHEMLTVELEKTKADNVQLYGKIRYVQDYSHDKIVSRGPKKYAEDIESGSSDVEAKYKKMYEDDINPFAAFSKKEKDQRYKELGLRDKITLSSGRFVLGNKYARTFIFFYSIGLHLLVFTLLYRMSALSYLNTTTQQDEIILDAGNQRLTHML

SEQ ID NO: 180226 - protein, 353 aa, Zea Mays
MHVNELKKLTTLLTEQESALMELKKELQERPTQKLVDDLKKKVQILQAVGYNSIEAEDWELATNGEEMSKLEALLLDKNRKMEHELTQLKVKISEKTSVLEEAEKRIVELTSKVEEQQKLILKLEDDILKGYSSTDRRGSLLNDWDIQEIGSSEASEGSDPRHASADQDQSSMLKVICNQRDRFRARLRETEEELRRLKEKHEMLTVELEKTKADNVQLYGKIRYVQDYSHDKIVSRGPKKYAEDIESGSSDVEAKYKKMYEDDINPFAAFSKKEKDQRYKELGLRDKITLSSGRFVLGNKYARTFIFFYSIGLHLLVFTLLYRMSALSYLNTTTQQDEIILDAGNQRLTHML

SEQ ID NO: 180227 - protein, 658 aa, Zea Mays
MEPSPAQAGASDRDRSPPPPPPPPSQSSTAATISSPLAVVCSFWKDFDLEKERSGLDEQGLKIAENQETSQKNRRKLAENTRDFKKASSDEKLSLLNSLLKSYQEEVDNLTKRAKFGENAFLNIYQKLYEAPDPYPALASMTDQDQKLSELETENRKMKLELEEYRAEAAHLKNQQATIRRLEERNRQLEQQMEEKVREMVEMKQRSMAEDSQKTLEALKDRERSLQDQLRQATESVKNMQKLHESAQSQLFELRTQSEEDRAAKEVEVSLLMDEVERAQARLVSLEREKGDLRSQLQTTNEDASKSSDYLESSDILESSLNAKEKIISELNAELRNIESTLSSEREMHVNELKKLTTLLTEQESALMELKKELQERPTQKLVDDLKKKVQILQAVGYNSIEAEDWELATNGEEMSKLEALLLDKNRKMEHELTQLKVKISEKTSVLEEAEKRIVELTSKVEEQQKLILKLEDDILKGYSSTDRRGSLLNDWDIQEIGSSEASEGSDPRHASADQDQSSMLKVICNQRDRFRARLRETEEELRRLKEKHEMLTVELEKTKADNVQLYGKIRYVQDYSHDKIVSRGPKKYAEDIESGSSDVEAKYKKMYEDDINPFAAFSKKIRTDVYILLQHRIASPCIYITVQNVSFELSQHNNSAG

SEQ ID NO: 180228 - protein, 53 aa, Zea Mays
MGFNCVIPKKWGMGERNRASEQALLSFPVFCIHPGKCVTQIKFHKYIMYRHNP

SEQ ID NO: 180229 - protein, 208 aa, Zea Mays
MRPLNSQNAADALQKFNLKKTAVQKALDALADSGQISFKEYGKQKIYIARQDQFDIPNGEELEEMKKTNAKLQEELADQKKAISEVESEVRGLQSNLTLTEITSKKSELQSEVQEMEEKLNKLRSGVTLVKPEDKKIIENSFAEKVSQWKRRKRMFKELWDNITEHSPKDQKEFKEELGIEYDEDVDVNVQSYSDMLASLNKRRKISR

SEQ ID NO: 180230 - protein, 116 aa, Zea Mays
MPSYRKNLRIKRKQLVRLNLVQEMEEKLNKLRSGVTLVKPEDKKIIENSFAEKVSQWKRRKRMFKELWDNITEHSPKDQKEFKEELGIEYDEDVDVNVQSYSDMLASLNKRRKISR

SEQ ID NO: 180231 - protein, 122 aa, Zea Mays
MAQVRGSARGTGSGSSAAALALVLLCALLRGEFAESAVYTVGDRGGWSFNTASWPNVFRYDARAHNVVPVSAAGYSSCSAPEGARALATGNDRVTLRRGANYFICSFPGHCQAGMKVAVTAA

SEQ ID NO: 180232 - protein, 962 aa, Zea Mays
MVSQAPMAGAGAGAGANLTAALCRKSNRVARVLAYALLEWVLIALLLADGVFSYLISRFAAFFGLAPPCALCSRLGVDSLFETHPRHRGVGAEPLRRLLCDVHAAELSRVGYCSAHRRLADAGDMCEDCAAAAAAAPGKALLSWMGQSELGERDLACACCGVALESGFYSPPFLLTASAPRGSDCGHKEEEEAARPNGDVVFVSEEGPVIELFDEKPFVEGDSIGVLACGAEVVANVERLVPLESIDSLPVAMATMLSQSGVEGKEAVDHDDVRQNNVDMEHTVSTDEETIVMTSDDDKVDDVVDRLIDEHIAAVVFVPACIESTPNDGINAGKTVEAFAFADHQSAEDDSGLKDKDQKISDISEDEQAEQATPQQELCAMPTNPSDHEIVERLDRSIDLEHFPQAKSKHKMNSMPVEASEHVTVTQIEEKQVQQAEVTQELDSLPICSREQAEVTQAGLEQDCGSVPIDSGEHGCLTSYAHTDVEQAEVKQKVTSVTRDVLDYAAGTFNVNTNTWKDIEEDPTEAALTAIYQISYEPLTNLDKFSPDHSVSEEDRQLNALTHIEDICDSQEPLDSKAAVSDAKSVDSGVATLSTDLESTELVNADQLKSALASTRKSLNTLYFELENERNAAAIAADETMAMINRLQEQKAAMQMEAIQYQRLMEEQSEYDQEALERLNELVVKREKEKQDLERELELYRHKVHLYEIKVRKMSRHKADDQNGSSSTSSSAEDSDDLSQSFYEGDESSHGLNGSNGSIPTDVVLQETARHLVIIDGSLADFEEERLSILEQLKVLEDKLFDLDDDDESDSRKHFPEENHFSGASNGFSDDDSCSKLRDKRRVVTYRGKELLPLFDDATTVEAGNVPNGDEAHHPAEATLDLARERHKLVIANEIDQVNERLQALEADREYIKQCVRALKRGGEGFDLLQEILQHLRDLRRIEQRGRNSGELSPHYLHLYTD

SEQ ID NO: 180233 - protein, 573 aa, Zea Mays
MQAKRWRPLPLLIISAKSKHKMNSMPVEASEHVTVTQIEEKQVQQAEVTQELDSLPICSREQAEVTQAGLEQDCGSVPIDSGEHGCLTSYAHTDVEQAEVKQKVTSVTRDVLDYAAGTFNVNTNTWKEDIEEDPTEAALTAIYQISYEPLTNLDKFSPDHSVSEEDRQLNALTHIEDICDSQEPLDSKAAVSDAKSVDSGVATLSTDLESTELVNADQLKSALASTRKSLNTLYFELENERNAAAIAADETMAMINRLQEQKAAMQMEAIQYQRLMEEQSEYDQEALERLNELVVKREKEKQDLERELELYRHKVHLYEIKVRKMSRHKADDQNGSSSTSSSAEDSDDLSQSFYEGDESSHGLNGSNGSIPTDVVLQETARHLVIIDGSLADFEEERLSILEQLKVLEDKLFDLDDDDESDSRKHFPEENHFSGASNGFSDDDSCSKLRDKRRVVTYRGKELLPLFDDATTVEAGNVPNGDEAHHPAEATLDLARERHKLVIANEIDQVNERLQALEADREYIKQCVRALKRGGEGFDLLQEILQHLRDLRRIEQRGRNSGELSPHYLHLYTD

SEQ ID NO: 180234 - protein, 678 aa, Zea Mays
MKRSADAMTEPVKPVFLTKAERERLALERRQAAVSDQRRTALDLIQSLPRPPPPPTSGGPPPSGSNPARRDSSNSNRDSDRDRDRDQDRERRRDDDSRRDRYRDRDRDRDRDRDDSSRRDRDRDRRDRDRDRDRDRDRDRGDRERDRLEKIAEREREKELDAIKEQYLGSKKPKKRVIKPSEKFRFSFDWENTEDTSRDMNALYQSPHEARLLFGRGFLAGIDRREQKKAAAVHEKETRAELRRKAGVEDRPEDDAVDKKKAAAAEIYDAFDMRVDRHWSEKTLEEMTERDWRIFREDFNISYKGSRIPRPMRKWSESKLGTELLRAIDKAGYEKPSPIQMAAIPLGLQQRDVIGIAETGSGKTAAFVLPMLSYITRLPPISEENEAEGPYAVVMAPTRELAQQIEEETVKFATYLGLKVVSIVGGQSIEEQGFKIRQGCEIVIATPGRLLDCLERRYAVLNQCNYVVLDEADRMIDMGFEPQVVGVLDAMPSSNLKPENEDEELDEKRIYRTTYMFSATMPPAVERLARKYLRNPVVVTIGTAGKATDLITQNVIMVKESEKMPRLQKILTDLGDKTAIVFCNTKKTADMRAKDLDKAGFRVTTLHGGKSQDQREISLDGFRNRRFNVLVATDVAGRGIDIPDVAHVINYEMPSSIDTYTHRIGRTDAYAEQQSRTT

SEQ ID NO: 180235 - protein, 645 aa, Zea Mays
MKRSADAMTEPVKPVFLTKAERERLALERRQAAVSDQRRTALDLIQSLPRPPPPPTSGGPPPSGSNPARRDSSNSNRDSDRDRDRDQDRERRRDDDSRRDRYRDRDRDRDRDRDDSSRRDRDRDRRDRDRDRDRDRDRDRGDRERDRLEKIAEREREKELDAIKEQYLGSKKPKKRVIKPSEKFRFSFDWENTEDTSRDMNALYQSPHEARLLFGRGFLAGIDRREQKKAAAVHEKETRAELRRKAGVEDRPEDDAVDKKKAAAAEIYDAFDMRVDRHWSEKTLEEMTERDWRIFREDFNISYKGSRIPRPMRKWSESKLGTELLRAIDKAGYEKPSPIQMAAIPLGLQQRDVIGIAETGSGKTAAFVLPMLSYITRLPPISEENEAEGPYAVVMAPTRELAQQIEEETVKFATYLGLKVVSIVGGQSIEEQGFKIRQGCEIVIATPGRLLDCLERRYAVLNQCNYVVLDEADRMIDMGFEPQVVGVLDAMPSSNLKPENEDEELDEKRIYRTTYMFSATMPPAVERLARKYLRNPVVVTIGTAGKATDLITQNVIMVKESEKMPRLQKILTDLGDKTAIVFCNTKKTADMRAKDLDKAGFRVTTLHGRGIDIPDVAHVINYEMPSSIDTYTHRIGRTEQQSRTT

SEQ ID NO: 180236 - protein, 340 aa, Zea Mays
MCRALMPGDEESMSDEAIWETLPHFWVSISMVFLIAATTFTLLKLSGDVGALGWWDLFINYGIAECFAFLVCTRWFNPMIHKSPTHGEASSSSAIRYRDWESGLVLPSLEDHEQERLCGLPDIGGHVMKIPLVAFQVLLCMRLEGTPPSARNIPIFALFSPLFILQGAGAFFSLARLVEKVVLLLRNGPVSPNYLTVSSKVRDCFAFLHHGSRLLGWWSIDEGSKEEQARLFYTESTGYNTFCGYPPEVVRKMPKKDLAEEVWRLQAALGEQSEITKCTKQEYERLQNEKVLCRVCYEGEICMVLLPCRHRTLCKSCAEKCKKCPICRVPIEERMPVYDV

SEQ ID NO: 180237 - protein, 262 aa, Zea Mays
MIHKSPTHGEASSSSAIRYRDWESGLVLPSLEDHEQERLCGLPDIGGHVMKIPLVAFQVLLCMRLEGTPPSARNIPIFALFSPLFILQGAGAFFSLARLVEKVVLLLRNGPVSPNYLTVSSKVRDCFAFLHHGSRLLGWWSIDEGSKEEQARLFYTESTGYNTFCGYPPEVVRKMPKKDLAEEVWRLQAALGEQSEITKCTKQEYERLQNEKVLCRVCYEGEICMVLLPCRHRTLCKSCAEKCKKCPICRVPIEERMPVYDV

SEQ ID NO: 180238 - protein, 396 aa, Zea Mays
MRRVAPAMIAAGSAGGEDTAEGAVVEKTLLNGDVYRGGFSAGSPHGKGKYVWADGCMYEGEWRRGKASGKGRFSWPSGATFEGEFRSGRIEGQGVFVGPDGATYRGAWVADRRHGVGAKSYANGDYYEGQWRRNFQDGHGRYVWANGNQYVGEWRAGVLSGRGVLIWANGSRYDGVWENGVPRGTGVFTWPDGSRYVGSWPGTCVDLPAISGTFFAPVGAGAPAAVRKRSSVEGVGEKATPRICIWESEGEAGDITCDIVDALEASMLYKEAAAVAGGATYTRKLPQRNTRRAASGVPRWASSAATTPESKRPGQTISKGHKNYELMLQLQLGIRHSVGKSSAVPMRALQPGDFDPGEKFWTRFPPEGSKVTLPHSSGEFRWKDYCPMAFEEVVCC

SEQ ID NO: 180239 - protein, 400 aa, Zea Mays
MRRVAPAMIAAGSAGGEDTAEGAVVEKTLLNGDVYRGGFSAGSPHGKGKYVWADGCMYEGEWRRGKASGKGRFSWPSGATFEGEFRSGRIEGQGVFVGPDGATYRGAWVADRRHGVGAKSYANGDYYEGQWRRNFQDGHGRYVWANGNQYVGEWRAGVLSGRGVLIWANGSRYDGVWENGVPRGTGVFTWPDGSRYVGSWPGTCVDLPAISGTFFAPVGAGAPAAVRKRSSVEGVGEKATPRICIWESEGEAGDITCDIVDALEASMLYKEAAAVAGGATYTRKLPQRNTRRAASGVPRWASSAATTPESKRPGQTISKGHKNYELMLQLQLGIRHSVGKSSAVPMRALQPGDFDPGEKFWTRFPPEGSKVTLPHSSGEFRWKDYCPMVFSGLHACDLWQ

SEQ ID NO: 180240 - protein, 703 aa, Zea Mays
MRRVAPAMIAAGSAGGEDTAEGAVVEKTLLNGDVYRGGFSAGSPHGKGKYVWADGCMYEGEWRRGKASGKGRFSWPSGATFEGEFRSGRIEGQGVFVGPDGATYRGAWVADRRHGVGAKSYANGDYYEGQWRRNFQDGHGRYVWANGNQYVGEWRAGVLSGRGVLIWANGSRYDGVWENGVPRGTGVFTWPDGSRYVGSWPGTCVDLPAISGTFFAPVGAGAPAAVRKRSSVEGVGEKATPRICIWESEGEAGDITCDIVDALEASMLYKEAAAVAGGATYTRKLPQRNTRRAASGVPRWASSAATTPESKRPGQTISKGHKNYELMLQLQLGIRHSVGKSSAVPMRALQPGDFDPGEKFWTRFPPEGSKVTLPHSSGEFRWKDYCPMVFRHLRKLFAVDTADYMLAICGNDALRELSSPGKSGSFFYLTQDDRFMIKTVKKSEVKLLIRMLNSYYNHFNRYKNSLITRFYGVHCVKPLNGQKVRFIVMGNLFCSEYQIHRRFDLKGSSYGRTADKFEDEIDETTTLKDLDLNFVFRLQRSWYTDLHEQLGRDCDFLESEGIMDYSFLVGVHFCDDISASKMGSSTFTASPKLLTKSESFQGGGTPELCFSDDDFDMVPDCHRKPLIRLGAHMPARAEQASRRSEFDPLLLTGLQLKKAGRACLQVITDRSQLDLCRGPEALLEEVPRLHRQNFCGRWLTGIG

SEQ ID NO: 180241 - protein, 621 aa, Zea Mays
MRRVAPAMIAAGSAGGEDTAEGAVVEKTLLNGDVYRGGFSAGSPHGKGKYVWADGCMYEGEWRRGKASGKGRFSWPSGATFEGEFRSGRIEGQGVFVGPDGATYRGAWVADRRHGVGAKSYANGDYYEGQWRRNFQDGHGRYVWANGNQYVGEWRAGVLSGRGVLIWANGSRYDGVWENGVPRGTGVFTWPDGSRYVGSWPGTCVDLPAISGTFFAPVGAGAPAAVRKRSSVEGVGEKATPRICIWESEGEAGDITCDIVDALEASMLYKEAAAVAGGATYTRKLPQRNTRRAASGVPRWASSAATTPESKRPGQTISKGHKNYELMLQLQLGIRHSVGKSSAVPMRALQPGDFDPGEKFWTRFPPEGSKVTLPHSSGEFRWKDYCPMVFRHLRKLFAVDTADYMLAICGNDALRELSSPGKSGSFFYLTQDDRFMIKTVKKSEVKLLIRMLNSYYNHFNRYKNSLITRFYGVHCVKPLNGQKVRFIVMGNLFCSEYQIHRRFDLKGSSYGRTADKFEDEIDETTTLKDLDLNFVFRLQRSWYTDLHEQLGRDCDFLESEGIMDYSFLVGVHFCDDISASKMGSSTFTASPKLLTKSESFQGGGTPELCFSDDDFDMETSD

SEQ ID NO: 180242 - protein, 643 aa, Zea Mays
MRRVAPAMIAAGSAGGEDTAEGAVVEKTLLNGDVYRGGFSAGSPHGKGKYVWADGCMYEGEWRRGKASGKGRFSWPSGATFEGEFRSGRIEGQGVFVGPDGATYRGAWVADRRHGVGAKSYANGDYYEGQWRRNFQDGHGRYVWANGNQYVGEWRAGVLSGRGVLIWANGSRYDGVWENGVPRGTGVFTWPDGSRYVGSWPGTCVDLPAISGTFFAPVGAGAPAAVRKRSSVEGVGEKATPRICIWESEGEAGDITCDIVDALEASMLYKEAAAVAGGATYTRKLPQRNTRRAASGVPRWASSAATTPESKRPGQTISKGHKNYELMLQLQLGIRHSVGKSSAVPMRALQPGDFDPGEKFWTRFPPEGSKVTLPHSSGEFRWKDYCPMVFRHLRKLFAVDTADYMLAICGNDALRELSSPGKSGSFFYLTQDDRFMIKTVKKSEVKLLIRMLNSYYNHFNRYKNSLITRFYGVHCVKPLNGQKVRFIVMGNLFCSEYQIHRRFDLKGSSYGRTADKFEDEIDETTTLKDLDLNFVFRLQRSWYTDLHEQLGRDCDFLESEGIMDYSFLVGVHFCDDISASKMGSSTFTASPSGGTPELCFSDDDFDMVPDCHRKPLIRLGAHMPARAEQASRRSEFDPLLLTA

SEQ ID NO: 180243 - protein, 449 aa, Zea Mays
MASWLEQLQRELAARGLTVASIPGKGRGLIATCTFFPGDVILNQEPYASTPNKILVGSSCDHCFTSGNLRKCSMCRVTWYCSSNCQKEEWKLHQLECRAMAALTEDRKKMLTPTIRLMVRLALKRKLQNEKMANLVSLILPFIELDLKEIAQTFSKFACNAHTICDPELRPLGTGLYPVISIINHSCVPNAVLIFDGRTAYVRALQPINKDEEVSISYIETATVTKKRNNDLKQYFFTCTCPRCVKGFDEDALLEGFRCKNQACDGFLLPNSGKKAYTCQKCGASRDVEEIKNMRSEILQLSDKASSFLSSGNKAEAGSIYKIIEQLERNLYHAFSTTLLHTCETLLKIYLELQDWWTALTYCRLTIPVYERVYPPFHPMIGLQFYTCGKLEWLLEFTEDALKSLTRAADILKVTHGVKSQFMKELFGKLEEARAEVSFRLSSRHGHDE

SEQ ID NO: 180244 - protein, 480 aa, Zea Mays
MASWLEQLQRELAARGLTVASIPGKGRGLIATCTFFPGDVILNQEPYASTPNKILVGSSCDHCFTSGNLRKCSMCRVTWYCSSNCQKEEWKLHQLECRAMAALTEDRKKMLTPTIRLMVRLALKRKLQNEKVIPSSSIDNYNLVDGLESHISKVDENQLVLYAQMANLVSLILPFIELDLKEIAQTFSKFACNAHTICDPELRPLGTGLYPVISIINHSCVPNAVLIFDGRTAYVRALQPINKDEEVSISYIETATVTKKRNNDLKQYFFTCTCPRCGFDEDALLEGFRCKNQACDGFLLPNSGKKAYTCQKCGASRDVEEIKNMRSEILQLSDKASSFLSSGNKAEAGSIYKIIEQLERNLYHAFSTTLLHTCETLLKIYLELQDWWTALTYCRLTIPVYERVYPPFHPMIGLQFYTCGKLEWLLEFTEDALKSLTRAADILKVTHGVKSQFMKELFGKLEEARAEVSFRLSSRHGHDE

SEQ ID NO: 180245 - protein, 442 aa, Zea Mays
MASWLEQLQRELAARGLTVASIPGKGRGLIATCTFFPGDVILNQEPYASTPNKILVGSSCDHCFTSGNLRKCSMCRVTWYCSSNCQKEEWKLHQLECRAMAALTEDRKKMLTPTIRLMVRLALKRKLQNEKVIPSSSIDNYNLVDGLESHISKVDENQLVLYAQMANLVSLILPFIELDLKEIAQTFSKFACNAHTICDPELRPLGTGLYPVISIINHSCVPNAVLIFDGRTAYVRALQPINKDEEVSISYIETATVTKKRNNDLKQYFFTCTCPRCVKGFDEDALLEGFRCKNQACDGFLLPNSDKAEAGSIYKIIEQLERNLYHAFSTTLLHTCETLLKIYLELQDWWTALTYCRLTIPVYERVYPPFHPMIGLQFYTCGKLEWLLEFTEDALKSLTRAADILKVTHGVKSQFMKELFGKLEEARAEVSFRLSSRHGHDE

SEQ ID NO: 180246 - protein, 482 aa, Zea Mays
MFSWNRKQSSSSGSPSPSSSSGRRRGGADASMDSSSRGGGGSGSGSGSRGRSPRLDRRNAVKRVDYEAGAGASVSVAASWSSSSSADQQRSPGPGLQPSRSLDVAPGADLRISGSVEGEVDELCRSLGLSGPEDFAIPVAAWEARKSRSNSDLLPRSHPDPSTPADEPSPIARVVSAPDVQPTRFVPAPIPATVAAPEESPKAAPAVAVAAPVGGLPLPSPRRGGGEVGIRGARPPLLSPPPPIGALAPPPVRRSFVDDDMTRSAWDIVQSFAPREQGSEPGERLDTRCNSDTEEESEAEDGVAAVEGELKELRIGETFEGLTGTSSLSTTNDDDASSTTTEAMFIISPNGKFKRKIKSWMRGALLGSGSFGMVYEGISDEGAFFAVKEVSLLDQGSNAQQSIVALEQEIALLGQFEHENIVQYYGTDKEESKLYIFIELVTQGSLSSLYQKYKLRESQVSAYTRQILNGLVYLHERNVVHS

SEQ ID NO: 180247 - protein, 392 aa, Zea Mays
MFSWNRKQSSSSGSPSPSSSSGRRRGGADASMDSSSRGGGGSGSGSGSRGRSPRLDRRNAVKRVDYEAGAGASVSVAASWSSSSSADQQRSPGPGLQPSRSLDVAPGADLRISGSVEGEVDELCRSLGLSGPEDFAIPVAAWEARKSRSNSDLLPRSHPDPSTPADEPSPIARVVSAPDVQPTRFVPAPIPATVAAPEESPKAAPAVAVAAPVGGLPLPSPRRGGGEVGIRGARPPLLSPPPPIGALAPPPVRRSFVDDDMTRSAWDIVQSFAPREQGSEPGERLDTRCNSDTEEESEAEDGVAAVEGELKELRIGETFEGLTGTSSLSTTNDDDASSTTTEAMFIISPNGKFKRKIKSWMRGALLGSGSFGMVYEGISEKLHSSVSLNMKI

SEQ ID NO: 180248 - protein, 513 aa, Zea Mays
MFSWNRKQSSSSGSPSPSSSSGRRRGGADASMDSSSRGGGGSGSGSGSRGRSPRLDRRNAVKRVDYEAGAGASVSVAASWSSSSSADQQRSPGPGLQPSRSLDVAPGADLRISGSVEGEVDELCRSLGLSGPEDFAIPVAAWEARKSRSNSDLLPRSHPDPSTPADEPSPIARVVSAPDVQPTRFVPAPIPATVAAPEESPKAAPAVAVAAPVGGLPLPSPRRGGGEVGIRGARPPLLSPPPPIGALAPPPVRRSFVDDDMTRSAWDIVQSFAPREQGSEPGERLDTRCNSDTEEESEAEDGVAAVEGELKELRIGETFEGLTGTSSLSTTNDDDASSTTTEAMFIISPNGKFKRKIKSWMRGALLGSGSFGMVYEGISDEGAFFAVKEVSLLDQGSNAQQSIVALEQEIALLGQFEHENIVQYYGTDKVLVILMNSCDLFMFQCRKNPNSIFLLSLSHKDLFHPSIKSINYENHKSLHTQGRFLTDWFTCMREMWSTEISSVPIYWCMQMDL

SEQ ID NO: 180249 - protein, 607 aa, Zea Mays
MFSWNRKQSSSSGSPSPSSSSGRRRGGADASMDSSSRGGGGSGSGSGSRGRSPRLDRRNAVKRVDYEAGAGASVSVAASWSSSSSADQQRSPGPGLQPSRSLDVAPGADLRISGSVEGEVDELCRSLGLSGPEDFAIPVAAWEARKSRSNSDLLPRSHPDPSTPADEPSPIARVVSAPDVQPTRFVPAPIPATVAAPEESPKAAPAVAVAAPVGGLPLPPPIGALAPPPVRRSFVDDDMTRSAWDIVQSFAPREQGSEPGERLDTRCNSDTEEESEAEDGVAAVEGELKELRIGETFEGLTGTSSLSTTNDDDASSTTTEAMFIISPNGKFKRKIKSWMRGALLGSGSFGMVYEGISDEGAFFAVKEVSLLDQGSNAQQSIVALEQEIALLGQFEHENIVQYYGTDKEESKLYIFIELVTQGSLSSLYQKYKLRESQVSAYTRQILNGLVYLHERNVVHRDIKCANILVHANGSVKLADFGLAKEMSKINMLRSCKGSVYWMAPEVINPKKMYGPSADIWSLGCTVLEMLTRQIPFPNIEWTNAFFMIGRGEQPTIPCYLSKEAQDFIGQCVRVDPESRPSASQLLEHPFVNRPLRASFESSSPPAI

SEQ ID NO: 180250 - protein, 286 aa, Zea Mays
MTVDNDLALKIYIKARATPKVVAAFAERREFDKTLIYSKQVLEINLVTYPNVVDAILANALQPINNFLGQALVEFFGTLSREWALECMKDLLLVNLRGNLQIVVQATKEYSEQLGVDACIKLFEQFKSYEDLYFFLGSYLSSSEDPDIHFKYIEAAARTGQIKEVERVTRESNFYDAEKIMNFLMEAKLPNARPLINVCDRFGFVPDLTHYLYTNNMLRYIEGYVQKVNPGNAPLVVGQLLDDECPKDFIKGLILFVRSLLPVEPLVDECEKRNRLRLLTQFLEHL

SEQ ID NO: 180251 - protein, 376 aa, Zea Mays
MDVLKRELQRKRQLLNADFGGRKIIRRAEIEARELQRIREVERQLLLQKQHRHSRPLSSPSSSSSSSSPTSAAADADADASRAESGSKESLPREEVIRRLRVLRQPATLFGEDDIARLRRLQVLIEDSGALADIDAAEIGEGQTNDFLRDIQAMRAKAATVTKPKAAGAEAERGEGDSVSIDVPFEELCDEDKITAFFRRLLDEWTQEVDGMPEAERRTAKGKAAIATCKQCTRYLDPLFKQCKKKALPSDVRQALLEVVRCCRRRDYLAAVDNYIKLAIGNSPWPIGVTMVGIHERSAREKIYTNSVAHIMNDETTRKYLQSVKRLITFCQRKYPTDPSRSVEFNSLANGSDLQSLLAQQNAKNSEETLRLVAAS

SEQ ID NO: 180252 - protein, 378 aa, Zea Mays
MDVLKRELQRKRQLLNADFGGRKIIRRAEIEARELQRIREVERQLLLQKQHRHSRPLSSPSSSSSSSSPTSAAADADADASRAESGSKESLPREEVIRRLRVLRQPATLFGEDDIARLRRLQVLIEDSGALADIDAAEIGEGQTNDFLRDIQAMRAKAATVTKPKAAGAEAERGEGDSVSIDVPFEELCDEDKITAFFRRLLDEWTQEVDGMPEAERRTAKGKAAIATCKQCTRYLDPLFKQCKKKSMALPSDVRQALLEVVRCCRRRDYLAAVDNYIKLAIGNSPWPIGVTMVGIHERSAREKIYTNSVAHIMNDETTRKYLQSVKRLITFCQRKYPTDPSRSVEFNSLANGSDLQSLLAQQNAKNSEETLRLVAAS

SEQ ID NO: 180253 - protein, 254 aa, Zea Mays
MDVLKRELQRKRQLLNADFGGRKIIRRAEIEARELQRIREVERQLLLQKQHRHSRPLSSPSSSSSSSSPTSAAADADADASRAESGSKESLPREEVIRRLRVLRQPATLFGEDDIARLRRLQVLIEDSGALADIDAAEIGEGQTNDFLRDIQAMRAKAATVTKPKAAGAEAERGEGDSVSIDVPFEELCDEDKITAFFRRLLDEWTQEVDGMPEAERRTAKGKAAIATCKQCTRYLDPLFKQCKKKILTASSNP

SEQ ID NO: 180254 - protein, 1499 aa, Zea Mays
MVGIHERSAREKIYTNSVAHIMNDETTRKYLQSVKRLITFCQRKYPTDPSRSVEFNSLANGSDLQSLLAQQNAKNSEETLRMSNFSLSLAIMVKWTIQTALDVSARGVRSCAGGRRADSVPALDMDREQWMYGIDRSDINYFRHVQGFIKVAEKHRLDNKATAILCPCVDCRNFDPIIDSRVILGHLIMRGFTSGYTCWTNHGECSIGDNNGNTEGPLDTNGGPMDTNEANDHYVHIQDTKSHFADATIVDVPVDHLEYMIHDVTVTRNLSEAQASQDQMSSESSSDTSGSSTSKTSGSTSTSSSTSLHSEDIVEKGSCTSARHRTKRGHAKCKKLEKGGPRRLTFDKNGIAQSPVKHVNEFSSYCGYIARMRVDIRIKDWRKVPTVVKSNLWEDVSKKFVMPRDETHTLNVKKVALKSMSHAWKDFKWKLNINYVKKDKTPFEDYPELKKEWWPDFVEWVTSDEYIALGEKGKQSQSMNKFRQKLGRRSYTVQKRKWAKEDAQALTEGKSIPFQDMPDGRHKDWARARNPSGDVNITESHPIIQKIVDLNEKSVAGTFTPLDNMDILATAIGSNHPGRTTGVSAYVGLGMGLAQGDGPRKKKRRRTKEYVKRIVDEYEAKFEKLTALCHSMERRLNNSESCSSSKFVDTPDHATHHSVDSLQEVMKCKLVVQIGPQSVVVARGQAYPPKDVVTVHGIERRDDHTKVQVDFVFDNFLEFPLPIPIAGGDMFTLGEAKNSFVLWPKSGIQLAEETTVHAKPQQVPHTSPQVLHHTPEKDKMPTPTMGTEDIDVTHSASNVSKKRKHKHRKHNKSKEKEQKTSQQKNIEDDGLDPLWTPPFHQRSPPPVPNNKQFVLGQPLVSSALLKRMGKQSQCFHKWYFAMTTPISRRQSATHFMVRYEEHDFLEKSGVYAVEFSDVFHIYNDLALDISLHRSWMLCMRKIDKYRGIVGFLDPEMIILKRINEEADEVEAYIVKALLAQQDKECIFVVCQEGAFGAYVDKKGRHNKNFGRTVIWKHFQGRAGFATCPLLPDEIANVRERLLDFFMNEVIDIGGSCRVEVVMSGHVAPPKSSNFFVEFGMGSGYHKKYTSSSSKVQGILFTYTFVQHMLYRILQVAGTVTKAMAVTPSGIFSVLALGWLGDHICVSSVQMSPTLLQSGLSTAAVWCRVPDTVSSQYQPLHRTPLSLCSGSLNVQCCRNLRETALKKGTPLARELDEKVRDALHLYIEARGINEKLFRFLQAWLYVKDHCNLVRWFKSVGSLISDQSQSKMTNTVTSMNQYILSLSDDKQLVPELISLIEQGTDVLRVKALLFVALLCKNSRRWLPHFFCNAKLISAVDRLGKEKEGFIHHCTEAFVQLVASLVPGILDTVSSDIQQVMVGKRHGPVTALAGRAHPKSTIHLFPLILHLLGSASFKHRVVTGHVLLQLANLIKILEAPFQVLFKNLTVDIKDVKPTSLLKDRLREVEGNPKLGSLGPQLQYSKYASKFLKGLLYFISYLI

SEQ ID NO: 180255 - protein, 86 aa, Zea Mays
MVGIHERSAREKIYTNSVAHIMNDETTRKYLQSVKRLITFCQRKYPTDPSRSVEFNSLANGSDLQSLLAQQNAKNSEETLRLVAAS

SEQ ID NO: 180256 - protein, 142 aa, Zea Mays
MNRHRNSTGAAMNTHDEHQDIRNTHSGGERRRTEGRSPTRTGTQHSATTLLAADTDRHARAHLSIIHAWMTCLRGSPPAQREQRRHRQRLRRRRPLVVEHALHLLTHRAPASSLLLLLPVGGVGAAVDAAAVTVRHCCRLVG

SEQ ID NO: 180257 - protein, 143 aa, Zea Mays
MNRHRNSTGAAMNTHDEHQDIRNTHSGGERRRTEGRSPTRTGTQHSATTLLAADTDRHARAHLSIIHAWMTCLRGSPAPAQREQRRHRQRLRRRRPLVVEHALHLLTHRAPASSLLLLLPVGGVGAAVDAAAVTVRHCCRLVG

SEQ ID NO: 180258 - protein, 89 aa, Zea Mays
MRWICWSVNVTSGVKEDRMMITGMHTVSDIFCVGCGSIVGWKYDAAHEKGQRYKEGKFILERYKVSGPDGSQYWVPQDAHLGGSDADDI

SEQ ID NO: 180259 - protein, 88 aa, Zea Mays
MSVMPSVNVTSGVKEDRMMITGMHTVSDIFCVGCGSIVGWKYDAAHEKGQRYKEGKFILERYKVSGPDGSQYWVPQDAHLGGSDADDI

SEQ ID NO: 180260 - protein, 712 aa, Zea Mays
MDGTPISASSTAGVDVGAVATGTPMKNAMTAAAVTEMARHLTVDTEDAFAGLLELAADDNAEGLRRALERAPPAAADEAGLWYGRRKVLEHRTPLMVAATYGSLAALRLLVSLSSVDVNRRSGTDGTTALHCAASGGSRSAVEAVKLLLGAGADTDTTDDAGRRPADVISVPPKMFDAKFALQDLLGFPKSEHGMLRVVTRVATSEKKEYPVDPSLPDIKNSIYASDEFRMYSFKVRPCSRAYSHDWTECPFVHPGENARRRDPRKYHYSCVPCPDFRKGVCRRGDMCEYAHGVFECWLHPAQYRTRLCKDGTSCNRRVCFFAHTTDELRPLYVSTGSAVPSPRASATAAMEMAAAMGLMPGSPSSVSAVMSPFTPPMSPSGNGMPPSLGWQQPNVPTLHLPGSSLQSSRLRTSLSARDMPADDYSLMPDFDSQLMNDLCYSRLGSSTGNHSARTKSLNPSNLDDLFSAELVSSPRYSNGDQGAMFSPSHKAAILNQFQQQQQALLSPINTGVYSPKAVDNKQLPSHPSLLHASLGMPSPGRMSPRCVESGSPMNSHLAAALAQREKQQQTMRSLSSRDLGPSAARASALGSPLSTSWSKWGSPSGVPDWGVDGEELGKLRRSSSFELRSGGDDPDLSWVHTLVKESPPEKQVTTSESINSVGPSPLMPPSMNNGGEGSGLNTQLDGRDQAAVLGALLEQMQLDQQIGSLAT

SEQ ID NO: 180261 - protein, 286 aa, Zea Mays
MATRRRLSPTFFGGLRARELGGASVSSRATAGLPYLADLSSDPGGRGGGVIAVEHSGDPAIPFAISFGKTAQTCNLLAVADEDGYVGLYDTRRRLPSASSSLEKSAETRVCDWVAHNNAVFDVCWIKEGSQILTASGDQTVKIWSVGNRKCIGVLSGHTGSVKSLSCHSSNPELIVSGSRDGSFALWDLRCDPKSPNSHGETCLTSSAVVREAHSPILRSRTRSRAKAASTSITSVLYLKDGVSIATSGAADNVVKIWDTRNLKVPFSNKNSQAGAQPLLKSGQSL

SEQ ID NO: 180262 - protein, 91 aa, Zea Mays
MGFLRTGALFTCHLPFPLRQTVIQKNPKRPLFLVFLTITKTSMPSFGNCSNNLFELQNKNSGLVTKAWAHGNLSQRCVGHMQTKAVSSNVP

SEQ ID NO: 180263 - protein, 355 aa, Zea Mays
MWRRAATAALSLGAGAGAVSIATSEDPAATFKVCAHLPPRLLRDSVTAATIAFDYKWSLWGLEPGTPVWQSAKHHAHLRSANRLQELCFRNGGIYIKLGQHIAQLEYVVPEEYVQTMRESMLKRCPVSSYEQVRGVFTKDLGESPETVFAEFDPAPFASASLAQVHVARTHDGQKVAVKVQHDHLTNTGVVDIATVDLLVNALHYIFPTFDYRWLVDEVRESAPKELDFLNEAKNSERCLNNFRKLSPQIAGSIYAPKVYWNLSTSRILTMEFMDAKEVTDVSGIKSIGVHPVDVSNLVSKAFAEMIFKHGFVHCDPHAANMMVRPMPQDSRKLFGHSWFFLTTASTKSLIIILG

SEQ ID NO: 180264 - protein, 487 aa, Zea Mays
MWRRAATAALSLGAGAGAVSIATSEDPAATFKVCAHLPPRLLRDSVTAATIAFDYKWSLWGLEPGTPVWQSAKHHAHLRSANRLQELCFRNGGIYIKLGQHIAQLVFAEFDPAPFASASLAQVHVARTHDGQKVAVKVQHDHLTNTGVVDIATVDLLVNALHYIFPTFDYRWLVDEVRESAPKELDFLNEAKNSERCLNNFRKLSPQIAGSIYAPKVYWNLSTSRILTMEFMDAKEVTDVSGIKSIGVHPVDVSNLVSKAFAEMIFKHGFVHCDPHAANMMVRPMPQDSRKLFGWKRPQLVLLDHGLYKELDYNTRISYASLWKALVFADAKAIKENSAKLGAGEDLHALFAGVLTMRPWKRVIDPSPDHLVLGKNTDYSELQNYASLYFTEISELLRRLPRVILLMLKTNDCLRAVSHALVGGSSLESFMIIGRVSSEAVLDAKRMNRRSFLDGLKIWLEEALLEARFFTLKLMLCVMQLRKLLPG

SEQ ID NO: 180265 - protein, 220 aa, Zea Mays
MWRRAATAALSLGAGAGAVSIATSEDPAATFKVCAHLPPRLLRDSVTAATIAFDYKWSLWGLEPGTPVWQSAKHHAHLRSANRLQELCFRNGGIYIKLGQHIAQLEYVVPEEYVQTMRESMLKRCPVSSYEQVRGVFTKDLGESPETVFAEFDPAPFASASLAQVHVARTHDGQKVAVKVQHDHLTNTGVVDIATVDLLVNALHYIFPTFDYSALEWFAS

SEQ ID NO: 180266 - protein, 247 aa, Zea Mays
MLVALNQLEFTLLMFQTYKAFAEMIFKHGFVHCDPHAANMMVRPMPQDSRKLFGWKRPQLVLLDHGLYKELDYNTRISYASLWKALVFADAKAIKENSAKLGAGEDLHALFAGVLTMRPWKRVIDPSPDHLVLGKNTDYSELQNYASLYFTEISELLRRLPRVILLMLKTNDCLRAVSHALVGGSSLESFMIIGRVSSEAVLDAKRMNRRSFLDGLKIWLEEALLEARFFTLKLMLCVMQLRKLLPG

SEQ ID NO: 180267 - protein, 505 aa, Zea Mays
MWRRAATAALSLGAGAGAVSIATSEDPAATFKVCAHLPPRLLRDSVTAATIAFDYKWSLWGLEPGTPVWQSAKHHAHLRSANRLQELCFRNGGIYIKLGQHIAQLEYVVPEEYVQTMRESMLKRCPVSSYEQVRGVFTKDLGESPETVFAEFDPAPFASASLAQVHVARTHDGQKVAVKVQHDHLTNTGVVDIATVDLLVNALHYIFPTFDYRWLVDEVRESAPKIAGSIYAPKVYWNLSTSRILTMEFMDAKEVTDVSGIKSIGVHPVDVSNLVSKAFAEMIFKHGFVHCDPHAANMMVRPMPQDSRKLFGWKRPQLVLLDHGLYKELDYNTRISYASLWKALVFADAKAIKENSAKLGAGEDLHALFAGVLTMRPWKRVIDPSPDHLVLGKNTDYSELQNYASLYFTEISELLRRLPRVILLMLKTNDCLRAVSHALVGGSSLESFMIIGRVSSEAVLDAKRMNRRSFLDGLKIWLEEALLEARFFTLKLMLCVMQLRKLLPG

SEQ ID NO: 180268 - protein, 197 aa, Zea Mays
MDNMLALVCKTYDGVKGLEKYDKDDIIDKTSGIHGLGRSVGKFVDGRFIVFCLENLRPFSSDVIIDDPQRKLILHRPRLPGGESPPGFLDFVVNMIHLDRAHLRFLIASGHGLRETLFSHLQVYKTRTNIQSSLPLIKDGVVSLDGGLLRPNGSFCLGHSKNLEVKFAVTTDVSSLLENVVEMEEQVKRKNWEKEMV

SEQ ID NO: 180269 - protein, 55 aa, Zea Mays
MDYVTQPAVTHQLIHPQLLGVICLEPSSPTSGGNILVAYVPILLGLIACSGISTT

SEQ ID NO: 180270 - protein, 257 aa, Zea Mays
MGACVSRPSACVGKPHTPRSGDASGRSGGGGGARRRRSRRVGKGRRTAPSRAASMETIQEAEVPGSTSAAAADHRTYSNPAFQVSGNIEEAWYDSLAMSESDAEDDFHSVQDDSFSLNGFENEAALSMRDGNGGSFNGAAQSGEQQHKKPKSSELSKGSLENGVRSSMSNEDAVSFSGADNTHGGERILEVCGLLPNNCLPCIASAVGVSEKKRTLSSSPTHSMRMPSLKLSFKKKSGEAHPSSTLRAIVSSFIISE

SEQ ID NO: 180271 - protein, 285 aa, Zea Mays
MLSVSTKDFLERPLAGSQVQLCLLETNMPNSWTHIDPGTFRVRGANYFRDKKKELAPNYAAYYPFGVDVYLSPQKLNHISRFVELPDIQLSSKLPPLLVVNVQVPLYPASLFQNETDGEGMSFVLYFRLSDGYSKELPPSFIESIRRLIDDHVEKIKAFPMETTIPFRERLKILGRVANLEDLPLSAAERKLMHAYNEKPVLSRPQHEFYLGDNYFEIDIDMHRFSYISRKGFATFLDRLKACVLDVGLTIQGNKAEELPEQILCCVRLNGIDYTKYQPLLTHAA

SEQ ID NO: 180272 - protein, 592 aa, Zea Mays
MESRGRRLRSPERQRPASRKVPVVYYLTRSRHLEHPHFVEVPLASPERLYLRDVINHLNVVRGKGMAAMYSWSCKSFLEVIFIGELFGWLFVPVLIGRSKGCRSYKNGFVWHDLAEDDLVVPATDGEYVLKGSELVDQSSSGPFYPVTVSNGSQKQQSRPKEGARQALPRDHSHPSCPPSSVTVREAKARRSPCVPPQDEDDDTTSPRRDRSLETMPQQELEPQQRNERAQPPASGSASPVEFRVHKQHAGCMDAATQTDDLGRRTPELRKKSLRSTDHDAVVREVTECWQRQSHPCRSADLPGVSREELLHQSTTPPSTPSTRGKSASLESLIRADNATSSFRILEEEEEEEEEEEEEEEEDIVVLSACPKLKPANVLVQLISCGSLSVKGHEDAAGPVRAYKPRLPSMKLPSPFVSRAMAMGELDYLSENPSRLVGVRMEEKEYFSGSLVETKTQRDGTAERYSALKRSSSYNAERERASDALDCTRREEGETDDRSSSRARCLPRTPMILASFLHPRGDPLKSPVSDCRRNSSARRQDCDAASGDGGSRRFAADASVVASAVAAGTEESFRANLVTRGSREDRRGLRGK

SEQ ID NO: 180273 - protein, 417 aa, Zea Mays
MPQQELEPQQRNERAQPPASGSASPVEFRVHKQHAGCMDAATQTDDLGRRTPELRKKSLRSTDHDAVVREVTECWQRQSHPCRSADLPGVSREELLHQSTTPPSTPSTRGKSASLESLIRADNATSSFRILEEEEEEEEEEEEEEEEDIVVLSACPKLKPANVLVQLISCGSLSVKGHEDAAGPVRAYKPRLPSMKLPSPFVSRAMAMGELDYLSENPSRLVGVRMEEKEYFSGSLVETKTQRDGTAERYSALKRSSSYNAERERASDALDCTRREEGETDDRSSSRARCLPRTPMILASFLHPRGDPLKSPVSDCRRNSSARRQDCDAASGDGGSRSGLSQAAVSSDPSRIEGCALNPWCSRIEGCALNPWCRLSSGARVVIHCTIACNDSDEGSERSGSGESRWLQGDHAAALEN

SEQ ID NO: 180274 - protein, 198 aa, Zea Mays
MLVGGGRDDEEVLRKLKSMDVDKMENGGGGGEAESPRPAVKYHGWKAMPFIIGNETFEKLGTLGTSANLLVYLTQVFHMRSVDAATLLNGLNGTTSLAPIVGAFLSDAYLGRYLALAIASIASLITRWRAAHGTSAHVHARSLAPRGRFFSENLDERRACLVLLLPYTTLAHLALGEVSFYQVWRELIWLAQVGLQKS

SEQ ID NO: 180275 - protein, 237 aa, Zea Mays
MASLQSQSLLGIGSSSIVLARARVQQCLAAASRSHAPLLQANGGRTGLPSSSILNAGNAISFSRRRRKDLRVVAEAAAAGPTKVTPASSGGVSISDVLWPSAGAFLAMAVLGKMDQVVAFKGVSLTIPPLGAVCCVLFSAPDSPAAKKYNMFVAQIGCAALGVLALSLFGPGWLARGAALSACIAFMTITGASHPPAASLPLLFIDGPKFHSLQLWYALFPGAVGCIVLCLIRWWFT

SEQ ID NO: 180276 - protein, 1000 aa, Zea Mays
MSVPPAGKRQVSLRGSSAKEITRDALLQKVSEERQLRSHLRRAAAAAFSIQRIWRRYHVIRMVSEQLHEDWELLMNQPNIDLTTQWISKKMLRPFLFFITQPSSWYIGQWSKTVESILTCFKIILNSINSMDARKNFCSFAVGIPEERSIWLYQAKKLISLCSSILARYDHSCCKDGSIVDMTAIAMRLAVSLTDCKTWKSLNSENTSAADASVQSLIEFIGTCQSGMYNCVRQYIKSLGPHVTSAKKSSATATDDDFLITASAVTLALRPFDSKKAKGGVDLNGASKKYFTLILTIPDLCKRMPPLLLPALKHFSVLQPSLNILLISKDKIFEEIIKLEQSEVSASIIPCSGWALGNIVNLATNHDDLSNSGCFIQELDFCLYVDVINCISENLLESFEKSKGTSQNVGNITFHADTSVAEEEDTNDDCRMRTLFMDLLKPIYQQWHLRKLLMLAKEDFPCRRATDYDPNLKNIHFRILKLSDVICFYYHMLRIFSSLNPSIGAMPILNMLAFSPGFLVDLWEALEMPIFGPPIQNSQETGHEKQLATSSSGVQVSSMRQRRNAKDTANRWSNVLQKITGKSNDSEEGTLSDSILFSHESNDDALTSWDIEAMRHASEGIGKDLMCIMYLFCAIYGHLLLVLDDIEFYEKQVPFTLEQQRKIASALNTFVYNSFIQNSGSYSNPLVDVAVRCLNLLYERDSRHKFCPISLWLAPARNGRIPIAAAARSHEAAFGIFPGIPHRSSVLTTLPHVYPFEERVQMFREFIESDKASRRVTGEVSGPGPGSIEIVIRRGHIIDDGYRQLNCLRSKLKSCIHVSFVSECGLPEAGLDYGGLSKEFLTDLSKSAFSPEYGLFSQTSASDTSLIPSNSAKLLDNGIDMIEFLGRVVGKALYEGILLDYSFSPVFVQKLLGRYNFLDELSTLDPELYRNLMQLKHYDGDVEDLFLDFTVTEELGGKRIVHELRPGGKNISVTNENKLHYVHAMADFKLNRQVRDTVFS

SEQ ID NO: 180277 - protein, 928 aa, Zea Mays
MSVPPAGKRQVSLRGSSAKEITRDALLQKVSEERQLRSHLRRAAAAAFSIQRIWRRYHVIRMVSEQLHEDWELLMNQPNIDLTTQWISKKMLRPFLFFITQPSSWYIGQWSKTVESILTCFKIILNSINSMDARKNFCSFAVGIPEERSIWLYQAKKLISLCSSILARYDHSCCKDGSIVDMTAIAMRLAVSLTDCKTWKSLNSENTSAADASVQSLIEFIGTCQSGMYNCVRQYIKSLGPHVTSAKKSSATATDDDFLITASAVTLALRPFDSKKAKGGVDLNGASKKYFTLILTIPDLCKRMPPLLLPALKHFSVLQPSLNILLISKDKIFEEIIKLEQSEVSASIIPCSGWALGNIVNLATNHDDLSNSGCFIQELDFCLYVDVINCISENLLESFEKSKGTSQNVGNITFHADTSVAEEEDTNDDCRMRTLFMDLLKPIYQQWHLRKLLMLAKEDFPCRRATDYDPNLKNIHFRILKLSDVICFYYHMLRIFSSLNPSIGAMPILNMLAFSPGFLVDLWEALEMPIFGPPIQNSQETGHEKQLATSSSGVQVSSMRQRRNAKDTANRWSNVLQKITGKSNDSEEGTLSDSILFSHESNDDALTSWDIEAMRHASEGIGKDLMCIMYLFCAIYGHLLLVLDDIEFYEKQVPFTLEQQRKIASALNTFVYNSFIQNSGSYSNPLVDVAVRCLNLLYERDSRHKFCPISLWLAPARNGRIPIAAAARSHEAAFGIFPGIPHRSSVLTTLPHVYPFEERVQMFREFIESDKASRRVTGEVSGPGPGSIEIVIRRGHIIDDGYRQLNCLRSKLKSCIHVSFVSECGLPEAGLDYGGLSKEFLTDLSKSAFSPEYGLFSQTSASDTSLIPSNSAKLLDNGIDMIEFLGRVVGKALYEGILLDYSFSPVFVQKLLGRTMMEMLRIYFWILL

SEQ ID NO: 180278 - protein, 1139 aa, Zea Mays
MSVPPAGKRQVSLRGSSAKEITRDALLQKVSEERQLRSHLRRAAAAAFSIQRIWRRYHVIRMVSEQLHEDWELLMNQPNIDLTTQWISKKMLRPFLFFITQPSSWYIGQWSKTVESILTCFKIILNSINSMDARKNFCSFAVGIPEERSIWLYQAKKLISLCSSILARYDHSCCKDGSIVDMTAIAMRLAVSLTDCKTWKSLNSENTSAADASVQSLIEFIGTCQSGMYNCVRQYIKSLGPHVTSAKKSSATATDDDFLITASAVTLALRPFDSKKAKGGVDLNGASKKYFTLILTIPDLCKRMPPLLLPALKHFSVLQPSLNILLISKDKIFEEIIKLEQSEVSASIIPCSGWALGNIVNLATNHDDLSNSGCFIQELDFCLYVDVINCISENLLESFEKSKGTSQNVGNITFHADTSVAEEEDTNDDCRMRTLFMDLLKPIYQQWHLRKLLMLAKEDFPCRRATDYDPNLKNIHFRILKLSDVICFYYHMLRIFSSLNPSIGAMPILNMLAFSPGFLVDLWEALEMPIFGPPIQNSQETGHEKQLATSSSGVQVSSMRQRRNAKDTANRWSNVLQKITGKSNDSEEGTLSDSILFSHESNDDALTSWDIEAMRHASEGIGKDLMCIMYLFCAIYGHLLLVLDDIEFYEKQVPFTLEQQRKIASALNTFVYNSFIQNSGSYSNPLVDVAVRCLNLLYERDSRHKFCPISLWLAPARNGRIPIAAAARSHEAAFGIFPGIPHRSSVLTTLPHVYPFEERVQMFREFIESDKASRRVTGEVSGPGPGSIEIVIRRGHIIDDGYRQLNCLRSKLKSCIHVSFVSECGLPEAGLDYGGLSKEFLTDLSKSAFSPDNSAKLLDNGIDMIEFLGRVVGKALYEGILLDYSFSPVFVQKLLGRYNFLDELSTLDPELYRNLMQLKHYDGDVEDLFLDFTVTEELGGKRIVHELRPGGKNISVTNENKLHYVHAMADFKLNRQILPFANAFYRGLSDLISPYWLSLFNANEFNQLLSGGLQDFDVDDLRNNTKYTGGYTESSRTVKLFWEVIKAFKPTERCLLLKFVTSCSRAPLLGFKYLQPSFTIHKVPCDVTLWASIGGQDVDRLPSASTCYNTLKLPTYKRSSTLRSKLLYAISSNTGFELS

SEQ ID NO: 180279 - protein, 739 aa, Zea Mays
MVLQRNTSHLYLQYQICANACHLFCYLLLNIFLCCNRVSIFYWWRQISKDKIFEEIIKLEQSEVSASIIPCSGWALGNIVNLATNHDDLSNSGCFIQELDFCLYVDVINCISENLLESFEKSKGTSQNVGNITFHADTSVAEEEDTNDDCRMRTLFMDLLKPIYQQWHLRKLLMLAKEDFPCRRATDYDPNLKNIHFRILKLSDVICFYYHMLRIFSSLNPSIGAMPILNMLAFSPGFLVDLWEALEMPIFGPPIQNSQETGHEKQLATSSSGVQVSSMRQRRNAKDTANRWSNVLQKITGKSNDSEEGTLSDSILFSHESNDDALTSWDIEAMRHASEGIGKDLMCIMYLFCAIYGHLLLVLDDIEFYEKQVPFTLEQQRKIASALNTFVYNSFIQNSGSYSNPLVDVAVRCLNLLYERDSRHKFCPISLWLAPARNGRIPIAAAARSHEAAFGIFPGIPHRSSVLTTLPHVYPFEERVQMFREFIESDKASRRVTGEVSGPGPGSIEIVIRRGHIIDDGYRQLNCLRSKLKSCIHVSFVSECGLPEAGLDYGGLSKEFLTDLSKSAFSPEYGLFSQTSASDTSLIPSNSAKLLDNGIDMIEFLGRVVGKALYEGILLDYSFSPVFVQKLLGRYNFLDELSTLDPELYRNLMQLKHYDGDVEDLFLDFTVTEELGGKRIVHELRPGGKNISVTNENKLHYVHAMADFKLNRQHHCPCRYFHLQTHFIEDSAISFHHIG

SEQ ID NO: 180280 - protein, 720 aa, Zea Mays
MVLQRNTSHLYLQYQICANACHLFCYLLLNIFLCCNRVSIFYWWRQISKDKIFEEIIKLEQSEVSASIIPCSGWALGNIVNLATNHDDLSNSGCFIQELDFCLYVDVINCISENLLESFEKSKGTSQNVGNITFHADTSVAEEEDTNDDCRMRTLFMDLLKPIYQQWHLRKLLMLAKEDFPCRRATDYDPNLKNIHFRILKLSDVICFYYHMLRIFSSLNPSIGAMPILNMLAFSPGFLVDLWEALEMPIFGPPIQNSQETGHEKQLATSSSGVQVSSMRQRRNAKDTANRWSNVLQKITGKSNDSEEGTLSDSILFSHESNDDALTSWDIEAMRHASEGIGKDLMCIMYLFCAIYGHLLLVLDDIEFYEKQVPFTLEQQRKIASALNTFVYNSFIQNSGSYSNPLVDVAVRCLNLLYERDSRHKFCPISLWLAPARNGRIPIAAAARSHEAAFGIFPGIPHRSSVLTTLPHVYPFEERVQMFREFIESDKASRRVTGEVSGPGPGSIEIVIRRGHIIDDGYRQLNCLRSKLKSCIHVSFVSECGLPEAGLDYGGLSKEFLTDLSKSAFSPEYGLFSQTSASDTSLIPSNSAKLLDNGIDMIEFLGRVVGKALYEGILLDYSFSPVFVQKLLGRYNFLDELSTLDPELYRNLMQLKHYDGDVEDLFLDFTVTEELGGKRIVHELRPGGKNISVTNENKLHYVHAMADFKLNRQVRDTVFS

SEQ ID NO: 180281 - protein, 701 aa, Zea Mays
MSTRDGGGGRRGGNAAAGRGGDGQGRGRGGGGRGGAGGRGGGGQWRAQGGAELGGGRGGAVGAARGGRGGVERGGHQSFHGARPVGGDRGGRGHYHHGVPAQVQPQWQVAAPPSTSRPTPAEVEELRGEVERKAAVAVPDAEAHEGPSSGTAHEPSAAPARVEAEQGTSLVVEADQAAQGRLPPSSSKALVFPARPGYGTLGRRCRVRANHFFVQVADKEIYHYDVVISPESQSRKRNRWILNELVKLHKNYLNGRLPVYDGRKGLFTAGPLPFKTKEFVLELTNPERANQGAKEYSVTIKDAAKLDLYSLRQFLAGRQRELPQDTVQALDIAMRECPTEKYVSISRSFFSQSFGHGGDIGSGVECWRGYYQSLRATQMGLSLNIDISATAFYKAQPILEFALEYLNIRDTSRRLSDQDRLKLKKVLKGVRVVATHRRDIAIHYKITGITSLPLNSLTFNQDGASVSVVQYFKHQYNYSLKHIHWPCLQSGNDSRPTYLPMEVCSILGGQRYSRKLNEYQVTSILKKACERPPQREGSILEVVNRNDYGNDHCAKEFGIKVTNELALVDARVLPAPTLKYHDSGREKVCSPSVGQWNMNNKRLIDGVSIQYWACVTFASRLHPNDVRMFCNNLVGACNDMGMQINGRPCVDVGQARPDNLEAALRNTHRQSAQMLAQQGVTRQLDLLIVVLPDANASVFYG

SEQ ID NO: 180282 - protein, 864 aa, Zea Mays
MSTRDGGGGRRGGNAAAGRGGDGQGRGRGGGGRGGAGGRGGGGQWRAQGGAELGGGRGGAVGAARGGRGGVERGGHQSFHGARPVGGDRGGRGHYHHGVPAQVQPQWQVAAPPSTSRPTPAEVEELRGEVERKAAVAVPDAEAHEGPSSGTAHEPSAAPARVEAEQGTSLVVEADQAAQGRLPPSSSKALVFPARPGYGTLGRRCRVRANHFFVQVADKEIYHYDVVISPESQSRKRNRWILNELVKLHKNYLNGRLPVYDGRKGLFTAGPLPFKTKEFVLELTNPERANQGAKEYSVTIKDAAKLDLYSLRQFLAGRQRELPQDTVQALDIAMRECPTEKYVSISRSFFSQSFGHGGDIGSGVECWRGYYQSLRATQMGLSLNIDISATAFYKAQPILEFALEYLNIRDTSRRLSDQDRLKLKKVLKGVRVVATHRRDIAIHYKITGITSLPLNSLTFNQDGASVSVVQYFKHQYNYSLKHIHWPCLQSGNDSRPTYLPMEVCSILGGQRYSRKLNEYQVTSILKKACERPPQREGSILEVVNRNDYGNDHCAKEFGIKVTNELALVDARVLPAPTLKYHDSGREKVCSPSVGQWNMNNKRLIDGVSIQYWACVTFASRLHPNDVRMFCNNLVGACNDMGMQINGRPCVDVGQARPDNLEAALRNTHRQSAQMLAQQGVTRQLDLLIVVLPDANASVFYGRIKRLCETELGLVTQCCQPKNVFKGGRQYLQNLALKINVKVVASMDWPQVAKYRCLVSSQGHREEIITDLFTQVKDPQKGLINGGMIRELLVSFYKANGSRKPSRIIFYRFVIVCLNELCCRLNLNLVSVHEKTAPAVFPYVNTLLIHSIQQLHLGEELPLCT

SEQ ID NO: 180283 - protein, 812 aa, Zea Mays
MSTRDGGGGRRGGNAAAGRGGDGQGRGRGGGGRGGAGGRGGGGQWRAQGGAELGGGRGGAVGAARGGRGGVERGGHQSFHGARPVGGDRGGRGHYHHGVPAQVQPQWQVAAPPSTSRPTPAEVEELRGEVERKAAVAVPDAEAHEGPSSGTAHEPSAAPARVEAEQGTSLVVEADQAAQGRLPPSSSKALVFPARPGYGTLGRRCRVRANHFFVQVADKEIYHYDVVISPESQSRKRNRWILNELVKLHKNYLNGRLPVYDGRKGLFTAGPLPFKTKEFVLELTNPERANQGAKEYSVTIKDAAKLDLYSLRQFLAGRQRELPQDTVQALDIAMRECPTEKYVSISRSFFSQSFGHGGDIGSGVECWRGYYQSLRATQMGLSLNIDISATAFYKAQPILEFALEYLNIRDTSRRLSDQDRLKLKKVLKGVRVVATHRRDIAIHYKITGITSLPLNSLTFNQDGASVSVVQYFKHQYNYSLKHIHWPCLQSGNDSRPTYLPMEVCSILGGQRYSRKLNEYQVTSILKKACERPPQREGSILEVVNRNDYGNDHCAKEFGIKVTNELALVDARVLPAPTLKYHDSGREKVCSPSVGQWNMNNKRLIDGVSIQYWACVTFASRLHPNDVRMFCNNLVGACNDMGMQINGRPCVDVGQARPDNLEAALRNTHRQSAQMLAQQGVTRQLDLLIVVLPDANASVFYGRIKRLCETELGLVTQCCQPKNVFKGGRQYLQNLALKINVKVGGRNTVLEDALNRRIHLLTDLPTIIFGADVTHPAPGEDASPSIAAFMIGCCINGLATSCKVQVLGVFSRS

SEQ ID NO: 180284 - protein, 510 aa, Zea Mays
MSTRDGGGGRRGGNAAAGRGGDGQGRGRGGGGRGGAGGRGGGGQWRAQGGAELGGGRGGAVGAARGGRGGVERGGHQSFHGARPVGGDRGGRGHYHHGVPAQVQPQWQVAAPPSTSRPTPAEVEELRGEVERKAAVAVPDAEAHEGPSSGTAHEPSAAPARVEAEQGTSLVVEADQAAQGRLPPSSSKALVFPARPGYGTLGRRCRVRANHFFVQVADKEIYHYDVVISPESQSRKRNRWILNELVKLHKNYLNGRLPVYDGRKGLFTAGPLPFKTKEFVLELTNPERANQGAKEYSVTIKDAAKLDLYSLRQFLAGRQRELPQDTVQALDIAMRECPTEKYVSISRSFFSQSFGHGGDIGSGVECWRGYYQSLRATQMGLSLNIDISATAFYKAQPILEFALEYLNIRDTSRRLSDQDRLKLKKVLKGVRVVATHRRDIAIHYKITGITSLPLNSLTFNQDGASVSVVQYFKHQYNYSLKHIHWPCLQSGNDSRPTYLPMEYTWRSTLF

SEQ ID NO: 180285 - protein, 716 aa, Zea Mays
MRECPTEKYVSISRSFFSQSFGHGGDIGSGVECWRGYYQSLRATQMGLSLNIDISATAFYKAQPILEFALEYLNIRDTSRRLSDQDRLKLKKVLKGVRVVATHRRDIAIHYKITGITSLPLNSLTFNQDGASVSVVQYFKHQYNYSLKHIHWPCLQSGNDSRPTYLPMEVCSILGGQRYSRKLNEYQVTSILKKACERPPQREGSILEVVNRNDYGNDHCAKEFGIKVTNELALVDARVLPAPTLKYHDSGREKVCSPSVGQWNMNNKRLIDGVSIQYWACVTFASRLHPNDVRMFCNNLVGACNDMGMQINGRPCVDVGQARPDNLEAALRNTHRQSAQMLAQQGVTRQLDLLIVVLPDANASVFYGRIKRLCETELGLVTQCCQPKNVFKGGRQYLQNLALKINVKVGGRNTVLEDALNRRIHLLTDLPTIIFGADVTHPAPGEDASPSIAAVVASMDWPQVAKYRCLVSSQGHREEIITDLFTQVKDPQKGLINGGMIRELLVSFYKANGSRKPSRIIFYRDGVSEGQFSQVLLYEVDAIRKACASLEEGYLPPITFIVVQKRHHTRLFPEDHHAHGQMDRSGNILPGTVVDTKICHPSEFDFYLCSHSGIQGTSRPAHYHVLFDENKFTADALQTLTYKLCYTYARCTRSVSIVPPAYYAHLAAFRARHYMDDDLSDQGSSSVASSRMKDGAVPVKQLPKVMESVKQFMFYC

SEQ ID NO: 180286 - protein, 218 aa, Zea Mays
MEGKEEGRIFVGGLSWQTDERKLQDAFGRFGKVVDVQIMLERHTYRHRGFGFVTFEDRRAVDSAIKEMRGQELDGRTISVNKAEPKMNTDDTRFDSGGGRGEYRGGRGDGPPPGNCYECGRPGHWVRDCPSAAGGRSGRFPSKFSGGGRGDRFSGSDRFNDRYMDDRYDGGRYGYRDQVDARDKYGGGPARYDGGSYRERPGPYDRPSRGGGRFDERH

SEQ ID NO: 180287 - protein, 92 aa, Zea Mays
MASPSSSSFPSRKALSKIACRRLQKELTEWQVNPPAGFEHRVTDNLQRWVVDVAGAPGTLYTGETYKLQVDFSEHYPMEAPQIYCMTRGPQQ

SEQ ID NO: 180288 - protein, 452 aa, Zea Mays
MATYYSSPDSERDSQTMYSTESGNASYPVPSALGNFLYLNSASSGPYTEFNGIVQSQQNFMELTGHPSAISHDSSSNEATNIGTSLTEQRSFGPLKDMRNEMLMHLMDGAHSSGSDLIHNDDHSTAQLEFGMLNNHNSTSLPSASGQGLSLSLNTHILAPSYPYWSAKQDLLTPNSYQGDDNRMKNMQSEASQAIRNSKYLKAAQELLDEIVSVWKSVKQKTDKGPSEAGKSDGKETDGGTKSEGVSFDPQESGANTAAELSTAEKQELQNKMVKLMAMLDEVDRKYKHYYHRMQLVMSSFDMVAGSGAAKPYTAVALQTISRHFRCLKDAINDQISVIRKKLGEDDDASGKEGKLIRLRYIDQQIRQQRAFQQYGMLQQNAWRPQRGLPENSVSILRAWLFEHFLHPYPKDSEKLMLSRQTGLTRNFKLVHQCPCPAVEANDRRHVQRRDR

SEQ ID NO: 180289 - protein, 109 aa, Zea Mays
MTLPGLGEPNRSVGKPSRSLSGYGCPLSPGAQAAAYPFCCRQQVLPSSANGRLLHKLPRMRCAKKAVTTSFPFPAPTCSATGATLPRWSPRIRWPWRSSSSCSQITPGF

SEQ ID NO: 180290 - protein, 115 aa, Zea Mays
MTLPGLGEPNRSVGKPSRSLSGYGCPLSPGAQAAAYPFCCRQQVLPSSANGRLLHKLPRMRCAKKAVTTSFPFPAPTCSATGATLPRWSPRRTYPSKNMHMRRDISVWMGTGKEE

SEQ ID NO: 180291 - protein, 262 aa, Zea Mays
MDLQKKPALLLRLRDLILAQKTGSLLVRDLEKEVGFVQKWDFLSLIGRHPNIFHVSGGSASRKPISVTLTEKARKISCEDADARELMEPILVRNLRKLLMMSMDCQIPMEKIELIQFELGLPKNFKSNLIPRYPDFFSIHDVKGLDRLCMEHWDSSLAVTIREKKSFEGFQICSRGIPKDGNVLGPFAFKLKYPAGFRPNWKYLEEVVRWQKMAFPSPYLNVRRVESATPQARKRAIAVLHEILSLTMERRLTSDKLDIFSQ

SEQ ID NO: 180292 - protein, 152 aa, Zea Mays
MDLQKKPALLLRLRDLILAQKTGSLLVRDLEKEVGFVQKWDFLSLIGRHPNIFHVSGGSASRKPISVTLTEKARKISCEDADARELMEPILVRNLRKLLMMSMDCQIPMEKIELIQFELGLPKNFKSNLIPRLFLFLLTKTCAPGMISPTSS

SEQ ID NO: 180293 - protein, 110 aa, Zea Mays
MILLFHTCTWSWRPSLSSPNPYSTGLMEAILMESHIFSTEYQYITNNCSVYFLVGVSQLAINEFYLSEISFCPFQSFHCILSPSVQIMICPYAPLNIMCMKEMVIDTNAK

SEQ ID NO: 180294 - protein, 57 aa, Zea Mays
MHVGAVQANDRALLVDDLIATSVRALNLSVSSFCAIFFYCVVGYHSYLNAFLSLEYI

SEQ ID NO: 180295 - protein, 64 aa, Zea Mays
MILLPPVYGHSTYRRKNLFDVVQILPEWGIGYKVANTTWCDVSCQITKINLYKDQVDEKVGVCS

SEQ ID NO: 180296 - protein, 683 aa, Zea Mays
MAAAPCTLNMASVLALLLVFSVHWTGRSHAFSLMNYLCNNGSSYALNSTYRSNVVALLGSLSANASSSAVGFATGTLGRGPDQTWGLALCRGDVNGSACASCLALAPDVAFGKCRGVKDASIYYDRCLLRYSDTDFLATPDDAAASVQYGANLQVNVTADPGRFAGLAADLVGALSAWAAWNSTARYAAGVVTSAQGFTTTDHSLVHDIYGLVQCTPNQAPEACLACLGRLRDEIPDVFNGSTGGQFNAVWCNLRFEVFLFYDSSPVVKLVAPPVTPAPPGAAVHGDANRTRGAGHAATVVAIVFGVLVIFLLSTFTIYLWRKAQVKRYAEEADDSGSLIFELATLRRATGDFAEENKLGHGGFGAVYKGFLADGRRIAVKRLDKASGQGLKELRNELLLVAKLRHNNLAKLLGVCVKGQEKLLVYEYMPNRSLDTYLFADEKRASLDWEARYRILYGTARGLLYLHEDSQVRIVHRDLKASNILLDADMSPKISDFGLARLFSADNTTTVTSQVVGTLGYMAPEYAVLGHLSVKLDVYSFGVLILEVVTGRRNTDMFESAAGESIILLSYVWDHWVRGTALEAVDPSLACHCQAPEAEAEVVKCIHLGLLCVQENPADRPNMLDVLVMLHGHSSGFAAPSKPAFAFAYGETTSSDERGILSVSRAAAAFSLNGMSASEFQPR

SEQ ID NO: 180297 - protein, 149 aa, Zea Mays
MELLVLGPFEVLRSELHQEGAPVEPLLRGNPMESAQERRVIVWPRRPLDDFSPVFHNPESPTHHGVAESTCNCKPTKSSRAPTPPNRVASEIEQGLEEPGERPSEEEDQQQAGGGGEVVGVGGRGIYDDNPVEAGGATARLPDPIPAQA

SEQ ID NO: 180298 - protein, 162 aa, Zea Mays
MELLVLGPFEVLRSELHQEGAPVEPLLRGNPMESAQERRVIVWPRRPLDDFSPVFHNPESPTHHGVAESTCNCKPTKSSRAPTPPNRVASEIEQGLEEPGERPSEEEDQQQAGGGGEVVGVGGRGIYDDNPVEAGGATARLPDPIPAQCCRCSPVMCDVSAG

SEQ ID NO: 180299 - protein, 263 aa, Zea Mays
MAAMTAYKYQAQALMRDYLLADPLVPYTSVLIGIVLCKMAYDFTRILSSFYFKGYTLLTKIQRIEWNNSAHAIFITAVSLYLVMSTDLFSDRVKGPITFRYSIISTSALGVSVGYFITDLAMIFWLYPSLGGMEYVLHHTVSLVAIAYTMLSGEGQFYTYMVLISETTTPEINLRWFLDTAGLKKSSAYLVNGILMFVAWLVARIFLFMYVFYHIYLHYGQIMQMHAFGYYLTFVVPSVLFVMNTMWFMKILKGVMKTLAKWP

SEQ ID NO: 180300 - protein, 232 aa, Zea Mays
MACFLLQAYDFTRILSSFYFKGYTLLTKIQRIEWNNRGMSSAHAIFITAVSLYLVMSTDLFSDRVKGPITFRYSIISTSALGVSVGYFITDLAMIFWLYPSLGGMEYVLHHTVSLVAIAYTMLSGEGQFYTYMVLISETTTPEINLRWFLDTAGLKKSSAYLVNGILMFVAWLVARIFLFMYVFYHIYLHYGQMHAFGYYLTFVVPSVLFVMNTMWFMKILKGVMKTLAKWP

SEQ ID NO: 180301 - protein, 197 aa, Zea Mays
MSSAHAIFITAVSLYLVMSTDLFSDRVKGPITFRYSIISTSALGVSVGYFITDLAMIFWLYPSLGGMEYVLHHTVSLVAIAYTMLSGEGQFYTYMVLISETTTPEINLRWFLDTAGLKKSSAYLVNGILMFVAWLVARIFLFMYVFYHIYLHYGQIMQMHAFGYYLTFVVPSVLFVMNTMWFMKILKGVMKTLAKWP

SEQ ID NO: 180302 - protein, 253 aa, Zea Mays
MACFLLQAYDFTRILSSFYFKGYTLLTKIQRIEWNNSAHAIFITAVSLYLVMSTDLFSDRVKGPITFRYSIISTSALGVSVGYFITDLAMIFWLYPSLGGMEYVLHHTVSLVAIAYTMLSGEGQFYTYMVLISETTTPEINLRWFLDTAGLKKSSAYLVNGILMFVAWLVARIFLFMYVFYHIYLHYDACLWVLPDICCAISALCNEHNVVHEDLKRCDENTGKMAMTWMTPRGSQNYQQDFVFLASLRDLNL

SEQ ID NO: 180303 - protein, 199 aa, Zea Mays
MKERDAAFQEAHMWRVELGKAREQAVIQEATIARTEEKARVSEADAAARIKEAAEKLRTVEKEKEELLALVGVLQSQVQREQSSTKQVCGERSESCSGADSPPPLTKHVDASDDDVDKACVSDSRSVLVSSDSTEVQLAVDGVDIRPVGDAEWGGFQQSDALIADVREVSPEADGGSLDIPVVNPPPISDHVQGGATHP

SEQ ID NO: 180304 - protein, 246 aa, Zea Mays
MDEQRRLLCLEIERLKQALERQVEQSMLKLRQSEEKVISLSKEKEQLMKERDAAFQEAHMWRVELGKAREQAVIQEATIARTEEKARVSEADAAARIKEAAEKLRTVEKEKEELLALVGVLQSQVQREQSSTKQVCGERSESCSGADSPPPLTKHVDASDDDVDKACVSDSRSVLVSSDSTEVQLAVDGVDIRPVGDAEWGGFQQSDALIADVREVSPEADGGSLDIPVVNPPPISDHVQGGATHP

SEQ ID NO: 180305 - protein, 102 aa, Zea Mays
MPCHAMPRTISSRGDDAASPVPDAMMLSQSINWIGRCMCRSLDRDGSSPYERLCRLAAGDAGIPGSRAPTRCLTDCEGTGRRTAQASERAVDTWELLATAYG

SEQ ID NO: 180306 - protein, 94 aa, Zea Mays
MAEICCASVGAFEGACDVSGRGKLQHASACADACGAQCLYVSRLKEQAGADGTVRLPCDRTVVGQAEDGCPQDATAVFRERAVDTWELLATAYG

SEQ ID NO: 180307 - protein, 105 aa, Zea Mays
MNCPYFLVAMDSSAFGLYYACLRSCALVTLSCFCGGWMRGGHRIFRGCRKRGLLIILRDEIMNVVAEPHMVMVILVLPWFFHRRMRGCCIYHRGLSGPGTGARNL

SEQ ID NO: 180308 - protein, 77 aa, Zea Mays
MDTDKWCDAQVGHYIGIDASASGVNYARELWENRRKPFTAEFIELDPSDDGFEAQVQEKGIQADMVCCMQHLQIVML

SEQ ID NO: 180309 - protein, 150 aa, Zea Mays
MLRNRSRRAVGGGANQAQGRAGGLMAELPAAAAAQSPRHPSSSSSSSPAAAPVFPSPRPFVAMAALPQGRRAALLPDRVRRQEQGRAAGGAVARQEAPAGGRELAVRPGVRRRRRGRRAPRRDGHVGGLHLRHLARPQPEDHAHLRRLHR

SEQ ID NO: 180310 - protein, 332 aa, Zea Mays
MDPLSVLRDYAGRNELDKIIFSGDEIHFGSDYTFPASTPTAFASKQSGRPYPLSAAVFLAQHHDLKHTDFIQAARLRRIPPVSLPDRKTFLDFLRFGHNSLPSADPLLPSAFQPQEPHLHPPSPPPEDPAATEEATTGKQIRALERPFKDRNSILDARGRDFLAVFHAAVRRQDEQLKGGGKDAAPSSRPNSGSVAAALAKPKVLDRSLGDGVVPIILVPSASQTLITIYNVKEFLEDGVFVPSEERMRATKGGKPESVTVQKKLIRTERAGGAGGAVSFEVRDKPASLKSDDWGRVVAVFVLGKEWQFKDWPFKDHVEIFNRGRSSKHRFN

SEQ ID NO: 180311 - protein, 332 aa, Zea Mays
MDPLSVLRDYAGRNELDKIIFSGDEIHFGSDYTFPASTPTAFASKQSGRPYPLSAAVFLAQHHDLKHTDFIQAARLRRIPPVSLPDRKTFLDFLRFGHNSLPSADPLLPSAFQPQEPHLHPPSPPPEDPAATEEATTGKQIRALERPFKDRNSILDARGRDFLAVFHAAVRRQDEQLKGGGKDAAPSSRPNSGSVAAALAKPKVLDRSLGDGVVPIILVPSASQTLITIYNVKEFLEDGVFVPSEERMRATKGGKPESVTVQKKLIRTERAGGAGGAVSFEVRDKPASLKSDDWGRVVAVFVLGKEWQFKDWPFKDHVEIFNRGDDVWLSWL

SEQ ID NO: 180312 - protein, 125 aa, Zea Mays
MHAVQVVISPPSMNRARLPWTWSVSGKGYGFARCTTSRHFIPTSKKNIFMARLWLLLLHYYCYIRTPKRRKKTNRKVKPGRPSSKVVPGTQNTPFFLSPENRDSTFTFKTAQKKKKNCPFMVLNW

SEQ ID NO: 180313 - protein, 137 aa, Zea Mays
MAEIVSQSARILIMTEAMTVFLTVHFRINLQFWIVSEMQCLRKVSRPVIHGHIPPRVPRAASPRLHPVRSLFRSIELSLFIPSHYCIEISSLIIFSWVSGKEKTRFMLSILDLQRSTEIHQHTSTFHTEQSRRDDME

SEQ ID NO: 180314 - protein, 146 aa, Zea Mays
MRRPWRRPRTTPAWLLRSRSSTRRACMGLRNGRVAIFRDRESERKDPDYDRSYDRPVIHGHIPPRVPRAASPRLHPVRSLFRSIELSLFIPSHYCIEISSLIIFSWVSGKEKTRFMLSILDLQRSTEIHQHTSTFHTEQSRRDDME

SEQ ID NO: 180315 - protein, 74 aa, Zea Mays
MNSLRSSLIPTLISKHAYESFPNRVTGTTMTSGTTMTSKTSGSITTNLSTTGKLSSVGSSFMASAGSRSTSGGV

SEQ ID NO: 180316 - protein, 123 aa, Zea Mays
MLLLAVFLTVHFRINLQFWIVSEMQCLRKVSRPVIHGHIPPRVPRAASPRLHPVRSLFRSIELSLFIPSHYCIEISSLIIFSWVSGKEKTRFMLSILDLQRSTEIHQHTSTFHTEQSRRDDME

SEQ ID NO: 180317 - protein, 87 aa, Zea Mays
MRRPWRRPRTTPAWLLRSRSSTRRACMGLRNGRDRESERKDPDYDRSYDSLFNRALSNKSAILDRIRDAVFKKVSLFPEFYISTKCH

SEQ ID NO: 180318 - protein, 140 aa, Zea Mays
MRRPWRRPRTTPAWLLRSRSSTRRACMGLRNGRVAIFRDRESERKDPDYDRSYDRVSRPVIHGHIPPRVPRAASPRLHPINRVEFVHSKSLLHRDIKPDNFLMGLGKRENQVYVIDFGLAKKYRDTSTHQHIPYRTKPEG

SEQ ID NO: 180319 - protein, 144 aa, Zea Mays
MAGLQFSEIVSQSARILIMTEAMTGQLYMVIYHPACPAPPARASTPCDLCLGSSFHEAHFCSTICFHLTALYINVLYFSRSIELSLFIPSHYCIEISSLIIFSWVSGKEKTRFMLSILDLQRSTEIHQHTSTFHTEQSRRDDME

SEQ ID NO: 180320 - protein, 139 aa, Zea Mays
MRRPWRRPRTTPAWLLRSRSSTRRACMGLRNGRVAIFRDRESERKDPDYDRSYDSLFNRALSNKSAILDRIRDAVFKKINRVEFVHSKSLLHRDIKPDNFLMGLGKRENQVYVIDFGLAKKYRDTSTHQHIPYRTKPEG

SEQ ID NO: 180321 - protein, 691 aa, Zea Mays
MLVFLRRGLLLVRQPTTRVLAKPSLRPACLFVHHFAVDTMGEGSAAGKDAKGKGKGKTKAAAADSALVVRDDSYLEAVTQKRIRFFEEIQARQAVERLNIGGEVIKVTLPDGAIKEGKKWITTPMDIAKEISSGFAASCLIAQVDETLWDMGRPLEGDCKLQMFKFDTNEGRDTFWHSSAHILGESIERAYGCKLCIGPCTTRGEGFYYDAYYNDQTLNEEHFGIIENQAKKAVAEKQPFERIEVSRAEALEMFAENEFKVEIINELPEDKTITVYRCGPLVDLCRGPHIPNTSFVKAFACLKASSSYWRGKVDRESLQRVYGISFPDSRRLTEYKHFLEEAKKRDHRILGKAQELFFFHELSPGSCFFLPHGARIYNKLMDFMRQQYRDRGYQEVLSPNIYNMQLWETSGHAANYKENMFVFEIEKQEFGLKPMNCPGHCLMFANRVRSYRELPLRMADFGVLHRNELSGALTGLTRVRRFQQDDAHIFCREDQIKDEVKAVLEFINYVYEIFGFKYELELSTRPEKYLGEVETWNKAEQQLTEALNEFGKPWKINEGDGAFYGPKIDIGVFDALKRKFQCATLQLDFQLPIRFKLAYSAEDEAKIERPVMIHRAILGSVERMLAILLEHYNGKWPLWLSPRQAIVCSVSSGSVEYAKQVLATLHEAGFHVDIDASDRTIQKKKELHVAN

SEQ ID NO: 180322 - protein, 512 aa, Zea Mays
MLVFLRRGLLLVRQPTTRVLAKPSLRPACLFVHHFAVDTMGEGSAAGKDAKGKGKGKTKAAAADSALVVRDDSYLEAVTQKRIRFFEEIQARQAVERLNIGGEVIKVTLPDGAIKEGKKWITTPMDIAKEISSGFAASCLIAQVDETLWDMGRPLEGDCKLQMFKFDTNEGRDTFWHSSAHILGESIERAYGCKLCIGPCTTRGEGFYYDAYYNDQTLNEEHFGIIENQAKKAVAEKQPFERIEVSRAEALEMFAENEFKVEIINELPEDKTITVYRCGPLVDLCRGPHIPNTSFVKAFACLKASSSYWRGKVDRESLQRVYGISFPDSRRLTEYKHFLEEAKKRDHRILGKAQELFFFHELSPGSCFFLPHGARIYNKLMDFMRQQYRDRGYQEVLSPNIYNMQLWETSGHAANYKENMFVFEIEKQEFGLKPMNCPGHCLMFANRVRSYRELPLRMADFGVLHRNELSGALTGLTRVRRFQQDDAHIFCREDQVGFICVNHACLLSFRME

SEQ ID NO: 180323 - protein, 176 aa, Zea Mays
MQFFGGSSLTSVAPEATPAPAAPPGTGTGASAQVLYVFNRNGVCLLYREWHRPLRTLDPTQDHKLMFGLLFSLRSFTAKIDPTTAEKGNLGVPLLPGQGCSFYSFKTNTYKLNFTESPSGIKLILITHPRTGDQRDSLKHIYNLYVEYVVKNPLYAPGTPIKQWVGEAKKGPFHVL

SEQ ID NO: 180324 - protein, 51 aa, Zea Mays
MINPWVIASPFKGVHGQVVIISYLNRSPCQMTRLKHHVFRLRHCMICMVGC

SEQ ID NO: 180325 - protein, 545 aa, Zea Mays
MDPEQTFLRVHARLSGTLSQLLTPRIRLVLEYLYLAGAVALFCLLVVMHTNFVQQPGCSSEFSGIEFGEAQLVQIKIISGGLWSSRGASYIMDLQNLGRSAEKILEVNGDKFNILASKFWSTWVGPGARRSKLMFRTWKGDKEFEPQSENTADTTVTTTIPGLPDLKAAGEGSVHHPLSAKESFKAAVTFLFRKWYLRAVSFWKNIKQLSENTLQLMVRSNWNDFLHIIKDLQLPSMDHLISTIVQWFERRSKAFEPTYLYGVEKGYFLLSEGAKTRHGVRTINITISARNPCFGNRWQQLLINSIVGYDTILTNSLVNSPGHGYLYNFQTKELYDLSYGHEPPEGPTRFGDYFVTKCGVLLMSLFVFFTTTMSVSFTLRETQSRMLRFTVQLQHHARHHLPTFQLIFVHVIESLVFVPIMIGILFFLFEFYDDQLLAFLVLTLVWLCELFTMISVRTSISMQFFPRFFLLYFLVFHIYFFSYTYGFSYLAFSATAAFMQHLILYFWNRFELSRDSCEVEHTFTSKQVSTLHPQLSTLLPYTLLG

SEQ ID NO: 180326 - protein, 499 aa, Zea Mays
MDPEQTFLRVHARLSGTLSQLLTPRIRLVLEYLYLAGAVALFCLLVVMHTNFVQQPGCSSEFSGIEFGEAQLVQIKIISGGLWSSRGASYIMDLQNLGRSAEKILEVNGDKFNILASKFWSTWVGPGARRSLPDLKAAGEGSVHHPLSAKESFKAAVTFLFRKWYLRAVSFWKNIKQLSENTLQLMVRSNWNDFLHIIKDLQLPSMDHLISTIVQWFERRSKAFEPTYLYGVEKGYFLLSEGAKTRHGVRTINITISARNPCFGNRWQQLLINSIVGYDTILTNSLVNSPGHGYLYNFQTKELYDLSYGHEPPEGPTRFGDYFVTKCGVLLMSLFVFFTTTMSVSFTLRETQSRMLRFTVQLQHHARHHLPTFQLIFVHVIESLVFVPIMIGILFFLFEFYDDQLLAFLVLTLVWLCELFTMISVRTSISMQFFPRFFLLYFLVFHIYFFSYTYGFSYLAFSATAAFMQHLILYFWNRFEVPALQRFMRSRAHIHQQTG

SEQ ID NO: 180327 - protein, 367 aa, Zea Mays
MDPEQTFLRVHARLSGTLSQLLTPRIRLVLEYLYLAGAVALFCLLVVMHTNFVQQPGCSSEFSGIEFGEAQLVQIKIISGGLWSSRGASYIMDLQNLGRSAEKILEVNGDKFNILASKFWSTWVGPGARRSLPDLKAAGEGSVHHPLSAKESFKAAVTFLFRKWYLRAVSFWKNIKQLSENTLQLMVRSNWNDFLHIIKDLQLPSMDHLISTIVQWFERRSKAFEPTYLYGVEKGYFLLSEGAKTRHGVRTINITISARNPCFGNRWQQLLINSIVGYDTILTNSLVNSPGHGYLYNFQTKELYDLSYGHEPPEGPTRFGVCGHPYRCSSFHASSCCIFWFSISTSSHIPMASHIWLSLLRQHSCST

SEQ ID NO: 180328 - protein, 396 aa, Zea Mays
MDPEQTFLRVHARLSGTLSQLLTPRIRLVLEYLYLAGAVALFCLLVVMHTNFVQQPGCSSEFSGIEFGEAQLVQIKIISGGLWSSRGASYIMDLQNLGRSAEKILEVNGDKFNILASKFWSTWVGPGARRSLPDLKAAGEGSVHHPLSAKESFKAAVTFLFRKWYLRAVSFWKNIKQLSENTLQLMVRSNWNDFLHIIKDLQLPSMDHLISTIVQWFERRSKAFEPTYLYGVEKGYFLLSEGAKTRHGVRTINITISARNPCFGNRWQQLLINSIVGYDTILTNSLVNSPGHGYLYNFQTKELYDLSYGHEPPEGPTRFGDYFVTKCGVLLMSLFVFFTTTMSVSFTLRETQSRMLRFTASTPCTPPPANLSVDIRACHRIIGFCADYDWDSLFSI

SEQ ID NO: 180329 - protein, 330 aa, Zea Mays
MDPEQTFLRVHARLSGTLSQLLTPRIRLVLEYLYLAGAVALFCLLVVMHTNFVQQPGCSSEFSGIEFGEAQLVQIKIISGGLWSSRGASYIMDLQNLGRSAEKILEVNGDKFNILASKFWSTWVGPGARRSLPDLKAAGEGSVHHPLSAKESFKAAVTFLFRKWYLRAVSFWKNIKQLSENTLQLMVRSNWNDFLHIIKDLQLPSMDHLISTIVQWFERRSKAFEPTYLYGVEKGYFLLSEGAKTRHGVRTINITISARNPCFGNRWQQLLINSIVGYDTILTNSLVNSPGHGYLYNFQTKELYDLSYGHEPPEGPTRFGDYDWDSLFSI

SEQ ID NO: 180330 - protein, 588 aa, Zea Mays
MDPEQTFLRVHARLSGTLSQLLTPRIRLVLEYLYLAGAVALFCLLVVMHTNFVQQPGCSSEFSGIEFGEAQLVQIKIISGGLWSSRGASYIMDLQNLGRSAEKILEVNGDKFNILASKFWSTWVGPGARRSLPDLKAAGEGSVHHPLSAKESFKAAVTFLFRKWYLRAVSFWKNIKQLSENTLQLMVRSNWNDFLHIIKDLQLPSMDHLISTIVQWFERRSKAFEPTYLYGVEKGYFLLSEGAKTRHGYLYNFQTKELYDLSYGHEPPEGPTRFGDYFVTKCGVLLMSLFVFFTTTMSVSFTLRETQSRMLRFTVQLQHHARHHLPTFQLIFVHVIESLVFVPIMIGILFFLFEFYDDQLLAFLVLTLVWLCELFTMISVRTSISMQFFPRFFLLYFLVFHIYFFSYTYGFSYLAFSATAAFMQHLILYFWNRFEVPALQRFMRSRAHIHQQTGVHITSSTIYTSTLHIARVNVRDPGTINDGLGAAREADALLVQDESTRSQQEGQQNGISEPAANNALQYQEQNPQRAGSTPAGSGSLNPFGSLLLWLLGGGASDGIVSFFSMFRDVRDHGQDYTDPPRNGNDQVT

SEQ ID NO: 180331 - protein, 192 aa, Zea Mays
MPLGDGAEAADFVLPDELLAALPRDPYEQLDLARRITALAVSGRVSGLEREAGRLRAEAAGKDRENAELRERVVLLDTALQETNARLRAALEDNIKLSKERDSLAQTSKKLARDLQKLESFKRHLMQSLRDDSSSPQETVDITTCDQPVATKASFSGDGGSGSHPTTNIFSESLDAGSTNRDGKYLPQQHRS

SEQ ID NO: 180332 - protein, 615 aa, Zea Mays
MGVVYYQYKSEKEICSMPVPHAFISVSELKQLIMTSGRHGRGRTRGRATEDIVISNAQTGEEYADERASIPQNTTVLVRRISIPGQLSEKIVLSPRPEVTEECSVPCKSVVTDSSSKSCSSTVVQDEDAVIAAVIDAAELKWEQLPSKRGQDSGRFTSRRNYGPLEGETPPPGYVCRSCGVPGHFIQHCSQENKMPPPGYICYRCRIPGHFIHHCPSIGDPKFDNNKMSRSLVPVVTPVDGILDSLVPSAPAGAVDDLPAELHCRLCKKVMRDAVLTSKCCFDSFCDRCIRDYIIKESKCICGVETLADDLIPNQTLRSTISNMLGTQTSSGGSGTTRHRSSSGSNPNPKIQSHTASVASAREVKQSIDHQLPAVSAPDYVLQVATEGDLVNQPLEKLAATAEILSKYEGNSAEVSVEKAVANAEALKVKDGSETTSNATTVSGSREHDVTRTDQAKKKRKKADLTKNVQPNNVGYGYNVSFDPAYYNPFINGHPWATEPYMYSSMGMPYAGYPMDPYCANPMDPYCEYPMDPYCVNPMQGYPASYQRPETEPMRRGSTAAARAPLKHRERSDRHRPKDTRLQPQSTEHKRRLVSSHGTRSNSDRRDHGHSYGAS

SEQ ID NO: 180333 - protein, 99 aa, Zea Mays
MGVVYYQYKSEKEICSMPVPHAFISVSELKQLIMTSGRHGRGRTRGRATEDIVISNAQTGEEYADERASIPQNTTVLVRRISIPGQLSEKIVLSPRAEK

SEQ ID NO: 180334 - protein, 466 aa, Zea Mays
MSMHYLAALSAVALGAILLLRSAFKWMNGARTGKDEGRMLPPGSRGLPLLGETLEFFAASPTLELVPFFKRRLERFGPIFRTNIVGEDLIVSLDPELNARVLQQEERGFQIWYPSSFMRVFGDDNIISALGPLHRHIRNLVLRLFGPEALRLVLLRDVQRSARDELRSWLDHPDVEVRTATSRMIFAVTAKKLISHDDAASGGSLWKCFDAWTKGLLSFPLCVPGTAFYKCMQGRKNVMKILKQQLDERRNTAERRTVDFFDLVIDELNKPDPIMNENIALDLLFLLLFASHETTSMGLTAILKFLTDNPKALQELTEEHEKIVETRVDPDSDITWEEYKSMRFTSHVIHESLRLANIAPVVFRQANQDVYIKAHLNSKVYEDPTAFNPWRWKDTPEPVGGSKDFMAFGGGLRLCVGADFAKLQMAMFIHCLVTKYSWKPISKGTMVFYPGLRFPEGFHIQLLAKA

SEQ ID NO: 180335 - protein, 148 aa, Zea Mays
MAPSSPLLCHRGVLELFDVLGWDLRVPACQSTRLDARMDHIVGGKFKLRKKIRSESFGEIYLAVNVQNGEEVAVKLESVTSRHPQLHYESKLYMLLQGGTGIPHLKWFGVEGQYNVMVTLVDRIIALLALFYQGNLRLPDEDLWLPHA

SEQ ID NO: 180336 - protein, 376 aa, Zea Mays
MHGRKKNHEEQSCRGGGASSPRCRRSDLYGEVAGVRGRVLRRGHGEALEVAAALHLVLHLEVHVEGVGRVAGGVQAVARGAVAERGAVGEGAGVGDAVADLARVLRVGVDDAPLAGQVLDPPRRHERRVPALPRQVHGVLGLAVVAHDAPVALEVARRHALGVLVDEAEQVDLDVLARAQRRAGAGRQLPQQARVELLRERGRGVLVAVGRPPDLADHDGEAADARRGQRGHERVEVGVEHVGVLDAVVHDGAARAVEEGVVQREVVVVVEAQERVDVDGEGRAALVQELHDLRHEAGDVGPEPPRRRHQVVLGRVVHVGVQRHRRLDGVAEAGVVQRALDVLQGGQRDVQERAVERRQEGLIPDSYVPARKRLYD

SEQ ID NO: 180337 - protein, 191 aa, Zea Mays
MDPKLLRHGNLRSIVLPPVPRLARASAAATASPRKIFLYERMEVSAGLRLPPVAAAASLLGCRSASVPPRAAASHSVRSVSRAVKIRAAAINGLQRNRSNLESLFCYDKSVPEQDIGEPSGLNLEKKNVGDKPPCSSCEAKGALLCATCAGSGLYVDSILESQGIIVKVRCLGCGGTGNIMCSKCGGRGHT

SEQ ID NO: 180338 - protein, 101 aa, Zea Mays
MDPKLLRHGNLRSIVLPPVPRLARASAAATASPRKIFLYERMEVSAGLRLPPVAAAASLLGCRSASVPPRAAASHSVRSVSRAVKVGLLSLSPLVAPPREV

SEQ ID NO: 180339 - protein, 110 aa, Zea Mays
MLSERERDQRRILGSWRRQLGPGTLNTGYKHVYNYALRDSIGEEVVKDQHLTSHWERLVQGEKITHVLHRRQSALRRHPCLRHRQCLPHRRQCHPRNRRLRPWRLQNHQS

SEQ ID NO: 180340 - protein, 68 aa, Zea Mays
MMCHLQNWSLVRGNTFKAADFKALSCSMVREVGCCPDIAKRNVSNNQTNDVSLLCAMMAQPNRTGWQW

SEQ ID NO: 180341 - protein, 88 aa, Zea Mays
MNVAEDGVDRGDLVGLLGGLLGVAAFVLHPPCLDHLHLPLDHCRHLEVAHLIDLLLHQLEPHPHFELVGMLAWRRMVDLVHLEAIRIL

SEQ ID NO: 180342 - protein, 135 aa, Zea Mays
MAATFTVAARLPLRGPARAPSRPAVAAVTRLRSRQERRGLAATGGRGPARVRAETFSGGGGVGRRDPMAPPYNVLITGSTKGIGYALARKFLEAGDNVIICSRSAQKVESVVGDLKEEYGEQHVELSVMLEMERM

SEQ ID NO: 180343 - protein, 226 aa, Zea Mays
MAATFTVAARLPLRGPARAPSRPAVAAVTRLRSRQERRGLAATGGRGPARVRAETFSGGGGVGRRDPMAPPYNVLITGSTKGIGYALARKFLEAGDNVIICSRSAQKVESVVGDLKEEYGEQHVWGTVCDVRNGKDVKALVEFARDKLKHIDIWINNAGSNAYTYKPLVETSDEALMEIITTNTLGLMICCREAINMMRNQPRGGHIFNLDGAGSDGRPTPRLNCR

SEQ ID NO: 180344 - protein, 177 aa, Zea Mays
MAATFTVAARLPLRGPARAPSRPAVAAVTRLRSRQERRGLAATGGRGPARVRAETFSGGGGVGRRDPMAPPYNVLITGSTKGIGYALARKFLEAGDNVIICSRSAQKVESVVGDLKEEYGEQHVWGTVCDVRNGKDVKALVEFARDKLKHIDIWINNAGSNAYTYKPLVETSDEALM

SEQ ID NO: 180345 - protein, 59 aa, Zea Mays
MNEVNNVMVHNLSPGMVTTDLLMSGATTKQAKIFINILAEPPDVTTLFQTSEKSLPSNP

SEQ ID NO: 180346 - protein, 630 aa, Zea Mays
MALEAGSSGGGGRGWGGRFRSLMRRKQVDSDRVRAEGQPQLAKELNVPELVAIVGAGVYVLVGTVAREHAGPALTISFLIAGIAAALSAFCYAELASRCPSAGSAYHYSYICVGEGVAWLIGWALVLEYTIGGSAVARGISPNLALFFGGQDSVPWILARHQLPWFDIIVDPCAAALVFVVTVLLCVGIKESSFAQGVVTVLNACVMIFVIVAGSYIGFQIGWVGYKVSDGYFPHGVNGMLAGSATVFFAYIGFDTVASTAEEVKNPQRDLPLGIGVALAICCALYMAVSVVIVGLVPYFAMDPDTPISSAFARHGMQWAMYVVTSGAVLALCSTLMGSLLPQPRILMAMARDGLLPSFFSDVNKQTQVPVKSTIVTGICAAALAFAMDVSQLAGMVSVGTLLAFTIVAVSILILRYVPPDEVPLPPSMQESFCLNQECDEERDRGLLGVGNCNLSQTKDVIVVVESVKDPLIDKRLHKGKMDETKRRKIASLSIGSVCVGVLILASSASATWLPFLPICIGCTIGVVLLLAGLSLLSWIDQDAGRHSFGHSGGFTCPFVPVLPVLCILINTYLLINLSGDTWMRVGIWLLLGVLVYAFYGRTHSSLIDVVYVPAAQADEIYRSSSGYVS

SEQ ID NO: 180347 - protein, 424 aa, Zea Mays
MIFVIVAGSYIGFQIGWVGYKVSDGYFPHGVNGMLAGSATVFFAYIGFDTVASTAEEVKNPQRDLPLGIGVALAICCALYMAVSVVIVGLVPYFAMDPDTPISSAFARHGMQWAMYVVTSGAVLALCSTLMGSLLPQPRILMAMARDGLLPSFFSDVNKQTQVPVKSTIVTGICAAALAFAMDVSQLAGMVSVGTLLAFTIVAVSILILRYVPPDEVPLPPSMQESFCLNQECDEERDRGLLGVGNCNLSQTKDVIVVVESVKDPLIDKRLHKGKMDETKRRKIASLSIGSVCVGVLILASSASATWLPFLPICIGCTIGVVLLLAGLSLLSWIDQDAGRHSFGHSGGFTCPFVPVLPVLCILINTYLLINLSGDTWMRVGIWLLLGVLVYAFYGRTHSSLIDVVYVPAAQADEIYRSSSGYVS

SEQ ID NO: 180348 - protein, 554 aa, Zea Mays
MGWQVPKPDAAEAGGLRSGPRRGPAAARQGAQRAGAGRDRVAWLIGWALVLEYTIGGSAVARGISPNLALFFGGQDSVPWILARHQLPWFDIIVDPCAAALVFVVTVLLCVGIKESSFAQGVVTVLNACVMIFVIVAGSYIGFQIGWVGYKVSDGYFPHGVNGMLAGSATVFFAYIGFDTVASTAEEVKNPQRDLPLGIGVALAICCALYMAVSVVIVGLVPYFAMDPDTPISSAFARHGMQWAMYVVTSGAVLALCSTLMGSLLPQPRILMAMARDGLLPSFFSDVNKQTQVPVKSTIVTGICAAALAFAMDVSQLAGMVSVGTLLAFTIVAVSILILRYVPPDEVPLPPSMQESFCLNQECDEERDRGLLGVGNCNLSQTKDVIVVVESVKDPLIDKRLHKGKMDETKRRKIASLSIGSVCVGVLILASSASATWLPFLPICIGCTIGVVLLLAGLSLLSWIDQDAGRHSFGHSGGFTCPFVPVLPVLCILINTYLLINLSGDTWMRVGIWLLLGVLVYAFYGRTHSSLIDVVYVPAAQADEIYRSSSGYVS

SEQ ID NO: 180349 - protein, 811 aa, Zea Mays
MGASRKLQGEIDRVLKKVYDTENANQKEKFEADLKKEIKKLQRYRDQIKTWIQSSEIKDKKALMDARKQIEREMERFKVCEKETKTKAFSKEGLGQQPKTDPKEKAKAETRDWLNNVVSDLESQIDNFEAEIEGLSIKKGKQRPPRLVHLETSITRHKAHIKKLESILRLLDNDELSPEQVNDVKDFLDDYVERNQEDFDEFSDVEDLYSTLPMEKVEALEDMVSLAPSSLVKGVAPVSTTAVLSTKSSVATSPTQPTVSTASSQSTSQDQTEETASQESNPEPTPQTPPPKGGNPGPSVPAVPIVVSTGSAAVSVPAETISSPVRLTVPATAATVLSSAIPRSAPENTLAVTSIPANLSTTLKDDESMSVPPRRPSPATEIGIGRGITRGTTSQALGTAPITIGPVSGNGSLVMPLGSKVQPQQVPRTNDAIGSDSANTNENPILGGRVFSPPVVSGVQWRPQAAAAFQNQIETNQYRGRPEISADHREKYIQRLQQVQQQGGSLLNVSHITGINQKQFPTPQPNPLLQQFNSQSSSISSQVNLGLGVQGSDAGHIKSEDQQILAEDVGVESSATTGANKQTSEDDTKIPYSNPSAPAAENTQLPRDTDLSPGQPLQPGMPSSGVGVIGRRSVSDLGTIGDNLTGTSGSSGHDQNYYLQMLEAAFHKLPQPKDSERAKTYIPRHPAVTPASYPQVQASIVSNPTFWERIGSDTLATDMLFFAFYYQQNTYQQYLAARELKKQSWRFHRRYNTWFQRHVEPQVTTDEYERGSYVYFDFHVTEDGSGWCQRIKNDFTFEYNYLEDELSVQTN

SEQ ID NO: 180350 - protein, 807 aa, Zea Mays
MGASRKLQGEIDRVLKKVYDTENANQKEKFEADLKKEIKKLQRYRDQIKTWIQSSEIKDKKALMDARKQIEREMERFKVCEKETKTKAFSKEGLGQQPKTDPKEKAKAETRDWLNNVVSDLESQIDNFEAEIEGLSIKKGKQRPPRLVHLETSITRHKAHIKKLESILRLLDNDELSPEQVNDVKDFLDDYVERNQEDFDEFSDVEDLYSTLPMEKVEALEDMVSLAPSSLVKGVAPVSTTAVLSTKSSVATSPTQPTVSTASSQSTSQDQTEETASQESNPEPTPQTPPPKGGNPGPSVPAVPIVVSTGSAAVSVPAETISSPVRLTVPATAATVLSSAIPRSAPENTLAVTSIPANLSTTLKDDESMSVPPRRPSPATEIGIGRGITRGTTSQALGTAPITIGPVSGNGSLVMPLGSKVQPQQVPRTNDAIGSDSANTNENPILGGRVFSPPVVSGVQWRPQAAAAFQNQIETNQYRGRPEISADHREKYIQRLQQVQQQGGSLLNVSHITGINQKQFPTPQPNPLLQQSSSISSQVNLGLGVQGSDAGHIKSEDQQILAEDVGVESSATTGANKQTSEDDTKIPYSNPSAPAAENTQLPRDTDLSPGQPLQPGMPSSGVGVIGRRSVSDLGTIGDNLTGTSGSSGHDQNYYLQMLEAAFHKLPQPKDSERAKTYIPRHPAVTPASYPQVQASIVSNPTFWERIGSDTLATDMLFFAFYYQQNTYQQYLAARELKKQSWRFHRRYNTWFQRHVEPQVTTDEYERGSYVYFDFHVTEDGSGWCQRIKNDFTFEYNYLEDELSVQTN

SEQ ID NO: 180351 - protein, 537 aa, Zea Mays
MGASRKLQGEIDRVLKKVYDTENANQKEKFEADLKKEIKKLQRYRDQIKTWIQSSEIKDKKALMDARKQIEREMERFKVCEKETKTKAFSKEGLGQQPKTDPKEKAKAETRDWLNNVVSDLESQIDNFEAEIEGLSIKKGKQRPPRLVHLETSITRHKAHIKKLESILRLLDNDELSPEQVNDVKDFLDDYVERNQEDFDEFSDVEDLYSTLPMEKVEALEDMVSLAPSSLVKGVAPVSTTAVLSTKSSVATSPTQPTVSTASSQSTSQDQTEETASQESNPEPTPQTPPPKGGNPGPSVPAVPIVVSTGSAAVSVPAETISSPVRLTVPATAATVLSSAIPRSAPENTLAVTSIPANLSTTLKDDESMSVPPRRPSPATEIGIGRGITRGTTSQALGTAPITIGPVSGNGSLVMPLGSKVQPQQVPRTNDAIGSDSANTNENPILGGRVFSPPVVSGVQWRPQAAAAFQNQIETNQYRGRPEISADHREKYIQRLQQVQQQGGSLLNVSHITGINQKQFPTPQPNPLLQQFKSSIS

SEQ ID NO: 180352 - protein, 532 aa, Zea Mays
MGASRKLQGEIDRVLKKVYDTENANQKEKFEADLKKEIKKLQRYRDQIKTWIQSSEIKDKKALMDARKQIEREMERFKVCEKETKTKAFSKEGLGQQPKTDPKEKAKAETRDWLNNVVSDLESQIDNFEAEIEGLSIKKGKQRPPRLVHLETSITRHKAHIKKLESILRLLDNDELSPEQVNDVKDFLDDYVERNQEDFDEFSDVEDLYSTLPMEKVEALEDMVSLAPSSLVKGVAPVSTTAVLSTKSSVATSPTQPTVSTASSQSTSQDQTEETASQESNPEPTPQTPPPKGGNPGPSVPAVPIVVSTGSAAVSVPAETISSPVRLTVPATAATVLSSAIPRSAPENTLAVTSIPANLSTTLKDDESMSVPPRRPSPATEIGIGRGITRGTTSQALGTAPITIGPVSGNGSLVMPLGSKVQPQQVPRTNDAIGSDSANTNENPILGGRVFSPPVVSGVQWRPQAAAAFQNQIETNQYRGRPEISADHREKYIQRLQQVQQQGGSLLNVSHITGINQKQFPTPQPNPLLQQL

SEQ ID NO: 180353 - protein, 825 aa, Zea Mays
MGASRKLQGEIDRVLKKVQEGVDVFDSIWNKVYDTENANQKEKFEADLKKEIKKLQRYRDQIKTWIQSSEIKDKKALMDARKQIEREMERFKVCEKETKTKAFSKEGLGQQPKTDPKEKAKAETRDWLNNVVSDLESQIDNFEAEIEGLSIKKGKQRPPRLVHLETSITRHKAHIKKLESILRLLDNDELSPEQVNDVKDFLDDYVERNQEDFDEFSDVEDLYSTLPMEKVEALEDMVSLAPSSLVKGVAPVSTTAVLSTKSSVATSPTQPTVSTASSQSTSQDQTEETASQESNPEPTPQTPPPKGGNPGPSVPAVPIVVSTGSAAVSVPAETISSPVRLTVPATAATVLSSAIPRSAPENTLAVTSIPANLSTTLKDDESMSVPPRRPSPATEIGIGRGITRGTTSQALGTAPITIGPVSGNGSLVMPLGSKVQPQQVPRTNDAIGSDSANTNENPILGGRVFSPPVVSGVQWRPQAAAAFQNQIETNQYRGRPEISADHREKYIQRLQQVQQQGGSLLNVSHITGINQKQFPTPQPNPLLQQFNSQSSSISSQVNLGLGVQGSDAGHIKSEDQQILAEDVGVESSATTGANKQTSEDDTKIPYSNPSAPAAENTQLPRDTDLSPGQPLQPGMPSSGVGVIGRRSVSDLGTIGDNLTGTSGSSGHDQNYYLQMLEAAFHKLPQPKDSERAKTYIPRHPAVTPASYPQVQASIVSNPTFWERIGSDTLATDMLFFAFYYQQNTYQQYLAARELKKQSWRFHRRYNTWFQRHVEPQVTTDEYERGSYVYFDFHVTEDGSGWCQRIKNDFTFEYNYLEDELSVQTN

SEQ ID NO: 180354 - protein, 832 aa, Zea Mays
MGASRKLQGEIDRVLKKVQEGVDVFDSIWNKVYDTENANQKEKFEADLKKEIKKLQRYRDQIKTWIQSSEIKDKKVSASYEQALMDARKQIEREMERFKVCEKETKTKAFSKEGLGQQPKTDPKEKAKAETRDWLNNVVSDLESQIDNFEAEIEGLSIKKGKQRPPRLVHLETSITRHKAHIKKLESILRLLDNDELSPEQVNDVKDFLDDYVERNQEDFDEFSDVEDLYSTLPMEKVEALEDMVSLAPSSLVKGVAPVSTTAVLSTKSSVATSPTQPTVSTASSQSTSQDQTEETASQESNPEPTPQTPPPKGGNPGPSVPAVPIVVSTGSAAVSVPAETISSPVRLTVPATAATVLSSAIPRSAPENTLAVTSIPANLSTTLKDDESMSVPPRRPSPATEIGIGRGITRGTTSQALGTAPITIGPVSGNGSLVMPLGSKVQPQQVPRTNDAIGSDSANTNENPILGGRVFSPPVVSGVQWRPQAAAAFQNQIETNQYRGRPEISADHREKYIQRLQQVQQQGGSLLNVSHITGINQKQFPTPQPNPLLQQFNSQSSSISSQVNLGLGVQGSDAGHIKSEDQQILAEDVGVESSATTGANKQTSEDDTKIPYSNPSAPAAENTQLPRDTDLSPGQPLQPGMPSSGVGVIGRRSVSDLGTIGDNLTGTSGSSGHDQNYYLQMLEAAFHKLPQPKDSERAKTYIPRHPAVTPASYPQVQASIVSNPTFWERIGSDTLATDMLFFAFYYQQNTYQQYLAARELKKQSWRFHRRYNTWFQRHVEPQVTTDEYERGSYVYFDFHVTEDGSGWCQRIKNDFTFEYNYLEDELSVQTN

SEQ ID NO: 180355 - protein, 833 aa, Zea Mays
MGASRKLQGEIDRVLKKVQEGVDVFDSIWNKVYDTENANQKEKFEADLKKEIKKLQRYRDQIKTWIQSSEIKDKKVSASYEQALMDARKQIEREMERFKVCEKETKTKAFSKEGLGQQPKTDPKEKAKAETRDWLNNVVSDLESQIDNFEAEIEGLSIKKGKQRPPRLVHLETSITRHKAHIKKLESILRLLDNDELSPEQVNDVKDFLDDYVERNQEDFDEFSDVEDLYSTLPMEKVEALEDMVSLAPSSLVKGVAPVSTTAVLSTKSSVATSPTQPTVSTASSQSTSQDQTEETASQESNPEPTPQTPPPKGGNPGPSVPAVPIVVSTGSAAVSVPAETISSPVRLTVPATAATVLSSAIPRSAPENTLAVTSIPANLSTTLKDDESMSVPPRRPSPATEIGIGRGITRGTTSQALGTAPITIGPVSGNGSQLVMPLGSKVQPQQVPRTNDAIGSDSANTNENPILGGRVFSPPVVSGVQWRPQAAAAFQNQIETNQYRGRPEISADHREKYIQRLQQVQQQGGSLLNVSHITGINQKQFPTPQPNPLLQQFNSQSSSISSQVNLGLGVQGSDAGHIKSEDQQILAEDVGVESSATTGANKQTSEDDTKIPYSNPSAPAAENTQLPRDTDLSPGQPLQPGMPSSGVGVIGRRSVSDLGTIGDNLTGTSGSSGHDQNYYLQMLEAAFHKLPQPKDSERAKTYIPRHPAVTPASYPQVQASIVSNPTFWERIGSDTLATDMLFFAFYYQQNTYQQYLAARELKKQSWRFHRRYNTWFQRHVEPQVTTDEYERGSYVYFDFHVTEDGSGWCQRIKNDFTFEYNYLEDELSVQTN

SEQ ID NO: 180356 - protein, 821 aa, Zea Mays
MGASRKLQGEIDRVLKKVQEGVDVFDSIWNKVYDTENANQKEKFEADLKKEIKKLQRYRDQIKTWIQSSEIKDKKALMDARKQIEREMERFKVCEKETKTKAFSKEGLGQQPKTDPKEKAKAETRDWLNNVVSDLESQIDNFEAEIEGLSIKKGKQRPPRLVHLETSITRHKAHIKKLESILRLLDNDELSPEQVNDVKDFLDDYVERNQEDFDEFSDVEDLYSTLPMEKVEALEDMVSLAPSSLVKGVAPVSTTAVLSTKSSVATSPTQPTVSTASSQSTSQDQTEETASQESNPEPTPQTPPPKGGNPGPSVPAVPIVVSTGSAAVSVPAETISSPVRLTVPATAATVLSSAIPRSAPENTLAVTSIPANLSTTLKDDESMSVPPRRPSPATEIGIGRGITRGTTSQALGTAPITIGPVSGNGSLVMPLGSKVQPQQVPRTNDAIGSDSANTNENPILGGRVFSPPVVSGVQWRPQAAAAFQNQIETNQYRGRPEISADHREKYIQRLQQVQQQGGSLLNVSHITGINQKQFPTPQPNPLLQQSSSISSQVNLGLGVQGSDAGHIKSEDQQILAEDVGVESSATTGANKQTSEDDTKIPYSNPSAPAAENTQLPRDTDLSPGQPLQPGMPSSGVGVIGRRSVSDLGTIGDNLTGTSGSSGHDQNYYLQMLEAAFHKLPQPKDSERAKTYIPRHPAVTPASYPQVQASIVSNPTFWERIGSDTLATDMLFFAFYYQQNTYQQYLAARELKKQSWRFHRRYNTWFQRHVEPQVTTDEYERGSYVYFDFHVTEDGSGWCQRIKNDFTFEYNYLEDELSVQTN

SEQ ID NO: 180357 - protein, 814 aa, Zea Mays
MGASRKLQGEIDRVLKKVYDTENANQKEKFEADLKKEIKKLQRYRDQIKTWIQSSEIKDKKALMDARKQIEREMERFKVCEKETKTKAFSKEGLGQQPKTDPKEKAKAETRDWLNNVVSDLESQIDNFEAEIEGLSIKKGKQRPPRLVHLETSITRHKAHIKKLESILRLLDNDELSPEQVNDVKDFLDDYVERNQEDFDEFSDVEDLYSTLPMEKVEALEDMVSLAPSSLVKPTVSTASSQSTSQDQTEETASQESNPEPTPQTPPPKGGNPGPSVPAVPIVVSTGSAAVSVPAETISSPVRLTVPATAATVLSSAIPRSAPENTLAVTSIPANLSTTLKDDESMSVPPRRPSPATEIGIGRGITRGTTSQALGTAPITIGPVSGNGSVSALPAINDLSKINILNTDEKINSDGLSQQLVMPLGSKVQPQQVPRTNDAIGSDSANTNENPILGGRVFSPPVVSGVQWRPQAAAAFQNQIETNQYRGRPEISADHREKYIQRLQQVQQQGGSLLNVSHITGINQKQFPTPQPNPLLQQSSSISSQVNLGLGVQGSDAGHIKSEDQQILAEDVGVESSATTGANKQTSEDDTKIPYSNPSAPAAENTQLPRDTDLSPGQPLQPGMPSSGVGVIGRRSVSDLGTIGDNLTGTSGSSGHDQNYYLQMLEAAFHKLPQPKDSERAKTYIPRHPAVTPASYPQVQASIVSNPTFWERIGSDTLATDMLFFAFYYQQNTYQQYLAARELKKQSWRFHRRYNTWFQRHVEPQVTTDEYERGSYVYFDFHVTEDGSGWCQRIKNDFTFEYNYLEDELSVQTN

SEQ ID NO: 180358 - protein, 552 aa, Zea Mays
MGASRKLQGEIDRVLKKVQEGVDVFDSIWNKVYDTENANQKEKFEADLKKEIKKLQRYRDQIKTWIQSSEIKDKKALMDARKQIEREMERFKVCEKETKTKAFSKEGLGQQPKTDPKEKAKAETRDWLNNVVSDLESQIDNFEAEIEGLSIKKGKQRPPRLVHLETSITRHKAHIKKLESILRLLDNDELSPEQVNDVKDFLDDYVERNQEDFDEFSDVEDLYSTLPMEKVEALEDMVSLAPSSLVKGVAPVSTTAVLSTKSSVATSPTQPTVSTASSQSTSQDQTEETASQESNPEPTPQTPPPKGGNPGPSVPAVPIVVSTGSAAVSVPAETISSPVRLTVPATAATVLSSAIPRSAPENTLAVTSIPANLSTTLKDDESMSVPPRRPSPATEIGIGRGITRGTTSQALGTAPITIGPVSGNGSQLVMPLGSKVQPQQVPRTNDAIGSDSANTNENPILGGRVFSPPVVSGVQWRPQAAAAFQNQIETNQYRGRPEISADHREKYIQRLQQVQQQGGSLLNVSHITGINQKQFPTPQPNPLLQQFKSSIS

SEQ ID NO: 180359 - protein, 547 aa, Zea Mays
MGASRKLQGEIDRVLKKVQEGVDVFDSIWNKVYDTENANQKEKFEADLKKEIKKLQRYRDQIKTWIQSSEIKDKKALMDARKQIEREMERFKVCEKETKTKAFSKEGLGQQPKTDPKEKAKAETRDWLNNVVSDLESQIDNFEAEIEGLSIKKGKQRPPRLVHLETSITRHKAHIKKLESILRLLDNDELSPEQVNDVKDFLDDYVERNQEDFDEFSDVEDLYSTLPMEKVEALEDMVSLAPSSLVKGVAPVSTTAVLSTKSSVATSPTQPTVSTASSQSTSQDQTEETASQESNPEPTPQTPPPKGGNPGPSVPAVPIVVSTGSAAVSVPAETISSPVRLTVPATAATVLSSAIPRSAPENTLAVTSIPANLSTTLKDDESMSVPPRRPSPATEIGIGRGITRGTTSQALGTAPITIGPVSGNGSQLVMPLGSKVQPQQVPRTNDAIGSDSANTNENPILGGRVFSPPVVSGVQWRPQAAAAFQNQIETNQYRGRPEISADHREKYIQRLQQVQQQGGSLLNVSHITGINQKQFPTPQPNPLLQQL

SEQ ID NO: 180360 - protein, 570 aa, Zea Mays
MGASRKLQGEIDRVLKKVQEGVDVFDSIWNKVYDTENANQKEKFEADLKKEIKKLQRYRDQIKTWIQSSEIKDKKALMDARKQIEREMERFKVCEKETKTKAFSKEGLGQQPKTDPKEKAKAETRDWLNNVVSDLESQIDNFEAEIEGLSIKKGKQRPPRLVHLETSITRHKAHIKKLESILRLLDNDELSPEQVNDVKDFLDDYVERNQEDFDEFSDVEDLYSTLPMEKVEALEDMVSLAPSSLVKGVAPVSTTAVLSTKSSVATSPTQPTVSTASSQSTSQDQTEETASQESNPEPTPQTPPPKGGNPGPSVPAVPIVVSTGSAAVSVPAETISSPVRLTVPATAATVLSSAIPRSAPENTLAVTSIPANLSTTLKDDESMSVPPRRPSPATEIGIGRGITRGTTSQALGTAPITIGPVSGNGSLVMPLGSKVQPQQVPRTNDAIGSDSANTNENPILGGRVFSPPVVSGVQWRPQAAAAFQNQIETNQYRGRPEISADHREKYIQRLQQVQQQGGSLLNVSHITGINQKQFPTPQPNPLLQQTEFLYIFPSESWAWSSRIRRGAYKK

SEQ ID NO: 180361 - protein, 417 aa, Zea Mays
MGASRKLQGEIDRVLKKVQEGVDVFDSIWNKVYDTENANQKEKFEADLKKEIKKLQRYRDQIKTWIQSSEIKDKKALMDARKQIEREMERFKVCEKETKTKAFSKEGLGQQPKTDPKEKAKAETRDWLNNVVSDLESQIDNFEAEIEGLSIKKGKQRPPRLVHLETSITRHKAHIKKLESILRLLDNDELSPEQVNDVKDFLDDYVERNQEDFDEFSDVEDLYSTLPMEKVEALEDMVSLAPSSLVKGVAPVSTTAVLSTKSSVATSPTQPTVSTASSQSTSQDQTEETASQESNPEPTPQTPPPKGGNPGPSVPAVPIVVSTGSAAVSVPAETISSPVRLTVPATAATVLSSAIPRSAPENTLAVTSIPANLSTTLKDDESMSVPPRRPSPATEIGIGRGITRGTTSQALVGYASW

SEQ ID NO: 180362 - protein, 856 aa, Zea Mays
MGASRKLQGEIDRVLKKVQEGVDVFDSIWNKVYDTENANQKEKFEADLKKEIKKLQRYRDQIKTWIQSSEIKDKKQALMDARKQIEREMERFKVCEKETKTKAFSKEGLGQQPKTDPKEKAKAETRDWLNNVVSDLESQIDNFEAEIEGLSIKKGKQRPPRLVHLETSITRHKAHIKKLESILRLLDNDELSPEQVNDVKDFLDDYVERNQEDFDEFSDVEDLYSTLPMEKVEALEDMVSLAPSSLVKGVAPVSTTAVLSTKSSVATSPTQPTVSTASSQSTSQDQTEETASQESNPEPTPQTPPPKGGNPGPSVPAVPIVVSTGSAAVSVPAETISSPVRLTVPATAATVLSSAIPRSAPENTLAVTSIPANLSTTLKDDESMSVPPRRPSPATEIGIGRGITRGTTSQALGTAPITIGPVSGNGSVSALPAINDLSKINILNTDEKINSDGLSQQLVMPLGSKVQPQQVPRTNDAIGSDSANTNENPILGGRVFSPPVVSGVQWRPQAAAAFQNQIETNQYRGRPEISADHREKYIQRLQQVQQQGGSLLNVSHITGINQKQFPTPQPNPLLQQFNSQSSSISSQVNLGLGVQGSDAGHIKSEDQQILAEDVGVESSATTGANKQTSEDDTKIPYSNPSAPAAENTQLPRDTDLSPGQPLQPGMPSSGVGVIGRRSVSDLGTIGDNLTGTSGSSGHDQNYYLQMLEAAFHKLPQPKDSERAKTYIPRHPAVTPASYPQVQASIVSNPTFWERIGSDTLATDMLFFAFYYQQNTYQQYLAARELKKQSWRFHRRYNTWFQRHVEPQVTTDEYERGSYVYFDFHVTEDGSGWCQRIKNDFTFEYNYLEDELSVQTN

SEQ ID NO: 180363 - protein, 324 aa, Zea Mays
MEKVEALEDMVSLAPSSLVKGVAPVSTTAVLSTKSSVATSPTQPTVSTASSQSTSQDQTEETASQESNPEPTPQTPPPKGGNPGPSVPAVPIVVSTGSAAVSVPAETISSPVRLTVPATAATVLSSAIPRSAPENTLAVTSIPANLSTTLKDDESMSVPPRRPSPATEIGIGRGITRGTTSQALGTAPITIGPVSGNGSLVMPLGSKVQPQQVPRTNDAIGSDSANTNENPILGGRVFSPPVVSGVQWRPQAAAAFQNQIETNQYRGRPEISADHREKYIQRLQQVQQQGGSLLNVSHITGINQKQFPTPQPNPLLQQFKSSIS

SEQ ID NO: 180364 - protein, 884 aa, Zea Mays
MGASRKLQGEIDRVLKKVQEGVDVFDSIWNKVYDTENANQKEKFEADLKKEIKKLQRYRDQIKTWIQSSEIKDKKIMIVGFSFTYLFVIVKDYGQIEVSASYEQALMDARKQIEREMERFKVCEKETKTKAFSKEGLGQQPKTDPKEKAKAETRDWLNNVVSDLESQIDNFEAEIEGLSIKKGKQRPPRLVHLETSITRHKAHIKKLESILRLLDNDELSPEQVNDVKDFLDDYVERNQEDFDEFSDVEDLYSTLPMEKVEALEDMVSLAPSSLVKGVAPVSTTAVLSTKSSVATSPTQPTVSTASSQSTSQDQTEETASQESNPEPTPQTPPPKGGNPGPSVPAVPIVVSTGSAAVSVPAETISSPVRLTVPATAATVLSSAIPRSAPENTLAVTSIPANLSTTLKDDESMSVPPRRPSPATEIGIGRGITRGTTSQALGTAPITIGPVSGNGSVSALPAINDLSKINILNTDEKINSDGLSQQLVMPLGSKVQPQQVPRTNDAIGSDSANTNENPILGGRVFSPPVVSGVQWRPQAAAAFQNQIETNQYRGRPEISADHREKYIQRLQQVQQQGGSLLNVSHITGINQKQFPTPQPNPLLQQFNSQSSSISSQVNLGLGVQGSDAGHIKSEDQQILAEDVGVESSATTGANKQTSEDDTKIPYSNPSAPAAENTQLPRDTDLSPGQPLQPGMPSSGVGVIGRRSVSDLGTIGDNLTGTSGSSGHDQNYYLQMLEAAFHKLPQPKDSERAKTYIPRHPAVTPASYPQVQASIVSNPTFWERIGSDTLATDMLFFAFYYQQNTYQQYLAARELKKQSWRFHRRYNTWFQRHVEPQVTTDEYERGSYVYFDFHVTEDGSGWCQRIKNDFTFEYNYLEDELSVQTN

SEQ ID NO: 180365 - protein, 569 aa, Zea Mays
MGASRKLQGEIDRVLKKVYDTENANQKEKFEADLKKEIKKLQRYRDQIKTWIQSSEIKDKKVSASYEQALMDARKQIEREMERFKVCEKETKTKAFSKEGLGQQPKTDPKEKAKAETRDWLNNVVSDLESQIDNFEAEIEGLSIKKGKQRPPRLVHLETSITRHKAHIKKLESILRLLDNDELSPEQVNDVKDFLDDYVERNQEDFDEFSDVEDLYSTLPMEKVEALEDMVSLAPSSLVKGVAPVSTTAVLSTKSSVATSPTQPTVSTASSQSTSQDQTEETASQESNPEPTPQTPPPKGGNPGPSVPAVPIVVSTGSAAVSVPAETISSPVRLTVPATAATVLSSAIPRSAPENTLAVTSIPANLSTTLKDDESMSVPPRRPSPATEIGIGRGITRGTTSQALGTAPITIGPVSGNGSVSALPAINDLSKINILNTDEKINSDGLSQQLVMPLGSKVQPQQVPRTNDAIGSDSANTNENPILGGRVFSPPVVSGVQWRPQAAAAFQNQIETNQYRGRPEISADHREKYIQRLQQVQQQGGSLLNVSHITGINQKQFPTPQPNPLLQQL

SEQ ID NO: 180366 - protein, 818 aa, Zea Mays
MGASRKLQGEIDRVLKKVYDTENANQKEKFEADLKKEIKKLQRYRDQIKTWIQSSEIKDKKVSASYEQALMDARKQIEREMERFKVCEKETKTKAFSKEGLGQQPKTDPKEKAKAETRDWLNNVVSDLESQIDNFEAEIEGLSIKKGKQRPPRLVHLETSITRHKAHIKKLESILRLLDNDELSPEQVNDVKDFLDDYVERNQEDFDEFSDVEDLYSTLPMEKVEALEDMVSLAPSSLVKGVAPVSTTAVLSTKSSVATSPTQPTVSTASSQSTSQDQTEETASQESNPEPTPQTPPPKGGNPGPSVPAVPIVVSTGSAAVSVPAETISSPVRLTVPATAATVLSSAIPRSAPENTLAVTSIPANLSTTLKDDESMSVPPRRPSPATEIGIGRGITRGTTSQALGTAPITIGPVSGNGSLVMPLGSKVQPQQVPRTNDAIGSDSANTNENPILGGRVFSPPVVSGVQWRPQAAAAFQNQIETNQYRGRPEISADHREKYIQRLQQVQQQGGSLLNVSHITGINQKQFPTPQPNPLLQQFNSQSSSISSQVNLGLGVQGSDAGHIKSEDQQILAEDVGVESSATTGANKQTSEDDTKIPYSNPSAPAAENTQLPRDTDLSPGQPLQPGMPSSGVGVIGRRSVSDLGTIGDNLTGTSGSSGHDQNYYLQMLEAAFHKLPQPKDSERAKTYIPRHPAVTPASYPQVQASIVSNPTFWERIGSDTLATDMLFFAFYYQQNTYQQYLAARELKKQSWRFHRRYNTWFQRHVEPQVTTDEYERGSYVYFDFHVTEDGSGWCQRIKNDFTFEYNYLEDELSVQTN

SEQ ID NO: 180367 - protein, 844 aa, Zea Mays
MGASRKLQGEIDRVLKKVYDTENANQKEKFEADLKKEIKKLQRYRDQIKTWIQSSEIKDKKVSASYEQALMDARKQIEREMERFKVCEKETKTKAFSKEGLGQQPKTDPKEKAKAETRDWLNNVVSDLESQIDNFEAEIEGLSIKKGKQRPPRLVHLETSITRHKAHIKKLESILRLLDNDELSPEQVNDVKDFLDDYVERNQEDFDEFSDVEDLYSTLPMEKVEALEDMVSLAPSSLVKGVAPVSTTAVLSTKSSVATSPTQPTVSTASSQSTSQDQTEETASQESNPEPTPQTPPPKGGNPGPSVPAVPIVVSTGSAAVSVPAETISSPVRLTVPATAATVLSSAIPRSAPENTLAVTSIPANLSTTLKDDESMSVPPRRPSPATEIGIGRGITRGTTSQALGTAPITIGPVSGNGSVSALPAINDLSKINILNTDEKINSDGLSQQLVMPLGSKVQPQQVPRTNDAIGSDSANTNENPILGGRVFSPPVVSGVQWRPQAAAAFQNQIETNQYRGRPEISADHREKYIQRLQQVQQQGGSLLNVSHITGINQKQFPTPQPNPLLQQSSSISSQVNLGLGVQGSDAGHIKSEDQQILAEDVGVESSATTGANKQTSEDDTKIPYSNPSAPAAENTQLPRDTDLSPGQPLQPGMPSSGVGVIGRRSVSDLGTIGDNLTGTSGSSGHDQNYYLQMLEAAFHKLPQPKDSERAKTYIPRHPAVTPASYPQVQASIVSNPTFWERIGSDTLATDMLFFAFYYQQNTYQQYLAARELKKQSWRFHRRYNTWFQRHVEPQVTTDEYERGSYVYFDFHVTEDGSGWCQRIKNDFTFEYNYLEDELSVQTN

SEQ ID NO: 180368 - protein, 539 aa, Zea Mays
MGASRKLQGEIDRVLKKVQEGVDVFDSIWNKVYDTENANQKEKFEADLKKEIKKLQRYRDQIKTWIQSSEIKDKKVSASYEQALMDARKQIEREMERFKVCEKETKTKAFSKEGLGQQPKTDPKEKAKAETRDWLNNVVSDLESQIDNFEAEIEGLSIKKGKQRPPRLVHLETSITRHKAHIKKLESILRLLDNDELSPEQVNDVKDFLDDYVERNQEDFDEFSDVEDLYSTLPMEKVEALEDMVSLAPSSLVKGVAPVSTTAVLSTKSSVATSPTQPTVSTASSQSTSQDQTEETASQESNPEPTPQTPPPKGGNPGPSVPAVPIVVSTGSAAVSVPAETISSPVRLTVPATAATVLSSAIPRSAPENTLAVTSIPANLSTTLKDDESMSVPPRRPSPATEIGIGRGITRGTTSQALGTAPITIGPVSGNGSLVMPLGSKVQPQQVPRTNDAIGSDSANTNENPILGGRVFSPPVVSGVQWRPQAAAAFQNQIETGEVHTETAASTAARWQPSECFPYNWHKSEAISNTTAKSPSTTV

SEQ ID NO: 180369 - protein, 598 aa, Zea Mays
MEKVEALEDMVSLAPSSLVKGVAPVSTTAVLSTKSSVATSPTQPTVSTASSQSTSQDQTEETASQESNPEPTPQTPPPKGGNPGPSVPAVPIVVSTGSAAVSVPAETISSPVRLTVPATAATVLSSAIPRSAPENTLAVTSIPANLSTTLKDDESMSVPPRRPSPATEIGIGRGITRGTTSQALGTAPITIGPVSGNGSLVMPLGSKVQPQQVPRTNDAIGSDSANTNENPILGGRVFSPPVVSGVQWRPQAAAAFQNQIETNQYRGRPEISADHREKYIQRLQQVQQQGGSLLNVSHITGINQKQFPTPQPNPLLQQFNSQSSSISSQVNLGLGVQGSDAGHIKSEDQQILAEDVGVESSATTGANKQTSEDDTKIPYSNPSAPAAENTQLPRDTDLSPGQPLQPGMPSSGVGVIGRRSVSDLGTIGDNLTGTSGSSGHDQNYYLQMLEAAFHKLPQPKDSERAKTYIPRHPAVTPASYPQVQASIVSNPTFWERIGSDTLATDMLFFAFYYQQNTYQQYLAARELKKQSWRFHRRYNTWFQRHVEPQVTTDEYERGSYVYFDFHVTEDGSGWCQRIKNDFTFEYNYLEDELSVQTN

SEQ ID NO: 180370 - protein, 747 aa, Zea Mays
MGASRKLQGEIDRVLKKVYDTENANQKEKFEADLKKEIKKLQRYRDQIKTWIQSSEIKDKKALMDARKQIEREMERFKVCEKETKTKAFSKEGLGQQPKTDPKEKAKAETRDWLNNVVSDLESQIDNFEAEIEGLSIKKGKQRPPRLVHLETSITRHKAHIKKLESILRLLDNDELSPEQVNDVKDFLDDYVERNQEDFDEFSDVEDLYSTLPMEKVEALEDMVSLAPSSLVKGVAPVSTTAVLSTKSSVATSPTQPTVSTASSQSTSQDQTEETASQESNPEPTPQTPPPKGGNPGPSVPAVPIVVSTGSAAVSVPAETISSPVRLTVPATAATVLSSAIPRSAPENTLAVTSIPANLSTTLKDDESMSVPPRRPSPATEIGIGRGITRGTTSQALGTAPITIGPVSGNGSVSALPAINDLSKINILNTDEKINSDGLSQQLVMPLGSKVQPQQVPRTNDAIGSDSANTNENPILGGRVFSPPVVSGVQWRPQAAAAFQNQIETNQYRGRPEISADHREKYIQRLQQVQQQGGSLLNVSHITGINQKQFPTPQPNPLLQQSSSISSQVNLGLGVQGSDAGHIKSEDQQILAEDVGVESSATTGANKQTSEDDTKIPYSRHPAVTPASYPQVQASIVSNPTFWERIGSDTLATDMLFFAFYYQQNTYQQYLAARELKKQSWRFHRRYNTWFQRHVEPQVTTDEYERGSYVYFDFHVTEDGSGWCQRIKNDFTFEYNYLEDELSVQTN

SEQ ID NO: 180371 - protein, 753 aa, Zea Mays
MQYALMDARKQIEREMERFKVCEKETKTKAFSKEGLGQQPKTDPKEKAKAETRDWLNNVVSDLESQIDNFEAEIEGLSIKKGKQRPPRLVHLETSITRHKAHIKKLESILRLLDNDELSPEQVNDVKDFLDDYVERNQEDFDEFSDVEDLYSTLPMEKVEALEDMVSLAPSSLVKGVAPVSTTAVLSTKSSVATSPTQPTVSTASSQSTSQDQTEETASQESNPEPTPQTPPPKGGNPGPSVPAVPIVVSTGSAAVSVPAETISSPVRLTVPATAATVLSSAIPRSAPENTLAVTSIPANLSTTLKDDESMSVPPRRPSPATEIGIGRGITRGTTSQALGTAPITIGPVSGNGSLVMPLGSKVQPQQVPRTNDAIGSDSANTNENPILGGRVFSPPVVSGVQWRPQAAAAFQNQIETNQYRGRPEISADHREKYIQRLQQVQQQGGSLLNVSHITGINQKQFPTPQPNPLLQQFNSQSSSISSQVNLGLGVQGSDAGHIKSEDQQILAEDVGVESSATTGANKQTSEDDTKIPYSNPSAPAAENTQLPRDTDLSPGQPLQPGMPSSGVGVIGRRSVSDLGTIGDNLTGTSGSSGHDQNYYLQMLEAAFHKLPQPKDSERAKTYIPRHPAVTPASYPQVQASIVSNPTFWERIGSDTLATDMLFFAFYYQQNTYQQYLAARELKKQSWRFHRRYNTWFQRHVEPQVTTDEYERGSYVYFDFHVTEDGSGWCQRIKNDFTFEYNYLEDELSVQTN

SEQ ID NO: 180372 - protein, 594 aa, Zea Mays
MEKVEALEDMVSLAPSSLVKGVAPVSTTAVLSTKSSVATSPTQPTVSTASSQSTSQDQTEETASQESNPEPTPQTPPPKGGNPGPSVPAVPIVVSTGSAAVSVPAETISSPVRLTVPATAATVLSSAIPRSAPENTLAVTSIPANLSTTLKDDESMSVPPRRPSPATEIGIGRGITRGTTSQALGTAPITIGPVSGNGSLVMPLGSKVQPQQVPRTNDAIGSDSANTNENPILGGRVFSPPVVSGVQWRPQAAAAFQNQIETNQYRGRPEISADHREKYIQRLQQVQQQGGSLLNVSHITGINQKQFPTPQPNPLLQQSSSISSQVNLGLGVQGSDAGHIKSEDQQILAEDVGVESSATTGANKQTSEDDTKIPYSNPSAPAAENTQLPRDTDLSPGQPLQPGMPSSGVGVIGRRSVSDLGTIGDNLTGTSGSSGHDQNYYLQMLEAAFHKLPQPKDSERAKTYIPRHPAVTPASYPQVQASIVSNPTFWERIGSDTLATDMLFFAFYYQQNTYQQYLAARELKKQSWRFHRRYNTWFQRHVEPQVTTDEYERGSYVYFDFHVTEDGSGWCQRIKNDFTFEYNYLEDELSVQTN

SEQ ID NO: 180373 - protein, 326 aa, Zea Mays
MEKVEALEDMVSLAPSSLVKGVAPVSTTAVLSTKSSVATSPTQPTVSTASSQSTSQDQTEETASQESNPEPTPQTPPPKGGNPGPSVPAVPIVVSTGSAAVSVPAETISSPVRLTVPATAATVLSSAIPRSAPENTLAVTSIPANLSTTLKDDESMSVPPRRPSPATEIGIGRGITRGTTSQALGTAPITIGPVSGNGSLVMPLGSKVQPQQVPRTNDAIGSDSANTNENPILGGRVFSPPVVSGVQWRPQAAAAFQNQIETNQYRGRPEISADHREKYIQRLQQVQQQGGSLLNVSHITGINQKQFPTPQPNPLLQQRVPLYLPK

SEQ ID NO: 180374 - protein, 201 aa, Zea Mays
MPIFFLLLLVAFFCTLIGLFMQFNSQSSSISSQVNLGLGVQGSDAGHIKSEDQQILAEDVGVESSATTGANKQTSEDDTKIPYSNPSAPAAENTQLPRDTDLSPGQPLQPGMPSSGVGVIGRRSVSDLGTIGDNLTGTSGSSGHDQNYYLQMLEAAFHKLPQPKDSERAKTYIPLPLLATPKFRHQLYRIPPFGKELVATH

SEQ ID NO: 180375 - protein, 762 aa, Zea Mays
MAASGASASYDLVDRVPYLFVRLLKAKRHGGGDGQPLYAQLSIGTHAVRTRAATAAGEWDLVFAFHKDSLTDTSLEVTVLEEAKKPAKEGDPVPPEANLGFVSFDLQEVPKRSPPDSALAPQWYTLEGHGSEDGAAVCDVMLSVWVGTQVDEAFQEAWQSDSGGYLVHTRSKAYLSPKLWYLRLSVIQAQDLRLPSPPDAKAKQCGPIFPELYVKAQLGAQVFKTGRVQLGSAAAGTANPSWNEDLLFVAAEPFDPFLTVVVEDVFSGQAVGQSRVPLSTVHRRSDDRVEPPSRWLNLCGGEARPYAGRVHVRVCLEGGYHVLDEAANVASDVRAASKQLSKPPVGMLEVGVRGAANLVPMKIAKDGASGSTDAYVVLKYGPKWARTRTILDQFNPRWNEQYAWDVFDPCTVLTIAVFDNVRYKAAAADDPGKLPRDSRIGKLRIRLSTLDTNRVYANTFALTAVHPVGVRKMGELELAIRFTCPSWLTLMQAYGSPLLPRMHYVKPLGAAQQDVLRHTAMRTVSGRLARSEPPLGPEVVQYLLDTDTQSWSMRRSKANWFRVVGCLSHVATAVRWAHRVRTWAHPPTTVLVHLLLVAVVLCPEMILPTVCLYLFLVLLWRYRARARQPAGMDPRLSHVDSVSPDELDEEFDGLPSGRPADVVRMRYDRLRAVAARAQTLLGDVAAQGERVEALLSWRDPRATAVFAVVCLLAALVLYAVPFKVLLLGMGFYYLRHPRFRGDMPSAGFNFFRRLPSLSDRVF

SEQ ID NO: 180376 - protein, 396 aa, Zea Mays
MLVACGVCRVPACLGRQLLHGHLLHLLVRPGLHLAAEAAGPAEHGAVPVGVRVRVPHSGDGDGLTRDDDGVDHLPLRVVHGEHVEAAAADLVWVDDGVQEGARAVRAAHHQRGAGRHVPPEVLHHARLLLGRHAHERRQEDDVVGGQAPRDVGHVGGAERHARGERGVGAHEAARPAVGLRADVVVVEGGGGEVARGEHEGAERERAGPHEGDAGGRRARDVARQQAVLQLAQQQVVAEVGEERQVVQRAVQGRQQVRVVRLQLGLGVGAAADEARAHALQLRAQAFHVHGAARDAGRDEVREQRVHLRRRAQRRQLRDGGGQAGDLAHQRGLRLILQRQHLDGSYFISFFVQHSWHFDIWIIITWNGLLYGISALTKKTKNDKDTRVFVAKHLVL

SEQ ID NO: 180377 - protein, 570 aa, Zea Mays
MSSNHAARILRRRVTEEELEGEVQQDSFWLIKPRLYDFAAPQQVPSRTLCLPPPPAPPAATLGLTADSCLLTTLKCDGAGWGMRRRVRYIGRHRDEAPKEASVDGYDTESSVREVQQPPATQEVKRSERNCKRKREAEASSKDNNGDEGKKNNKVQGASKKISKKAKKRTVESKDGDPRHGKDRWSAERYAAAEKSLLNIMRSRDARFGAPVMRQVLREEARKHIGDTGLLDHLLKHMAGRVPEGSVHRFRRRHNADGAMEYWLEPAELAEVRKQAGVSDPYWVPPPGWKPGDDVSLVAGDILVKRQVEELTEEVNGVKRQMEQLLCKDDGDFGAERDYSSLKEKYQRAVRANEKLEKQVLCLKDMCENVVQMNGELKKEVSSFKEKYEHIADKNDKLEEQVTYLSSSFLSFKDQLVVALKLELAPSEAVPRTALFVASGEQMTGTVIQGGQDRAERKSSFRVCKPQGKFLLPSMASGMTIGRGASSTCPAAATPGPGIPRSTSFPSMPGLPRSSRGPVEVVAAASGLDEHVMFGAHFSTPPLGVVHQRRCQAAAVPAQPEVAPAAAEAV

SEQ ID NO: 180378 - protein, 639 aa, Zea Mays
MQHGAFYEIDHDKLPPKSPIHLKSIRVVKVSECTNLDITVKFPSLQALRSFFSSYPAPGTGPELDERFVMSSNHAARILRRRVTEEELEGEVQQDSFWLIKPRLYDFAAPQQVPSRTLCLPPPPAPPAATLGLTADSCLLTTLKCDGAGWGMRRRVRYIGRHRDEAPKEASVDGYDTESSVREVQQPPATQEVKRSERNCKRKREAEASSKDNNGDEGKKNNKVQGASKKISKKAKKRTVESKDGDPRHGKDRWSAERYAAAEKSLLNIMRSRDARFGAPVMRQVLREEARKHIGDTGLLDHLLKHMAGRVPEGSVHRFRRRHNADGAMEYWLEPAELAEVRKQAGVSDPYWVPPPGWKPGDDVSLVAGDILVKRQVEELTEEVNGVKRQMEQLLCKDDGDFGAERDYSSLKEKYQRAVRANEKLEKQVLCLKDMCENVVQMNGELKKEVSSFKEKYEHIADKNDKLEEQVTYLSSSFLSFKDQLVVALKLELAPSEAVPRTALFVASGEQMTGTVIQGGQDRAERKSSFRVCKPQGKFLLPSMASGMTIGRGASSTCPAAATPGPGIPRSTSFPSMPGLPRSSRGPVEVVAAASGLDEHVMFGAHFSTPPLGVVHQRRCQAAAVPAQPEVAPAAAEAV

SEQ ID NO: 180379 - protein, 79 aa, Zea Mays
MATREEHVAAPAPAVEETPEKKQASTTELPAPSGWTKKGALWARERYGARAAPPDRDVGVSIVDFTFIALPIATSKSFL

SEQ ID NO: 180380 - protein, 181 aa, Zea Mays
MSLCRHIFSQTLSQLSKYCQFALCGQEVVNAFSAAVLGLSSGCVSSQVNQEQPHDGSPPLREDDKNGHYVFAVGDNLTSRCNFLPSASLVTNANLFPWLVLIDSFLCLQIRSMQKWEKSTGISGLLRYAPEIFEQSGVASLFSDIGLSPHSTSILMSTLNALLILPCITAAMLLMDVCGRR

SEQ ID NO: 180381 - protein, 238 aa, Zea Mays
MVRQLSIDQFENEGRRVSYGTPENATAARKLLDRQMSINSIPKKVIASLLKPRGWKPPVRRQFFLDCNEIADLCDSAERIFSSEPSVLQLKAPVKIFGDLHGQFGDLMRLFDEYGAPSTAGDIAYIDYLFLGDYVDRGQHSLETITLLLALKVEYPQNVHLIRGNHEAADINALFGFRIECIERMKRKSSVCMVASVGQSTMSSKLRIFKGQLQWKLARLFSWIFYGLIQQRMTVLKD

SEQ ID NO: 180382 - protein, 390 aa, Zea Mays
MVRQLSIDQFENEGRRVSYGTPENATAARKLLDRQMSINSIPKKVIASLLKPRGWKPPVRRQFFLDCNEIADLCDSAERIFSSEPSVLQLKAPVKIFGDLHGQFGDLMRLFDEYGAPSTAGDIAYIDYLFLGDYVDRGQHSLETITLLLALKVEYPQNVHLIRGNHEAADINALFGFRIECIERMGERDGIWTWHRMNRLFNWLPLAALIEKKIICMHGGIGRSINHVEQIENLQRPITMEAGSVVLMDLLWSDPTENDSVEGLRPNARGPGLVTFGPDRVMEFCNNNDLQLIVRAHECVMDGFERFAQGHLITLFSATNYCGAILVLGRDLVVVPKLIHPLPPAITSPEASPDHIEDTWMQELNANRPPTPTRGRPQAVANERGSLAWI

SEQ ID NO: 180383 - protein, 425 aa, Zea Mays
MSKQAKPAKTAQKKDVPQAASTLASEKKATERPPEREKKLDAPHPRMQFDDVHKVEKAKKRAVVNQSEAQNRVELFRHLPQYVHGTQLPDLESKFFQLEPMHPSVYKVGLQYLSGEVSGGNDRCVAMLLAFKEAIKDYTTPTNKTLSRDLTAKISSYVSFLIECRPLSISMGNAIRFLKSRIAKLPHALSESEAKTSLQSDIDRFINEKIVLADKVIVSHAITKVRDNDVLLTYGSSTVVEMILDYAHELGRNFRVVVVDSRPKLEGQGLLRRLVAKGINCTYTHINAISYIMHEVTRVLLGASSILSNGTVYSRVGTASVAMVAHAFGVPVLVCCEAYKFHERVQLDSICANELGDPDVILKIPGKAEDHLKNWADSANLQLLNLTYDATPPDYVSMIITDYGMLPPTSVPVIVREYRKEQLWI

SEQ ID NO: 180384 - protein, 680 aa, Zea Mays
MQSSGRPNYPLRPLRAPTPLRLCRPIEKEKKNKMNKPPQTTPTNAHGPGSRARQRRSRRLHPVQWSTIIARVVCSAAAVRIPSSPTSLARSPPRLPQSHTRLERRPKPPTKPSPPSAAMDLRRPPRSSSGGVEPKIRQVGFFTPDASAPSEPMPPAAVVQAPSAQQRPVTASPPASDDFSQGRLSPVMIPPPRHADHLALGPHPPAAADVVLATSAPVRSSPRLDIVSEIGDDDSWSRAPSAVELDKSGKSAGAAMSKQAKPAKTAQKKDVPQAASTLASEKKATERPPEREKKLDAPHPRMQFDDVHKVEKAKKRAVVNQSEAQNRVELFRHLPQYVHGTQLPDLESKFFQLEPMHPSVYKVGLQYLSGEVSGGNDRCVAMLLAFKEAIKDYTTPTNKTLSRDLTAKISSYVSFLIECRPLSISMGNAIRFLKSRIAKLPHALSESEAKTSLQSDIDRFINEKIVLADKVIVSHAITKVRDNDVLLTYGSSTVVEMILDYAHELGRNFRVVVVDSRPKLEGQGLLRRLVAKGINCTYTHINAISYIMHEVTRVLLGASSILSNGTVYSRVGTASVAMVAHAFGVPVLVCCEAYKFHERVQLDSICANELGDPDVILKIPGKAEDHLKNWADSANLQLLNLTYDATPPDYVSMIITDYGMLPPTSVPVIVREYRKEQLWI

SEQ ID NO: 180385 - protein, 182 aa, Zea Mays
MGAPKQRWTSEEEAALRAGIARHGVGKWRTILKDPEFSSTLCYRSNVDLKDKWRNMNVIVSTSSSRDKAKSALKRIRTIPKNNEHTMAITRVTSDIDDEIVDEKPIVSLPSEAKNTSSSKKSHRLDNIIMEAIKNLNEPTGSHRTTIANYIEEQYWPPSDFDHLLSAKLKDLSTSGKLIKMA

SEQ ID NO: 180386 - protein, 523 aa, Zea Mays
MTSDDEEACDYFYDDDDDAEEDAAAGLEEDSSLPTPEGRADYWKQDLSTVMNLLNINQHQARALLIHHRWSMDGIYDSLDMGRERMLRNSGIVLQEVNSIAAAGSMTPWRTVTCKVCFEDFSMDAVSTMDCGHCFCNDCWTEYFHAAVESGKKQIRCMEVKCSAFCDEDLVRFLLVQKYPDMAKNFNRFLLGSYLEDNASVKWCPSTPNCGHAIRVGTDERCCEVECPCGLSFCFNCMGHAHSPCPCTIWEKWNASRSEGENIKWILANTKSCPKCFKAIEKNGGCNLVRCKCGQCMCWLCGGGTGQDHTWNSITGHSCNRYEEEICVETVHTGRQQMQRYKHYHDRFKIHGDSSYGVEKQKLGAAIEERVRLLESDRERPLAIRDGDWLTRAHRRLLVSRQVLSRSYVFAYYMFGGHELRTRPAERANLGVARNLFEHQQEQLERHVEHLSRSLAESADLAGAPDAEIVKQKQTAITLTKTVERLCGEMYKCIQDELLTLLVEPMSIAAYRPDGPDRAKPAI

SEQ ID NO: 180387 - protein, 441 aa, Zea Mays
MNLLNINQHQARALLIHHRWSMDGIYDSLDMGRERMLRNSGIVLQEVNSIAAAGSMTPWRTVTCKVCFEDFSMDAVSTMDCGHCFCNDCWTEYFHAAVESGKKQIRCMEVKCSAFCDEDLVRFLLVQKYPDMAKNFNRFLLGSYLEDNASVKWCPSTPNCGHAIRVGTDERCCEVECPCGLSFCFNCMGHAHSPCPCTIWEKWNASRSEGENIKWILANTKSCPKCFKAIEKNGGCNLVRCKCGQCMCWLCGGGTGQDHTWNSITGHSCNRYEEEICVETVHTGRQQMQRYKHYHDRFKIHGDSSYGVEKQKLGAAIEERVLSRSYVFAYYMFGGHELRTRPAERANLGVARNLFEHQQEQLERHVEHLSRSLAESADLAGAPDAEIVKQKQTAITLTKTVERLCGEMYKCIQDELLTLLVEPMSIAAYRPDGPDRAKPAI

SEQ ID NO: 180388 - protein, 138 aa, Zea Mays
MLVILLFSWYQVMSALEKMTRGVAWGDLDILVVDMPPGTGDAQLSMSQRLRLSGALIVSTPQDIALIDARRGANMFRKVQVPVPLEISIRTGSDEGNPIVVSSPNSASAQAYVNVAEKVTQRLKELAEERRMGPEILL

SEQ ID NO: 180389 - protein, 644 aa, Zea Mays
MTHCSVWIPTVTPKPSIFLPDHKDQAPQKIIVLTESVKWSSAINTLLDIGSRCKSTYLFESGVRCGLHERSSSTPRTRISRSDPQARLSLRRQFLAGVLPASPFIPSSDFSCLWLELMDGQVETFVGDEEGGSPQVPYDGEQPTLYDSVAKQYSEELGDQYNEQPRAQYDEGSGNPYNDYEEQANLYSEETGNRYNEDPADSYQEEQENAFSGGINQQDNLQVNNVDDNKWPGWPGESVFRILVPAQKVGAIIGRKGEFIKKMCEETKARIKILDGPPGVPERAVMISAKDEPDAPLSPAMDGLLRVHKRITDSSDGESSQPQRSAGNIGPTRLLVPSSQAGSLIGKQGATIKSIQDSSKSIVRIVENVPPVALNDDRVVEIQGEPLGVQEAVELISSHLRKFLVDRSVLPLFEAHMKMHGMPREQPVPPPQHWGPPQTWIRPPNIPPGGPGFGGNPQFMHPRPQDSYYPSPDVPHMEKQPHYGISAYGREAPPSGASATGNQPPSHAGSQVAHDMHIPLAYADAVIGAAGASISYIRRHSGATVTIQESRGAPGEMTVEITGTAAQVQTAQQLIQNFMAEAAPPPPGPAPASNPPAPPVDPSYGSYPPPYGAAPSYGSSAAAGPPQYNGGNYGGPTYPPSYGY

SEQ ID NO: 180390 - protein, 198 aa, Zea Mays
METVVGDLMATELRLGLPGTKRPAAEEEEANKRDAEAAPPAAKAPVVGWPPVRSYRKSCFQQAKQQAVSSSSKAADKEDAAAPAPSCTASAAASNATASAGAGSFVKVSMDGAPYLRKLDLRMYKGYRELREALEAMFVSSGSANNNNNLSEFAVTYQDKDGDLMLVGDVPFEMFASTCRKLRIMKRSEATGLGSARQ

SEQ ID NO: 180391 - protein, 554 aa, Zea Mays
MQLIANVRNPFIVEHKDSWVDKGCYVCIVIGYCEGGDMAEAIKRANDTHFSEEKLCQWLVQLLMALDYLHAHHILHRDVKCSNIFLTRDQNIRLGDFGLAKILTADDLAFSIVGTPSYMCPELLADIPYGTKSDIWSLGCCMYEMAALKPAFRAFDMQNLINKITKSIVSPLPTRYSGAFRRLVRSMLRRSPEHRPSAAELLKHPHLQPYVLQLHLKSHLSRSIVPVHQSPSEKRMTFAAEPVCRSKGRRNSLGSERMIAAFSKPSPDRSSVSSIRSVKDDYTATQSVRELSVDESMVEVASKPVASRTSDVMRTPKATPWKMMTTLRNRLEAPQASYDRTSHTEFSRTPVDKRNSRVARRASLPLPVFETPKQRSSMSVLERLESPDVSVNSPRIDRIAEFPLASCEDPLFSTVKPPTPASASASATPPFVDRSITKDKCTAQTLRSAAHDGGNGRSEDGGGLSSGRTTTTAASSGGTSGSLQPKGRFDTTSYQQRAEALEGLLEFSAQLLQQERYEELGVLLRPFGPDEMVSPRETAIWLTKSFKEAMATGL

SEQ ID NO: 180392 - protein, 436 aa, Zea Mays
MCPELLADIPYGTKSDIWSLGCCMYEMAALKPAFRAFDMQNLINKITKSIVSPLPTRYSGAFRRLVRSMLRRSPEHRPSAAELLKHPHLQPYVLQLHLKSHLSRSIVPVHQSPSEKRMTFAAEPVCRSKGRRNSLGSERMIAAFSKPSPDRSSVSSIRSVKDDYTATQSVRELSVDESMVEVASKPVASRTSDVMRTPKATPWKMMTTLRNRLEAPQASYDRTSHTEFSRTPVDKRNSRVARRASLPLPVFETPKQRSSMSVLERLESPDVSVNSPRIDRIAEFPLASCEDPLFSTVKPPTPASASASATPPFVDRSITKDKCTAQTLRSAAHDGGNGRSEDGGGLSSGRTTTTAASSGGTSGSLQPKGRFDTTSYQQRAEALEGLLEFSAQLLQQERYEELGVLLRPFGPDEMVSPRETAIWLTKSFKEAMATGL

SEQ ID NO: 180393 - protein, 182 aa, Zea Mays
MAQFLRGKAAAAAGAAVLRASSPAPWRRTASASYHHTIQAVPRETAGPRAAARERRHGRVPAVLLTLAGAAPGNGIAHRHLLTADRRQLAEMLKQSPYFLSTPVRLQVRAGERSNAILHAGTVLPIKVHRDENSGNILNLVMVKADEGTMLKVDLPVEFKGKDACPGLKKENKDQPGVSLPS

SEQ ID NO: 180394 - protein, 116 aa, Zea Mays
MRRRLHAHLAPRNRLPVAPRVTASTGHIPPFPNSTDVKRDSPLAPPHPPSPTLEEPVEEAPKTYASVLRTKSKATMAITESQQAQQLAQQPQSASVHEKSNLDNHRDVSVPEDEVL

SEQ ID NO: 180395 - protein, 119 aa, Zea Mays
MQFSCGKLFQGLILLNHQKLDHQHKIASIVASGIQPLHNLTVLRFIDQKVGAWESVLWTQQQIERGFTAIENLIQLKGCAGKYATGDEVQLLQNQVRLPRRARMTMILMRTRQMKPIAF

SEQ ID NO: 180396 - protein, 103 aa, Zea Mays
MAGVQAEGASTEQALSSALTSIMDALKSTDWNTRKDASLALSSIVVSSGYLITSFRTSCLRSLECSKFDKVKLVRDTIIHAVQLWKAIPGSHTPEPSEAGPST

SEQ ID NO: 180397 - protein, 104 aa, Zea Mays
MQFSCGKLFQGLILLNHQKLDHQHKIASIVASGIQPLHNLTVLRFIDQKVGAWESVLWTQQQIERGFTAIENLIQLKGCAGKYATGDEVQLSSSTDLNVEELLA

SEQ ID NO: 180398 - protein, 83 aa, Zea Mays
MKLWKPQRNMSLLLQNLHLKKTNLLQVVQQLAPGTISDDVVRADVTVEVPWSTIQRERSCYQCCMWWPNRWRRSHLVQALLDV

SEQ ID NO: 180399 - protein, 82 aa, Zea Mays
MKLKVYLRWICCTRLRILAKLSHRRKSRSLVLNQIIAKGGNECKEMSLPWQIKTRALHSDFLGVHLQVKSLFPHEFMKKSCK

SEQ ID NO: 180400 - protein, 199 aa, Zea Mays
MVLVAGGRPTPHDDEDALECSGDAPAPFIQHEAGRWLGHGGLAVARVLLEIICGYSTSTKMTNTMIPQWRDMVMGKGTEEGAMNGVEANFPSRTRDLQTRGLLAGGVSETRGKLNRRGRGAPKREWRLGRARDGALMGEADCRGGRGGGRAWGRRGASEIGAERGTLPRLSWSEGAARLLRGRGRLPREIAAREGALAE

SEQ ID NO: 180401 - protein, 408 aa, Zea Mays
MDRAALTVGPGMDMPIMHDGDRYELVRDIGSGNFGVARLMRNRADGQLVAVKYIERGEKIDENVQREIINHRSLRHPNIIRFKEVILTPTHLAIVMEYASGGELFERICNAGRFSEDEVHSFSFVFSRFHQRCLLVLPFLCTCDDTPALYNYKHGTLIKLSKLLSGAFLFPATHIRGQLLPFHVCHRDLKLENTLLDGSTAPRLKICDFGYSKSSVLHSQPKSTVGTPAYIAPEVLLKKEYDGKVADVWSCGVTLYVMLVGAYPFEDPDEPKNFRKTIQRILGVQYSIPDYVHISPECQNLVSRIFVADPATRITIPEIRNHPWFLKNLPADLMDDSTMSKQYEEPEQPMQSMDEIMQILAEATIPAAGPHGLNQFLNDGLDLDDDMDDLDSDTDLDLESSGEIVYAI

SEQ ID NO: 180402 - protein, 89 aa, Zea Mays
MAQTKNFMHLLFSNNCIARDFCPALAKAVKTMKKAEKLLLIYSKAIGRPTVGEEGVLMSIILFCIITNQLVMHSVRCACLNSIGIMLCV

SEQ ID NO: 180403 - protein, 84 aa, Zea Mays
MEFWIPIYRNSFAVAYAFQFQFGVTKRIQLQVCLFSYIGGETVCARSNILNFVAALFTLYRFAMVKSLLTIGLVNFMFRVMCHA

SEQ ID NO: 180404 - protein, 65 aa, Zea Mays
MAQTKNFMHLLFSNNCIARDFCPALAKAVKTMKKAEKLLLIYSKAITNSWRGRCSDEHHLVLHHH

SEQ ID NO: 180405 - protein, 62 aa, Zea Mays
MAQTKNFMHLLFSNNCIARDFCPALAKAVKTMKKAEKLLLIYSKAIVRFYFKIRLFFYNFHV

SEQ ID NO: 180406 - protein, 535 aa, Zea Mays
MKYMKLGSKPDVFQTEGSNIRFVATELATDIVISVGDAKFYLHKFPLLSKSSLLQRLVASSNDEKNDEVDISDIPGGPSAFEICAKFCYGVIVTLNAYNVLAARCAAEYLEMFESIDKGNLIYKIDVFLTSSVFRTWKDSIIVLQSTKSLQPWCENLKVINHCIDCIASKASIDPSEVEWSYTYNRKKLPSENGIDSHWNGVRKQPMVPSDWWVEDLCELEVDLYKRVIMTIKAKGSTPAAVIGEALRAYAYRRLLGSLEDAVSNGVDCTKRRAALDAIVFLLPAEEGSVSCGFLLKLLGAACLLESGESHRVNLIKRIGTQLDGASVPDLLIPLNTNEDNISSIDLIMAIVEEFMSRNGDSGTEKFQDDEGIVDIEKSTSVSSASKLAVAKLIDGYLAEIAKDPNLPLPKLIALAEMVSSLPRPTHDGLYRAIDMYLKEHPSLSKSEKKKLCGLMDCKQLSQDACMHAVQNERLPLRVVVQRERQLHWQLQVSRDDDDDGGRGEWGPDVERHQLSEVDEAGQQQRWEREEQRQQ

SEQ ID NO: 180407 - protein, 114 aa, Zea Mays
MFESIDKGNLIYKIDVFLTSSVFRTWKDSIIVLQSTKSLQPWCENLKVINHCIDCIASKAKGTMLMPKKMLSKLWSGKTNAGESSSSDTSDSPGSANPEEAKSTQSRITWRSVS

SEQ ID NO: 180408 - protein, 387 aa, Zea Mays
MILSMFYYGYVLSQIPGGWAAQRIGGRRVLLLSFVLWSMICGLIPLDPNRVTILVLSRLFVGVAQGFIFPAIHTVLAQWVPPQERSRSVSLTTSGMYLGAACGMLFFPSLVKHMGPQSVFFVEAVLGAAWSVIWLKFSSDPPRTDLPKVSMPKVPSRDMIKAQAGGVVAPRTVKIPWRRIIFSLPVWAIVVNNFTFHYALYVLMNWLPTYFELGLKLSLQDMGSSKMLPYFNMFIFSNIGGVVADHLITRRILSVTKTRKLLNTIGFIVSAFALMALPLFSTPSGTVMCSAISLGFLALGRAGFAVNHMDVAPKFAGIVMGVSNTAGTLAGIVGVGLTGNILEAAKASNKDLTDSETWKTVFFVPAYLCIFSSVIFLIFSTGEKIFE

SEQ ID NO: 180409 - protein, 141 aa, Zea Mays
MNQPVQKNTLYVGGLAEEVDEKILHAAFVPFGEVKDVKTPLDQSTQKHRSFGFVTFLEREDAAAAMDNMDGAELFGRVLTVNYAFPERIKGGEQGWAAQPIWADADTWFERQQRSCTGRNWPLKGKARKKKIPWLPQRLRL

SEQ ID NO: 180410 - protein, 198 aa, Zea Mays
MNQPVQKNTLYVGKPTISSSSKRAHSLVQSPTFLAARVTCSTKFLGGLAEEVDEKILHAAFVPFGEVKDVKTPLDQSTQKHRSFGFVTFLEREDAAAAMDNMDGAELFGRVLTVNYAFPERIKGGEQGWAAQPIWADADTWFERQQQEEEMQRLQAEHRAAMQAAEKLHREKLAAEREGEKEEDPMAAAEAQAVKQSS

SEQ ID NO: 180411 - protein, 317 aa, Zea Mays
MAGTVTVPGSSKPSTPLLKDELDNRNDINRILGPKASCISFKDSACRCFGYMVSKKKYIYTIDDDCFVAKDPSGKDINALEQHIKNLLSPSTPFFFNTLYDPYREGADFVRGYPFSLREGAHTAVSHGLWLNIPDYDAPTQLVKPKERNERYVDAVMTIPKGTLFPMCGMNLAFDRDLIGPAMYFGLMGDGQPIGRYDDMWAGWCVKVICDHLSLGVKTGLPYIWHSKASNPFVNLKKEYKGIFWQEDIIPFFQNVTIPKDCDTVQKCYIYLSGQVKEKLGKIDPYFAKLGDAMVTWIEAWDELNPAGPAAGKDKAK

SEQ ID NO: 180412 - protein, 637 aa, Zea Mays
MEEKAVTNGAAAADVAAPDNKDNTKEEVSKSKEPVANKDAEEQNKGSENGAEGHSGGDVNMAEAEITEEGGGGDAGAAKQVDSGDVKTDADTKEDANARTEEGEDAKMTEADVGSTEVKDKEEKEDEVENTNEQDESKEQEKGASAEQEENEGKETDADENQEEEEAEEKGSADKKDEAEAEGDKKTEENKETPKNKKARSARDRSQGKDKEQDGSKSKEAKSLLNTPSPYGTNRPQRERKIVERLVEVIDKEPNKNFVVEKGQGTPLKDIPSVAHRISRKKPSDLKFLHSILFGRKGKAVDFKGHILQFSGFVWHESDQRAKAKEKLDKCVKDTLLDLCWTLGIPTPKANIRKEDIVSKLLDFIAEPHSAAESWGSDDQGSNSKKRKRGGESASKTPDGTPSRSRKKFVDDGTSSKRQNKALQYDTEEDESMKSDSEENIDEDSDEAADKQEVDYGSGKEKAGKKLSEVKESSGKKKSNTGSGHKSGPPNKIIKNLVKKVSSKIHEEKESPNGSAKVFSRKKKPTAEKEIKEKKSSGKKVTKGKGESAEAVLPSKDDLRKTITEILKKVDFNTATFSDILKKLDNHYKMDLTPKKEAIKVMIQDELTKLSEEDEEGEGDEDAGKKQQQPQAQEIEA

SEQ ID NO: 180413 - protein, 205 aa, Zea Mays
MKSDSEENIDEDSDEAADKQEVDYGSGKEKAGKKLSEVKESSGKKKSNTGSGHKSGPPNKIIKNLVKKVSSKIHEEKESPNGSAKVFSRKKKPTAEKEIKEKKSSGKKVTKGKGESAEAVLPSKDDLRKTITEILKKVDFNTATFSDILKKLDNHYKMDLTPKKEAIKVMIQDELTKLSEEDEEGEGDEDAGKKQQQPQAQEIEA

SEQ ID NO: 180414 - protein, 592 aa, Zea Mays
MVKRSKKSKSKRVTLRQKHKVQRKVKEHHRKKRKEAKKAGKAGQRRKVEKDPGIPNEWPFKEQELKALEARRAQALQELELKKQARKERKRKAGLLEDEDIASLASAASAQGSEFAAKENAPLLVAKINDHSERSFYKELVKVIEASDVIVEVLDARDPLGTRCIDMEKMVRKADPSKRIVLLLNKIDLVPKEAAEKWLTYLREELPTVAFKCNTQEQRTKLGWKSSKLDKTSNIPQSSDCLGAENLIKLLKNYSRSHELKLAITVGIVGLPNVGKSSLINSLKRSRVVNVGSTPGITRSMQEVQLDKKVKLLDCPGVVMLKSSNSGVSVALRNCKKVEKIEDPVAPVKEILSICPHEKLLSLYKVPNFGSVDDFLQKVATVRGKLKKGGVVDVEAAARIVLHDWNEGKIPYFTLPPKRDAGEDSDAVIISEDGKEFNIDDIYKAESSYIGGLKSIEEFHHIEIPPNAPPAIDEEMLEDGGKKPSEAIQESRDREEQMPDVKDSGGSKAASASTQNDKLYTAEGVLDPRKSKAEKKRRKASRPSALNDMDADYDFKVDYRMEDGGSEGAHADDEDGGDGSEDNEPMTGVDDA

SEQ ID NO: 180415 - protein, 591 aa, Zea Mays
MVKRSKKSKSKRVTLRQKHKVQRKVKEHHRKKRKEAKKAGKAGQRRKVEKDPGIPNEWPFKEQELKALEARRAQALQELELKKQARKERAQKRKAGLLEDEDIASLASAASAQGSEFAAKENAPLLVAKINERSFYKELVKVIEASDVIVEVLDARDPLGTRCIDMEKMVRKADPSKRIVLLLNKIDLVPKEAAEKWLTYLREELPTVAFKCNTQEQRTKLGWKSSKLDKTSNIPQSSDCLGAENLIKLLKNYSRSHELKLAITVGIVGLPNVGKSSLINSLKRSRVVNVGSTPGITRSMQEVQLDKKVKLLDCPGVVMLKSSNSGVSVALRNCKKVEKIEDPVAPVKEILSICPHEKLLSLYKVPNFGSVDDFLQKVATVRGKLKKGGVVDVEAAARIVLHDWNEGKIPYFTLPPKRDAGEDSDAVIISEDGKEFNIDDIYKAESSYIGGLKSIEEFHHIEIPPNAPPAIDEEMLEDGGKKPSEAIQESRDREEQMPDVKDSGGSKAASASTQNDKLYTAEGVLDPRKSKAEKKRRKASRPSALNDMDADYDFKVDYRMEDGGSEGAHADDEDGGDGSEDNEPMTGVDDA

SEQ ID NO: 180416 - protein, 570 aa, Zea Mays
MVKRSKKSKSKRVTLRQKHKVQRKVKEHHRKKRKEAKKAGKAGQRRKVEKDPGIPNEWPFKEQELKALEARRAQALQELELKKQARKERAQKRKAGLLEDEDIASLASAASAQGSEFAAKENAPLLVAKINDHSERSFYKELVKVIEASDVIVEVLDARDPLGTRCIDMEKMVRKADPSKRIVLLLNKIDLVPKEAAEKWLTYLREELPTVAFKCNTQEQRTKLGWKSSKLDKTSNIPQSSDCLGAENLIKLLKNYSRSHELKLAITVGIVGLPNVGKSSLINSLKRSRVVNVGSTPGITRSMQEVQLDKKVKLLDCPGVVMLKSSNSGVSVALRNCKKVEKIEDPVAPVDDFLQKVATVRGKLKKGGVVDVEAAARIVLHDWNEGKIPYFTLPPKRDAGEDSDAVIISEDGKEFNIDDIYKAESSYIGGLKSIEEFHHIEIPPNAPPAIDEEMLEDGGKKPSEAIQESRDREEQMPDVKDSGGSKAASASTQNDKLYTAEGVLDPRKSKAEKKRRKASRPSALNDMDADYDFKVDYRMEDGGSEGAHADDEDGGDGSEDNEPMTGVDDA

SEQ ID NO: 180417 - protein, 315 aa, Zea Mays
MVKRSKKSKSKRVTLRQKHKVQRKVKEHHRKKRKEAKKAGKAGQRRKVEKDPGIPNEWPFKEQELKALEARRAQALQELELKKQARKERAQKRKAGLLEDEDIASLASAASAQGSEFAAKENAPLLVAKINDHSERSFYKELVKVIEASDVIVEVLDARDPLGTRCIDMEKMVRKADPSKRIVLLLNKIDLVPKEAAEKWLTYLREELPTVAFKCNTQEQRTKLGWKSSKLDKTSNIPQSSDCLGAENLIKLLKNYSRSHELKLAITVGIVGLPNVGKSSLINSLKRSRVVNVGSTPGITRSMQEVQLDKKLRRS

SEQ ID NO: 180418 - protein, 418 aa, Zea Mays
MVKRSKKSKSKRVTLRQKHKVQRKVKEHHRKKRKEAKKAGKAGQRRKVEKDPGIPNEWPFKEQELKALEARRAQALQELELKKQARKERAQKRKAGLLEDEDIASLASAASAQGSEFAAKENAPLLVAKINDHSERSFYKELVKVIEASDVIVEVLDARDPLGTRCIDMEKMVRKADPSKRIVLLLNKIDLVPKEAAEKWLTYLREELPTVAFKCNTQEQRTKLGWKSSKLDKTSNIPQSSDCLGAENLIKLLKNYSRSHELKLAITVGIVGLPNVGKSSLINSLKRSRVVNVGSTPGITRSMQEVQLDKKVKLLDCPGVVMLKSSNSGVSVALRNCKKVEKIEDPVAPVKEILSICPHEKLLSLYKVPNFGSVDDFLQKVATVRGKLKKGGVVDVEAAARIVLHDWNEEMLGRTQMQ

SEQ ID NO: 180419 - protein, 356 aa, Zea Mays
MVKRSKKSKSKRVTLRQKHKVQRKVKEHHRKKRKEAKKAGKAGQRRKVEKDPGIPNEWPFKEQELKALEARRAQALQELELKKQARKERAQKRKAGLLEDEDIASLASAASAQGSEFAAKENAPLLVAKINDHSERSFYKELVKVIEASDVIVEVLDARDPLGTRCIDMEKMVRKADPSKRIVLLLNKIDLVPKEAAEKWLTYLREELPTVAFKCNTQEQRTKLGWKSSKLDKTSNIPQSSDCLGAENLIKLLKNYSRSHELKLAITVGIVGLPNVGKSSLINSLKRSRVVNVGSTPGITRSMQEVQLDKKVKLLDCPGVVMLKSSNSGVSVALRNCKKVEKIEDPVAPGSKLWFS

SEQ ID NO: 180420 - protein, 564 aa, Zea Mays
MLLFLPLIAVPVMCYISEPWINLAAAAAAASGKPQKASAADDDDMDPTQYYENRLKTLDSLKAAGVNPYPHKFPVGISVVEYIEKYKTLNNGEKLTDATECLAGRIMNKRTSSSKLFFYDLYGGGMKVQVMADARTSELDEAEFSKYHSSVKRGDIVGICGYPGKSNRGELSLFPKKFVVLSPCLHMMPRQKGEGSSVPVSWTPGMGRNIENYVLRDQETRYRQRYLDIMVNHEVRHIFKTRSKVVSFIRKFLDDREFLEVETPMMNMIAGGAAARPFITHHNELNMRLFMRIAPELYLKELVVGGLDRVYEIGKQFRNEGIDLTHNPEFTTCEFYMAYADYNDLMELTETMLSGMVKELTGGYKIKYHANGVTNSPIEIDFTPPFRRIDMIKDLEAMANLNIPKDLASDEANRYLIEACAKYDVKCPPPQTTSRLLDKLVGHFLEETCVNPTFIINHPEIMSPLAKWHRSRPGLTERFELFVNKHEVCNAYTELNDPVVQRQRFEEQLKDRQSGDDEAMALDETFCAALEYGLPPTGGWGLGIDRLTMLLTDSQNIKFFYFRL

SEQ ID NO: 180421 - protein, 138 aa, Zea Mays
MADDDYNEIDMGYEDEPPEPEIEEGAEEEPENNEDAPDDVIGGEGEDKEQEKTKRERKTTKYMTKYERARILGTRALQISMNAPVMVELEGETDPLEELRARKIPFTIRRYLPDGSYEDWGVDELIVEDSWKRQVGGD

SEQ ID NO: 180422 - protein, 171 aa, Zea Mays
MADDDYNEIDMGYEDEPPEPEIEEGAEEEPENNEDAPDDVIGGEGEDKEQEKTKRERKTTKYMTKYERARILGTRALQISMNAPVMVELEGETDPLEIAMKELRARKIPFTIRRYLPDGRLGSRRAHCGGLLETPGWWRLKTRIYLAWKGYVVQWVFPVVTSLRCHYEWIL

SEQ ID NO: 180423 - protein, 127 aa, Zea Mays
MADDDYNEIDMGYEDEPPEPEIEEGAEEEPENNEDAPDDVIGGEGEDKEQEKTKRERKTTKYMTNMNAPVMVELEGETDPLEIAMKELRARKIPFTIRRYLPDGSYEDWGVDELIVEDSWKRQVGGD

SEQ ID NO: 180424 - protein, 227 aa, Zea Mays
MIEAAFSSIDLESQSGAHPRIGVVDDLSFHPVGQATIEDAASLARQVASDIACIAAVPVFLYAAAHPAGKSVGAVRRELGYYRPNYRGNQWSGSVLPNVLPVKPDVGPAHVVSHKRGATTVGVTPWIENYNVPVLCKDVATVRRITRGVTGRSGGLPTVQALALFHGDDCTEIACLLDPDHASAYQVQTVVEQIAGDQGLEVEQGYYTDITKDEALDKYLKIACADD

SEQ ID NO: 180425 - protein, 244 aa, Zea Mays
MWTVPEPKEIIRRSTLEVEKMSLVDGDCAPKSAGDARDVPGEVPRTQDVIQTLDRTISNLEMELASAKATQESMLHGAAGAPVPEPTGKRKHFMVVGVNTAFSSRKRRDSVRATWMPQGEKRRTMEEEKGIVIRFVIGHSATPGGILDRAIDAEDRKHGDFMRLDHVEGYLELAAKTKAYFVAAVSTWDAEYYVKVDDDVHVNIAHCSDSWKHAGEAPLQAASLRWLHEIWPRASPEGREVPRA

SEQ ID NO: 180426 - protein, 371 aa, Zea Mays
MMQPPPPHQQQQWAMAPPPPPQYYQAGPPPPAMWGQPPPQAAAAPAPAGGGAGDEARTLWIGDLQYWMDENYLYSCFSQAGEVISVKIIRNKQTGQPEGYGFIEFSNHAVAEQVLQNYNGQMMPNVNQPFKLNWATSGAGEKRGDDGSDYTIFVGDLASDVTDFILQDTFKSRYPSFADSDEQTRAMTEMNGQYCSSRAMRLGPASNKKNTGGPQPSSAIYQNTQGTDSDSDPNNTTVFVGGLDPSVTDELLKQTFSPYGELLYVKIPVGKRCGFVQYSNRASAEEAIRVLNGSQLGGQSIRLSWGRSPANKQPQQEQSQWSGGGYYGYPQGYDPYGYARPPQDPAMYAYAAYPGYGNYQQQPPQQPPPQQ

SEQ ID NO: 180427 - protein, 206 aa, Zea Mays
MDNTVLAGPCALDQHPTRRILVDHNHRVLFTRTPKELILIAIRTILLWVSVNSAVFFKLHDGCLFSRLTSLQVFVGGLDPSVTDELLKQTFSPYGELLYVKIPVGKRCGFVQYSNRASAEEAIRVLNGSQLGGQSIRLSWGRSPANKQPQQEQSQWSGGGYYGYPQGYDPYGYARPPQDPAMYAYAAYPGYGNYQQQPPQQPPPQQ

SEQ ID NO: 180428 - protein, 98 aa, Zea Mays
MWSGDCPFFYGGLFIPDSLCISLNFRYGAKIPRDFEDYASWCRCWSQCRDVRILSVQNCNGRQPHPTTKERVNQALTCKLCLIDVEEDYERLCCLVAW

SEQ ID NO: 180429 - protein, 201 aa, Zea Mays
MMGRFPDSISNCVHLRYLNISSTTIATVPEFLCKLYHLQVLNLSGCRLGKLPSRMNNLVNLRNLTAANQIISAITDIGRLKCLQRLPTFKVTREKTQSIVQLGYLLELQGSLQIRNLENVEAPIEAKEAMLCKKRQLSVLQLMWASDRDEVNGNKEEDVLEALQPHENLKRLDIVGWMGVKSPNWLKNEWLSNLELIFLSG

SEQ ID NO: 180430 - protein, 191 aa, Zea Mays
MSSFKANPISLCFFPRCPNLHYFSLPSTCMTYDQFCKAIGGLQSLKGMAVDESLINYDVLLHVHQCCPDFVELKVSALYVDEEMASVICNSLPRLKKLEIPSCDMSSAAIIRFLDCLEQLEHLDISGYETSAISSPVLEKASRLKVFLWNSKFELGEFMDCSNCGEHNINPQEPCKCMMEHKVMDWLAGPS

SEQ ID NO: 180431 - protein, 808 aa, Zea Mays
MQSLTLCAMKELRLYENSEKALLSSTSANGTAILRVVQALSSLVSTLQDRKDPEQPAEKDHSDAVSQISEINTALDALWLELSNCISKIESSSEYASNLTPASASAATLTAGVAPPLPAGTQNRRTQGLLGRSGIRRRGAAGFGIGDGAEVARANLPEVTGAAGFAGGAQRDLAAATQSCASSPIYGDGAFASTVYPSPKRWAADLPNHQELKSKFLSRTSARRPANLMALVDAKAAGASTSTVAAAPTVEHLLFLVVLDGVETPIHEGTLYGSAGGTVTVTGPGQLSADGLESVLVRGGGTGAGAVRFTLCADAAAEGVGAACFERCGAARVEGAREVSVSSCRAVEVERAGRVTLDRCRDARLRGGGALRATRCRRADVESFGGVRLARCKAARADWCGTVEVELCRAVDVRRCGAVTGERCRVVNAAGCGSVEVARAVINMVEEEQPYPAAHPQQHCLVVSHIGVGITVGIVPITMPPLPAADDLLILEFIASNRRIPHAVFNSFIASQSPPSAFSRTSQRLRKALVLRALDAALYTVGASCSSSLLLHKARKVLADPDAAACFPHQIPFTENEENDEARAAVADLKRLLDLEWANLPPSTLELVAGDGSHQTGAAADHTMPKREILAKPVQVGSASHQSIRTQVADNASNANKADGARRDEAHPSNSNVNYEADSDRESMVGHQNASVKGAEGQLSEKSVFTSKKRVLVERIPKWDSSDDDQPVRKRKLDPFERKPYPSPTCAYKIRKKWSKIEIETLLEGVDKYGIGNWKDIKLAYPGVFEERSTVDLKDKFRNLGKRHHESS

SEQ ID NO: 180432 - protein, 713 aa, Zea Mays
MSLNRLKETLHACSSSSSEPRTQPRSPQHPARLPRRPPKTSLSQQLLRLEAAASSSSFFSSRPLQLPPAPRPPIEKPREDVEPPSSEDEDERKSRPIIRRCLHPPPAAALESRGPYEPLVLSLPGEHPVVQVPPSINCRLLAHQRDGVRFLYNLYRNNHGGVLGDDMGLGKTIQTIAFLSSVIGKGNGHGQSTNKGKMTGPVLILCPTSVIRNWENEFSEWAEFSVAVYHGPNRDLVLGKIENQGLEVLITSFDTFRIHDKVLCGISWELVVVDEAHRLKNEKSKLYTACLGITTQKRFGLTGTIMQNKIMELFNLFDWVVPGCLGDREHFRAYYDEPLKQGQRLSAPERFVQVADARKKHLVSILREFLLRRTKEETIGHLMLGKEDNIVFCKMSDVQKRVYRRMLQQPDIQILINKDVRCSCGSPLPQVECCKRTEPDGVIWSYLHRENPEGCSICPFCLVLPFLVKLQQISNHLELIKPNPKDELEKQKKDAELAAAVFGADIDLVGGTAKSENFMGLSDAENCGKMRALERLLSLWTGQGDKILLFSYSVRMLDILEKFLIRKGYCFSRFDGTTPMNARQSLVDEFNRSPSKQVFLISTRAGNLGVNLVSANRVVIFDPSWNPAQDLQAQDRSFRYGQRRHVTVFRLLGAGSLEELIYSRQIYKQQLSNIAVSGKIERRYFEGVQELDPKCYFFISASNSALMAFFQSS

SEQ ID NO: 180433 - protein, 491 aa, Zea Mays
MSLNRLKETLHACSSSSSEPRTQPRSPQHPARLPRRPPKTSLSQQLLRLEAAASSSSFFSSRPLQLPPAPRPPIEKPREDVEPPSSEDEDERKSRPIIRRCLHPPPAAALESRGPYEPLVLSLPGEHPVVQVPPSINCRLLAHQRDGVRFLYNLYRNNHGGVLGDDMMLDILEKFLIRKGYCFSRFDGTTPMNARQSLVDEFNRSPSKQVFLISTRAGNLGVNLVSANRVVIFDPSWNPAQDLQAQDRSFRYGQRRHVTVFRLLGAGSLEELIYSRQIYKQQLSNIAVSGKIERRYFEGVQDDKKFQGELFGICNLFRDLSDKLFTSEIIEMHGEHGKSSATEATGIREIVDTDLFGSQENRKSSTATTHTDDQKLVDFGIVYAHRNEDVVNMRTDGREKGGADETVQSSLEELLSKNETKHTAMEKSYSSEEKREVARSYSLEQKKKEFSCIASFMGMDDLEFSKWLLSASPHQRSEVLQDYRRKKKNQK

SEQ ID NO: 180434 - protein, 682 aa, Zea Mays
MTGPVLILCPTSVIRNWENEFSEWAEFSVAVYHGPNRDLVLGKIENQGLEVLITSFDTFRIHDKVLCGISWELVVVDEAHRLKNEKSKLYTACLGITTQKRFGLTGTIMQNKIMELFNLFDWVVPGCLGDREHFRAYYDEPLKQGQRLSAPERFVQVADARKKHLVSILREFLLRRTKEETIGHLMLGKEDNIVFCKMSDVQKRVYRRMLQQPDIQILINKDVRCSCGSPLPQVECCKRTEPDGVIWSYLHRENPEGCSICPFCLVLPFLVKLQQISNHLELIKPNPKDELEKQKKDAELAAAVFGADIDLVGGTAKSENFMGLSDAENCGKMRALERLLSLWTGQGDKILLFSYSVRMLDILEKFLIRKGYCFSRFDGTTPMNARQSLVDEFNRSPSKQVFLISTRAGNLGVNLVSANRVVIFDPSWNPAQDLQAQDRSFRYGQRRHVTVFRLLGAGSLEELIYSRQIYKQQLSNIAVSGKIERRYFEGVQDDKKFQGELFGICNLFRDLSDKLFTSEIIEMHGEHGKSSATEATGIREIVDTDLFGSQENRKSSTATTHTDDQKLVDFGIVYAHRNEDVVNMRTDGREKGGADETVQSSLEELLSKNETKHTAMEKSYSSEEKREVARSYSLEQKKKEFSCIASFMGMDDLEFSKWLLSASPHQRSEVLQDYRRKKKNQK

SEQ ID NO: 180435 - protein, 1582 aa, Zea Mays
MWSMHKSIHRYSFKAIVTNHLVLRGTYRSLTLVIYGNTAEDLGQFNIELGLDHSLANVVSSPSEGKLEDLPPALHSSKLSFEESLSSLKPSSFHATDVDLSIEAKKVLHLALKMYQISDVENLIPNLRSAVLSAISKYVTASTNHILHTLSQDSANAFINSDFDSQEINKILAEAGKELSEIWKNVHAVTESNLFNDNGFTIGVDEDLPTTKILIELFNHCFPYYKKLSLLDLQCPSQSKWLVLSLSLVLLLCSSKESCFYFVDTGGMEQIINLLCWRTPKSAATTLLLLGIVEHATRNGFGCEAFLGWWPRAEHTSIPVGSSDGYCSLLKLLLEKERHDIASLATYVLQRLRFYEILSKYESAVVKVISNIQADKLSTDGVPFLISASVELGEMLKLIIFCGPIEDPSPVATASRIFKSEHLEGLLSYKATIDLITSSKYSFLQYDTDPYLLSLIQERSFFPLSAALLSSPILHLPNGPAAEILMGIASSIESIILSLLFCRSGLSFLLSQPEATELILLSLQDAEKMNKSECITLRQAFVLLSKGFFCRPKEVGLITELHLKVGSAATRILSVPPNSDELLWVLWELCAISRSDSGRQALLALGYFPEAISVLLRSLSSYKDLDSVMAENGGSPLGLAIFHSAAEILEVLVVDSTASSLESWIGFAVDLHKALHSSSPGSNRKDAPTRLLEWIDAGVVYQRNVALCSTSVVQLTTAFRILAFISDDKPVASSLFEEGAITVIYVVLMNCKSMLERLSNSYDYLVDEGAELSSTTELLLDRTHEKAIVDLMIPSLVLLINLLHILRETKEQYRNKKLLSSLLQLHREVSPRLAACAADLSFMFPTFAIGFGVVCHLITSALACWPLYNWAPGLFHCLLENTEATNASVPLGPKAAFSLLCLLGDLFPDEGIWLWKVELPSLSAIRSLSTGAVLGPQVEKGVNWYLHPEHVTILLVRLMPQLDRLARIIDNFATSVLMVIQDMLRVFIVRVALEKIECAVVLLRPIFMWLDDKVDKTSLSERDTFKVHQLLQFTVKLSEHPTGKALLWRMGFTRILSKLLQNCSRASFPYDNQTFGRAHSKNDLMLKWRIPLFKSIAYIFSIDPCNNEKADVEESLNEKSVHECSSVMHDLMMFCQVLPVGREMLACSLAFKELVYSYTCRSAVTLILSQIHTSNKDVLEKDESDPNHNSPSLDGWNCFSSLFKCWKKLVKYVGSNERTDYLVETIYSLTLGAITLSQYGENGSLESSGESPSEIELFMKTYEEKICQGIENSATAVGKTLLRKGQTQYMLAGAGSSSANELPNVEAKLLWNTFPANRIPLETFSSGLPARPMPPLTPYSAVATQHATMNSGSPANLYSQGSVVQPSPTASIISDSNLAMNSASGSMLASNLLPSFASQFLMSRPSMPTPFFGTPLQQVQFSSGLPQNISNPQPPVSIQPRPPPPPPPPQQPHPSQTLQQLGAIQLPHQDQQHSYPHSAILPQVTLQFPNQLPIPQVQLYHQSQQESGQTLRQVGEQSQLQNQGMQADSFSQQQQDSGINLNQFFSSPEAIQSLLSDREKLCQLLEQNPKLMQMLQDRIGQL

SEQ ID NO: 180436 - protein, 2074 aa, Zea Mays
MWSMHKSIHRYSFKAIVTNHLVLRGTYRSLTLVIYGNTAEDLGQFNIELGLDHSLANVVSSPSEGKLEDLPPALHSSKLSFEESLSSLKPSSFHATDVDLSIEAKKVLHLALKMYQISDVENLIPNLRSAVLSAISKYVTASTNHILHTLSQDSANAFINSDFDSQEINKILAEAGKELSEIWKNVHAVTESNLFNDNGFTIGVDEDLPTTKILIELFNHCFPYYKKLSLLDLQCPSQSKWLVLSLSLVLLLCSSKESCFYFVDTGGMEQIINLLCWRTPKSAATTLLLLGIVEHATRNGFGCEAFLGWWPRAEHTSIPVGSSDGYCSLLKLLLEKERHDIASLATYVLQRLRFYEILSKYESAVVKVISNIQADKLSTDGVPFLISASVELGEMLKLIIFCGPIEDPSPVATASRIFKSEHLEGLLSYKATIDLITSSKYSFLQYDTDPYLLSLIQERSFFPLSAALLSSPILHLPNGPAAEILMGIASSIESIILSLLFCRSGLSFLLSQPEATELILLSLQDAEKMNKSECITLRQAFVLLSKGFFCRPKEVGLITELHLKVGSAATRILSVPPNSDELLWVLWELCAISRSDSGRQALLALGYFPEAISVLLRSLSSYKDLDSVMAENGGSPLGLAIFHSAAEILEVLVVDSTASSLESWIGFAVDLHKALHSSSPGSNRKDAPTRLLEWIDAGVVYQRNVALCSTSVVQLTTAFRILAFISDDKPVASSLFEEGAITVIYVVLMNCKSMLERLSNSYDYLVDEGAELSSTTELLLDRTHEKAIVDLMIPSLVLLINLLHILRETKEQYRNKKLLSSLLQLHREVSPRLAACAADLSFMFPTFAIGFGVVCHLITSALACWPLYNWAPGLFHCLLENTEATNASVPLGPKAAFSLLCLLGDLFPDEGIWLWKVELPSLSAIRSLSTGAVLGPQVEKGVNWYLHPEHVTILLVRLMPQLDRLARIIDNFATSVLMVIQDMLRVFIVRVALEKIECAVVLLRPIFMWLDDKVDKTSLSERDTFKVHQLLQFTVKLSEHPTGKALLWRMGFTRILSKLLQNCSRASFPYDNQTFGRAHSKNDLMLKWRIPLFKSIAYIFSIDPCNNEKADVEESLNEKSVHECSSVMHDLMMFCQVLPVGREMLACSLAFKELVYSYTCRSAVTLILSQIHTSNKDVLEKDESDPNHNSPSLDGWNCFSSLFKCWKKLVKYVGSNERTDYLVETIYSLTLGAITLSQYGENLEGLLILRYLFGLPSDPSGSLESSGESPSEIELFMKTYEEKICQGIENSATAVGKTLLRKLLNSIKLLRSILENSGQSADTVQMVLEEGTDSLSEIARSVVMTAHLMPSLANVSVNDESPFLFSNMWKVIVDSEEPLDCQEGEFAKRLVWELPDSSLDRQLAPGQSARRKLALGESASRRVRDNQLPEPTGQFSRGLNTSNASSGHTRRDTFRQRKPNTSRPPSMHVDDYVARERNIDGASSASNIVNSTPRGTLSGRPPSIHVDEFMARQRERQNHAPAPTGDAPQAKSQTTSLDDSLRTKPENLRQPKTDLDDDQEIEIVFDEESGSDDKLPFPQPDDSLQSPPVIIGENSPGPVIDETENQENERVPFFQRATSIPKDDENLGIGISSQTAMLSEANSSLELKHSVSSPGKNSFRDHAEESNYDSIGVSGRPSLQADHQQLSRRHEKRSPRKFSETSLSNGFHGREHRHSNNHPPLPPMPPPISSVSMQNTDSVNRQSSSFSARDRPTPNPSGYPTQSFDSSMPSAFTGLQGQTQYMLAGAGSSSANELPNVEAKLLWNTFPANRIPLETFSSGLPARPMPPLTPYSAVATQHATMNSGSPANLYSQGSVVQPSPTASIISDSNLAMNSASGSMLASNLLPSFASQFLMSRPSMPTPFFGTPLQQVQFSSGLPQNISNPQPPVSIQPRPPPPPPPPQQPHPSQTLQQLGAIQLPHQDQQHSYPHSAILPQVTLQFPNQLPIPQVQLYHQSQQESGQTLRQVGEQSQLQNQGMQADSFSQQQQDSGINLNQFFSSPEAIQSLLSDREKLCQLLEQNPKLMQMLQDRIGQL

SEQ ID NO: 180437 - protein, 1324 aa, Zea Mays
MWSMHKSIHRYSFKAIVTNHLVLRGTYRSLTLVIYGNTAEDLGQFNIELGLDHSLANVVSSPSEGKLEDLPPALHSSKLSFEESLSSLKPSSFHATDVDLSIEAKKVLHLALKMYQISDVENLIPNLRSAVLSAISKYVTASTNHILHTLSQDSANAFINSDFDSQEINKILAEAGKELSEIWKNVHAVTESNLFNDNGFTIGVDEDLPTTKILIELFNHCFPYYKKLSLLDLQCPSQSKWLVLSLSLVLLLCSSKESCFYFVDTGGMEQIINLLCWRTPKSAATTLLLLGIVEHATRNGFGCEAFLGWWPRAEHTSIPVGSSDGYCSLLKLLLEKERHDIASLATYVLQRLRFYEILSKYESAVVKVISNIQADKLSTDGVPFLISASVELGEMLKLIIFCGPIEDPSPVATASRIFKSEHLEGLLSYKATIDLITSSKYSFLQYDTDPYLLSLIQERSFFPLSAALLSSPILHLPNGPAAEILMGIASSIESIILSLLFCRSGLSFLLSQPEATELILLSLQDAEKMNKSECITLRQAFVLLSKGFFCRPKEVGLITELHLKVGSAATRILSVPPNSDELLWVLWELCAISRSDSGRQALLALGYFPEAISVLLRSLSSYKDLDSVMAENGGSPLGLAIFHSAAEILEVLVVDSTASSLESWIGFAVDLHKALHSSSPGSNRKDAPTRLLEWIDAGVVYQRNVALCSTSVVQLTTAFRILAFISDDKPVASSLFEEGAITVIYVVLMNCKSMLERLSNSYDYLVDEGAELSSTTELLLDRTHEKAIVDLMIPSLVLLINLLHILRETKEQYRNKKLLSSLLQLHREVSPRLAACAADLSFMFPTFAIGFGVVCHLITSALACWPLYNWAPGLFHCLLENTEATNASVPLGPKAAFSLLCLLGDLFPDEGIWLWKVELPSLSAIRSLSTGAVLGPQVEKGVNWYLHPEHVTILLVRLMPQLDRLARIIDNFATSVLMVIQDMLRVFIVRVALEKIECAVVLLRPIFMWLDDKVDKTSLSERDTFKVHQLLQFTVKLSEHPTGKALLWRMGFTRILSKLLQNCSRASFPYDNQTFGRAHSKNDLMLKWRIPLFKSIAYIFSIDPCNNEKADVEESLNEKSVHECSSVMHDLMMFCQVLPVGREMLACSLAFKELVYSYTCRSAVTLILSQIHTSNKDVLEKDESDPNHNSPSLDGWNCFSSLFKCWKKLVKYVGSNERTDYLVETIYSLTLGAITLSQYGENLEGLLILRYLFGLPSDPSGSLESSGESPSEIELFMKTYEEKICQGIENSATAVGKTLLRKIQFRWFLKKALTHCLKLLALLL

SEQ ID NO: 180438 - protein, 1828 aa, Zea Mays
MWSMHKSIHRYSFKAIVTNHLVLRGTYRSLTLVIYGNTAEDLGQFNIELGLDHSLANVVSSPSEGKLEDLPPALHSSKLSFEESLSSLKPSSFHATDVDLSIEAKKVLHLALKMYQISDVENLIPNLRSAVLSAISKYVTASTNHILHTLSQDSANAFINSDFDSQEINKILAEAGKELSEIWKNVHAVTESNLFNDNGFTIGVDEDLPTTKILIELFNHCFPYYKKLSLLDLQCPSQSKWLVLSLSLVLLLCSSKESCFYFVDTGGMEQIINLLCWRTPKSAATTLLLLGIVEHATRNGFGCEAFLGWWPRAEHTSIPVGSSDGYCSLLKLLLEKERHDIASLATYVLQRLRFYEILSKYESAVVKVISNIQADKLSTDGVPFLISASVELGEMLKLIIFCGPIEDPSPVATASRIFKSEHLEGLLSYKATIDLITSSKYSFLQYDTDPYLLSLIQERSFFPLSAALLSSPILHLPNGPAAEILMGIASSIESIILSLLFCRSGLSFLLSQPEATELILLSLQDAEKMNKSECITLRQAFVLLSKGFFCRPKEVGLITELHLKVGSAATRILSVPPNSDELLWVLWELCAISRSDSGRQALLALGYFPEAISVLLRSLSSYKDLDSVMAENGGSPLGLAIFHSAAEILEVLVVDSTASSLESWIGFAVDLHKALHSSSPGSNRKDAPTRLLEWIDAGVVYQRNVALCSTSVVQLTTAFRILAFISDDKPVASSLFEEGAITVIYVVLMNCKSMLERLSNSYDYLVDEGAELSSTTELLLDRTHEKAIVDLMIPSLVLLINLLHILRETKEQYRNKKLLSSLLQLHREVSPRLAACAADLSFMFPTFAIGFGVVCHLITSALACWPLYNWAPGLFHCLLENTEATNASVPLGPKAAFSLLCLLGDLFPDEGIWLWKVELPSLSAIRSLSTGAVLGPQVEKGVNWYLHPEHVTILLVRLMPQLDRLARIIDNFATSVLMVIQDMLRVFIVRVALEKIECAVVLLRPIFMWLDDKVDKTSLSERDTFKVHQLLQFTVKLSEHPTGKALLWRMGFTRILSKLLQNCSRASFPYDNQTFGRAHSKNDLMLKWRIPLFKSIAYIFSIDPCNNEKADVEESLNEKSVHECSSVMHDLMMFCQVLPVGREMLACSLAFKELVYSYTCRSAVTLILSQIHTSNKDVLEKDESDPNHNSPSLDGWNCFSSLFKCWKKLVKYVGSNERTDYLVETIYSLTLGAITLSQYGENLEGLLILRYLFGLPSDPSGSLESSGESPSEIELFMKTYEEKICQGIENSATAVGKTLLRKLLNSIKLLRSILENSGQSADTVQMVLEEGTDSLSEIARSVVMTAHLMPSLANVSVNDESPFLFSNMWKVIVDSEEPLDCQEGEFAKRLVWELPDSSLDRQLAPGQSARRKLALGESASRRVRDNQLPEPTGQFSRGLNTSNASSGHTRRDTFRQRKPNTSRPPSMHVDDYVARERNIDGASSASNIVNSTPRGTLSGRPPSIHVDEFMARQRERQNHAPAPTGDAPQAKSQTTSLDDSLRTKPENLRQPKTDLDDDQEIEIVFDEESGSDDKLPFPQPDDSLQSPPVIIGENSPGPVIDETENQENERVPFFQRATSIPKDDENLGIGISSQTAMLSEANSSLELKHSVSSPGKNSFRDHAEESNYDSIGVSGRPSLQADHQQLSRRHEKRSPRKFSETSLSNGFHGREHRHSNNHPPLPPMPPPISSVSMQNTDSVNRQSSSFSARDRPTPNPSGYPTQSFDSSMPSAFTGLQGQTQYMLAGAGSSSANELPNVEAKLLWNTFPANRIPLETFSSGIWANTEASW

SEQ ID NO: 180439 - protein, 744 aa, Zea Mays
MVLEEGTDSLSEIARSVVMTAHLMPSLANVSVNDESPFLFSNMWKVIVDSEEPLDCQEGEFAKRLVWELPDSSLDRQLAPGQSARRKLALGESASRRVRDNQLPEPTGQFSRGLNTSNASSGHTRRDTFRQRKPNTSRPPSMHVDDYVARERNIDGASSASNIVNSTPRGTLSGRPPSIHVDEFMARQRERQNHAPAPTGDAPQAKSQTTSLDDSLRTKPENLRQPKTDLDDDQEIEIVFDEESGSDDKLPFPQPDDSLQSPPVIIGENSPGPVIDETENQENERVPFFQRATSIPKDDENLGIGISSQTAMLSEANSSLELKHSVSSPGKNSFRDHAEESNYDSIGVSGRPSLQADHQQLSRRHEKRSPRKFSETSLSNGFHGREHRHSNNHPPLPPMPPPISSVSMQNTDSVNRQSSSFSARDRPTPNPSGYPTQSFDSSMPSAFTGLQGQTQYMLAGAGSSSANELPNVEAKLLWNTFPANRIPLETFSSGLPARPMPPLTPYSAVATQHATMNSGSPANLYSQGSVVQPSPTASIISDSNLAMNSASGSMLASNLLPSFASQFLMSRPSMPTPFFGTPLQQVQFSSGLPQNISNPQPPVSIQPRPPPPPPPPQQPHPSQTLQQLGAIQLPHQDQQHSYPHSAILPQVTLQFPNQLPIPQVQLYHQSQQESGQTLRQVGEQSQLQNQGMQADSFSQQQQDSGINLNQFFSSPEAIQSLLSDREKLCQLLEQNPKLMQMLQL

SEQ ID NO: 180440 - protein, 188 aa, Zea Mays
MVELLRSPGSMAKACDELATVIGPRKDIEESDIGRLPYLQAVVKETFRLHPAAPLLLPRRAQADVKMMGYVIPEGSRVFVNVWAMGRDEETWPEPEKFLPERFLGKKTQQAVDLRGGDFDLIPFGGGRRICPGMPLAIRMVHLLLASLLNQFAWRLPAELERNGVDMAENFGITLTKAVPLCAIATEI

SEQ ID NO: 180441 - protein, 111 aa, Zea Mays
MDGELRQAQQTRLHDERRHGVEAAGRPRPSPHQRGRRTTKRGVGRRYQAGELERVRWSSDRWSVERVRKQLKARKSSSSAQASVRRELASGLSIWELSTRYKAKASAMRYA

SEQ ID NO: 180442 - protein, 633 aa, Zea Mays
MAASLLLRAVRRRELASPLGSLGASIQSTCVANVCSKWGSFARPFSAKAAGNEVIGIDLGTTNSCVSVMEGKNPKVIENAEGARTTPSVVAFTQKGERLVGTPAKRQAVTNPQNTFFGTKRLIGRRFDDPQTQKEMKMVPYTIVKAPNGDAWVQTTDGKQYSPSQVGAFVLTKMKETAESYLGKSISKAVITVPAYFNDAQRQATKDAGRIAGLDVERIINEPTAAALSYGMNNKEGLIAVFDLGGGTFDISILEISNGVFEVKATNGDTFLGGEDFDNTLLEFLVSDFKRTEGIDLSKDRLALQRLREAAEKAKVELSSTSQTEINLPFITADASGAKHLNITLTRSKFESLVHNLIERTRDPCKNCLKDAGISTKEVDEVLLVGGMTRVPKVQEVVSEIFGKNPSKGVNPDEAVAMGAALQGGILRGDVKELLLLDVTPLSLGIETLGGIFTRLINRNTTIPTKKSQVFSTAADNQTQVGIRVLQAKDKATGKEQNITIRSSGGLSEADIQKMVQEAELHAQKDQERKALIDIRNNADTTIYSIEKSLGEYRDKIPAEVASEIEAAIADLRQEMASDDIEKIKAKLEAANKAVSKIGQHMSGGGSGGSQSGSGPQGGGDQAPEAEYEEVKK

SEQ ID NO: 180443 - protein, 687 aa, Zea Mays
MAASLLLRAVRRRELASPLGSGLSQMYLFQLGASIQSTCVANVCSKWGSFARPFSAKAAGNEVIGIDLGTTNSCVSVMEGKNPKVIENAEGARTTPSVVAFTQKGERLVGTPAKRQAVTNPQNTFFGTKRLIGRRFDDPQTQKEMKMVPYTIVKAPNGDAWVQTTDGKQYSPSQVGAFVLTKMKETAESYLGKSISKAVITVPAYFNDAQRQATKDAGRIAGLDVERIINEPTAAALSYGMNNKEGLIAVFDLGGGTFDISILEISNGVFEVKATNGDTFLGGEDFDNTLLEFLVSDFKRTEGIDLSKDRLALQRLREAAEKAKVELSSTSQTEINLPFITADASGAKHLNITLTRSKFESLVHNLIERTRDPCKNCLKDAGISTKEVDEVLLVGGMTRVPKVQEVVSEIFGKNPSKGVNPDEAVAMGAALQGGILRGDVKELLLLDVTPLSLGIETLGGIFTRLINRNTTIPTKKSQVFSTAADNQTQVGIRVLQGEREMATDNKLLGEFDLVGIPPAPRGLPQIEVTFDIDANGIVTVSAKDKATGKEQNITIRSSGGLSEADIQKMVQEAELHAQKDQERKALIDIRNNADTTIYSIEKSLGEYRDKIPAEVASEIEAAIADLRQEMASDDIEKIKAKLEAANKAVSKIGQHMSGGGSGGSQSGSGPQGGGDQAPEAEYEEVKK

SEQ ID NO: 180444 - protein, 610 aa, Zea Mays
MEGKNPKVIENAEGARTTPSVVAFTQKGERLVGTPAKRQAVTNPQNTFFGTKRLIGRRFDDPQTQKEMKMVPYTIVKAPNGDAWVQTTDGKQYSPSQVGAFVLTKMKETAESYLGKSISKAVITVPAYFNDAQRQATKDAGRIAGLDVERIINEPTAAALSYGMNNKEGLIAVFDLGGGTFDISILEISNGVFEVKATNGDTFLGGEDFDNTLLEFLVSDFKRTEGIDLSKDRLALQRLREAAEKAKVELSSTSQTEINLPFITADASGAKHLNITLTRSKFESLVHNLIERTRDPCKNCLKDAGISTKEVDEVLLVGGMTRVPKVQEVVSEIFGKNPSKGVNPDEAVAMGAALQGGILRGDVKELLLLDVTPLSLGIETLGGIFTRLINRNTTIPTKKSQVFSTAADNQTQVGIRVLQGEREMATDNKLLGEFDLVGIPPAPRGLPQIEVTFDIDANGIVTVSAKDKATGKEQNITIRSSGGLSEADIQKMVQEAELHAQKDQERKALIDIRNNADTTIYSIEKSLGEYRDKIPAEVASEIEAAIADLRQEMASDDIEKIKAKLEAANKAVSKIGQHMSGGGSGGSQSGSGPQGGGDQAPEAEYEEVKK

SEQ ID NO: 180445 - protein, 291 aa, Zea Mays
MTRVPKVQEVVSEIFGKNPSKGVNPDEAVAMGAALQGGILRGDVKELLLLDVTPLSLGIETLGGIFTRLINRNTTIPTKKSQVFSTAADNQTQVGIRVLQGEREMATDNKLLGEFDLVGIPPAPRGLPQIEVTFDIDANGIVTVSAKDKATGKEQNITIRSSGGLSEADIQKMVQEAELHAQKDQERKALIDIRNNADTTIYSIEKSLGEYRDKIPAEVASEIEAAIADLRQEMASDDIEKIKAKLEAANKAVSKIGQHMSGGGSGGSQSGSGPQGGGDQAPEAEYEEVKK

SEQ ID NO: 180446 - protein, 497 aa, Zea Mays
MPKSHYAASPPPHPPPLLPLALVPPRQCPLVAALLALLSVLLATALWLLLVLSPSQGATPAASERSVLPDAGAAAAAGPGAASPLSLGHIVFGIAGSAHLWPRRREYVRLWWDPAAMRGNVWLDAGAPAAPGPSAPWEGSLPPIRVSEDTSRFRYTNPTGHPSGLRIARIAAEAVRLVGRGAGARWLVLVDDDTVLCADNLVAVLSKYDWTEMVYVGAPSESHSANTYFSHSMAFGGGGVALSFPLAAALAQTLDVCIERYPKLYGSDDRLHACITELGVPLSREYGFHQWDIRGNSHGLLASHPIAPFISIHHVELVDPIYPGLNSLESLELFTKAMKMEPMSFLQRSICYDQSQKLTFAISLGYVVEVYPNVLLPRDLERSQRTYVAYNRMSQRNEFDFDTRDVQKSLCKKPILFFLKDVWKDGNITRGSYARSSARDDLKRKVFCFRSPPLPDIDEIQVSSSPLSKRWHLLLTEETLQKRQAGNFRFGISVVGV

SEQ ID NO: 180447 - protein, 545 aa, Zea Mays
MPMTTTVGYPSISTSNTEDDYTDEDDSDDEGTEELVGGGADDQRRKRKRVSDGSGKMMRFFEGLMKHVMDRQEAMQQRFLEAIEKREQDRMIREEAWRRQEMTRLAREQEILAQERSMAASRDAAVLSFIQKITGQTIPMPSIAAPTINAMPPPSHPKPPPPPQPHPTPIASVSPAPPPPQPPASQTPPPQQQKSPMPATPQTPAPQRQSTDIVMTPAETTPHADTQGHEGSGGGATSSRWPKAEVHALIQLRSTLDTRYQETGPKGPLWEEISAGMRGMGYNRNAKRCKEKWENINKYFKKVKESNKKRPEDSKTCPYFHQLDALYRNKAAITSSSGAGAMVHANASSAPQEMVTVTAATPISQTPPPPTQPSQSHHAAKNGGSSNSAGTGTGNGSYASEHGSRGMQTQASNGSAAASMFVGLGGGAASAAKKPEEIMKEMIEQRQPQQPQAVVGGYNRMDGAGSNNMDDDDDDDEDDYDENDNDEDDAGNKMQYEIQFQHHHQHPNVVRSNAGAGGGNPPGTTAPSTAAAPTTTAGSFLGMVQ

SEQ ID NO: 180448 - protein, 803 aa, Zea Mays
MSSRPSSSSSRRSSSPFSAGHRRPPTASSSSSSSYFSSGRLIPRSSSSSVSSSFYGGGGGGSTRSTTPSRRSSSVAPALPPSPVPFPSADELVIEDTSRSGDSISVTIRFRPLSEREFQRGDEISWYPDGDRLVRCDYNPPTAYAYDRVFGPSTSTEAVYDVAARPVVKGAMEGINGTVFAYGVTSSGKTHTMHGDQNCPGIIPLAIKDVFSMIQDSPGREFLLRVSYLEIYNEVINDLLDPTGQNLRVREDAQGTYVEGIKEEVVLSPGHALSFIAAGEEHRHVGSNNFNLFSSRSHTIFTLMIESSARGDEYDGAMYSQLNLIDLAGSESSKTETTGLRRREGSYINKSLLTLGTVIGKLSEGRATHIPYRDSKLTRLLQSSLSGHGHVSLICTITPASSNMEETHNTLKFASRAKRVEIYASRNRIIDEKSLIKKYQKEISSLKQELDQLRRGMIGGASREEILSLRQQLEAGQVKMQSRLEEEEEAKAALMSRIQRLTKLILVSTKNNIPALTDGHQSHNSLSEQDKLITSQDSSTLVQTEGTTKDPLSSALPDSLDEINQLRSGTGEQSSVTGSATDSMQVGFTASDHMDLLIEQIKMLAGEVAFGTSSLKRLIEQSIDDPEATKDQIENLEREIQQKRRHMRALEKQIMESGEASVANASMMDMQQTITKLTAQCSEKAFDLELKSADNRVLQEQLHQKNLEIYDLQEKVLRVEQQLSAKVDISPEKETDCAQQETIDLKSKLQSKVLLLIMFFHFVYLSPLCSIPVQFDILVSIEYLWFGYILSVILLDRNSMHVH

SEQ ID NO: 180449 - protein, 734 aa, Zea Mays
MSSRPSSSSSRRSSSPFSAGHRRPPTASSSSSSSYFSSGRLIPRSSSSSVSSSFYGGGGGGSTRSTTPSRRSSSVAPALPPSPVPFPSADELVIEDTSRSGDSISVTIRFRPLSEREFQRGDEISWYPDGDRLVRCDYNPPTAYAYDRVFGPSTSTEAVYDVAARPVVKGAMEGINGTVFAYGVTSSGKTHTMHGDQNCPGIIPLAIKDVFSMIQDLITSQDSSTLVQTEGTTKDPLSSALPDSLDEINQLRSGTGEQSSVTGSATDSMQVGFTASDHMDLLIEQIKMLAGEVAFGTSSLKRLIEQSIDDPEATKDQIENLEREIQQKRRHMRALEKQIMESGEASVANASMMDMQQTITKLTAQCSEKAFDLELKSADNRVLQEQLHQKNLEIYDLQEKVLRVEQQLSAKVDISPEKETDCAQQETIDLKSKLQSKEAEIEKLKYEHLKISEEHCDLINQNHKLSEEAAYAKELASSAAVELKNLAEEVTKLSVLNAKQAKELLVAQEMAHSRVHGRKGRTASRGRDEVGTWSLDLEDMKMELQARRQREAALEAALAEKELLEEEYKKKFDEAKKKELSLENDLAGMWVLVAKLKRGALGISDLNVDDRTVNLADITNSTKENKGGKNFALVEKQASEDSVKSLSSEEHTSPEFEPLLVRLKAKIQEMKEKDIDPLTDKDGNSHVCKVCFESAAAAVLLPCRHFCLCKPCSLACSECPLCRTRIADRIITFT

SEQ ID NO: 180450 - protein, 909 aa, Zea Mays
MSSQHEMDRVFGPSTSTEAVYDVAARPVVKGAMEGINGTVFAYGVTSSGKTHTMHGDQNCPGIIPLAIKDVFSMIQDSPGREFLLRVSYLEIYNEVINDLLDPTGQNLRVREDAQGTYVEGIKEEVVLSPGHALSFIAAGEEHRHVGSNNFNLFSSRSHTIFTLMIESSARGDEYDGAMYSQLNLIDLAGSESSKTETTGLRRREGSYINKSLLTLGTVIGKLSEGRATHIPYRDSKLTRLLQSSLSGHGHVSLICTITPASSNMEETHNTLKFASRAKRVEIYASRNRIIDEKSLIKKYQKEISSLKQELDQLRRGMIGGASREEILSLRQQLEAGQVKMQSRLEEEEEAKAALMSRIQRLTKLILVSTKNNIPALTDGHQSHNSLSEQDLITSQDSSTLVQTEGTTKDPLSSALPDSLDEINQLRSGTGEQSSVTGSATDSMQVGFTASDHMDLLIEQIKMLAGEVAFGTSSLKRLIEQSIDDPEATKDQIENLEREIQQKRRHMRALEKQIMESGEASVANASMMDMQQTITKLTAQCSEKAFDLELKSADNRVLQEQLHQKNLEIYDLQEKVLRVEQQLSAKVDISPEKETDCAQQETIDLKSKLQSKEAEIEKLKYEHLKISEEHCDLINQNHKLSEEAAYAKELASSAAVELKNLAEEVTKLSVLNAKQAKELLVAQEMAHSRVHGRKGRTASRGRDEVGTWSLDLEDMKMELQARRQREAALEAALAEKELLEEEYKKKFDEAKKKELSLENDLAGMWVLVAKLKRGALGISDLNVDDRTVNLADITNSTKENKGGKNFALVEKQASEDSVKSLSSEEHTSPEFEPLLVRLKAKIQEMKEKDIDPLTDKDGNSHVCKVCFESAAAAVLLPCRHFCLCKPCSLACSECPLCRTRIADRIITFT

SEQ ID NO: 180451 - protein, 145 aa, Zea Mays
MAAAVTLLRLPLARLSYHLRSVPSSRLPSPRLRIFASHRLFSSLDHGSASASASAAVAEVVGVPDAEESVEEESAAEAEAEAPRSFVLPRLPRPKLSVKERKELASYAHGLGKKLKSQQVGKSGVTPNLVSAFSDNLESNELLKA

SEQ ID NO: 180452 - protein, 310 aa, Zea Mays
MKIIDFGLSDFIRPDERLNDIVGSAYYVAPEVLHRSYSTEADMWSIGVITYILLCGSRPFWARTESGIFRSVLRADPNFEDSPWQSVSPEAKDFVKRLLNKDYRKRMTAAQALSHPWLRDEQQQIPLDMLVFKLVKAYLVSTPLKRAALKALSRAITQDELIYIRAQYNLLEPNSADGRICIDNFRMALLQNCTDAMKESRTLEILHALEPLAYRRMDFEEFRAATISPYQLEAVPRWEEIASTAFGYFEQEGNRAITIEELAQEMNLSAAAYSVVRDWIRPSDGKLSFLGYTKFLHGLTMRSGNARRHH

SEQ ID NO: 180453 - protein, 314 aa, Zea Mays
MGQCYARNVHGVDADDGGVGATTITVSAAGGPEDAASVGGGGGRGGGRRSARPSPATSVSTPRRFFRRPFPPPSPAKHIKASLARRLGHRSPASASQVPMPPVEVPIQEHGAGGAGGGAGQRELDKSFGYDRQFAAKYELGKEVGRGHFGHTCLVRARKGDMRGQVLAVKMTTAISIEDVRREVKILKALSGHSNLVKFYDACEDALNVYIIMELCEGGELLDRILSRGGRYNEGDAKIIVEQILKVVAFCHLQGVVHRDLKPENFLFSTREEHSPMKIIDFGLSDFIRPDERLNDIVGSAYYVAPEVLHSAES

SEQ ID NO: 180454 - protein, 569 aa, Zea Mays
MGQCYARNVHGVDADDGGVGATTITVSAAGGPEDAASVGGGGGRGGGRRSARPSPATSVSTPRRFFRRPFPPPSPAKHIKASLARRLGHRSPASASQVPMPPVEVPIQEHGAGGAGGGAGQRELDKSFGYDRQFAAKYELGKEVGRGHFGHTCLVRARKGDMRGQVLAVKVISKAKMTTAISIEDVRREVKILKALSGHSNLVKFYDACEDALNVYIIMELCEGGELLDRILSRGGRYNEGDAKIIVEQILKVVAFCHLQGVVHRDLKPENFLFSTREEHSPMKIIDFGLSDFIRPDERLNDIVGSAYYVAPEVLHRPFWARTESGIFRSVLRADPNFEDSPWQSVSPEAKDFVKRLLNKDYRKRMTAAQALSHPWLRDEQQQIPLDMLVFKLVKAYLVSTPLKRAALKALSRAITQDELIYIRAQYNLLEPNSADGRICIDNFRMALLQNCTDAMKESRTLEILHALEPLAYRRMDFEEFRAATISPYQLEAVPRWEEIASTAFGYFEQEGNRAITIEELAQEMNLSAAAYSVVRDWIRPSDGKLSFLGYTKFLHGLTMRSGNARRHH

SEQ ID NO: 180455 - protein, 311 aa, Zea Mays
MGQCYARNVHGVDADDGGVGATTITVSAAGGPEDAASVGGGGGRGGGRRSARPSPATSVSTPRRFFRRPFPPPSPAKHIKASLARRLGHRSPASASQVPMPPVEVPIQEHGAGGAGGGAGQRELDKSFGYDRQFAAKYELGKEVGRGHFGHTCLVRARKGDMRGQVLAVKVISKAKMTTAISIEDVRREVKILKALSGHSNLVKFYDACEDALNVYIIMELCEGGELLDRILSRGGRYNEGDAKIIVEQILKVVAFCHLQGVVHRDLKPENFLFSTREEHSPMKIIDFGLSDFIRPGHSGHELNQVFSAQC

SEQ ID NO: 180456 - protein, 684 aa, Zea Mays
MGLLPIHRIILLCFCSSSLLLPPPVSSDSRILPNKPLTVGSTLTSDDGTFALGFFSPSNPDKKHYYYVGIWYANIPKDNVVWVANRGTPIITDPSSATLALTNTSDLVLSSADGQTLWMANTSAAASSEPETTAGEATLDNTGNFILWSSQGAVLWQSFDYPADTLLPGMKFRVTHRRHALQQLVSWKGPQDPAPGSFSYGADPDELLQRFVRNGSRPYWRSPVLNSYLVARSYIGILKSTIYLTISKYDDGEVYMSFGVPGGSSSSTAMKIKMDYSGKIEILIWNTNILEWYVLEAQPMNECSTYGYCGPFGYCDNTELNATCKCLDSFEPISNEGRSNGSFTEGCRRKETLRCGEEDTSFLTLADMKIPDEFVHVKNRSFDGCTAECASNCSCTGYAYANFSTTAFTGDDTRCLLWMGDLIDTAKRTGDGENLYLRVNRSNKKRRSNILKITLPAVSSLLILVFMWFVWICYSRVKERNKKTWKKVVSGVLGTSDELEDANLPCISFREIVLATNNFSSSNMLGHGGFGHVYKGTLECGKAIAVKRLSKGSGQGVLEFRNEVILIAKLQHRNLVKLLGFCIHGDEKLLIYEYLSNKSLDAFLFNSTRKPSLDWSKRFNIILGIARGLLYLHQDSRLKIIHRDLKANNILLDDEMNPRISDFGMARIFYGNQQQGNTNRVVGT

SEQ ID NO: 180457 - protein, 455 aa, Zea Mays
MDPETKELYFRSQSQEDEILLLRKKIAEASLKELSLLSEKHILERRLTDLRMAVDEKQEEAISGALKQLNQKKTHLEDNMRLANELKVEEEELYFFTSSLLSMLAEYNIRPPQINASTITIGTKRLYQQMHWKLKSLNDNLGDMPQPGNIYNSSHQQQQVTLPRNEASPSYNMVSNKNALQQYAQGPSDRHIEQMYHGSSFQQDTGGTTPSNYFEEGRVDGGSQLYPSDGDALPGIEGFQIAGEPRPGCQLTACGFPTNGTTLCNFQWVRHLENGIKQSIEGATMYDYVVTADDVGTLLAVDCTPMDDNGRQGDLVTEFANNGNKITCDPEMQSHIDACISKGRAEFEVFVLAYSPEEWELATLVLTRPNYQIKFKQTGNVVIDEKYSQSLQTKIPNGRTTQFVLITAGTTLPFNTQGISEPNNEDYDVRLRDLIVLVMRTFQKKALDAKRKGKA

SEQ ID NO: 180458 - protein, 347 aa, Zea Mays
MRDPFDAPVDLINVDHNGGYQLSRTGAVSAGDHGLQNGGPKSLAPNSDTVVRHQLQGASLHKDLALEDPNTRIMDPETKELYFRSQSQEDEILLLRKKIAEASLKELSLLSEKHILERRLTDLRMAVDEKQEEAISGALKQLNQKKTHLEDNMRLANELKVEEEELYFFTSSLLSMLAEYNIRPPQINASTITIGTKDNLGDMPQPGNIYNSSHQQQQVTLPRNEASPSYNMVSNKNALQQYAQGPSDRHIEQMYHGSSFQQDTGGTTPSNYFEEGRVDGGSQLYPSDGDALPGIEGFQIAGEPRPGCQLTACGFPTNGTTLCNFQWVRHLENGIKQSIEGKVGNFS

SEQ ID NO: 180459 - protein, 230 aa, Zea Mays
MRDPFDAPVDLINVDHNGGYQLSRTGAVSAGDHGLQNGGPKSLAPNSDTVVSRHQLQGASLHKDLALEDPNTRIMDPETKELYFRSQSQEDEILLLRKKIAEASLKELSLLSEKHILERRLTDLRMAVDEKQEEAISGALKQLNQKKTHLEDNMRLANELKVEEEELYFFTSSLLSMLAEYNIRPPQINASTITIGTKRLYQQMHWKLKSLNVICLNLETFITPVISNSK

SEQ ID NO: 180460 - protein, 170 aa, Zea Mays
MRDPFDAPVDLINVDHNGGYQLSRTGAVSAGDHGLQNGGPKSLAPNSDTVVRHQLQGASLHKDLALEDPNTRIMDPETKELYFRSQSQEDEILLLRKKIAEASLKELSLLSEKHILERRLTDLRMAVDEKQEEAISGALKQLNQKKTHLEDNMRLANELKVWCYCTFQEC

SEQ ID NO: 180461 - protein, 229 aa, Zea Mays
MRDPFDAPVDLINVDHNGGYQLSRTGAVSAGDHGLQNGGPKSLAPNSDTVVRHQLQGASLHKDLALEDPNTRIMDPETKELYFRSQSQEDEILLLRKKIAEASLKELSLLSEKHILERRLTDLRMAVDEKQEEAISGALKQLNQKKTHLEDNMRLANELKVEEEELYFFTSSLLSMLAEYNIRPPQINASTITIGTKRLYQQMHWKLKSLNVICLNLETFITPVISNSK

SEQ ID NO: 180462 - protein, 345 aa, Zea Mays
MLAEYNIRPPQINASTITIGTKRLYQQMHWKLKSLNDNLGDMPQPGNIYNSSHQQQQVTLPRNEASPSYNMVSNKNALQQYAQGPSDRHIEQMDTGGTTPSNYFEEGRVDGGSQLYPSDGDALPGIEGFQIAGEPRPGCQLTACGFPTNGTTLCNFQWVRHLENGIKQSIEGATMYDYVVTADDVGTLLAVDCTPMDDNGRQGDLVTEFANNGNKITCDPEMQSHIDACISKGRAEFEVFVLAYSPEEWELATLVLTRPNYQIKFKQTGNVVIDEKYSQSLQTKIPNGRTTQFVLITAGTTLPFNTQGISEPNNEDYDVRLRDLIVLVMRTFQKKALDAKRKGKA

SEQ ID NO: 180463 - protein, 182 aa, Zea Mays
MSINSMRFPYKWYYPLQFPDDVGTLLAVDCTPMDDNGRQGDLVTEFANNGNKITCDPEMQSHIDACISKGRAEFEVFVLAYSPEEWELATLVLTRPNYQIKFKQTGNVVIDEKYSQSLQTKIPNGRTTQFVLITAGTTLPFNTQGISEPNNEDYDVRLRDLIVLVMRTFQKKALDAKRKGKA

SEQ ID NO: 180464 - protein, 346 aa, Zea Mays
MLAEYNIRPPQINASTITIGTKRLYQQMHWKLKSLNDNLGDMPQPGNIYNSSHQQQQVTLPRNEASPSYNMVSNKNALQQYAQGPSDRHIEQMDTGGTTPSNYFEEGRVDGGSQLYPSDGDALPGIEGFQIAGEPRPGCQLTACGFPTNGTTLCNFQWVRHLENGIKQSIEGATMYDYVVTADDVGTLLAVDCTPMDDNGRQGDLVTEFANNGNKITCDPEMQSHIDACISKGRAEFEVFVLQAYSPEEWELATLVLTRPNYQIKFKQTGNVVIDEKYSQSLQTKIPNGRTTQFVLITAGTTLPFNTQGISEPNNEDYDVRLRDLIVLVMRTFQKKALDAKRKGKA

SEQ ID NO: 180465 - protein, 313 aa, Zea Mays
MPQPGNIYNSSHQQQQVTLPRNEASPSYNMVSNKNALQQYAQGPSDRHIEQMYHGSSFQQDTGGTTPSNYFEEGRVDGGSQLYPSDGDALPGIEGFQIAGEPRPGCQLTACGFPTNGTTLCNFQWVRHLENGIKQSIEGATMYDYVVTADDVGTLLAVDCTPMDDNGRQGDLVTEFANNGNKITCDPEMQSHIDACISKGRAEFEVFVLQAYSPEEWELATLVLTRPNYQIKFKQTGNVVIDEKYSQSLQTKIPNGRTTQFVLITAGTTLPFNTQGISEPNNEDYDVRLRDLIVLVMRTFQKKALDAKRKGKA

SEQ ID NO: 180466 - protein, 186 aa, Zea Mays
MLAEYNIRPPQINASTITIGTKRLYQQMHWKLKSLNDNLGDMPQPGNIYNSSHQQQQVTLPRNEASPSYNMVSNKNALQQYAQGPSDRHIEQMYHGSSFQQDTGGTTPSNYFEEGRVDGGSQLYPSDGDALPGIEGFQIAGEPRPGCQLTACGFPTNGTTLCNFQWVRHLENGIKQSIEGKVGNFS

SEQ ID NO: 180467 - protein, 354 aa, Zea Mays
MLAEYNIRPPQINASTITIGTKRLYQQMHWKLKSLNDNLGDMPQPGNIYNSSHQQQQVTLPRNEASPSYNMVSNKNALQQYAQGPSDRHIEQMYHGSSFQQDTGGTTPSNYFEEGRVDGGSQLYPSDGDALPGIEGFQIAGEPRPGCQLTACGFPTNGTTLCNFQWVRHLENGIKQSIEGATMYDYVVTADDVGTLLAVDCTPMDDNGRQGDLVTEFANNGNKITCDPEMQSHIDACISKGRAEFEVFVLQAYSPEEWELATLVLTRPNYQIKFKQTGNVVIDEKYSQSLQTKIPNGRTTQFVLITAGTTLPFNTQGISEPNNEDYDVRLRDLIVLVMRTFQKKALDAKRKGKA

SEQ ID NO: 180468 - protein, 637 aa, Zea Mays
MEEAAAAAAAWASNAATPVPSEPMRSPPDAEASVDPTAVGDDEHDSKEVVLRRYFLQEWELVSAILHRVVAGGGVAESADVHRIRSIMDKYQEEGQLLEPYLENIVSPLMSLVRSKTMELGASTDELLDIIKPLCIIIYTLVTVCGYKSVIRFFPHQVSDLELAVALLEKCHTMSSATALRQESTGEMETKCVVLLWLYILVLIPFDISTVDTSIATADNVDGPEVVPLVTRILDICKDYLSSSGPMRRMSGLLLARLLTRPDMAKAFSSFMDWAHKMLLSVSDDFVDQFRSIGIVEALASIFKIGNRRALHDAVSGTWSDCSLVMKTNVSARSPLLRKFLVKLAQRVGLISLPPRLPSWQYKSISSSLGANLSSYTAGEVYSSGSREQVNIDQIGMCFLEEDMDVPEIAEEIIDLLLTGLRDSDTIVRWSAAKGIGRITACLTPALSEDVLSSILQLFSPGEGDGSWHGGCLALAELARRGLLLPSSFPDVVPVIIKALHYDVRRGPHSIGSHVRDAAAYVCWAFGRAYTNYDMKAVLEQLAPHLLTVACYDREVNCRRAASAAFQENVGRQGTFPHGIDIVNTTDYFALASRSNSYLNVAVSVAQCKEYLYPFADELLCNKITHWVYNSLQLFMV

SEQ ID NO: 180469 - protein, 514 aa, Zea Mays
MEEAAAAAAAWASNAATPVPSEPMRSPPDAEASVDPTAVGDDEHDSKEVVLRRYFLQEWELVSAILHRVVAGGGVAESADVHRIRSIMDKYQEEGQLLEPYLENIVSPLMSLVRSKTMELGASTDELLDIIKPLCIIIYTLVTVCGYKSVIRFFPHQVSDLELAVALLEKCHTMSSATALRQESTGEMETKCVVLLWLYILVLIPFDISTVDTSIATADNVDGPEVVPLVTRILDICKDYLSSSGPMRRMSGLLLARLLTRPDMAKAFSSFMDWAHKMLLSVSDDFVDQFRSIGIVEALASIFKIGNRRALHDAVSGTWSDCSLVMKTNVSARSPLLRKFLVKLAQRVGLISLPPRLPSWQYKSISSSLGANLSSYTAGEVYSSGSREQVNIDQIGMCFLEEDMDVPEIAEEIIDLLLTGLRDSDTIVRWSAAKGIGRITACLTPALSEDVLSSILQLFSPGEGDGSWHGGCLALAELARRGLLLPSSFPDVVPVIIKENCTSYYIKKRKGGGK

SEQ ID NO: 180470 - protein, 301 aa, Zea Mays
MEEAAAAAAAWASNAATPVPSEPMRSPPDAEASVDPTAVGDDEHDSKEVVLRRYFLQEWELVSAILHRVVAGGGVAESADVHRIRSIMDKYQEEGQLLEPYLENIVSPLMSLVRSKTMELGASTDELLDIIKPLCIIIYTLVTVCGYKSVIRFFPHQVSDLELAVALLEKCHTMSSATALRQESTGEMETKCVVLLWLYILVLIPFDISTVDTSIATADNVDGPEVVPLVTRILDICKDYLSSSGPMRRMSGLLLARLLTRPDMAKAFSSQLAVRWVQTFQVIQLEKCIQVDQGNKLTLIK

SEQ ID NO: 180471 - protein, 312 aa, Zea Mays
MKTNVSARSPLLRKFLVKLAQRVGLISLPPRLPSWQYKSISSSLGANLSSYTAGEVYSSGSREQVNIDQIGMCFLEEDMDVPEIAEEIIDLLLTGLRDSDTIVRWSAAKGIGRITACLTPALSEDVLSSILQLFSPGEGDGSWHGGCLALAELARRGLLLPSSFPDVVPVIIKALHYDVRRGPHSIGSHVRDAAAYVCWAFGRAYTNYDMKAVLEQLAPHLLTVACYDREVNCRRAASAAFQENVGRQGTFPHGIDIVNTTDYFALASRSNSYLNVAVSVAQCKEYLYPFADELLCNKITHWVYNSLQLFMV

SEQ ID NO: 180472 - protein, 879 aa, Zea Mays
MEEAAAAAAAWASNAATPVPSEPMRSPPDAEASVDPTAVGDDEHDSKEVVLRRYFLQEWELVSAILHRVVAGGGVAESADVHRIRSIMDKYQEEGQLLEPYLENIVSPLMSLVRSKTMELGASTDELLDIIKPLCIIIYTLVTVCGYKSVIRFFPHQVSDLELAVALLEKCHTMSSATALRQESTGEMETKCVVLLWLYILVLIPFDISTVDTSIATADNVDGPEVVPLVTRILDICKDYLSSSGPMRRMSGLLLARLLTRPDMAKAFSSFMDWAHKMLLSVSDDFVDQFRSIGIVEALASIFKIGNRRALHDAVSGTWSDCSLVMKTNVSARSPLLRKFLVKLAQRVGLISLPPRLPSWQYKCAAVEALKHFIPTYLVSSGEKIASDIISKYVALLDDPNVAARRGAALALGILPFKFLMLKWMPVMSKLCSSCTIEDKPDDPDAEARVNSVRGLISVCETLTASFDQLSNGDSLYAYIKDYVMRALFRALDDYAVDNRGDVGSWVREAAMDALVRCMFILCKRDIVALRAVSATGHDSELGDMEVNASSTAYRLFDSGIAQDLVAGIAKQAVEKIDKIREIAIKTLQRILYHQEHLIPFIPHRELLEEIIPNSRDLEWAVPTVSYPRLVKLLQVSYYSKSVLSGLVISTGGLQESLKKASMSALVGYLQDSDINTNCEGKSREYLLSCDLLWGLQHYQKCDRVITPMFKTIEALFSKKVFLNKEGYSEFYSGLVDSVSSELKGSKDFTKLCAGLSILGYISSESDGTCTKAFSQLLTFLGHRYPKIRKAAADQVYLVLLQNDDLIVSENMDKAQELLAETCWEGDVEEARRRRSEINEMAGFRVTTSQKSGKQETRTVAASTDENRSYSSLVDFSGY

SEQ ID NO: 180473 - protein, 207 aa, Zea Mays
MLKWMPVMSKLCSSCTIEDKPDDPDAEARVNSVRGLISVCETLTASFDQLSNGDSLYAYIKDYVMRALFRALDDYAVDNRGDVGSWVREAAMDALVRCMFILCKRDIVALRAVSATGHDSELGDMEVNASSTAYRLFDSGIAQDLVAGIAKQAVEKIDKIREIAIKTLQRILYHQEHLIPFIPHRELLEEIIPNSRDLEWAVVCRSL

SEQ ID NO: 180474 - protein, 295 aa, Zea Mays
MHQPRARYPPGYGSGGGGGAGRGGGGGNGGGGGNHNYYGRNPQQHHYHQQQQSQHSHRNSSYQQQWLRRDQAPAVAGAASGNAVAKTASQLDAVGSSSQDWKAQLNIPAPDTRYRTEDVTATKGNEFEDYFLKRELLMGIYEKGFERPSPIQEESIPIALTGSDILARAKNGTGKTAAFCIPALEKIDPEKNAIQVVILVPTRELALQTSQVCKELGKYLNIQVMVSTGGTSLKDDIMRLYQPVHLLVGTPGRILDLTRKGICVLKDCSMLVMDEADKLLAPEFQPSVEALIPFL

SEQ ID NO: 180475 - protein, 171 aa, Zea Mays
MDELTLKGITQYYAFVEERQKVHCLNTLFSKLQINQSIIFCNSVNRVELLAKKITELGYSCFYIHAKMLQDHRNRVFHDFRNGACRNLVCTDLFTRGIDIQAVNVVINFDFPKTSETYLHRVGRSGRYGHLGLAVNLITYEDRFNLYRIEQELGTEIKTIPPQIDLSIYCQ

SEQ ID NO: 180476 - protein, 649 aa, Zea Mays
MSPVLWLTSLLFLVHSAAADTRRALHEPLFPIEWTPPPSTTAPPAPGFASDPSTPVPPVDNGGPALLPAPPPPNTVAADASSSRTGPGPRPHGGGGTPKAAIVVASAAAAAVLALLAFAAAFLLTGRLARHPAWAHKPPGLAAAAHPGPASALVLHADAVGTSAAAAASSSGATATPHRKARSERARRGMCRDVDTVPSPELRPLPPLRRAGSSDEDAAYYTPGQRSAVSAGGEGAGTWSQASASSPRTTTPSRQSLPSLTSDFFPPTPAAATAVPAATVAPPPPAPPAPRSRRTLPRTRFSAGSASDMNMIKQIVSPSSNLPPPPPPPPPPPPPAPRRTNAIPKPLTTATPLSTRRLLKQEQTEGPSVAVPRAPVVAVNKDNDGMPIRTNDDHAGDEARPKLKPLHWDKVRACSDRDMVWDRLKSNSFQLDEDMIEVLFTNNAANAPPRDTLRKPGVLQCSAKEKVLDPKKAQNIAILLRALNVTPEEVSDALLDGNAECLGADLLETLVKMAPTKEEELKLRNFTGDSSKLGSAERFLKAVLDIPFSFKRVDAMLYRANFESEINYLRKSFETLEVCWFTLHSTYCSFYYQWLAHESVIVSHNCHSVEQSNCFSTNSSFTVVDLNSSLHIGHSHCQFGTYDLCASEI

SEQ ID NO: 180477 - protein, 486 aa, Zea Mays
MSPVLWLTSLLFLVHSAAADTRRALHEPLFPIEWTPPPSTTAPPAPGFASDPSTPVPPVDNGGPALLPAPPPPNTVAADASSSRTGPGPRPHGGGGTPKAAIVVASAAAAAVLALLAFAAAFLLTGRLARHPAWAHKPPGLAAAAHPGPASALVLHADAVGTSAAAAASSSGATATPHRKARSERARRGMCRDVDTVPSPELRPLPPLRRAGSSDEDAAYYTPGQRSAVSAGGEGAGTWSQASASSPRTTTPSRQSLPSLTSDFFPPTPAAATAVPAATVAPPPPAPPAPRSRRTLPRTRFSAGSASDMNMIKQIVSPSSNLPPPPPPPPPPPPPAPRRTNAIPKPLTTATPLSTRRLLKQEQTEGPSVAVPRAPVVAVNKDNDGMPIRTNDDHAGDEARPKLKPLHWDKVRACSDRDMVWDRLKSNSFQLDEDMIEVLFTNNAANAPPRDTLRKPGVLQCSAKEKVLDPKKAMLNAWVRICWKPW

SEQ ID NO: 180478 - protein, 637 aa, Zea Mays
MSPVLWLTSLLFLVHSAAADTRRALHEPLFPIEWTPPPSTTAPPAPGFASDPSTPVPPVDNGGPALLPAPPPPNTVAADASSSRTGPGPRPHGGGGTPKAAIVVASAAAAAVLALLAFAAAFLLTGRLARHPAWAHKPPGLAAAAHPGPASALVLHADAVGTSAAAAASSSGATATPHRKARSERARRGMCRDVDTVPSPELRPLPPLRRAGSSDEDAAYYTPGQRSAVSAGGEGAGTWSQASASSPRTTTPSRQSLPSLTSDFFPPTPAAATAVPAATVAPPPPAPPAPRSRRTLPRTRFSAGSASDMNMIKQIVSPSSNLPPPPPPPPPPPPPAPRRTNAIPKPLTTATPLSTRRLLKQEQTEGPSVAVPRAPVVAVNKDNDGMPIRTNDDHAGDEARPKLKPLHWDKVRACSDRDMVWDRLKSNSFQLDEDMIEVLFTNNAANAPPRDTLRKPGVLQCSAKEKVLDPKKAQNIAILLRALNVTPEEVSDALLDGNAECLGADLLETLVKMAPTKEEELKLRNFTGDSSKLGSAERFLKAVLDIPFSFKRVDAMLYRANFESEINYLRKSFETLEGACDDLKSSRLFLKLLEAVLRTGNRMNVGTNRGNRAVGRCKIRESRRRRNQKHRERRNVP

SEQ ID NO: 180479 - protein, 250 aa, Zea Mays
MEMVDSWCNGVENEKIGSIRSILQAFRRACHYGEDHGDNSTPKLSVMSGSVLDKVMHFVLKHMDKVLRQLLGAPSYGGKKEVISELMLSKSWKRHGNLMRIYLANALHMITEMTDEQMIAFTVHRVRASAVFLAAFPSLLRKYVKALLHTWARGRGAMPLVSFMFLRDLCIQVGSDCLDTCLKGIYKAYLVNCKLSKSISGSKQQHIQFLGNCVRELYSLDPQSAYQHAFVFIRQLGVILRGALTERGPK

SEQ ID NO: 180480 - protein, 54 aa, Zea Mays
MLHTHHRLIGDKSKSRFLDKGMGMSRTAGAFSAANEEEIGSWRVGTKKVKKPRG

SEQ ID NO: 180481 - protein, 357 aa, Zea Mays
MAAACLRRLHRIPHPVLKLAAATHWPLPFPGAKLAPVTQSCPSADRVEVQLSARCPGFASNGNFKHRWHHKLGSSVGAVLIGHAAFFLGLSNGSAFAQEDSVSPAAASEHAEGNAPGLQPIEDGSVVSNEHTVKWRIYTDNAREFFQKRQLDEAEKLFQAALLEAKEGFGLRDPHVASALNNLAEFYRLKKEHVKAEPLYLEAIEILEESFGPDDIRVGRTVHSLGICYHLQLKLAQAQTCYERALKIEGRVLGVGHPEYSSTMYSLAKVLSLQGKRKNAECLIEESIRILEEAGLGDSLTCLRRMVSLSRELIKSRRFAEAEIWQRKILHVLELSERKWHWIHGNAMTQQELAKEP

SEQ ID NO: 180482 - protein, 313 aa, Zea Mays
MYSLAKELIKSRRFAEAEIWQRKILHVLELSEGWDSLVTARAAELLSLNLETMEKLKESEELLERCLAVKKKILPEDHLQVAYTLVHLARLTLHRVVKDRDVNSDVTAYYLAKAKQFSNDSIRITEGQLNSSRKDQNKINNTSTADTDKSAAIILFQALHVFGLIDIAAKQLLGQGLVLLLRLPLEHLKHGFFKIEAVHIPGTPRPFIWTDTYTIYARYSALQIHFKNKFGKEQDYNSVQDALQKCVSLYKEPHTRRLVKNAAKQDYMICLTSLIDMVQSLFPIPHIPGLQELLCEAEQILGELEEESTRKKQ

SEQ ID NO: 180483 - protein, 576 aa, Zea Mays
MAAACLRRLHRIPHPVLKLAAATHWPLPFPGAKLAPVTQSCPSADRVEVQLSARCPGFASNGNFKHRWHHKLGSSVGAVLIGHAAFFLGLSNGSAFAQEDSVSPAAASEHAEGNAPGLQPIEDGSVVSNEHTVKWRIYTDNAREFFQKRQLDEAEKLFQAALLEAKEGFGLRDPHVASALNNLAEFYRLKKEHVKAEPLYLEAIEILEESFGPDDIRVGRTVHSLGICYHLQLKLAQAQTCYERALKIEGRVLGVGHPEYSSTMYSLAKELIKSRRFAEAEIWQRKILHVLELSEGWDSLVTARAAELLSLNLETMEKLKESEELLERCLAVKKKILPEDHLQVAYTLVHLARLTLHRVVKDRDVNSDVTAYYLAKAKQFSNDSIRITEGQLNSSRKDQNKINNTSTADTDKSAAIILFQALHVFGLIDIAAKQLLGQGLVLLLRLPLEHLKHGFFKIEAVHIPGTPRPFIWTDTYTIYARYSALQIHFKNKFGKEQDYNSVQDALQKCVSLYKEPHTRRLVKNAAKQDYMICLTSLIDMVQSLFPIPHIPGLQELLCEAEQILGELEEESTRKKQ

SEQ ID NO: 180484 - protein, 520 aa, Zea Mays
MAAACLRRLHRIPHPVLKLAAATHWPLPFPGAKLAPVTQSCPSADRVEVQLSARCPGFASNGNFKHRWHHKLGSSVGAVLIGHAAFFLGLSNGSAFAQEDSVSPAAASEHAEGNAPGLQPIEDGSVVSNEHTVKWRIYTDNAREFFQKRQLDEAEKLFQAALLEAKEGFGLRDPHVASALNNLAEFYRLKKEHVKAEPLYLEAIEILEESFGPDDIRVGRTVHSLGICYHLQLKLAQAQTCYERALKIEGRVLGVGHPEYSSTMYSLAKELIKSRRFAEAEIWQRKILHVLELSEGWDSLVTARAAELLSLNLETMEKLKESEELLERCLAVKKKILPEDHLQVAYTLVHLARLTLHRVVKDRDVNSDVTAYYLAKAKQFSNDSIRITEGQLNSSRKDQNKINNTSTADTDKSAAIILFQALHVFGLIDIAAKQLLGQGEQDYNSVQDALQKCVSLYKEPHTRRLVKNAAKQDYMICLTSLIDMVQSLFPIPHIPGLQELLCEAEQILGELEEESTRKKQ

SEQ ID NO: 180485 - protein, 502 aa, Zea Mays
MAAACLRRLHRIPHPVLKLAAATHWPLPFPGAKLAPVTQSCPSADRVEVQLSARCPGFASNGNFKHRWHHKLGSSVGAVLIGHAAFFLGLSNGSAFAQEDSVSPAAASEHAEGNAPGLQPIEDGSVVSNEHTVKWRIYTDNAREFFQKRQLDEAEKLFQAALLEAKEGFGLRDPHVASALNNLAEFYRLKKEHVKAEPLYLEAIEILEESFGPDDIRVGRTVHSLGICYHLQLKLAQAQTCYERALKIEGRVLGVGHPEYSSTMYSLAKVAYTLVHLARLTLHRVVKDRDVNSDVTAYYLAKAKQFSNDSIRITEGQLNSSRKDQNKINNTSTADTDKSAAIILFQALHVFGLIDIAAKQLLGQGLVLLLRLPLEHLKHGFFKIEAVHIPGTPRPFIWTDTYTIYARYSALQIHFKNKFGKEQDYNSVQDALQKCVSLYKEPHTRRLVKNAAKQDYMICLTSLIDMVQSLFPIPHIPGLQELLCEAEQILGELEEESTRKKQ

SEQ ID NO: 180486 - protein, 562 aa, Zea Mays
MAAACLRRLHRIPHPVLKLAAATHWPLPFPGAKLAPVTQSCPSADRVEVQLSARCPGFASNGNFKHRWHHKLGSSVGAVLIGHAAFFLGLSNGSAFAQEDSVSPAAASEHAEGNAPGLQPIEDGSVVSNEHTVKWRIYTDNAREFFQKRQLDEAEKLFQAALLEAKEGFGLRDPHVASALNNLAEFYRLKKEHVKAEPLYLEAIEILEESFGPDDIRVGRTVHSLGICYHLQLKLAQAQTCYERALKIEGRVLGVGHPEYSSTMYSLAKVLSLQGKRKNAECLIEESIRILEEAGLGDSLTCLRRMVSLSRELIKSRRFAEAEIWQRKILHVLELSEGWDSLVTARAAELLSLNLETMEKLKESEELLERCLAVKKKILPEDHLQVAYTLVHLARLTLHRVVKDRDVNSDVTAYYLAKAKQFSNDSIRITEGQLNSSRKDQNKINNTSTADTDKSAAIILFQALHVFGLIDIAAKQLLGQGEQDYNSVQDALQKCVSLYKEPHTRRLVKNAAKQDYMICLTSLIDMVQSLFPIPHIPGLQELLCEAEQILGELEEESTRKKQ

SEQ ID NO: 180487 - protein, 618 aa, Zea Mays
MAAACLRRLHRIPHPVLKLAAATHWPLPFPGAKLAPVTQSCPSADRVEVQLSARCPGFASNGNFKHRWHHKLGSSVGAVLIGHAAFFLGLSNGSAFAQEDSVSPAAASEHAEGNAPGLQPIEDGSVVSNEHTVKWRIYTDNAREFFQKRQLDEAEKLFQAALLEAKEGFGLRDPHVASALNNLAEFYRLKKEHVKAEPLYLEAIEILEESFGPDDIRVGRTVHSLGICYHLQLKLAQAQTCYERALKIEGRVLGVGHPEYSSTMYSLAKVLSLQGKRKNAECLIEESIRILEEAGLGDSLTCLRRMVSLSRELIKSRRFAEAEIWQRKILHVLELSEGWDSLVTARAAELLSLNLETMEKLKESEELLERCLAVKKKILPEDHLQVAYTLVHLARLTLHRVVKDRDVNSDVTAYYLAKAKQFSNDSIRITEGQLNSSRKDQNKINNTSTADTDKSAAIILFQALHVFGLIDIAAKQLLGQGLVLLLRLPLEHLKHGFFKIEAVHIPGTPRPFIWTDTYTIYARYSALQIHFKNKFGKEQDYNSVQDALQKCVSLYKEPHTRRLVKNAAKQDYMICLTSLIDMVQSLFPIPHIPGLQELLCEAEQILGELEEESTRKKQ

SEQ ID NO: 180488 - protein, 592 aa, Zea Mays
MAAACLRRLHRIPHPVLKLAAATHWPLPFPGAKLAPVTQSCPSADRVEVQLSARCPGFASNGNFKHRWHHKLGSSVGAVLIGHAAFFLGLSNGSAFAQEDSVSPAAASEHAEGNAPGLQPIEDGSVVSNEHTVKWRIYTDNAREFFQKRQLDEAEKLFQAALLEAKEGFGLRDPHVASALNNLAEFYRLKKEHVKAEPLYLEAIEILEESFGPDDIRVGRTVHSLGICYHLQLKLAQAQTCYERALKIEGRVLGVGHPEYSSTMYSLAKVLSLQGKRKNAECLIEESIRILEEAGLGDSLTCLRRMVSLSRGWDSLVTARAAELLSLNLETMEKLKESEELLERCLAVKKKILPEDHLQVAYTLVHLARLTLHRVVKDRDVNSDVTAYYLAKAKQFSNDSIRITEGQLNSSRKDQNKINNTSTADTDKSAAIILFQALHVFGLIDIAAKQLLGQGLVLLLRLPLEHLKHGFFKIEAVHIPGTPRPFIWTDTYTIYARYSALQIHFKNKFGKEQDYNSVQDALQKCVSLYKEPHTRRLVKNAAKQDYMICLTSLIDMVQSLFPIPHIPGLQELLCEAEQILGELEEESTRKKQ

SEQ ID NO: 180489 - protein, 486 aa, Zea Mays
MALHLPRKIQLAQLQLVSMLREMLLVYNRLKMDQWSQTNTRSNGEFTLIMRGSFSRKQRQLDEAEKLFQAALLEAKEGFGLRDPHVASALNNLAEFYRLKKEHVKAEPLYLEAIEILEESFGPDDIRVGRTVHSLGICYHLQLKLAQAQTCYERALKIEGRVLGVGHPEYSSTMYSLAKELIKSRRFAEAEIWQRKILHVLELSEGWDSLVTARAAELLSLNLETMEKLKESEELLERCLAVKKKILPEDHLQVAYTLVHLARLTLHRVVKDRDVNSDVTAYYLAKAKQFSNDSIRITEGQLNSSRKDQNKINNTSTADTDKSAAIILFQALHVFGLIDIAAKQLLGQGLVLLLRLPLEHLKHGFFKIEAVHIPGTPRPFIWTDTYTIYARYSALQIHFKNKFGKEQDYNSVQDALQKCVSLYKEPHTRRLVKNAAKQDYMICLTSLIDMVQSLFPIPHIPGLQELLCEAEQILGELEEESTRKKQ

SEQ ID NO: 180490 - protein, 528 aa, Zea Mays
MAAACLRRLHRIPHPVLKLAAATHWPLPFPGAKLAPVTQSCPSADRVEVQLSARCPGFASNGNFKHRWHHKLGSSVGAVLIGHAAFFLGLSNGSAFAQEDSVSPAAASEHAEGNAPGLQPIEDGSVVSNEHTVKWRIYTDNAREFFQKRQLDEAEKLFQAALLEAKEGFGLRDPHVASALNNLAEFYRLKKEHVKAEPLYLEAIEILEESFGPDDIRVGRTVHSLGICYHLQLKLAQAQTCYERALKIEGRVLGVGHPEYSSTMYSLAKELIKSRRFAEAEIWQRKILHVLELSEVAYTLVHLARLTLHRVVKDRDVNSDVTAYYLAKAKQFSNDSIRITEGQLNSSRKDQNKINNTSTADTDKSAAIILFQALHVFGLIDIAAKQLLGQGLVLLLRLPLEHLKHGFFKIEAVHIPGTPRPFIWTDTYTIYARYSALQIHFKNKFGKEQDYNSVQDALQKCVSLYKEPHTRRLVKNAAKQDYMICLTSLIDMVQSLFPIPHIPGLQELLCEAEQILGELEEESTRKKQ

SEQ ID NO: 180491 - protein, 472 aa, Zea Mays
MALHLPRKIQLAQLQLVSMLREMLLVYNRLKMDQWSQTNTRSNGEFTLIMRGSFSRKQRQLDEAEKLFQAALLEAKEGFGLRDPHVASALNNLAEFYRLKKEHVKAEPLYLEAIEILEESFGPDDIRVGRTVHSLGICYHLQLKLAQAQTCYERALKIEGRVLGVGHPEYSSTMYSLAKVLSLQGKRKNAECLIEESIRILEEAGLGDSLTCLRRMVSLSRELIKSRRFAEAEIWQRKILHVLELSEGWDSLVTARAAELLSLNLETMEKLKESEELLERCLAVKKKILPEDHLQVAYTLVHLARLTLHRVVKDRDVNSDVTAYYLAKAKQFSNDSIRITEGQLNSSRKDQNKINNTSTADTDKSAAIILFQALHVFGLIDIAAKQLLGQGEQDYNSVQDALQKCVSLYKEPHTRRLVKNAAKQDYMICLTSLIDMVQSLFPIPHIPGLQELLCEAEQILGELEEESTRKKQ

SEQ ID NO: 180492 - protein, 355 aa, Zea Mays
MYSLAKVLSLQGKRKNAECLIEESIRILEEAGLGDSLTCLRRMVSLSRELIKSRRFAEAEIWQRKILHVLELSEGWDSLVTARAAELLSLNLETMEKLKESEELLERCLAVKKKILPEDHLQVAYTLVHLARLTLHRVVKDRDVNSDVTAYYLAKAKQFSNDSIRITEGQLNSSRKDQNKINNTSTADTDKSAAIILFQALHVFGLIDIAAKQLLGQGLVLLLRLPLEHLKHGFFKIEAVHIPGTPRPFIWTDTYTIYARYSALQIHFKNKFGKEQDYNSVQDALQKCVSLYKEPHTRRLVKNAAKQDYMICLTSLIDMVQSLFPIPHIPGLQELLCEAEQILGELEEESTRKKQ

SEQ ID NO: 180493 - protein, 183 aa, Zea Mays
MYSLAKVAYTLVHLARLTLHRVVKDRDVNSDVTAYYLAKAKQFSNDSIRITEGQLNSSRKDQNKINNTSTADTDKSAAIILFQALHVFGLIDIAAKQLLGQGEQDYNSVQDALQKCVSLYKEPHTRRLVKNAAKQDYMICLTSLIDMVQSLFPIPHIPGLQELLCEAEQILGELEEESTRKKQ

SEQ ID NO: 180494 - protein, 287 aa, Zea Mays
MYSLAKGWDSLVTARAAELLSLNLETMEKLKESEELLERCLAVKKKILPEDHLQVAYTLVHLARLTLHRVVKDRDVNSDVTAYYLAKAKQFSNDSIRITEGQLNSSRKDQNKINNTSTADTDKSAAIILFQALHVFGLIDIAAKQLLGQGLVLLLRLPLEHLKHGFFKIEAVHIPGTPRPFIWTDTYTIYARYSALQIHFKNKFGKEQDYNSVQDALQKCVSLYKEPHTRRLVKNAAKQDYMICLTSLIDMVQSLFPIPHIPGLQELLCEAEQILGELEEESTRKKQ

SEQ ID NO: 180495 - protein, 69 aa, Zea Mays
MDSSKLKLYIYQAHLGHLYGPTHIPYMPDIAHCKSILKISLERSKTIILFKMLCRSVFHFTKSLIHEGW

SEQ ID NO: 180496 - protein, 617 aa, Zea Mays
MTGREAVASAEAELDQDSAAAAAAAPVLLSPLSETLWRDRAAAAAGGVLVGDVSARLAWRDLTVTVALGTGDTQAVLQGLTGHAEPGTITALMGPSGSGKSTLLDALAGRLAANAFLSGTVLLNGRKANLSFGAAAYVTQDDNLIGTLTVRETISYSARLRLPDKMPREEKQALVEGTIVEMGLQDCADTVVGNWHLRGISGGEKRRVSIALEILMRPRLLFLDEPTSGLDSASAFFVTQTLRGLARDGRTVIASVHQPSSEVFLLFDCLYLLSGGRTVYFGKASEACEFFAQAGFPCPPMRNPSDHFLRCINSDFDKVKATLKGSMKARFERSNDDDPLEKMTTSEAMRRLTSYYQHSQCHINAQQKVDEMARLKGTVLDPGGGSQASFLMQAFTLTKRSFVNMSRDFGYYWLRLIIYIVVTLCIGTIYLNVGTGYSSILARGACASFIFGFVTFMSIGGFPSFVEDMKVFQRERLNGHYGVLAFVVSNTVSAMPFLVLITFVSGTLCYFMVRLHPGFTHYLFFVLALYASVTVVESLMMAIASVIPNFLMGIIIGAGIQGIFMLVSGYFRLPHDIPKPFWRTTSCPGSRGSSSWRPCSRSTSPAPSGWTWPCSSA

SEQ ID NO: 180497 - protein, 300 aa, Zea Mays
MLQIRLSKIGSSDSGAAATGSAAAAGAAAAVGSAAALGGGIPESVTVACPDHLVIADLPVAKSLGAVTTSAAAATRAIGRRSRRPLGERVHICSRCEFPIAIYGRLIPCEHAFCLTCARSDSSCYLCDERIQKIQSVKMMEGIFICAAPMCLKSFLKKADFEFHVPDVHANLLQTNLEKEEERNEPDAPNISRASAGDTQRQSQMPEMSTARAPSRPGVSQDRDERSRYHQSREQTPLRPPTLSKPPSFHGRHSYPPGDTQAENNPPQGFDRAYNWASQSRQESPGKLYDAYEYESAFDS

SEQ ID NO: 180498 - protein, 649 aa, Zea Mays
MDYDKSRRSNSKKRRHSNSDDGKRKRLSSRHDDTSMSSEPIETIYRILCPAKKIGSVLGRGGDIVKALREETKAKIRVADSIPGADERVIIIFNYQNQPELTDEAAEKQISDGLGNMKPHCFAQDALLKIHDKIVADEIYDEVAHDESSDDVTARILVQGNQVGCLLGKGGSIIQQLRSDTGAGIRVLSSENLPQCALQSDELVQISGAPSLVRKALYEISTRLHQHPRKENRPLEQIIDASTQRKHESPTLQHENPMLPHLHSHHPPPIPLLDPYRSGPQYPVSETEEFSIRILCASELIGSVIGKSGANVRRVEQQTGARIKVQEIDKDASGERLIIVSSNEIPTEPISPTIEALILLHDKVITEMRRRTGAEIRVYSKADKPKYLSFGDELVQVAGPPAIARGALTEIASRLRTRTLRDTSTANNPPPFAPSDDPTVDMPSRKLTLYGGPTNDTPYGRPANDPLYGRPAIDPPFGRPTNDRPYGRPAIVPPFGRPTNDPPYGRPANDPPYERPTNDPPYGRPSSTIAYGRPNRSAPRDPSDAYPVDYFSKREHPSGGPMFTSNAPSAAYERYAAPTHFPTREPPSTFSHRSYRDHMPTDSYSSRGTQKLDITRDGNSDAYDYTEVHLCRELPSFANGHHLKFSLEA

SEQ ID NO: 180499 - protein, 342 aa, Zea Mays
MGQQSLIYVFVAHATSSPTTAIATPSTTSSRMDSGSRSYKSTKVAAKRLEEAALSCKGDERVQLLRRWLVALKETQRVTMVVREPQLGDNPDQAASLLDLYIDYDSGVEPMNFFHVFLYSQALECVVLSLAKRDELLQFAQGAISGLKINADIARLDNEITQLQQQIKSMDALHVSISSSVKSIHQPQGPVDLFWCTMWMKTTWSSGLWGLLDASGARGNSQEQYGTPMPHIGQTTVEVDLLKYGVIEGDESYGMNLTKEQRVEKIESQKLEKYEAKHDKRHDLKVDQSVQEEYINAYYEALRKKLEEKEAKSRMHHEGKIFVPDAQRECQVGNKYKQDDDE

SEQ ID NO: 180500 - protein, 161 aa, Zea Mays
MALLALKEAPPFCLQRLYKHKDALRQLFTRGRKLRLCFLYDSGMLRRIAWTSQPLLIVLRIVNRDEKPVMPEISAAMDFTIEEINTSLGSKPRVLKKVMDIIDTRWLHQMEQKLHGAVLFLNPNKFFDITNDADHASRLLITFNYVLEKMVTDDDVLEKNK

SEQ ID NO: 180501 - protein, 324 aa, Zea Mays
MTWRISLSKMPALMQSYLIPGFRVHMWLLWQLCLVGRSLRWGRSDLFPMENSCFLIWNVRGLNDRARRDSVKSLVLDIKPSIVCLQETKLCAISDFDMLSILGTGFSNFVYSPAQGTRGGILIAWRDGSFVSVASVVKNFSVSVQFQDESGSSWWFTGVYGPHQDIFKQEFIHELRSVRDECVGPWFLCGDFNMILREEDKNNSNINRLMMGRFRGFVNSMELKEIPLIGRRFTWSNQREVPTLVKLDHVFCTADWEDFFPDCSLHSNATAISDHCPLTLRIREGAWGGEDFTLRVFGQKSRDFWRWWLPRGVYLCRSFVHLRR

SEQ ID NO: 180502 - protein, 212 aa, Zea Mays
MGWVNKIADWLPNWKARLLSLAGRTALVRHVISAIPVYILMAMSVPKWVIKSIDKLRRGFLWKGRKNVNGGSCLVPWEIVTRPLKYGGLGVSNLQFKSWALQVKWLWLQRTDPSRPWQGMNLPIQQQVRQFFNLSVFHVVGDGTSTLFWFDKWLNGKAIFDIAPEVVCLVDSRVSSTRTVPQALDNWRWVRDIGTWESSFYAWAAAVFKIMG

SEQ ID NO: 180503 - protein, 228 aa, Zea Mays
MATRNRTPLYRKYRDALRHVRAPAGATSSSCGGGGGSVIEMASLLRSDRPYAPLSIEDPSASSRGAVSVGLPPAWVDVSEEISANMQRARTKMTELAKAHAKALMPSFGDGRDDQRAIEVLTHEITDLLKRSEKRLQKLSMKDLSEDSNVRKNVQRSLATDLQNLSMEFRKKQSSYLKQLRQQKEGQDGVDLEMNMNGTKSTFEDDEFDDVVRFILVFTCCIPDFGFH

SEQ ID NO: 180504 - protein, 336 aa, Zea Mays
MERRLSATSRRSAPSAIQRLSHLAQRVGAVNLAEGFPDFPAPPHVKAAAVAAIAADLNQYRHVQGICDILANTMKRDHDLDVDPLTDFVICCGQSEAFAAAIFAIIDQGDEVLIFDPAYETYETSIELARGVPVYVPLDPPSWTLNEEKFLKSFTSRTKALVLNSPHNPTGKVFSKEELLIISQACQKMDCFVITDEVYEYITYDANKHISLASLPGMQERTIITSSLSKTYSVTGWRLGWACAAASIASAIRNIHIKLTDSAPAPFQEAALIALTSTADYYISLRKDYEVKRDFILLLLKDLGFKISVKPQGSVFVFAELPRSCQLSDVSSFDEK

SEQ ID NO: 180505 - protein, 110 aa, Zea Mays
MEFYIYAVGENRQGWSDRGIWLLCGIEKFDASRGFKISTYVYWCIHQLPYEDMTPFQATVVVVQKIDWIYMGLTLLVLKEKERAWLAGDHVSVHIFFMGHVTCHVRLYNF

SEQ ID NO: 180506 - protein, 60 aa, Zea Mays
MASNKRSQIGYKNLVVSDMWDLPRPLLELTFLYMVLSYLHQESSKLHHAQTLRTVEARSI

SEQ ID NO: 180507 - protein, 90 aa, Zea Mays
MLMGINDMKSKQHSSLKSSHPKLMHMFKALLQVLILESWSFIYMLLEKIDKGGLIGAYGYFVGSKSLMPQEDLRFPPMCIGAFISFHTKT

SEQ ID NO: 180508 - protein, 114 aa, Zea Mays
MLMGINDMKSKQHSSLKSSHPKLMHMFKALLQVLILESWSFIYMLLEKIDKLPYEDMTPFQATVVVVQKIDWIYMGLTLLVLKEKERAWLAGDHVSVHIFFMGHVTCHVRLYNF

SEQ ID NO: 180509 - protein, 298 aa, Zea Mays
MSSGADGSDPCTGLDPGTIPELPAHEPPVLQAPSPAPQQEVVVASQTEAPLPAVTIVISRPGEDVQMPDAKGGSPACSPQAGDGKPMATSVSLTASAAAKEAGLARSDSDSLDDYEQCRSNTCTLNKPRFQLRVCQQKTEEPLVDLGCRCRGDLAKAHRTCIDFWFRTRGSNKCEICQQVAVNIAPPETQSSTSYWVWRVDSTYGRGRGGRERGWFSPLWVAFAILIGGLLLDVLISVSLGVSALPVNIIIGVLIVLGLGTALHLALECCHEWGSRRNVANIPRLENIAPTGYHPAVV

SEQ ID NO: 180510 - protein, 153 aa, Zea Mays
MSSGADGSDPCTGLDPGTIPELPAHEPPVLQAPSPAPQQEVVVASQTEAPLPAVTIVISRPGEDVQMPDAKGGSPACSPQAGDGKPMATSVSLTASAAAKEAGLARSDSDSLDDYEQCRSNTCTLNKPRFQLRYLWTKWLSLFWKEQCRMHWP

SEQ ID NO: 180511 - protein, 213 aa, Zea Mays
MSSGADGSDPCTGLDPGTIPELPAHEPPVLQAPSPAPQQEVVVASQTEAPLPAVTIVISRPGEDVQMPDAKGGSPACSPQAGDGKPMATSVSLTASAAAKEAGLARSDSDSLDDYEQCRVCQQKTEEPLVDLGCRCRGDLAKAHRTCIDFWFRTRGSNKCEICQQVAVNIAPPETQSSVCLLFCTLYISIYIGSFGECMCPNAYVYPFHLFSN

SEQ ID NO: 180512 - protein, 213 aa, Zea Mays
MSSGADGSDPCTGLDPGTIPELPAHEPPVLQAPSPAPQQEVVVASQTEAPLPAVTIVISRPGEDVQMPDAKGGSPACSPQAGDGKPMATSVSLTASAAAKEAGLARSDSDSLDDYEQCRVCQQKTEEPLVDLGCRCRGDLAKAHRTCIDFWFRTRGSNKCEICQQVAVNIAPPETQSSTSYWVWRVDSTYGRGRGGRERVFLSLDMINKKQMQ

SEQ ID NO: 180513 - protein, 371 aa, Zea Mays
MLLQLHVVREEVNSSNEPENIDEQEQIRIARALLNYRLKEKMAMANYPHVSPFPKKFPMQQERKPCLGQSCQSSHSKILPLFRPKPNSRPKSPASTDGVSKTPGRTVESLVDQSPRSRFPAAEAAPYVPVGHYRRIPCHNMAPSVTIRTAVPVFSAPPLPPPPARLQQLPPLMSHPPPIRMASPVRMRPAPASPMFASSSPVQVPKPVMPVQLKDVQDHPRKEAVPLPPVIPVQVKDAQCRPRKSSMSPVIPVPVKDAQRRPAAIPVQMKDVQTQAPKEPLAAPIPAARPSVMTDTPAQVKEASAGATSEAPSSATGNNAAVECSASSETVLARQSGAADEDTLVLMRKLSMRPEAQSAAEAATTMRLETN

SEQ ID NO: 180514 - protein, 439 aa, Zea Mays
MDETGVYKNLLQEVAQRVGAPLPLYTTERSGLGHLPVFTCTVELAGITFAGDPAKNKKQAEKNAASAAWSALKQLVREEVNSSNEPENIDEQEQIRIARALLNYRLKEKMAMANYPHVSPFPKKFPMQQERKPCLGQSCQSSHSKILPLFRPKPNSRPKSPASTDGVSKTPGRTVESLVDQSPRSRFPAAEAAPYVPVGHYRRIPCHNMAPSVTIRTAVPVFSAPPLPPPPARLQQLPPLMSHPPPIRMASPVRMRPAPASPMFASSSPVQVPKPVMPVQLKDVQDHPRKEAVPLPPVIPVQVKDAQCRPRKSSMSPVIPVPVKDAQRRPAAIPVQMKDVQTQAPKEPLAAPIPAARPSVMTDTPAQVKEASAGATSEAPSSATGNNAAVECSASSETVLARQSGAADEDTLVLMRKLSMRPEAQSAAEAATTMRLETN

SEQ ID NO: 180515 - protein, 203 aa, Zea Mays
MQEQLSAATAEMVMLSTEETEKKKHATHKDGTANGSAKEIPDEKPAVTKPSPYKELIGDIKASLGSAPTPTQLKAMLASSTLPSQDVMNALLEALFDGVGKGFAKEVVKNKKYLAVAVPDEGAQTLLVQAIEAFGSKCNPEALKEVPVVLKALYDGDILEEETVVDWYNAAVAAGKDSQVVKNAKPFVEWLQSAESDDEDGDE

SEQ ID NO: 180516 - protein, 810 aa, Zea Mays
MRCSAAVRSLLPLSLHSPAGPAPSPIHTSALPLAAELEAGDALHALLSTLPPSLPSLFPCLSLLSRRLTPHSVADALLCDALPPASRIRLFLFSALTPRLRSPLLHSRAVVPILLATDADAAMYDAIADAQAAGLQPPTAAFEALIFAHASAGRHHEAVEAFSRMEGEFGCRPTTFVYNAVLRVLVASGGAVPLALALYNRMVAAGCLPNRATYNVLIHGLCKRGTPVDALKLFDEMISRGITPNVKTHTILLSSMCNAGQLKEAENLLHSMEDKGCPPDEVTYNAFLSGLCKAGRVDEAIERLEALRHTGTFVLGLKGYSCLIDGLFLAGRYEEGFQCYMEVLEQADVSPDIVLYTIMIRGCAEAGRTNDAFAFFDEMKEKGFTPDTFCYNTLLKALCDAGDLDGARSLMSEMVRNNVVLDIHTYTTMIIGLCKEQLVDEAMQVFDGMVEVGCHPSVMTYNVLIDGLYRAHRLEEARMLFYKMEVGNNPSLFLRLTLGANQVRDSETLQKLVESMCQSGQVLKAYKLLRGIIDSGVVPDVVTYNTLLNGLCKVRNLDGALRLFRELQVKGFPLDEITYGTLIDSLLRAHRYNDALTLFQDILHSGGTPSMPIYNSMMRSLCRMQKLSQAINLWFDHLPRKYNLLAQDEVISSARKKFEEGCLHEAVRELIKIDQEYGSVNSCPYTIWLIGLIQAGRIEDALKIFHILEESGIDITPACCVHLSKYLCLEGNLGAAVDVMLYTLKKGFTMRRYVGNRLLCSLCIHHRRKDAQALAWRMHLVGYDMDAYLHESTKVTGTYMEYSSLCHNIL

SEQ ID NO: 180517 - protein, 808 aa, Zea Mays
MRCSAAVRSLLPLSLHSPAGPAPSPIHTSALPLAAELEAGDALHALLSTLPPSLPSLFPCLSLLSRRLTPHSVADALLCDALPPASRIRLFLFSALTPRLRSPLLHSRAVVPILLATDADAAMYDAIADAQAAGLQPPTAAFEALIFAHASAGRHHEAVEAFSRMEGEFGCRPTTFVYNAVLRVLVASGGAVPLALALYNRMVAAGCLPNRATYNVLIHGLCKRGTPVDALKLFDEMISRGITPNVKTHTILLSSMCNAGQLKEAENLLHSMEDKGCPPDEVTYNAFLSGLCKAGRVDEAIERLEALRHTGTFVLGLKGYSCLIDGLFLAGRYEEGFQCYMEVLEQADVSPDIVLYTIMIRGCAEAGRTNDAFAFFDEMKEKGFTPDTFCYNTLLKALCDAGDLDGARSLMSEMVRNNVVLDIHTYTTMIIGLCKEQLVDEAMQVFDGMVEVGCHPSVMTYNVLIDGLYRAHRLEEARMLFYKMEVGNNPSLFLRLTLGANQVRDSETLQKLVESMCQSGQVLKAYKLLRGIIDSGVVPDVVTYNTLLNGLCKVRNLDGALRLFRELQVKGFPLDEITYGTLIDSLLRAHRYNDALTLFQDILHSGGTPSMPIYNSMMRSLCRMQKLSQAINLWFDHLPRKYNLLAQDEVISSARKKFEEGCLHEAVRELIKIDQEYGSVNSCPYTIWLIGLIQAGRIEDALKIFHILEESGIDITPACCVHLSKYLCLEGNLGAAVDVMLYTLKKGFTMRRYVGNRLLCSLCIHHRRKDAQALAWRMHLVGYDMDAYLHESTKGTYMEYSSLCHNIL

SEQ ID NO: 180518 - protein, 381 aa, Zea Mays
MFWKWSIHFGQLVLSCSCKCLQFLAVYHAWLVPELFGHDVSRDAFVEYWMDDNKITMDMASQIFEILRKPGCTYLTQDDFKPVLKELLATHPGLEFLQGTPEFQERYAETVIYRIFYSINRSGNGHLTLRELKRGNLIAALQQLDEEEDINKVLRYFSYEHFYVIYCKFWELDADHDFLIDKENLIKYGNHSLTYRIVDRIFTQIPRKFTSMTEGKMGYEDFVYFILSEEDKSSEPSLEYWFKCIDLDGNGILTYNEMQFFYEEQLHRMECMAQEPVVFGDILCQMIDMIGPENESYFTLRDLKRCKLSGNIFNILFNLNKFMAFETRDPFLIRQERENPTLTEWDRFAHREYIRLSMEEDGEDASNGSGDVWDESLEAPF

SEQ ID NO: 180519 - protein, 567 aa, Zea Mays
MDRLGAPHLSTGPNSHGHLDGAVMMVRMALKSPFLEPGMQMMSSPRAFLNLIYQMRLKLDLNLMEHYERHCPPPERRFNCLIPPPHGYKVPIKWPKSRDVVWKANIPHTHLAKEKSDQNWMVEAGEKIKFPGGGTHFHHGADKYISNIANMLNFKDNNINNDGMLRTVLDVGCGVASFGGYLLSSNVIAMSLAPNDVHQNQIQFALERGIPAYLGVLGTKRLPYPSRSFELAHCSRCRIDWLQRDGILLLELDRLLRPGGYFAYSSPEAYAQDEEDLRIWKEMSALVERMCWKIAEKRNQTVIWVKPLDNDCYKRRAHGTKPPLCKSGNDPDSVWGVPMEACITPYPEQMHRDGGTGLAPWPARLTAPPPRLADLYITADTFEKDTEMWQQRVENYWSLLGPKVKPDTIRNIMDMKANFGSFAAALKEKDVWVMNVVPHDGPSTLKIIYDRGLIGSNHDWCEAFSTYPRTYDLLHAWAVFSDLDKRGCSAEDLLLEMDRILRPTGFAIVRDKGTVIEFIKKYLHALHWEALTVVDAEPSPESEESEMILIIRKKLWLPKAGPQDSGT

SEQ ID NO: 180520 - protein, 50 aa, Zea Mays
MEAQATATVKEALAALYHHPDDAIRTAADRWLQEFQHTLDAWQDFYASSM

SEQ ID NO: 180521 - protein, 319 aa, Zea Mays
MEAQATATVKEALAALYHHPDDAIRTAADRWLQEFQHTLDAWQVADSLLHDESSNLETLIFCSQTLRSKVQRDFEELPSEAFRSLQDSLYVLLKKFNKGPQKVRTQICIAIAALAVHVPVEDWGAGGIVNWLSDEMKTHPEFIPGFLELLIVLPQETSSYKIAARPERRRQFEIDLCSSANVAIDLLTACMAIDQLKEQVLEGFSSWLRFCHGISASELASHPLVHLALSSLNSGQFLEAAVNVTSELIHATVSHGAGTMAEQVPLIQILVPHIMGLKEQLKDPSKDEEDVKAIARLYADMGESYVDLIATGTLMYHMD

SEQ ID NO: 180522 - protein, 672 aa, Zea Mays
MEAQATATVKEALAALYHHPDDAIRTAADRWLQEFQHTLDAWQVADSLLHDESSNLETLIFCSQTLRSKVQRDFEELPSEAFRSLQDSLYVLLKKFNKGPQKVRTQICIAIAALAVHVPVEDWGAGGIVNWLSDEMKTHPEFIPGFLELLIVLPQETSSYKIAARPERRRQFEIDLCSSANVAIDLLTACMAIDQLKEQVLEGFSSWLRFCHGISASELASHPLVHLALSSLNSGQFLEAAVNVTSELIHATVSHGAGTMAEQVPLIQILVPHIMGLKEQLKDPSKDEEDVKAIARLYADMGESYVDLIATGSDDSIQIVNALLEVTSLLEFAISSMTFNFWHCLKRNLIRRDSDVSYGLDVTVEIEKNRRLQIFRPKFETLVSLVSFRVEYPEDYHTFSEEDRKDFRHVRYAVSDVLLDATEVLGGDSTLKLLSTKLAQAYGSCNNEQNSKWQPVEATLFCIQAIARSVSIEEREILPQIMSLLPCLPQHEQLLQTVCLTIGAFSKWIDAAPAELSILPPLVDILNKGMSTSEDTAAAASMAFKYICEDCRTKFSGSLDGLFQIYHIAISGVGGYKVSSEDSLHLVEALSVIITTLPPESASRALELICQPVINPLQEFIQQGDQVLQRVPARHLTVHIDRLSSIFSNVKQPEVVAEAVYRYWPTLKSIFD

SEQ ID NO: 180523 - protein, 419 aa, Zea Mays
MEAQATATVKEALAALYHHPDDAIRTAADRWLQEFQHTLDAWQVADSLLHDESSNLETLIFCSQTLRSKVQRDFEELPSEAFRSLQDSLYVLLKKFNKGPQKVRTQICIAIAALAVHVPVEDWGAGGIVNWLSDEMKTHPEFIPGFLELLIVLPQETSSYKIAARPERRRQFEIDLCSSANVAIDLLTACMAIDQLKEQVLEGFSSWLRFCHGISASELASHPLVHLALSSLNSGQFLEAAVNVTSELIHATVSHGAGTMAEQVPLIQILVPHIMGLKEQLKDPSKDEEDVKAIARLYADMGESYVDLIATGSDDSIQIVNALLEVTSLLEFAISSMTFNFWHCLKRNLIRRDSDVSYGLDVTVEIEKNRRLQIFRPKFETLVSLVSFRVEYPEDYHTFSEEDRKDFRHVRYGIWELQQ

SEQ ID NO: 180524 - protein, 518 aa, Zea Mays
MEAQATATVKEALAALYHHPDDAIRTAADRWLQEFQHTLDAWQVADSLLHDESSNLETLIFCSQTLRSKVQRDFEELPSEAFRSLQDSLYVLLKKFNKGPQKVRTQICIAIAALAVHVPVEDWGAGGIVNWLSDEMKTHPEFIPGFLELLIVLPQETSSYKIAARPERRRQFEIDLCSSANVAIDLLTACMAIDQLKEQVLEGFSSWLRFCHGISASELASHPLVHLALSSLNSGQFLEAAVNVTSELIHATVSHGAGTMAEQVPLIQILVPHIMGLKEQLKDPSKAYGSCNNEQNSKWQPVEATLFCIQAIARSVSIEEREILPQIMSLLPCLPQHEQLLQTVCLTIGAFSKWIDAAPAELSILPPLVDILNKGMSTSEDTAAAASMAFKYICEDCRTKFSGSLDGLFQIYHIAISGVGGYKVSSEDSLHLVEALSVIITTLPPESASRALELICQPVINPLQEFIQQGDQVLQRVPARHLTVHIDRLSSIFSNVKQPEVVAEAVYRYWPTLKSIFD

SEQ ID NO: 180525 - protein, 617 aa, Zea Mays
MEAQATATVKEALAALYHHPDDAIRTAADRWLQEFQHTLDAWQVADSLLHDESSNLETLIFCSQTLRSKVQRDFEELPSEAFRSLQDSLYVLLKKFNKGPQKVRTQICIAIAALAVHVPVEDWGAGGIVNWLSDEMKTHPEFIPGFLELLIVLPQETSSYKIAARPERRRQFEIDLCSSANVAIDLLTACMAIDQLKEQVLEGFSSWLRFCHGISASELASHPLVHLALSSLNSGQFLEAAVNVTSELIHATVSHGAGTMAEQVPLIQILVPHIMGLKEQLKDPSKDEEDVKAIARLYADMGESYVDLIATGSDDSIQIVNALLEVTSLLEFAISSMTFNFWHCLKRNLIRRDSDVSYGLDVTVEIEKNRRLQIFRPKFETLVSLAYGSCNNEQNSKWQPVEATLFCIQAIARSVSIEEREILPQIMSLLPCLPQHEQLLQTVCLTIGAFSKWIDAAPAELSILPPLVDILNKGMSTSEDTAAAASMAFKYICEDCRTKFSGSLDGLFQIYHIAISGVGGYKVSSEDSLHLVEALSVIITTLPPESASRALELICQPVINPLQEFIQQGDQVLQRVPARHLTVHIDRLSSIFSNVKQPEVVAEAVYRYWPTLKSIFD

SEQ ID NO: 180526 - protein, 372 aa, Zea Mays
MGESYVDLIATGSDDSIQIVNALLEVTSLLEFAISSMTFNFWHCLKRNLIRRDSDVSYGLDVTVEIEKNRRLQIFRPKFETLVSLVSFRVEYPEDYHTFSEEDRKDFRHVRYAVSDVLLDATEVLGGDSTLKLLSTKLAQAYGSCNNEQNSKWQPVEATLFCIQAIARSVSIEEREILPQIMSLLPCLPQHEQLLQTVCLTIGAFSKWIDAAPAELSILPPLVDILNKGMSTSEDTAAAASMAFKYICEDCRTKFSGSLDGLFQIYHIAISGVGGYKVSSEDSLHLVEALSVIITTLPPESASRALELICQPVINPLQEFIQQGDQVLQRVPARHLTVHIDRLSSIFSNVKQPEVVAEAVYRYWPTLKSIFD

SEQ ID NO: 180527 - protein, 436 aa, Zea Mays
MEAQATATVKEALAALYHHPDDAIRTAADRWLQEFQHTLDAWQVADSLLHDESSNLETLIFCSQTLRSKVQRDFEELPSEAFRSLQDSLYVLLKKFNKGPQKVRTQICIAIAALAVHVPVEDWGAGGIVNWLSDEMKTHPEFIPGFLELLIVLPQETSSYKIAARPERRRQFEIDLCSSANVAIDLLTACMAIDQLKEQVLEGFSSWLRFCHGISASELASHPLVHLALSSLNSGQFLEAAVNVTSELIHATVSHGAGTMAEQVPLIQILVPHIMGLKEQLKDPSKDEEDVKAIARLYADMGESYVDLIATGSDDSIQIVNALLEVTSLLEFAISSMTFNFWHCLKRNLIRRDSDVSYGLDVTVEIEKNRRLQIFRPKFETLVSLVSFRVEYPEDYHTFSEEDRKDFRHVRYGPFVFQLLVMCYLMQLKFLGVTRR

SEQ ID NO: 180528 - protein, 484 aa, Zea Mays
MSLLPCLPQHEQLLQTVCLTIGAFSKWIDAAPAELSILPPLVDILNKGMSTSEDTAAAASMAFKYICEDCRTKFSGSLDGLFQIYHIAISGVGGYKVSSEDSLHLVEALSVIITTLPPESASRALELICQPVINPLQEFIQQGDQVLQRVPARHLTVHIDRLSSIFSNVKQPEVVAEAVYRYWPTLKSIFDQRAWDTRTMESICRSCKFAVRTCGRFMGMTIGAMLEEIQTLYQQHKQSCFLYLSSEVIKIFGSDPSCAGYLTSLIQILFSHTVQLLRTIQDFTARPDIADDCYLLASRCIRYCPDLFIPTETFQRLVDCAMAGITIHHREACKSILSFLSDVIDLPNSSGGGQYREVINTIILQRGTTLTRIMIAALTGALPSGRLEEVSYVLLSLSRAFGEDMLNWARESINLIPPQALTDAERLRFFNIISDATSGSSLHNITDRFGEISDICRRNKTVQDLVQSALRPQDLTVTVVRQQM

SEQ ID NO: 180529 - protein, 301 aa, Zea Mays
MFAVGPDAGRGGFVEVFAGFGVRSGEGLRWWTLTPRREVTGLGLGDDGLGLGAEREEAILYRVSFIVSVFELNTLRTTTPFPRKTARILDMLDMAYGSCNNEQNSKWQPVEATLFCIQAIARSVSIEEREILPQIMSLLPCLPQHEQLLQTVDILNKGMSTSEDTAAAASMAFKYICEDCRTKFSGSLDGLFQIYHIAISGVGGYKVSSEDSLHLVEALSVIITTLPPESASRALELICQPVINPLQEFIQQGDQVLQRVPARHLTVHIDRLSSIFSNVKQPEVVAEAVYRYWPTLKSIFD

SEQ ID NO: 180530 - protein, 163 aa, Zea Mays
MAGITIHHREACKSILSFLSDVIDLPNSSGGGQYREVINTIILQRGTTLTRIMIAALTGALPSGRLEEVSYVLLSLSRAFGEDMLNWARESINLIPPQALTDAERLRFFNIISDATSGSSLHNITDRFGEISDICRRNKTVQDLVQSALRPQDLTVTVVRQQM

SEQ ID NO: 180531 - protein, 378 aa, Zea Mays
MENMRYAEELVREFLVFRGFTSTLQAYETELSTEIGRNFQGDKIVDLVFSEYVPKYQLDKLLGLFAFFKQCFMSPADTELFSTLVKLELSVLRYYVINALKSGRQDKVIEFFGESGNYLMQKRGDWLAWFAIPYIKNPSLDPQFRLYFSKEWLDTLVLSFRNFLSGIFNDTPLMRISSEKNTIKSLKNDIKQLNNKLAELQASLEEKEDEISLLRRNYNSGGYGNKNVVGTSTAGSPHEEMSENYEESSASSSMIQGFDSRSSSSVKSYTRGGKFHESSEINHTEDQQVLVTEEEFPEVKVDFQETFLGHNSPISRCRFSASGSNIASSSIDGTVRNATIYCGSEVSALSWECRSDRLAQLMEELKLGMLMQRELFAT

SEQ ID NO: 180532 - protein, 309 aa, Zea Mays
MENMRYAEELVREFLVFRGFTSTLQAYETELSTEIGRNFQGDKIVDLVFSEYVPKYQLDKLLGLFAFFKQCFMSPADTELFSTLVKLELSVLRYYVINALKSGRQDKVIEFFGESGNYLMQKRGDWLAWFAIPYIKNPSLDPQFRLYFSKEWLDTLVLSFRNFLSGIFNDTRTPALMRISSEKNTIKSLKNDIKQLNNKLAELQASLEEKEDEISLLRRNYNSGGYGNKNVVGTSTAGSPHEEMSENYEESSASSSMIQGFDSRSSSSVKSYTRGGKFHESSEINHTEDQQVLVTEEEFPEVKVDFQSN

SEQ ID NO: 180533 - protein, 226 aa, Zea Mays
MENMRYAEELVREFLVFRGFTSTLQAYETELSTEIGRNFQGDKIVDLVFSEYVPKYQLDKLLGLFAFFKQCFMSPADTELFSTLVKLELSVLRYYVINALKSGRQDKVIEFFGESGNYLMQKRGDWLAWFAIPYIKNPSLDPQFRLYFSKEWLDTLVLSFRNFLSGIFNDTRTPALMRISSEKNTIKSLKNDIKQLNNKLAELQASLEEKEDEISLLRRGSAGFGD

SEQ ID NO: 180534 - protein, 391 aa, Zea Mays
MENMRYAEELVREFLVFRGFTSTLQAYETELSTEIGRNFQGDKIVDLVFSEYVPKYQLDKLLGLFAFFKQCFMSPADTELFSTLVKLELSVLRYYVINALKSGRQDKVIEFFGESGNYLMQKRGDWLAWFAIPYIKNPSLDPQFRLYFSKEWLDTLVLSFRNFLSGIFNDTRTPALMRISSEKNTIKSLKNDIKQLNNKLAELQASLEEKEDEISLLRRNYNSGGYGNKNVVGTSTAGSPHEEMSENYEESSASSSMIQGFDSRSSSSVKSYTRGGKFHESSEINHTEDQQVLVTEEEFPEVKVDFQETFLGHNSPISRCRFSASGSNIASSSIDGTVRIWTYDSSTASSRNATIYCGSEVSALSWECRSDRLLMEELKLGMLMQRELFAT

SEQ ID NO: 180535 - protein, 368 aa, Zea Mays
MENMRYAEELVREFLVFRGFTSTLQAYETELSTEIGRNFQGDKIVDLVFSEYVPKYQLDKLLGLFAFFKQCFMSPADTELFSTLVKLELSVLRYYVINALKSGRQDKVIEFFGESGNYLMQKRGDWLAWFAIPYIKNPSLDPQFRLYFSKEWLDTLVLSFRNFLSGIFNDTPLMRISSEKNTIKSLKNDIKQLNNKLAELQASLEEKEDEISLLRRNYNSGGYGNKNVVGTSTAGSPHEEMSENYEESSASSSMIQGFDSRSSSSVKSYTRGGKFHESSEINHTEDQQVLVTEEEFPEVKVDFQAITVQLADVDFLHLGQILLVHQLMAQLGFGHMIRQLHHPEMLLYTVGLKSVHFHGNADLTDCCS

SEQ ID NO: 180536 - protein, 371 aa, Zea Mays
MENMRYAEELVREFLVFRGFTSTLQAYETELSTEIGRNFQGDKIVDLVFSEYVPKYQLDKLLGLFAFFKQCFMSPADTELFSTLVKLELSVLRYYVINALKSGRQDKVIEFFGESGNYLMQKRGDWLAWFAIPYIKNPSLDPQFRLYFSKEWLDTLVLSFRNFLSGIFNDTRTPALMRISSEKNTIKSLKNDIKQLNNKLAELQASLEEKEDEISLLRRNYNSGGYGNKNVVGTSTAGSPHEEMSENYEESSASSSMIQGFDSRSSSSVKSYTRGGKFHESSEINHTEDQQVLVTEEEFPEVKVDFQAITVQLADVDFLHLGQILLVHQLMAQLGFGHMIRQLHHPEMLLYTVGLKSVHFHGNADLTDWHS

SEQ ID NO: 180537 - protein, 371 aa, Zea Mays
MENMRYAEELVREFLVFRGFTSTLQAYETELSTEIGRNFQGDKIVDLVFSEYVPKYQLDKLLGLFAFFKQCFMSPADTELFSTLVKLELSVLRYYVINALKSGRQDKVIEFFGESGNYLMQKRGDWLAWFAIPYIKNPSLDPQFRLYFSKEWLDTLVLSFRNFLSGIFNDTRTPALMRISSEKNTIKSLKNDIKQLNNKLAELQASLEEKEDEISLLRRNYNSGGYGNKNVVGTSTAGSPHEEMSENYEESSASSSMIQGFDSRSSSSVKSYTRGGKFHESSEINHTEDQQVLVTEEEFPEVKVDFQAITVQLADVDFLHLGQILLVHQLMAQLGFGHMIRQLHHPEMLLYTVGLKSVHFHGNADLTDCCS

SEQ ID NO: 180538 - protein, 181 aa, Zea Mays
MLSLVRLNYNSGGYGNKNVVGTSTAGSPHEEMSENYEESSASSSMIQGFDSRSSSSVKSYTRGGKFHESSEINHTEDQQVLVTEEEFPEVKVDFQETFLGHNSPISRCRFSASGSNIASSSIDGTVRIWTYDSSTASSRNATIYCGSEVSALSWECRSDRLAQLMEELKLGMLMQRELFAT

SEQ ID NO: 180539 - protein, 134 aa, Zea Mays
MIHMFGWPAHDSPVSSVLFGPAETSIFSLGSDGKILEWSLHNQGQILWSRDCSRFCNPESFKTRMHEIALDSNGKRLLVTSGLVRAPIYQVQGHESELRTLPHSSSITSVDWHPTLPMYITGSADHSVRVTSIL

SEQ ID NO: 180540 - protein, 172 aa, Zea Mays
MKTWKPLTVLPLGEDPPAITSLCFNHNGKILAASATDGMIHMFGWPAHDSPVSSVLFGPAETSIFSLGSDGKILEWSLHNQGQILWSRDCSRFCNPESFKTRMHEIALDSNGKRLLVTSGLVRAPIYQVQGHESELRTLPHSSSITSVDWHPTLPMYITGSADHSVRVTSIL

SEQ ID NO: 180541 - protein, 375 aa, Zea Mays
MCAPIYFSYFIFFNLFFCCALCIVHVFHIFGTLSFAAEDQQVLVTEEEFPEVKVDFQETFLGHNSPISRCRFSASGSNIASSSIDGTVRIWTYDSSTASSRNATIYCGSEVSALSWECRSDRLLLIGTANGGIKAWNADAKRVVCDLSTSRNFPSILDLKCSPVEPVFVSAAASRRHGSTTFERTGFANLTVWHMKTWKPLTVLPLGEDPPAITSLCFNHNGKILAASATDGMIHMFDMSAGLQITGWPAHDSPVSSVLFGPAETSIFSLGSDGKILEWSLHNQGQILWSRDCSRFCNPESFKTRMHEIALDSNGKRLLVTSGLVRAPIYQVQGHESELRTLPHSSSITSVDWHPTLPMYITGSADHSVRVTSIL

SEQ ID NO: 180542 - protein, 268 aa, Zea Mays
MERVIGGKYKLGRKIGSGSFGELYLGVNIQNGEEVGIKLEPVKTKHPQLHYESKVYMLLQGGNGIPHLKWYGVEGEYNVMVIDLLGPSLEDLFNSCHRNFSMKTVLMLADQLINRVEYMHSKGFIHRDIKPDNFLMGLGRKANQVYIIDYGLAKKYKDLHTHKHIPYRENKNLTGTARYASVNTHLGIEQSRRDDLESAGYLLLYFLRGSLPWQGLKAGTKKQKYDKISEKKMLTSAEVLCNLTRRSSSHISTIVAPCDLKTGQTTLF

SEQ ID NO: 180543 - protein, 269 aa, Zea Mays
MERVIGGKYKLGRKIGSGSFGELYLGVNIQNGEEVGIKLNQDIPFLNLELKCLVQGFTFSLGGNGIPHLKWYGVEGEYNVMVIDLLGPSLEDLFNSCHRNFSMKTVLMLADQLINRVEYMHSKGFIHRDIKPDNFLMGLGRKANQVYIIDYGLAKKYKDLHTHKHIPYRENKNLTGTARYASVNTHLGIEQSRRDDLESAGYLLLYFLRGSLPWQGLKAGTKKQKYDKISEKKMLTSAEVLCNLTRRSSSHISTIVAPCDLKTGQTTLF

SEQ ID NO: 180544 - protein, 439 aa, Zea Mays
MERVIGGKYKLGRKIGSGSFGELYLGVNIQNGEEVGIKLEPVKTKHPQLHYESKVYMLLQGGNGIPHLKWYGVEGEYNVMVIDLLGPSLEDLFNSCHRNFSMKTVLMLADQLINRVEYMHSKGFIHRDIKPDNFLMGLGRKANQVYIIDYGLAKKYKDLHTHKHIPYRENKNLTGTARYASVNTHLGIEQSRRDDLESAGYLLLYFLRGSLPWQGLKAGTKKQKYDKISEKKMLTSAEINTVGYQFDYVFDWTVLKHPQIGSNNKLVQQPSARMAGVGPSVDRTDKASVGQEARDRFTGAVEAFARRNPGSGRHGDHSRHQSLADSFGTSNEAVADSEKTHILSWGGSSSKMPAASSSRPTSSGDCSDQNHRWVSGSSGGSGRPSTVQRHHHSAGAENSRSSTRSPVARNAAERGGSGSRDSTTFRSLERLSITTSRRK

SEQ ID NO: 180545 - protein, 162 aa, Zea Mays
MNNMGHCNFELVPNWLFKWFPPLKYLMYTPSFHSLHHTQFRTNYSLFMPFYDYIYNTMDKSSDTLYEKSLKGKEETADVVHLTHLTSLHSIYHMRPGFAEYASRPYTAKWYVRMMWPMSWLSMVLTWSYGSSFTVERNVMKKLKMQSWVIPRYSFHVRTIVN

SEQ ID NO: 180546 - protein, 304 aa, Zea Mays
MNNMGHCNFELVPNWLFKWFPPLKYLMYTPSFHSLHHTQFRTNYSLFMPFYDYIYNTMDKSSDTLYEKSLKGKEETADVVHLTHLTSLHSIYHMRPGFAEYASRPYTAKWYVRMMWPMSWLSMVLTWSYGSSFTVERNVMKKLKMQSWVIPRYSFHYGLSWEKEAINSLVEKAICEADKKGAKVVTLGLLNQVWLIGDGLDASEQFKAQKGTQFIPYSQFPPRMARKDTCTYSTTPAMVVPKTLQNVHSCENWLPRRVMSAWRIAGMVHALEGWNEHECGDIVLDMEKMWSGALLHGFRPVAQV

SEQ ID NO: 180547 - protein, 90 aa, Zea Mays
MESDQGKLFIGGISWETTEEKLSEHFSAYGEVTQAAVMRDKITGRPRGFGFVVFADPAAVDRALQDPHTLDGRTVEWDGILFLDMPKQGL

SEQ ID NO: 180548 - protein, 304 aa, Zea Mays
MYDQNTQRPRGFGFITFDSEDAVDRVLQKTFHDLGGKLVEVKRALPREANPGGSGGGRSGGGGGYQSNNGHNTSSGSYDGRSDGGRYGQTQQGSGGGGYPGYGAGGYGAGAAGYGYGANPAVGYGNYGAGGYGGVPAAYGGHYGNPGAAGSGYQGGHPGSNRGPWGSQAPSAYGTGGYGGSAGYSAWNNSSGGGNALNSQAPGGPAGYGSQGYGYGGYGGDPSYASHGGYGAYGARIDSAGNPATGGSSGYNAGYGSGGANSGYSSAWSDPSQGGGFGGSVNGGAEGQSTYGTGYGSVQPRVAQ

SEQ ID NO: 180549 - protein, 101 aa, Zea Mays
MLRLPRIYRIQFFFADDIPSAGPFVLAKYSLTESEPLLAVARVMRVLITRPQDCEANLASMAAKTLDTSEDSLVVYQFANWEKTDPLKLHPNKKKRITHLH

SEQ ID NO: 180550 - protein, 54 aa, Zea Mays
MGSRGGRGSPDGAPHEPPGLPTSFSPHHCEVSGALQTALLHMPRKEVPVERLKP

SEQ ID NO: 180551 - protein, 116 aa, Zea Mays
MGSRGGRGSPDGAPHEPPGLPTSFSPHHCEVSGALQTALLHMPRKDEVLYTIVPASETGGPSGAAKAEGRGTGERELGSQVKVPDRTKPAREGEAGEGAHFHGVDQRHRAHQERCR

SEQ ID NO: 180552 - protein, 432 aa, Zea Mays
MVFIDLEKAYEKIVKPRPLQAASIPGLLGIFQNEWDALMLSNFALEQQLHTARQELSHALYQHDAACRVIARLKKERDDARALLAQAERQIPASVAGAAPAAVVSNGKRVIEDEIGPDGKKIRPGINPVMIDELTECNAMLSAQRKKRQVPPTLAPIDALERYTQISSHPLHKTNKPGILSMDIHPSKDIVATGGIDTNAVIFDRSSGQILCTLAGHSKKITTLKFIPRDQLFVTGSADKTVRIWQENENGNYNCVHTLKDHTDEVEAVTVHVTQKYFVSASKDNSWCFYDISTGSCLTQVGDASGQEGYTSASFHPDGLILGTGTTDAVVKIWDVKAQSNVAKFEGHVGPVTAMSFSENGYFLATAAHDGVKLWDLRKLRNFRTFSPYDLDTPTNTVEFDFSGNYLAIGGSDIRVYQVANVKAEWNLIKTE

SEQ ID NO: 180553 - protein, 78 aa, Zea Mays
MSFSENGYFLATAAHDGVKLWDLRKLRNFRTFSPYDLDTPTNTVEFDFSGNYLAIGGSDIRVYQVANVKAEWNLIKTE

SEQ ID NO: 180554 - protein, 89 aa, Zea Mays
MAPAWERARRALATRFCMRFAARRVVVEDAPRGMDDIEAEEEEEQEQQQHQEEPAEDEREMSLAAESEDLASSWSGSRSSENLLGHLQA

SEQ ID NO: 180555 - protein, 379 aa, Zea Mays
MYIRDLKNTKGHISGLTGGEWNPKSKETILTSSEDGSMRLWDVSDFTSQKQVIKPKLVRPMRIPVTSCAWDHEGKRIVGGIGDGSIQVWTIKAGWGSRPDIHVEKTHTEDITGVKFSTDGQSLLSRSMDSTLKIWDLRRMKTPLKVFEDLPNHYAETNAAFSSDEQLIFTGTSIEKDGDNGGLLCFFDRKKLELVSRVGISAHYSVIRCLWHPRINQVFATVGDKKEGGTHILYDPSISQRGALVCVGRAPRKKSVDDFEVQPVIHNPHALPLFRDQPSRKRQREKILKDPLKSHKPEAPVNGPGFGGRVGTTKGSLLTQYLLKEGGLIKETWMDEDPREAILKYADAAEKDPKFIAPAYSQTQPKPVFAESDSDNEEK

SEQ ID NO: 180556 - protein, 187 aa, Zea Mays
MKTPLKVFEDLPNHYAETNAAFSSDEQLIFTGTSIEKDGDNGGLLCFFDRKKLELVSRVGISAHYSVIRCLWHPRINQVFATVGDKKEGGTHILYDPSISQRGALVCVGRAPRKKSVDDFEVQPVIHNPHALPLFRDQPSRKRQREKILKDPLKSHKPEAPVNGPGFGGRVGTTKGSLLTQYLLKVV

SEQ ID NO: 180557 - protein, 299 aa, Zea Mays
MEAVVVDAGSKLLKAGIAAPDQAPPLVMPSKMKLDVEDQEMADGAVVEEVVHPVVRGFVKDWDAMEDLLNYVLYRDIGWEIGDEGQILFTEPLFTPKTLREQLVQLMFEKFNVSGFYASEQAVLSLYAVGRISGCTVDIGHGKIDIAPVCEGAVQHIASKRLEIGGVDLTNLFAQELKKSNPSVNLDVADVELLKEQYACCTEDYLTFESIESSCQPEKHTLPDGQVITIEKEGYIVGEALFQPRILGLEDYGIVHQLVTSVSNVSSEYHRQLLENTMLCGGTSSMTVEHNFIQDENLP

SEQ ID NO: 180558 - protein, 356 aa, Zea Mays
MEAVVVDAGSKLLKAGIAAPDQAPPLVMPSKMKLDVEDQEMADGAVVEEVVHPVVRGFVKDWDAMEDLLNYVLYRDIGWEIGDEGQILFTEPLFTPKTLREQLVQLMFEKFNVSGFYASEQAVLSLYAVGRISGCTVDIGHGKIVCEGAVQHIASKRLEIGGVDLTNLFAQELKKSNPSVNLDVADVELLKEQYACCTEDYLTFESIESSCQPEKHTLPDGQVITIEKEGYIVGEALFQPRILGLEDYGIVHQLVTSVSNVSSEYHRQLLENTMLCGGTSSMTGFEDRFQREANLSASAICPSLVKPPEYMPENLARYSAWLGGAILAKVVFPQNQHVTKGEYDETGPSIVHKKCF

SEQ ID NO: 180559 - protein, 83 aa, Zea Mays
MLCGGTSSMTGFEDRFQREANLSASAICPSLVKPPEYMPENLARYSAWLGGAILAKVVFPQNQHVTKGEYDETGPSIVHKKCF

SEQ ID NO: 180560 - protein, 269 aa, Zea Mays
MFSGTGPSGGAAHSTSTGGGGGSPSDRGGPAPSASASVSTPASESTVARRLNGLDPHGDDAPSSQPATSKKKKRGARAVGPDKNGRGLRQFSMRVCEKVESKGRTTYNEVADELVAEFSDPNINIDSPDPDNSSAQQYDEKNIRRRVYDALNVLMAMEIISKDKKEIQWRGLPKTSMNDIEELKTEVNGLKGRIDKKNAYLQDLQDQYACLQNLVRRNEQLYGSGDAPSGGVALPFILVQTRPHATVEVEISEDMQHVHFDFNRMIHLY

SEQ ID NO: 180561 - protein, 277 aa, Zea Mays
MFSGTGPSGGAAHSTSTGGGGGSPSDRGGPAPSASASVSTPASESTVARRLNGLDPHGDDAPSSQPATSKKKKRGARAVGPDKNGRGLRQFSMRVCEKVESKGRTTYNEVADELVAEFSDPNINIDSPDPDNSSAQQYDEKNIRRRVYDALNVLMAMEIISKDKKEIQWRGLPKTSMNDIEELKTEVNGLKGRIDKKNAYLQDLQDQYACLQNLVRRNEQLYGSGDAPSGGVALPFILVQTRPHATVEVEISEDMQHVHFDFNRASLESQIPSGIGG

SEQ ID NO: 180562 - protein, 236 aa, Zea Mays
MFSGTGPSGGAAHSTSTGGGGGSPSDRGGPAPSASASVSTPASESTVARRLNGLDPHGDDAPSSQPATSKKKKRGARAVGPDKNGRGLRQFSMRVCEKVESKGRTTYNEVADELVAEFSDPNINIDSPDPDNSSAQQYDEKNIRRRVYDALNVLMAMEIISKDKKEIQWRGLPKTSMNDIEELKTEVNGLKGRIDKKNAYLQDLQDQTRPHATVEVEISEDMQHVHFDFNRMIHLY

SEQ ID NO: 180563 - protein, 177 aa, Zea Mays
MRVCEKVESKGRTTYNEVADELVAEFSDPNINIDSPDPDNSSAQQYDEKNIRRRVYDALNVLMAMEIISKDKKEIQWRGLPKTSMNDIEELKTEVNGLKGRIDKKNAYLQDLQDQYACLQNLVRRNEQLYGSGDAPSGGVALPFILVQTRPHATVEVEISEDMQHVHFDFNRMIHLY

SEQ ID NO: 180564 - protein, 413 aa, Zea Mays
MAVGGPSWPNLQCLVRRKPATAGWAEDADRGGVQRLAKTLSIPHLVAIGVGSTIGAGIYVLVGTVAREHTGPGLTLSFLIAGVAAALSALCYAELSCRFPSAGSAYHYSYICIGESVAWLIGWALILEYTIGGSSVARGMSPNLALFFGGQDKLPFFLAQVHVKGLDTPVDPCAAILVLIVTALLCLGIKESSSVEGIITTANIIVMLFVICAGGWLGFRNGWVGYKVPEGYFPNGISGVLSGSATLFFAFIGFDTVASTAEEVKNPRRDLPLGMGLTLSLCCFLYMMVSAVVVGLVPYHAMDPDTPISSVFARYGMQWAEYVVSSGAVLALVASLIGGILPQRSKQDDVRGGGRNHKRRGARRGAPQGDLWARRGPRRGVGVSVAMKPWRSLGAGGRATRSWRLGGIATRSW

SEQ ID NO: 180565 - protein, 148 aa, Zea Mays
MVLHPEQAGSSEATGQEAHHGRMNGEEEKYVAWNGCMLLERPSSKTRVMYHHCCIFLAVSGFGCCNVCEIWKYVAWLHHLVRTQKQSVVSSGSGRSFIRFSCMITGRHGWGMACLFVPSIDMIIMANVLPVLWVRVDPYRTVEWVEWR

SEQ ID NO: 180566 - protein, 63 aa, Zea Mays
MRRCCIVSPSWSQRGHALGWGSPLLVRQSAVQHLLCMTSQRKKLHFEDVQDSQTRSNAPRPLS

SEQ ID NO: 180567 - protein, 518 aa, Zea Mays
MDGLVAPSPSHSGATSGGGASHRKRKLPPSSLSDATGDEDDDTTAPSSPSTAPSSPSRPSSPSSSHSDDDDDDSLHTFNAARLDGAPSGGSASGRPPKPDSSSVSAAAAAAAAAVGGGPKPEPGSANAGDGKEDTKGLFTDNLQTSGAYSAREEGLKREEDSGRLKFLCYSNDGVDEHMIWLVGLKNIFARQLPNMPKEYIVRLVMDRTHKSMMVIRNNIVVGGITYRPYASQRFGEIAFCAITADEQVKGYGTRLMNHLKQHARDADGLTHFLTYADNNAVGYFVKQGFTKEITLDKERWQGYIKDYDGGILMECKIDPKLPYVDVATMIRRQRQAIDEKIRELSNCHIVYSGIDFQKKEAGIPRRLIKPEDIPGLREAGWTPDQLGHSKSRSSFSPDYNTYRQQLTTLMQTALKNLNEHPDAWPFKEPVDSRDVPDYYDIIKDPIDLRTMLRRVDSEQYYVTLEMFVADMKRMFSNARTYNSPDTIYYKCATRLSTSAAAVSGCSSQHLRRVPNQG

SEQ ID NO: 180568 - protein, 337 aa, Zea Mays
MIWLVGLKNIFARQLPNMPKEYIVRLVMDRTHKSMMVIRNNIVVGGITYRPYASQRFGEIAFCAITADEQVKGYGTRLMNHLKQHARDADGLTHFLTYADNNAVGYFVKQGFTKEITLDKERWQGYIKDYDGGILMECKIDPKLPYVDVATMIRRQRQAIDEKIRELSNCHIVYSGIDFQKKEAGIPRRLIKPEDIPGLREAGWTPDQLGHSKSRSSFSPDYNTYRQQLTTLMQTALKNLNEHPDAWPFKEPVDSRDVPDYYDIIKDPIDLRTMLRRVDSEQYYVTLEMFVADMKRMFSNARTYNSPDTIYYKCATRLENFFSGRITVLLAQLSTKS

SEQ ID NO: 180569 - protein, 588 aa, Zea Mays
MTAQTKKRGATENGDGVGLGLAAFIANNEDVGPVVRHAFESGKPEALLHSLQNIVKNKEVEIEEICRLHYEEFILAVDELRGVLVDADELKGTLSDENLRLQEVASALLLKLDELFEIYSVNSNVGEALATLKICLQVTNLCKVCNRDITEAKLLSALKTLELIEKDYLQNIPLKLLKKVIHKQVPMVKLYIEKKVCSEFNEWLVYIRRTAKDIGQVAINQTSLTHKKDQGICARQREAEESSLVGFDVNAYTLDVEHMAEEAMLEFDLVPVYRAHHIHIGLGLGEKFREYYYNNRLMQLNLDLQISTSQPFVESYQPFIAQVAGFFIVEDRVFRTADGLLSESQVDTMLETAISKLTLILEEQFSRIHAANHLLLIKGYVSLFGATLKKYGYRSMSLAEILDKTRDKYLELLLSDCRKQLNEAFSRDSYERMVIKKQNEYDANIAAFQLDPIDGVSNLPYVAPFSSSVPNACRIVRSFIEELVSYLSLSGGVNVYDVVKSYLDKFLIETLNDGFLKLIHGGSLEFPQVVQIAGNIAVLEQSCDMFLWHAARLCGVFRAAGRAKGRAVQGCIWRAEPHLGLYDDGPSQ

SEQ ID NO: 180570 - protein, 96 aa, Zea Mays
MAVHRLQPSLSGLQCSTARSPVLLHGPRLTGARTGRRGGFGGPRFDVQRATWRWLTSSSTATCSYNYCWPYREMLGLLYQLFKAWTLLFFQHLTFE

SEQ ID NO: 180571 - protein, 73 aa, Zea Mays
MFLGPTATVLRHTVAAHLVPSHQISSSTSKSRSSECHVSSLVQSVLTGICWQATSTHHRLSLSPSVLPPFLLC

SEQ ID NO: 180572 - protein, 94 aa, Zea Mays
MAVHRLQPSLSGLQCSTARSPVLLHGPRLTGARTGRRGGFGGPRFDVQRATWRWLTSSSTATCSYNYCWPYREMLGLLYQLFKAWTLYSYMFLS

SEQ ID NO: 180573 - protein, 535 aa, Zea Mays
MLSVVRVHLPSEIPIVGCEVTPYVLLRRPDGAVSTDDVPETAPADGQFMRYRWYRIQSDRKVPICSVHPMEQATIQCLGCLKSKIPVAKSYHCSAKCFSDAWQHHKVLHERASSAQNENGAEEEELCGSAVDSEKRSPIGPPTSVMTSHVIPAPTPTPRRLIQVNGDVLGHLDLDSQTSSLGTFTVLSYNILADTYATSDAYSYCPTWALTWTYRRQNLLREIIGYHADIICLQEVQVNHFEDFFSPELDRHGYQALYKKRTTEVYSGNPMAIDGCATFFRRDKFSHVKKYEVEFNKAAQSLTDAIIPSAQKRLALNRLIKDNIALIAVLEAKFANHGAENPGKRQLLCVANTHINVHQDLKDVKLWEVHTLLKGLEKIAVSADIPMLVCGDFNSPPGSSPHALLAMGKVDQHHPDLAIDPLGILRPPSKLNHQLPLVSAYSAFARMVGVGYDLEHQRRRTDPATNEPLFTNCTRDFTGTVDYIFYTADSLTVDSLLELLDEESLRKDTALPSPGWSSDHIALLAEFRCKPRIRS

SEQ ID NO: 180574 - protein, 421 aa, Zea Mays
MLSVVRVHLPSEIPIVGCEVTPYVLLRRPDGAVSTDDVPETAPADGQFMRYRWYRIQSDRKVPICSVHPMEQATIQCLGCLKSKIPVAKSYHCSAKCFSDAWQHHKVLHERASSAQNENGAEEEELCGSGGSGVLSTAGSGSLSNFGQSPSINNEPVPLYPSGTDKNSGETWYEVGRLRTYTPTAADIGHALKFECVAVDSEKRSPIGPPTSVMTSHVIPAPTPTPRRLIQVNGDVLGHLDLDSQTSSLGTFTVLSYNILADTYATSDAYSYCPTWALTWTYRRQNLLREIIGYHADIICLQEVQVNHFEDFFSPELDRHGYQALYKKRTTEVYSGNPMAIDGCATFFRRDKFSHVKKYEVEFNKAAQSLTDAIIPSAQKRLALNRLIKDNIALIAVLEAKFANHGAENPGKRQLLCVVRE

SEQ ID NO: 180575 - protein, 534 aa, Zea Mays
MEQATIQCLGCLKSKIPVAKSYHCSAKCFSDAWQHHKVLHERASSAQNENGAEEEELCGSGGSGVLSTAGSGSLSNFGQSPSINNEPVPLYPSGTDKNSGETWYEVGRLRTYTPTAADIGHALKFECVAVDSEKRSPIGPPTSVMTSHVIPAPTPTPRRLIQVNGDVLGHLDLDSQTSSLGTFTVLSYNILADTYATSDAYSYCPTWALTWTYRRQNLLREIIGYHADIICLQEVQVNHFEDFFSPELDRHGYQALYKKRTTEVYSGNPMAIDGCATFFRRDKFSHVKKYEVEFNKAAQSLTDAIIPSAQKRLALNRLIKDNIALIAVLEAKFANHGAENPGKRQLLCVANTHINVHQDLKDVKLWEVHTLLKGLEKIAVSADIPMLVCGDFNSPPGSSPHALLAMGKVDQHHPDLAIDPLGILRPPSKLNHQLPLVSAYSAFARMVGVGYDLEHQRRRTDPATNEPLFTNCTRDFTGTVDYIFYTADSLTVDSLLELLDEESLRKDTALPSPGWSSDHIALLAEFRCKPRIRS

SEQ ID NO: 180576 - protein, 627 aa, Zea Mays
MSGMSARIKEMVRVATARLGGEQAGGGGASSSGFARRESTARLGGGGTSLRRQPQPMAPSVRTVCCNDREANAPVGYKGNSVSTTKYNILTFLPKGLFEQFRRVANLYFLMISIMSTTPISPVHPVTNVVPLSLVLLVSLIKEAFEDWKRFQNDMSINNAHVDVLQGQCWESTPWKRLQVGDIVRIKQDGYFPADLLFLSSTNPDGVCYIETANLDGETNLKIRKALEKTWDYVIPEKASEFKGEVQCEQPNNSLYTFTGNLIMDKQTIPLSPNQLLLRGCSLRNTEYIVGVVIFTGHETKVMMNSMNVPSKRSTLEKKLDKLILALFATLFTMCVIGAIGSGVFINEKYFYLGLRGHVEDQFNPQNKFVVTILTMFTLITLYSTIIPISLYVSIEMIKFIQCTKFINNDLHMYHAESNTPALARTSNLNEELGQVEYIFSDKTGTLTRNLMEFFKCSIGGEMYGTGITEIEKGGAERAGIKIDDDEGKRSANAVHEKGFNFDDARIMRGAWRNEPNLEACKEFFRCLAICHTVLPEGEETPEKISYQAASPDEAALVAAAKNFGFFFYSSSPNPSASYAASGHAVLQSSDCSSSSTGGHCNDARLLFHGRPLQRRAIPLPRVATAM

SEQ ID NO: 180577 - protein, 1243 aa, Zea Mays
MSGMSARIKEMVRVATARLGGEQAGGGGASSSGFARRESTARLGGGGTSLRRQPQPMAPSVRTVCCNDREANAPVGYKGNSVSTTKYNILTFLPKGLFEQFRRVANLYFLMISIMSTTPISPVHPVTNVVPLSLVLLVSLIKEAFEDWKRFQNDMSINNAHVDVLQGQCWESTPWKRLQVGDIVRIKQDGYFPADLLFLSSTNPDGVCYIETANLDGETNLKIRKALEKTWDYVIPEKASEFKGEVQCEQPNNSLYTFTGNLIMDKQTIPLSPNQLLLRGCSLRNTEYIVGVVIFTGHETKVMMNSMNVPSKRSTLEKKLDKLILALFATLFTMCVIGAIGSGVFINEKYFYLGLRGHVEDQFNPQNKFVVTILTMFTLITLYSTIIPISLYVSIEMIKFIQCTKFINNDLHMYHAESNTPALARTSNLNEELGQVEYIFSDKTGTLTRNLMEFFKCSIGGEMYGTGITEIEKGGAERAGIKIDDDEGKRSANAVHEKGFNFDDARIMRGAWRNEPNLEACKEFFRCLAICHTVLPEGEETPEKISYQAASPDEAALVAAAKNFGFFFYRRTPTTVMVRESHVERMGSIQDVPYEILNVLEFNSTRKRQSVVCRFPNGRLVLYCKGADNVVYERLADGNHDMKKTSREHLEQFGSAGLRTLCLAYRDLSREQYESWNEKFVQAKSSLRDRDKKLDEVAELIEKDLILVGCTAIEDKLQEGVPTCIETLSAAGIKIWVLTGDKMETAINIAYACSLVNNDTKQFIISSETDTIREAEDRGDPVEIARVIKDSVKQSLKSFHEEARHSLISTPERKLALIIDGRCLMYALDPTLRVDLLGLSLSCHSVVCCRVSPLQKAQVTSLVRKGAQKITLSIGDGANDVSMIQAAHVGIGISGQEGMQAVMASDFAIAQFRFLTDLLLVHGRWSYLRLCKVITYFFYKNLTFTLTQFWFTFQTGFSGQRFYDDWFQSLYNVIFTALPVIIVGLFDKDVSASLSKKYPQLYKEGIRNSFFKWRVIAVWGFFAFYQSIVFFYFTAAASQHGHGSSGKILGLWDVSTMAFTCVVVTVNLRLLMACNSITRWHYISVAGSIVAWFMFIFIYSAIMTSFDRQENEYFVIYVLMSTFFFYMTILLVPIIALFGDFLYLSIQRWLFPYDYQIIQEQHKDEPHVYSRVQLPETSHLSPQEARSYMMSMLPRESSKHTGFAFDSPGYESFFASQQGVGVPHKPWDVARRASMKQQRAGKS

SEQ ID NO: 180578 - protein, 787 aa, Zea Mays
MSGMSARIKEMVRVATARLGGEQAGGGGASSSGFARRESTARLGGGGTSLRRQPQPMAPSVRTVCCNDREANAPVGYKGNSVSTTKYNILTFLPKGLFEQFRRVANLYFLMISIMSTTPISPVHPVTNVVPLSLVLLVSLIKEAFEDWKRFQNDMSINNAHVDVLQGQCWESTPWKRLQVGDIVRIKQDGYFPADLLFLSSTNPDGVCYIETANLDGETNLKIRKALEKTWDYVIPEKASEFKGEVQCEQPNNSLYTFTGNLIMDKQTIPLSPNQLLLRGCSLRNTEYIVGVVIFTGHETKVMMNSMNVPSKRSTLEKKLDKLILALFATLFTMCVIGAIGSGVFINEKYFYLGLRGHVEDQFNPQNKFVVTILTMFTLITLYSTIIPISLYVSIEMIKFIQCTKFINNDLHMYHAESNTPALARTSNLNEELGQVEYIFSDKTGTLTRNLMEFFKCSIGGEMYGTGITEIEKGGAERAGIKIDDDEGKRSANAVHEKGFNFDDARIMRGAWRNEPNLEACKEFFRCLAICHTVLPEGEETPEKISYQAASPDEAALVAAAKNFGFFFYRRTPTTVMVRESHVERMGSIQDVPYEILNVLEFNSTRKRQSVVCRFPNGRLVLYCKGADNVVYERLADGNHDMKKTSREHLEQFGSAGLRTLCLAYRDLSREQYESWNEKFVQAKSSLRDRDKKLDEVAELIEKDLILVGCTAIEDKLQEGVPTCIETLSAAGIKIWVLTGDKMETAINIAYACSLVNNDTKQFIISSETDTIREAEDRRLCIFIHKP

SEQ ID NO: 180579 - protein, 534 aa, Zea Mays
MSGMSARIKEMVRVATARLGGEQAGGGGASSSGFARRESTARLGGGGTSLRRQPQPMAPSVRTVCCNDREANAPVGYKGNSVSTTKYNILTFLPKGLFEQFRRVANLYFLMISIMSTTPISPVHPVTNVVPLSLVLLVSLIKEAFEDWKRFQNDMSINNAHVDVLQGQCWESTPWKRLQVGDIVRIKQDGYFPADLLFLSSTNPDGVCYIETANLDGETNLKIRKALEKTWDYVIPEKASEFKGEVQCEQPNNSLYTFTGNLIMDKQTIPLSPNQLLLRGCSLRNTEYIVGVVIFTGHETKVMMNSMNVPSKRSTLEKKLDKLILALFATLFTMCVIGAIGSGVFINEKYFYLGLRGHVEDQFNPQNKFVVTILTMFTLITLYSTIIPISLYVSIEMIKFIQCTKFINNDLHMYHAESNTPALARTSNLNEELGQVEYIFSDKTGTLTRNLMEFFKCSIGGEMYGTGITEIEKGGAERAGIKIDDDEGKRSANAVHEKGFNFDDARIMRGAWRNEPNLEACKMPCNLSYSSSRG

SEQ ID NO: 180580 - protein, 1163 aa, Zea Mays
MSGMSARIKEMVRVATARLGGEQAGGGGASSSGFARRESTARLGGGGTSLRRQPQPMAPSVRTVCCNDREANAPVGYKGNSVSTTKYNILTFLPKGLFEQFRRVANLYFLMISIMSTTPISPVHPVTNVVPLSLVLLVSLIKEAFEDWKRFQNDMSINNAHVDVLQGQCWESTPWKRLQVGDIVRIKQDGYFPADLLFLSSTNPDGVCYIETANLDGETNLKIRKALEKTWDYVIPEKASEFKGEVQCEQPNNSLYTFTGNLIMDKQTIPLSPNQLLLRGCSLRNTEYIVGVVIFTGHETKVMMNSMNVPSKRSTLEKKLDKLILALFATLFTMCVIGAIGSGVFINEKYFYLGLRGHVEDQFNPQNKFVVTILTMFTLITLYSTIIPISLYVSIEMIKFIQCTKFINNDLHMYHAESNTPALARTSNLNEELGQVEYIFSDKTGTLTRNLMEFFKCSIGGEMYGTGITEIEKGGAERAGIKIDDDEGKRSANAVHEKGFNFDDARIMRGAWRNEPNLEACKEFFRCLAICHTVLPEGEETPEKISYQAASPDEAALVAAAKNFGFFFYRRTPTTVMVRESHVERMGSIQDVPYEILNVLEFNSTRKRQSVVCRFPNGRLVLYCKGADNVVYERLADGNHDMKKTSREHLEQFGSAGLRTLCLAYRDLSREQYESWNEKFVQAKSSLRDRDKKLDEVAELIEKDLILVGCTAIEDKLQEGVPTCIETLSAAGIKIWVLTGDKMETAINIAYACSLVNNDTKQFIISSETDTIREAEDRVTSLVRKGAQKITLSIGDGANDVSMIQAAHVGIGISGQEGMQAVMASDFAIAQFRFLTDLLLVHGRWSYLRLCKVITYFFYKNLTFTLTQFWFTFQTGFSGQRFYDDWFQSLYNVIFTALPVIIVGLFDKDVSASLSKKYPQLYKEGIRNSFFKWRVIAVWGFFAFYQSIVFFYFTAAASQHGHGSSGKILGLWDVSTMAFTCVVVTVNLRLLMACNSITRWHYISVAGSIVAWFMFIFIYSAIMTSFDRQENEYFVIYVLMSTFFFYMTILLVPIIALFGDFLYLSIQRWLFPYDYQIIQEQHKDEPHVYSRVQLPETSHLSPQEARSYMMSMLPRESSKHTGFAFDSPGYESFFASQQGVGVPHKPWDVARRASMKQQRAGKS

SEQ ID NO: 180581 - protein, 780 aa, Zea Mays
MSGMSARIKEMVRVATARLGGEQAGGGGASSSGFARRESTARLGGGGTSLRRQPQPMAPSVRTVCCNDREANAPVGYKGNSVSTTKYNILTFLPKGLFEQFRRVANLYFLMISIMSTTPISPVHPVTNVVPLSLVLLVSLIKEAFEDWKRFQNDMSINNAHVDVLQGQCWESTPWKRLQVGDIVRIKQDGYFPADLLFLSSTNPDGVCYIETANLDGETNLKIRKALEKTWDYVIPEKASEFKGEVQCEQPNNSLYTFTGNLIMDKQTIPLSPNQLLLRGCSLRNTEYIVGVVIFTGHETKVMMNSMNVPSKRSTLEKKLDKLILALFATLFTMCVIGAIGSGVFINEKYFYLGLRGHVEDQFNPQNKFVVTILTMFTLITLYSTIIPISLYVSIEMIKFIQCTKFINNDLHMYHAESNTPALARTSNLNEELGQVEYIFSDKTGTLTRNLMEFFKCSIGGEMYGTGITEIEKGGAERAGIKIDDDEGKRSANAVHEKGFNFDDARIMRGAWRNEPNLEACKEFFRCLAICHTVLPEGEETPEKISYQAASPDEAALVAAAKNFGFFFYRRTPTTVMVRESHVERMGSIQDVPYEILNVLEFNSTRKRQSVVCRFPNGRLVLYCKGADNVVYERLADGNHDMKKTSREHLEQFGSAGLRTLCLAYRDLSREQYESWNEKFVQAKSSLRDRDKKLDEVAELIEKDLILVGCTAIEDKLQEGVPTCIETLSAAGIKIWVLTGDKMETAINIAYACSLVNNDTKQFIISSETDTIREAEDRIQ

SEQ ID NO: 180582 - protein, 667 aa, Zea Mays
MVRESHVERMGSIQDVPYEILNVLEFNSTRKRQSVVCRFPNGRLVLYCKGADNVVYERLADGNHDMKKTSREHLEQFGSAGLRTLCLAYRDLSREQYESWNEKFVQAKSSLRDRDKKLDEVAELIEKDLILVGCTAIEDKLQEGVPTCIETLSAAGIKIWVLTGDKMETAINIAYACSLVNNDTKQFIISSETDTIREAEDRGDPVEIARVIKDSVKQSLKSFHEEARHSLISTPERKLALIIDGRCLMYALDPTLRVDLLGLSLSCHSVVCCRVSPLQKAQVTSLVRKGAQKITLSIGDGANDVSMIQAAHVGIGISGQEGMQAVMASDFAIAQFRFLTDLLLVHGRWSYLRLCKVITYFFYKNLTFTLTQFWFTFQTGFSGQRFYDDWFQSLYNVIFTALPVIIVGLFDKDVSASLSKKYPQLYKEGIRNSFFKWRVIAVWGFFAFYQSIVFFYFTAAASQHGHGSSGKILGLWDVSTMAFTCVVVTVNLRLLMACNSITRWHYISVAGSIVAWFMFIFIYSAIMTSFDRQENEYFVIYVLMSTFFFYMTILLVPIIALFGDFLYLSIQRWLFPYDYQIIQEQHKDEPHVYSRVQLPETSHLSPQEARSYMMSMLPRESSKHTGFAFDSPGYESFFASQQGVGVPHKPWDVARRASMKQQRAGKS

SEQ ID NO: 180583 - protein, 677 aa, Zea Mays
MISIMSTTPISPVHPVTNVVPLSLVLLVSLIKEAFEDWKRFQNDMSINNAHVDVLQGQCWESTPWKRLQVGDIVRIKQDGYFPADLLFLSSTNPDGVCYIETANLDGETNLKIRKALEKTWDYVIPEKASEFKGEVQCEQPNNSLYTFTGNLIMDKQTIPLSPNQLLLRGCSLRNTEYIVGVVIFTGHETKVMMNSMNVPSKRSTLEKKLDKLILALFATLFTMCVIGAIGSGVFINEKYFYLGLRGHVEDQFNPQNKFVVTILTMFTLITLYSTIIPISLYVSIEMIKFIQCTKFINNDLHMYHAESNTPALARTSNLNEELGQVEYIFSDKTGTLTRNLMEFFKCSIGGEMYGTGITEIEKGGAERAGIKIDDDEGKRSANAVHEKGFNFDDARIMRGAWRNEPNLEACKEFFRCLAICHTVLPEGEETPEKISYQAASPDEAALVAAAKNFGFFFYRRTPTTVMVRESHVERMGSIQDVPYEILNVLEFNSTRKRQSVVCRFPNGRLVLYCKGADNVVYERLADGNHDMKKTSREHLEQFGSAGLRTLCLAYRDLSREQYESWNEKFVQAKSSLRDRDKKLDEVAELIEKDLILVGCTAIEDKLQEGVPTCIETLSAAGIKIWVLTGDKMETAINIAYACSLVNNDTKQFIISSETDTIREAEDRRLCIFIHKP

SEQ ID NO: 180584 - protein, 1133 aa, Zea Mays
MISIMSTTPISPVHPVTNVVPLSLVLLVSLIKEAFEDWKRFQNDMSINNAHVDVLQGQCWESTPWKRLQVGDIVRIKQDGYFPADLLFLSSTNPDGVCYIETANLDGETNLKIRKALEKTWDYVIPEKASEFKGEVQCEQPNNSLYTFTGNLIMDKQTIPLSPNQLLLRGCSLRNTEYIVGVVIFTGHETKVMMNSMNVPSKRSTLEKKLDKLILALFATLFTMCVIGAIGSGVFINEKYFYLGLRGHVEDQFNPQNKFVVTILTMFTLITLYSTIIPISLYVSIEMIKFIQCTKFINNDLHMYHAESNTPALARTSNLNEELGQVEYIFSDKTGTLTRNLMEFFKCSIGGEMYGTGITEIEKGGAERAGIKIDDDEGKRSANAVHEKGFNFDDARIMRGAWRNEPNLEACKEFFRCLAICHTVLPEGEETPEKISYQAASPDEAALVAAAKNFGFFFYRRTPTTVMVRESHVERMGSIQDVPYEILNVLEFNSTRKRQSVVCRFPNGRLVLYCKGADNVVYERLADGNHDMKKTSREHLEQFGSAGLRTLCLAYRDLSREQYESWNEKFVQAKSSLRDRDKKLDEVAELIEKDLILVGCTAIEDKLQEGVPTCIETLSAAGIKIWVLTGDKMETAINIAYACSLVNNDTKQFIISSETDTIREAEDRGDPVEIARVIKDSVKQSLKSFHEEARHSLISTPERKLALIIDGRCLMYALDPTLRVDLLGLSLSCHSVVCCRVSPLQKAQVTSLVRKGAQKITLSIGDGANDVSMIQAAHVGIGISGQEGMQAVMASDFAIAQFRFLTDLLLVHGRWSYLRLCKVITYFFYKNLTFTLTQFWFTFQTGFSGQRFYDDWFQSLYNVIFTALPVIIVGLFDKDVSASLSKKYPQLYKEGIRNSFFKWRVIAVWGFFAFYQSIVFFYFTAAASQHGHGSSGKILGLWDVSTMAFTCVVVTVNLRLLMACNSITRWHYISVAGSIVAWFMFIFIYSAIMTSFDRQENEYFVIYVLMSTFFFYMTILLVPIIALFGDFLYLSIQRWLFPYDYQIIQEQHKDEPHVYSRVQLPETSHLSPQEARSYMMSMLPRESSKHTGFAFDSPGYESFFASQQGVGVPHKPWDVARRASMKQQRAGKS

SEQ ID NO: 180585 - protein, 941 aa, Zea Mays
MMNSMNVPSKRSTLEKKLDKLILALFATLFTMCVIGAIGSGVFINEKYFYLGLRGHVEDQFNPQNKFVVTILTMFTLITLYSTIIPISLYVSIEMIKFIQCTKFINNDLHMYHAESNTPALARTSNLNEELGQVEYIFSDKTGTLTRNLMEFFKCSIGGEMYGTGITEIEKGGAERAGIKIDDDEGKRSANAVHEKGFNFDDARIMRGAWRNEPNLEACKEFFRCLAICHTVLPEGEETPEKISYQAASPDEAALVAAAKNFGFFFYRRTPTTVMVRESHVERMGSIQDVPYEILNVLEFNSTRKRQSVVCRFPNGRLVLYCKGADNVVYERLADGNHDMKKTSREHLEQFGSAGLRTLCLAYRDLSREQYESWNEKFVQAKSSLRDRDKKLDEVAELIEKDLILVGCTAIEDKLQEGVPTCIETLSAAGIKIWVLTGDKMETAINIAYACSLVNNDTKQFIISSETDTIREAEDRGDPVEIARVIKDSVKQSLKSFHEEARHSLISTPERKLALIIDGRCLMYALDPTLRVDLLGLSLSCHSVVCCRVSPLQKAQVTSLVRKGAQKITLSIGDGANDVSMIQAAHVGIGISGQEGMQAVMASDFAIAQFRFLTDLLLVHGRWSYLRLCKVITYFFYKNLTFTLTQFWFTFQTGFSGQRFYDDWFQSLYNVIFTALPVIIVGLFDKDVSASLSKKYPQLYKEGIRNSFFKWRVIAVWGFFAFYQSIVFFYFTAAASQHGHGSSGKILGLWDVSTMAFTCVVVTVNLRLLMACNSITRWHYISVAGSIVAWFMFIFIYSAIMTSFDRQENEYFVIYVLMSTFFFYMTILLVPIIALFGDFLYLSIQRWLFPYDYQIIQEQHKDEPHVYSRVQLPETSHLSPQEARSYMMSMLPRESSKHTGFAFDSPGYESFFASQQGVGVPHKPWDVARRASMKQQRAGKS

SEQ ID NO: 180586 - protein, 980 aa, Zea Mays
MDKQTIPLSPNQLLLRGCSLRNTEYIVGVVIFTGHETKVMMNSMNVPSKRSTLEKKLDKLILALFATLFTMCVIGAIGSGVFINEKYFYLGLRGHVEDQFNPQNKFVVTILTMFTLITLYSTIIPISLYVSIEMIKFIQCTKFINNDLHMYHAESNTPALARTSNLNEELGQVEYIFSDKTGTLTRNLMEFFKCSIGGEMYGTGITEIEKGGAERAGIKIDDDEGKRSANAVHEKGFNFDDARIMRGAWRNEPNLEACKEFFRCLAICHTVLPEGEETPEKISYQAASPDEAALVAAAKNFGFFFYRRTPTTVMVRESHVERMGSIQDVPYEILNVLEFNSTRKRQSVVCRFPNGRLVLYCKGADNVVYERLADGNHDMKKTSREHLEQFGSAGLRTLCLAYRDLSREQYESWNEKFVQAKSSLRDRDKKLDEVAELIEKDLILVGCTAIEDKLQEGVPTCIETLSAAGIKIWVLTGDKMETAINIAYACSLVNNDTKQFIISSETDTIREAEDRGDPVEIARVIKDSVKQSLKSFHEEARHSLISTPERKLALIIDGRCLMYALDPTLRVDLLGLSLSCHSVVCCRVSPLQKAQVTSLVRKGAQKITLSIGDGANDVSMIQAAHVGIGISGQEGMQAVMASDFAIAQFRFLTDLLLVHGRWSYLRLCKVITYFFYKNLTFTLTQFWFTFQTGFSGQRFYDDWFQSLYNVIFTALPVIIVGLFDKDVSASLSKKYPQLYKEGIRNSFFKWRVIAVWGFFAFYQSIVFFYFTAAASQHGHGSSGKILGLWDVSTMAFTCVVVTVNLRLLMACNSITRWHYISVAGSIVAWFMFIFIYSAIMTSFDRQENEYFVIYVLMSTFFFYMTILLVPIIALFGDFLYLSIQRWLFPYDYQIIQEQHKDEPHVYSRVQLPETSHLSPQEARSYMMSMLPRESSKHTGFAFDSPGYESFFASQQGVGVPHKPWDVARRASMKQQRAGKS

SEQ ID NO: 180587 - protein, 481 aa, Zea Mays
MFTLITLYSTIIPISLYVSIEMIKFIQCTKFINNDLHMYHAESNTPALARTSNLNEELGQVEYIFSDKTGTLTRNLMEFFKCSIGGEMYGTGITEIEKGGAERAGIKIDDDEGKRSANAVHEKGFNFDDARIMRGAWRNEPNLEACKEFFRCLAICHTVLPEGEETPEKISYQAASPDEAALVAAAKNFGFFFYRRTPTTVMVRESHVERMGSIQDVPYEILNVLEFNSTRKRQSVVCRFPNGRLVLYCKGADNVVYERLADGNHDMKKTSREHLEQFGSAGLRTLCLAYRDLSREQYESWNEKFVQAKSSLRDRDKKLDEVAELIEKDLILVGCTAIEDKLQEGVPTCIETLSAAGIKIWVLTGDKMETAINIAYACSLVNNDTKQFIISSETDTIREAEDRGDPVEIARVIKDSVKQSLKSFHEEARHSLISTPERKLALIIDGRCLMYALDPTLRVDLLGLSLSCHSVVCCRVSPLQK

SEQ ID NO: 180588 - protein, 165 aa, Zea Mays
MSGMSARIKEMVRVATARLGGEQAGGGGASSSGFARRESTARLGGGGTSLRRQPQPMAPSVRTVCCNDREANAPVGYKGNSVSTTKYNILTFLPKGLFEQFRRVANLYFLMISIMSTTPISPVHPVTNVVPLSLVLLVSLIKEAFEDWVNVGKVLHGNDCRLEIL

SEQ ID NO: 180589 - protein, 501 aa, Zea Mays
METAINIAYACSLVNNDTKQFIISSETDTIREAEDRGDPVEIARVIKDSVKQSLKSFHEEARHSLISTPERKLALIIDGRCLMYALDPTLRVDLLGLSLSCHSVVCCRVSPLQKAQVTSLVRKGAQKITLSIGDGANDVSMIQAAHVGIGISGQEGMQAVMASDFAIAQFRFLTDLLLVHGRWSYLRLCKVITYFFYKNLTFTLTQFWFTFQTGFSGQRFYDDWFQSLYNVIFTALPVIIVGLFDKDVSASLSKKYPQLYKEGIRNSFFKWRVIAVWGFFAFYQSIVFFYFTAAASQHGHGSSGKILGLWDVSTMAFTCVVVTVNLRLLMACNSITRWHYISVAGSIVAWFMFIFIYSAIMTSFDRQENEYFVIYVLMSTFFFYMTILLVPIIALFGDFLYLSIQRWLFPYDYQIIQEQHKDEPHVYSRVQLPETSHLSPQEARSYMMSMLPRESSKHTGFAFDSPGYESFFASQQGVGVPHKPWDVARRASMKQQRAGKS

SEQ ID NO: 180590 - protein, 189 aa, Zea Mays
MISIMSTTPISPVHPVTNVVPLSLVLLVSLIKEAFEDWKRFQNDMSINNAHVDVLQGQCWESTPWKRLQVGDIVRIKQDGYFPADLLFLSSTNPDGVCYIETANLDGETNLKIRKALEKTWDYVIPEKASEFKGEVQCEQPNNSLYTFTGNLIMDKQTIPLSPNQLLLRGCSLRNTEYIVGVTEHTLSC

SEQ ID NO: 180591 - protein, 1083 aa, Zea Mays
MISIMSTTPISPVHPVTNVVPLSLVLLVSLIKEAFEDWKRFQNDMSINNAHVDVLQGQCWESTPWKRLQVGDIVRIKQDGYFPADLLFLSSTNPDGVCYIETANLDGETNLKIRKALEKTWDYVIPEKASEFKGEVQCEQPNNSLYTFTGNLIMDKQTIPLSPNQLLLRGCSLRNTEYIVGVVIFTGHETKKTVAGYDEFHECSLQKKYIGEKARQAYPCPFCNPLHNVCYWCHWKMIKFIQCTKFINNDLHMYHAESNTPALARTSNLNEELGQVEYIFSDKTGTLTRNLMEFFKCSIGGEMYGTGITEIEKGGAERAGIKIDDDEGKRSANAVHEKGFNFDDARIMRGAWRNEPNLEACKEFFRCLAICHTVLPEGEETPEKISYQAASPDEAALVAAAKNFGFFFYRRTPTTVMVRESHVERMGSIQDVPYEILNVLEFNSTRKRQSVVCRFPNGRLVLYCKGADNVVYERLADGNHDMKKTSREHLEQFGSAGLRTLCLAYRDLSREQYESWNEKFVQAKSSLRDRDKKLDEVAELIEKDLILVGCTAIEDKLQEGVPTCIETLSAAGIKIWVLTGDKMETAINIAYACSLVNNDTKQFIISSETDTIREAEDRGDPVEIARVIKDSVKQSLKSFHEEARHSLISTPERKLALIIDGRCLMYALDPTLRVDLLGLSLSCHSVVCCRVSPLQKAQVTSLVRKGAQKITLSIGDGANDVSMIQAAHVGIGISGQEGMQAVMASDFAIAQFRFLTDLLLVHGRWSYLRLCKVITYFFYKNLTFTLTQFWFTFQTGFSGQRFYDDWFQSLYNVIFTALPVIIVGLFDKDVSASLSKKYPQLYKEGIRNSFFKWRVIAVWGFFAFYQSIVFFYFTAAASQHGHGSSGKILGLWDVSTMAFTCVVVTVNLRLLMACNSITRWHYISVAGSIVAWFMFIFIYSAIMTSFDRQENEYFVIYVLMSTFFFYMTILLVPIIALFGDFLYLSIQRWLFPYDYQIIQEQHKDEPHVYSRVQLPETSHLSPQEARSYMMSMLPRESSKHTGFAFDSPGYESFFASQQGVGVPHKPWDVARRASMKQQRAGKS

SEQ ID NO: 180592 - protein, 724 aa, Zea Mays
MTASQRGGRTTAARPPDDASSQRDTTSGGRTTHHPSAAVGQRQRGGAASSRRTPTTVMVRESHVERMGSIQDVPYEILNVLEFNSTRKRQSVVCRFPNGRLVLYCKGADNVVYERLADGNHDMKKTSREHLEQFGSAGLRTLCLAYRDLSREQYESWNEKFVQAKSSLRDRDKKLDEVAELIEKDLILVGCTAIEDKLQEGVPTCIETLSAAGIKIWVLTGDKMETAINIAYACSLVNNDTKQFIISSETDTIREAEDRGDPVEIARVIKDSVKQSLKSFHEEARHSLISTPERKLALIIDGRCLMYALDPTLRVDLLGLSLSCHSVVCCRVSPLQKAQVTSLVRKGAQKITLSIGDGANDVSMIQAAHVGIGISGQEGMQAVMASDFAIAQFRFLTDLLLVHGRWSYLRLCKVITYFFYKNLTFTLTQFWFTFQTGFSGQRFYDDWFQSLYNVIFTALPVIIVGLFDKDVSASLSKKYPQLYKEGIRNSFFKWRVIAVWGFFAFYQSIVFFYFTAAASQHGHGSSGKILGLWDVSTMAFTCVVVTVNLRLLMACNSITRWHYISVAGSIVAWFMFIFIYSAIMTSFDRQENEYFVIYVLMSTFFFYMTILLVPIIALFGDFLYLSIQRWLFPYDYQIIQEQHKDEPHVYSRVQLPETSHLSPQEARSYMMSMLPRESSKHTGFAFDSPGYESFFASQQGVGVPHKPWDVARRASMKQQRAGKS

SEQ ID NO: 180593 - protein, 421 aa, Zea Mays
METAINIAYACSLVNNDTKQFIISSETDTIREAEDRVTSLVRKGAQKITLSIGDGANDVSMIQAAHVGIGISGQEGMQAVMASDFAIAQFRFLTDLLLVHGRWSYLRLCKVITYFFYKNLTFTLTQFWFTFQTGFSGQRFYDDWFQSLYNVIFTALPVIIVGLFDKDVSASLSKKYPQLYKEGIRNSFFKWRVIAVWGFFAFYQSIVFFYFTAAASQHGHGSSGKILGLWDVSTMAFTCVVVTVNLRLLMACNSITRWHYISVAGSIVAWFMFIFIYSAIMTSFDRQENEYFVIYVLMSTFFFYMTILLVPIIALFGDFLYLSIQRWLFPYDYQIIQEQHKDEPHVYSRVQLPETSHLSPQEARSYMMSMLPRESSKHTGFAFDSPGYESFFASQQGVGVPHKPWDVARRASMKQQRAGKS

SEQ ID NO: 180594 - protein, 305 aa, Zea Mays
MLPMLQDSSVDEYMRVAEPIGSLLLSEGMSGQHNSGGSTSSCSDGSEYDIVPKSYTSTPRNFPSRRSFLSKPIHPVSFPEHALEAQETRSHVASASSNNPLCSEYKGTGELCFPDYGSGRHGESGNWSAASSMDLTDLSEQPEAGQAGLLRPNNAMQKTRCDLCERLLTKRSPCGSRRIVRTGDLPVAGVLPCSHVYHAECLERTTPKGQKHDPPCPVCDKLAGKDTEQWSICRLKNGFPRFRSLGEGPSRVFSCADAGDCVAGAVQIPRSNSIGLLTRSGHKRHASSKGEPSKDSAETSRNACM

SEQ ID NO: 180595 - protein, 520 aa, Zea Mays
MRRRHTPYSRESIRRRPVVEEEDRSKSKARGVNPERRKRRRRGDRDRLPPSCLCLSRTVLVRTRSCRVRFFQEPAAGMDLYDKREDMALQDGDSCLASRASRGGCDVDLQWVDGLLEGAGRKRRAPEDFEDEVQKMDEVDGGGKRSKPPSPQPHTPDIHEAHVPGRRTTVVAGGGEHSGGGGDLIGEIGRDLSINCLLRLSRSEYGSVASLNHDFRSLVRGGGIYRLRRQNNIAEHWVYFSCNVLEWDAYDPYRKRWISVPKMPPDECFMCSDKESLAVGTELLVFGMAHIVFRYSILTNSWSRGEVMNSPRCLFGSASVGEKAYVAGGTDSLGRILSSAELYNSETHTWTPLPSMNKARKNCSGLFMDGKFYVIGGVTNNNMVLTCGEVYDVQSKTWRVIENMSGGLNGVSGAPPLVAVVKNELYAADYSEKDVKKYDKQNNRWITLGKLPERSVSMNGWGLAFRACGERLIVIGGPRTPVGGTIELTSWIPDDKPPVWNLMDRRPSGNFVYNCAVMSC

SEQ ID NO: 180596 - protein, 140 aa, Zea Mays
MEFCTPATCPTMSAGPKFEYRWADGVQIKKPIEVSAPKYVEYLMDWIEAQLDDESIFPQKLGTPFPQNFKEVVKTIFKRLFRVYAHIYHSHFQKIVSLKEEAHLNTCFKHFTLFTWEFTLIDKAELAPLIDLIESIVSVC

SEQ ID NO: 180597 - protein, 274 aa, Zea Mays
MGKPAESSSTSWSALFGFGCFSSSHADRSGDGPGKVASAGSRPPAPPAPLLSPDDLSLSLAGSDVLAFTVEELRVATRDFSMSNFVGEGGFGPVYKGRVDERVRPGLRQPQAVAVKLLDLEGSQGHKEWLAEVIFLGQLRHPHLVKLIGYCYQDEHRLLVYEFMARGSLEKHLFKSRAGHSASLPWSTRMRIAIGAAKGLAFLHDAAKPVIYRDFKTSNILLDSDYTAKLSDFGLAKAGPGEDETHVSTRVMGTQGYAAPEYIMTASASCSWSC

SEQ ID NO: 180598 - protein, 241 aa, Zea Mays
MFYDFLAQLARKTMATSLFLVGEIGVNDYFIGLNENRTVGEVRTFVPHVVGAIRSVITDVISAGAGTVVVPGMIPLGCEPQLLTLYRGSVDAAGYDPESGCITRLNDLAQLHNRELRRMLAGLRRAHPGTAIVYADLYRAVTDIVVSPRAYGFRHMPLDACCGGGGAYNYDDASFCGAAGTAPCADPSEYVSWDGVHYTEAANRLIACSVLEGSHSHAADAPTLSNSSATTEDWLHRIGCV

SEQ ID NO: 180599 - protein, 373 aa, Zea Mays
MPDVQPLVSDFVLKLKRRKVEGSHAVARQTAELLRSVVSQHRMGSSANQAATLADAVRAVGEQLIAANPIELAVGNIVRRVLHIIKEEDISSTAVGIEGLSVTVDSDDEYDSEHDDRPALSAAVLAAHARNALRAPSLQTLLEDIPVSPAISRTASSTGDSDGKSKSGDKSSTRKLKHDVIAAIGDLIDEIDSCYEPISEQAVELIHQNEVILTLGRSRTVKEFLYAAKEKKRSFRVFVAEGAPRYQGHVLAKELVEKGVQTTVITDSAVFAMISRVNMLCPLYPHNPEVLLNELKSPSDLLDFGEFSDCMNFSTQDGSPLLNVVNPTFDYVPPKLVSLFITDTGGHSPSYMYRLIAEYYSADDLVVRRKATS

SEQ ID NO: 180600 - protein, 63 aa, Zea Mays
MNFSTQDGSPLLNVVNPTFDYVPPKLVSLFITDTGGHSPSYMYRLIAEYYSADDLVVRRKATS

SEQ ID NO: 180601 - protein, 390 aa, Zea Mays
MKLDLTLLDKLVHEYCVYRGIVEGSSHVLSGTADLKCNQNNDVNNETQLYCEMTNNQNGHCSTSGINLDDSWSRRLHRDRHIMPGQQRRKRWRGRLDDLDYACDALLDPSKHDSLSPTLDMDEDTMVEKQDLVENFNLSDKHMEDQKYEIILEMRDLTRKGMASKVVEEISSIDPDFFQQNPILLFQLKQVEFLKLVAAGDHVSALKVASTYLGPLAANNEALLKPLKETLVTLIQPNEDVVMNALSLPVLASSVQVAMSRRLGIEEPQLMKIVRTTIHTHTEWFKLQMCKDRFEHLLKIDSLKEVDPSLGSHRKSKVLTDECANGSSQMTTCSSGKVPDEGIPCVAKGGRHPTPHAVQWKCRSSHPTDLPIVLTVNNKVFCLLSNVIIC

SEQ ID NO: 180602 - protein, 260 aa, Zea Mays
MKLDLTLLDKLVHEYCVYRGIVEGSSHVLSGTADLKCNQNNDVNNETQLYCEMTNNQNGHCSTSGINLDDSWSRRLHRDRHIMPGQQRRKRWRGRLDDLDYACDALLDPSKHDSLSPTLDMDEDTMVEKQDLVENFNLSDKHMEDQKYEIILEMRDLTRKGMASKVVEEISSIDPDFFQQNPILLFQLKQVEFLKLVAAGDHVSALKVASTYLGPLAANNEALLKPLKETLVTLIQPNEDVVMNALSLPVLASSVQKAWY

SEQ ID NO: 180603 - protein, 331 aa, Zea Mays
MAAILARAGVIATAGKGFSGRRRGNGIVVAAVTKTGAAVPQEGALERPAWSGETTLSRLVGALIAFKPLYAVLKLASREVIIRTAEKSNIPWREMTKEVLESDVYEVFERIQDPNLVYPDYYLNPFHAYDEGNLSWLAAAEAEPATMSIAKRAIPEATSIEEANQIVRGNWLNVIEEHHLKYSGNCQGLDLSPYFLAVAAQKEEKLSRPKPIRWVHANGEATGLSSDSFDLVSLAYVCHECPARAITGLVKEAFRVLRPGGTIALTDNSPKSKVLQELSPVLFTLMKSTEPFLDEYYMLDLEETMRKVGFVNVCSVLTDPRHRTVTATVPY

SEQ ID NO: 180604 - protein, 197 aa, Zea Mays
MDGCKKFVTENQGDPDLRPEQILSKAVDEACSPGSCTVLVAHFDGQALQASNIGDSGFIVIRNGEVFKKSKPTLYGFNFPLQIQKGDDPSKFVQNYAIDLEDGDAIVTATDGLFDNVYEHEIAGIVSKSLQADLEPAEIAEHLAVKAQEVGRSGAGRSPFSDAALSAGYLGYSGGKLDDIAVVVSIVRTEIQEDRLR

SEQ ID NO: 180605 - protein, 691 aa, Zea Mays
MYGSDFTPSGDLHISSIDFGDPTRKHEMHCRFKHEPSLPWSAIIISTAVAIIVLLVGHIIYATLNSLEKAEHDYRVMRELKGQAEAADIAKSQFLATVSHEIRTPMNGVLGMLQMLMDTELDTTQQDFVVTAQESGKVLINLINEVLDLAKIESGRIELEAVPFDVRDILDNVISLFYDKSQAKGIELAVLVSDQVPDVLIGDPWRFRQIITNLVGNSMKGHIFVQVHLVKELNRKGNNFCDVSAHNREILYDSDNSMLWNTLSGLEVADSWRSLENFTMFKNSNGETDTIRLAVRVEDTGIGITKDAQMRIFTPFMQADSSTSRTYGGTGIGLSITKRLVELMGGEIGFTSKSGVGSTFSFTAIFKENRGCPGDMKRYYSEPTPLDFQGMRALIIDGRSARAEVTMYHLRRLGIQCSLVATSESESASSALMKACTSSKNNPDMVLVDTEAWGKGSGLAFYHRFVDCQLKGAHKFSQPMPKTILLGSSISPVESDYLRLTGFGDCIRKPLRLSTIVACLRKTLGVGVTRQQSRDQSLVLQSVLTGKQILVVDDNAVNRKVAAGSLKKYGSKVTCVDSGSDAIDMLKPPHTFDACFMDVQMPEMDGFEATRLIRSIEKKINDMIMMGEISANNYGNKAHWHVPILAMTADVIQATFEKCMQCGMDGYVSKPFEEQQLYFAVAHFLETDETE

SEQ ID NO: 180606 - protein, 662 aa, Zea Mays
MYGSDFTPSGDLHISSIDFGDPTRKHEMHCRFKHEPSLPWSAIIISTAVAIIVLLVGHIIYATLNSLEKAEHDYRVMRELKGQAEAADIAKSQFLATVSHEIRTPMNGVLGMLQMLMDTELDTTQQDFVVTAQESGKVLINLINEVLDLAKIESGRIELEAVPFDVRDILDNVISLFYDKSQAKGIEFTEQGHIFVQVHLVKELNRKGNNFCDVSAHNREILYDSDNSMLWNTLSGLEVADSWRSLENFTMFKNSNGETDTIRLAVRVEDTGIGITKDAQMRIFTPFMQADSSTSRTYGGTGIGLSITKRLVELMGGEIGFTSKSGVGSTFSFTAIFKENRGCPGDMKRYYSEPTPLDFQGMRALIIDGRSARAEVTMYHLRRLGIQCSLVATSESESASSALMKACTSSKNNPDMVLVDTEAWGKGSGLAFYHRFVDCQLKGAHKFSQPMPKTILLGSSISPVESDYLRLTGFGDCIRKPLRLSTIVACLRKTLGVGVTRQQSRDQSLVLQSVLTGKQILVVDDNAVNRKVAAGSLKKYGSKVTCVDSGSDAIDMLKPPHTFDACFMDVQMPEMDGFEATRLIRSIEKKINDMIMMGEISANNYGNKAHWHVPILAMTADVIQATFEKCMQCGMDGYVSKPFEEQQLYFAVAHFLETDETE

SEQ ID NO: 180607 - protein, 695 aa, Zea Mays
MYGSDFTPSGDLHISSIDFGDPTRKHEMHCRFKHEPSLPWSAIIISTAVAIIVLLVGHIIYATLNSLEKAEHDYRVMRELKGQAEAADIAKSQFLATVSHEIRTPMNGVLGMLQMLMDTELDTTQQDFVVTAQESGKVLINLINEVLDLAKIESGRIELEAVPFDVRDILDNVISLFYDKSQAKGIELAVLVSDQVPDVLIGDPWRFRQIITNLVGNSMKFTEQGHIFVQVHLVKELNRKGNNFCDVSAHNREILYDSDNSMLWNTLSGLEVADSWRSLENFTMFKNSNGETDTIRLAVRVEDTGIGITKDAQMRIFTPFMQADSSTSRTYGGTGIGLSITKRLVELMGGEIGFTSKSGVGSTFSFTAIFKENRGCPGDMKRYYSEPTPLDFQGMRALIIDGRSARAEVTMYHLRRLGIQCSLVATSESESASSALMKACTSSKNNPDMVLVDTEAWGKGSGLAFYHRFVDCQLKGAHKFSQPMPKTILLGSSISPVESDYLRLTGFGDCIRKPLRLSTIVACLRKTLGVGVTRQQSRDQSLVLQSVLTGKQILVVDDNAVNRKVAAGSLKKYGSKVTCVDSGSDAIDMLKPPHTFDACFMDVQMPEMDGFEATRLIRSIEKKINDMIMMGEISANNYGNKAHWHVPILAMTADVIQATFEKCMQCGMDGYVSKPFEEQQLYFAVAHFLETDETE

SEQ ID NO: 180608 - protein, 635 aa, Zea Mays
MVPNGAGECGGGCRRGKAAHAGVGAVAGFFLCLLMVWAVGGSERSGCGRVAEHHGVVRVGQFNLSRSQLQALVFLLSSTHKECMVNSGMVHDGNQVNGASFIPDIRCIRDRIYDGKQNWLKDAILQESCTAQDKYGLNSHAPAVLEDKLLQNVIQEDINSTTQCNPDECDLCAGISGVNVVQNIGSSSNRTIILCLSAFLGSIVISIVKTTHKRGIQTHKLYADEKVLQAPSTKISRKWSKRALLIGVLFGLCSSVCIFSCMYADVVARRIENLANMCDERARMLQDQFNVSMNHVHALAILVSSFHHGKDPSAIDQKTFEDFTARTTFERPLMSGVAYALKVLHNERQQFEEQHGWKIKKMEDGDQSLVHDYNLEKLEPSPVQDEYAPVIFSQETVKHIISVDMMSGKEDHDNILRSWSTGKGALTSPFKLLKSNHLGVVLTFTVYKYDLPPNATPQERIHATLGYLGASFDVPSLVDKLLEQLASKRKIVVNLYDTTNHTSPIEMYGSDFTPSGDLHISSIDFGDPTRKHEMHCRFKHEPSLPWSAIIISTAVAIIVLLVGHIIYATLNSLEKAEHDYRVMRELKGQAEAADIAKSQFLATVSHEIRTPMNGVLAGFCSHRSRKWKGINKLNK

SEQ ID NO: 180609 - protein, 820 aa, Zea Mays
MKDNSLRNNMDGRLRRWKMEISPLFMTTTLKSLNHHQFKMSKGALTSPFKLLKSNHLGVVLTFTVYKYDLPPNATPQERIHATLGYLGASFDVPSLVDKLLEQLASKRKIVVNLYDTTNHTSPIEMYGSDFTPSGDLHISSIDFGDPTRKHEMHCRFKHEPSLPWSAIIISTAVAIIVLLVGHIIYATLNSLEKAEHDYRVMRELKGQAEAADIAKSQFLATVSHEIRTPMNGVLGMLQMLMDTELDTTQQDFVVTAQESGKVLINLINEVLDLAKIESGRIELEAVPFDVRDILDNVISLFYDKSQAKGIELAVLVSDQVPDVLIGDPWRFRQIITNLVGNSMKFTEQGHIFVQVHLVKELNRKGNNFCDVSAHNREILYDSDNSMLWNTLSGLEVADSWRSLENFTMFKNSNGETDTIRLAVRVEDTGIGITKDAQMRIFTPFMQADSSTSRTYGGTGIGLSITKRLVELMGGEIGFTSKSGVGSTFSFTAIFKENRGCPGDMKRYYSEPTPLDFQGMRALIIDGRSARAEVTMYHLRRLGIQCSLVATSESESASSALMKACTSSKNNPDMVLVDTEAWGKGSGLAFYHRFVDCQLKGAHKFSQPMPKTILLGSSISPVESDYLRLTGFGDCIRKPLRLSTIVACLRKTLGVGVTRQQSRDQSLVLQSVLTGKQILVVDDNAVNRKVAAGSLKKYGSKVTCVDSGSDAIDMLKPPHTFDACFMDVQMPEMDGFEATRLIRSIEKKINDMIMMGEISANNYGNKAHWHVPILAMTADVIQATFEKCMQCGMDGYVSKPFEEQQLYFAVAHFLETDETE

SEQ ID NO: 180610 - protein, 581 aa, Zea Mays
MLMDTELDTTQQDFVVTAQESGKVLINLINEVLDLAKIESGRIELEAVPFDVRDILDNVISLFYDKSQAKGIELAVLVSDQVPDVLIGDPWRFRQIITNLVGNSMKFTEQGHIFVQVHLVKELNRKGNNFCDVSAHNREILYDSDNSMLWNTLSGLEVADSWRSLENFTMFKNSNGETDTIRLAVRVEDTGIGITKDAQMRIFTPFMQADSSTSRTYGGTGIGLSITKRLVELMGGEIGFTSKSGVGSTFSFTAIFKENRGCPGDMKRYYSEPTPLDFQGMRALIIDGRSARAEVTMYHLRRLGIQCSLVATSESESASSALMKACTSSKNNPDMVLVDTEAWGKGSGLAFYHRFVDCQLKGAHKFSQPMPKTILLGSSISPVESDYLRLTGFGDCIRKPLRLSTIVACLRKTLGVGVTRQQSRDQSLVLQSVLTGKQILVVDDNAVNRKVAAGSLKKYGSKVTCVDSGSDAIDMLKPPHTFDACFMDVQMPEMDGFEATRLIRSIEKKINDMIMMGEISANNYGNKAHWHVPILAMTADVIQATFEKCMQCGMDGYVSKPFEEQQLYFAVAHFLETDETE

SEQ ID NO: 180611 - protein, 81 aa, Zea Mays
MELRSQFLYIELAPGNKIHWTPTDQKKEDKIVGGTKCLVWFPQQFFFWPCFLEPIQHDLATVVSVASVMPYDTTIFPNAVL

SEQ ID NO: 180612 - protein, 147 aa, Zea Mays
MKKKPKTVQPAPCEVCKIQCDTLEVLLIHKQGKKHKKNLEKLQDSITRKPIIKPPSNVIGPSMPPVAVSNCVVPSVQPKKKSSSAATREDLEVKKRRVLEAGAAQGEVKICQVCNVVVNSQKVYEFHIAGQKHQALVRKQQPLRFVT

SEQ ID NO: 180613 - protein, 136 aa, Zea Mays
MGGCCCCSSRTSEADRAPIDIYRQQNLEEHEPLSSAFDGSSPPSSIVAVDTNLDTSTPDTYRAPPAPLPYDVVLAVPTTPGLEKLDNKSKTDDQQESINDQESLKVDESCKKNVTEDKAEEEDVCPICLEDCTVRR

SEQ ID NO: 180614 - protein, 86 aa, Zea Mays
MGGCCCCSSRTSEADRAPIDIYRQQNLEEHEPLSSAFDGSSPPSSIVAVDTNLDTSTPDTYRAPPAPLPYDVVLAVPTTPGFGNSM

SEQ ID NO: 180615 - protein, 157 aa, Zea Mays
MLVRQQNLEEHEPLSSAFDGSSPPSSIVAVDTNLDTSTPDTYRAPPAPLPYDVVLAVPTTPGLEKLDNKSKTDDQQESINDQESLKVDESCKKNVTEDKAEEEDVCPICLEEYDEENPRSVTKCEHHFHLCCILEWMERKDTCPVCDQTILVDEMSE

SEQ ID NO: 180616 - protein, 292 aa, Zea Mays
MEQQQHQEVRRNRKGVLQVQDGSEIRALVENKAEFARFVDDRFRKLDADGDGRLSVKELQPAVADIGAAIGLPARGSSPQADHIYAEVMENVVEPAFQELPASATQQLDLDQPVPSQEAFLQEFRRLLGAITLRLRQHPVIVAHTENNFDGSGVRRLLSNKFEFDKLLDSVWREVPKERKDKQASKEYLRIALDRIADSAGLPPLGAVGQVDAVVNEAFKMAKADDLRAVDEAEFKKLLTEVLGAVMLQLDASPVAVSTNTVVHEPMCTSSSSSALLSPTPLSPMVSSPASE

SEQ ID NO: 180617 - protein, 161 aa, Zea Mays
MVLGLYTFADIDADGAPRLEVADGEEFVRVDRVVELALGPRVLKAPGTLYLTTRRVIWVSDGGEGYAVDFVAISLHAVSRDPEAYPYPCIYTQIGVMHVKIETEAISDEESDVSDSETNGELELSKVMEMRIIPSDPGQLDELFEAFCNCAELNPDPSAGN

SEQ ID NO: 180618 - protein, 475 aa, Zea Mays
MTSRQEYNVRANSVMDKTYSIGRFVTGLPPFSKKKNAENKWSLHKEGLQGRQIAENMREKYNKKPWILEDETGQYQYQGQMEGSQSATATYYLLMRHGKEFNAYPAGSWFNFSKIAQYKQLTLEEAEEKMNKRKTSATGYERWMMKAAANGPAAFGSDMKKLEATNGGEKESARPKKGKNNEEGNNSDKGEEDEEEEATRKNRLGLTKKGMDDDEEGGKDLDFDLDDEIEKGDDWEHEETFTDDDEAVDIDPEERADLAPEIPAPPEIKQDDEENEEEGGLSKSGKELKKLLGRAAGLNESDADEDEEDEDQEDDSSPVLAPKQKDQVKDEPVDSSPSKPAPSGHARGTPPASKSKQKRKSGVDDAKTSSGAASKKAKDAKASGLKEEASSLAKPASKTSAASKSGTSVSPVTEDEIRSVLLAVAPVTTQDLVSRFKSRLRGAEDKNAFAEILKKISKIQKTNGHNYVVLRDDKK

SEQ ID NO: 180619 - protein, 478 aa, Zea Mays
MTSRQEYNVRANSVMDKTYSIGRFVTGLPPFSKKKNAENKWSLHKEGLQGRQIAENMREKYNKKPWILEDETGQYQYQGQMEGSQSATATYYLLMRHGKEFNAYPAGSWFNFSKIAQYKQLTLEEAEEKMNKRKTSATGYERWMMKAAANGPAAFGSDMKKLEATNGGEKESARPKKGKNNEEGNNSDKGEEDEEEEATRKNRLGLTKKGMDDDEEGGKDLDFDLDDEIEKGDDWEHEETFTDDDEAVDIDPEERADLAPEIPAPPEIKQDDEENEEEGGLSKSGKELKKLLGRAAGLNESDADEDEEDEDQEDDSSPVLAPKQKDQVKDEPVDSSPSKPAPSGHARGTPPASKSKQKRKSGVDDAKTSSGAASKKAKVELDAKASGLKEEASSLAKPASKTSAASKSGTSVSPVTEDEIRSVLLAVAPVTTQDLVSRFKSRLRGAEDKNAFAEILKKISKIQKTNGHNYVVLRDDKK

SEQ ID NO: 180620 - protein, 503 aa, Zea Mays
MGSKVRQVLGLPGCLGRRRCLGDNVPLFPKEYNVRANSVMDKTYSIGRFVTGLPPFSKKKNAENKWSLHKEGLQGRQIAENMREKYNKKPWILEDETGQYQYQGQMEGSQSATATYYLLMRHGKEFNAYPAGSWFNFSKIAQYKQLTLEEAEEKMNKRKTSATGYERWMMKAAANGPAAFGSDMKKLEATNGGEKESARPKKGKNNEEGNNSDKGEEDEEEEATRKNRLGLTKKGMDDDEEGGKDLDFDLDDEIEKGDDWEHEETFTDDDEAVDIDPEERADLAPEIPAPPEIKQDDEENEEEGGLSKSGKELKKLLGRAAGLNESDADEDEEDEDQEDDSSPVLAPKQKDQVKDEPVDSSPSKPAPSGHARGTPPASKSKQKRKSGVDDAKTSSGAASKKAKVELDAKASGLKEEASSLAKPASKTSAASKSGTSVSPVTEDEIRSVLLAVAPVTTQDLVSRFKSRLRGAEDKNAFAEILKKISKIQKTNGHNYVVLRDDKK

SEQ ID NO: 180621 - protein, 395 aa, Zea Mays
MEGSQSATATYYLLMRHGKEFNAYPAGSWFNFSKIAQYKQLTLEEAEEKMNKRKTSATGYERWMMKAAANGPAAFGSDMKKLEATNGGEKESARPKKGKNNEEGNNSDKGEEDEEEEATRKNRLGLTKKGMDDDEEGGKDLDFDLDDEIEKGDDWEHEETFTDDDEAVDIDPEERADLAPEIPAPPEIKQDDEENEEEGGLSKSGKELKKLLGRAAGLNESDADEDEEDEDQEDDSSPVLAPKQKDQVKDEPVDSSPSKPAPSGHARGTPPASKSKQKRKSGVDDAKTSSGAASKKAKDAKASGLKEEASSLAKPASKTSAASKSGTSVSPVTEDEIRSVLLAVAPVTTQDLVSRFKSRLRGAEDKNAFAEILKKISKIQKTNGHNYVVLRDDKK

SEQ ID NO: 180622 - protein, 398 aa, Zea Mays
MEGSQSATATYYLLMRHGKEFNAYPAGSWFNFSKIAQYKQLTLEEAEEKMNKRKTSATGYERWMMKAAANGPAAFGSDMKKLEATNGGEKESARPKKGKNNEEGNNSDKGEEDEEEEATRKNRLGLTKKGMDDDEEGGKDLDFDLDDEIEKGDDWEHEETFTDDDEAVDIDPEERADLAPEIPAPPEIKQDDEENEEEGGLSKSGKELKKLLGRAAGLNESDADEDEEDEDQEDDSSPVLAPKQKDQVKDEPVDSSPSKPAPSGHARGTPPASKSKQKRKSGVDDAKTSSGAASKKAKVELDAKASGLKEEASSLAKPASKTSAASKSGTSVSPVTEDEIRSVLLAVAPVTTQDLVSRFKSRLRGAEDKNAFAEILKKISKIQKTNGHNYVVLRDDKK

SEQ ID NO: 180623 - protein, 395 aa, Zea Mays
MFVLILNLAGKIQQETMDFGRRNRPISVSSKIAQYKQLTLEEAEEKMNKRKTSATGYERWMMKAAANGPAAFGSDMKKLEATNGGEKESARPKKGKNNEEGNNSDKGEEDEEEEATRKNRLGLTKKGMDDDEEGGKDLDFDLDDEIEKGDDWEHEETFTDDDEAVDIDPEERADLAPEIPAPPEIKQDDEENEEEGGLSKSGKELKKLLGRAAGLNESDADEDEEDEDQEDDSSPVLAPKQKDQVKDEPVDSSPSKPAPSGHARGTPPASKSKQKRKSGVDDAKTSSGAASKKAKVELDAKASGLKEEASSLAKPASKTSAASKSGTSVSPVTEDEIRSVLLAVAPVTTQDLVSRFKSRLRGAEDKNAFAEILKKISKIQKTNGHNYVVLRDDKK

SEQ ID NO: 180624 - protein, 154 aa, Zea Mays
MSQMRMRMKKTKIKKMIHRQCLLQNRRIKLKMNLWIAAHLNQHHQDMLEAHLRHPNPSKRENQVLMMQKLLVVQLQRKQRMRKHQASKRRHHLWQNLHQRPLLHQKVGQAYHLSQRMKSGVFFLQWLQSPHKIWYPDSSLGFEVQRTRMHLLKF

SEQ ID NO: 180625 - protein, 207 aa, Zea Mays
MAVGKALRPTSPAPLTLAVALKPSQPSADHNNLVSEMSSPPSTTIQSSASTTRCPDPPHPHTHHLHLPVESLEAAAHELTRSMETMQETLATALLPPQQQPLPTAADILWHVTYQRPSGIMSTHSSVAQCHRRLSLFHHTPWLWGDPSNVFTSNTDCDIRRNHPSGRPTPLPHLHATITISNSIVRPLINDGAGNHDGCIDEENEGR

SEQ ID NO: 180626 - protein, 70 aa, Zea Mays
MHETCKLTRLIQARSSPSLCISYTCSGLNMFGFRANFLQIPKNIISDQICVDAHPNILPLQRTGTHLVYT

SEQ ID NO: 180627 - protein, 247 aa, Zea Mays
MRPVLSCRAGAHEGMLGWNLDWPTGSFSVRQRKATVVLMLGLGPLTTSLTSDPELLHPAPPEARARQHRPILDPTAETHPPGNPSAATLYNLLSSPCSDLTHLPNPTLPAAAAAAQQRQQHPKMVKFLKPGKAVIVRVFEEGTRDRPYGHCLVAGLAKYPKKVIRKDSAKKTAKKSRVKCFIKLVNFTHLMPTRYTLDVDFKDVATGGPDALSTHDKKVAACKTAKARLEERFKTGKNRWFFTKLRF

SEQ ID NO: 180628 - protein, 348 aa, Zea Mays
MDKGKSVVAELAASFSDVRVTPRQNPKTKSFLPSPSFYSSSKKGKPQKLVSLCLGTLGQHLEDIITDISEFAALFPPHIKLTIMSIARRRRLLNDEVLTSLAESSWEILDISGSDVTDAGLATVANVCSNLRAVDISRCEKVTTSGVSEIVCHCPSLEILRCGGCPRSEVTARRCLDLLKPKLNNLEEDSWEELNTLDIGGGAESLKWLVWPKIDDNSKETLAAECPRVTVNPQPSLFDLSGSKVPVEALASVPLDHSIVEDIDPKTWAVSAAPRRPVAPPNPNAPPEIPIAERFRLAYVEREARLAPKRAKRERQQRRRAERDYMMNDIDARSMALAAQASRNLRKS

SEQ ID NO: 180629 - protein, 86 aa, Zea Mays
MDKGKSVVAELAASFSDVRVTPRQNPKTKSFLPSPSFYSSSKKGKPQKLVSLCLGTLGQHLEDIITDISEFAALFPPHIKEEEAPE

SEQ ID NO: 180630 - protein, 328 aa, Zea Mays
MSVSRRARTPRPRASYRRPPSILPRRKLTIMSIARRRRLLNDEVLTSLAESSWEILDISGSDVTDAGLATVANVCSNLRAVDISRCEKVTTSGVSEIVCHCPSLEILRCGGCPRSEVTARRCLDLLKPKLNNLEEDSWEELNTLDIGGGAESLKWLVWVCKQVHFSSYDLWCVYNSPIRISCLMNIFPVLQPKIDDNSKETLAAECPRVTVNPQPSLFDLSGSKVPVEALASVPLDHSIVEDIDPKTWAVSAAPRRPVAPPNPNAPPEIPIAERFRLAYVEREARLAPKRAKRERQQRRRAERDYMMNDIDARSMALAAQASRNLRKS

SEQ ID NO: 180631 - protein, 324 aa, Zea Mays
MSTCTYACYCELVTIEFICYMIQLTIMSIARRRRLLNDEVLTSLAESSWEILDISGSDVTDAGLATVANVCSNLRAVDISRCEKVTTSGVSEIVCHCPSLEILRCGGCPRSEVTARRCLDLLKPKLNNLEEDSWEELNTLDIGGGAESLKWLVWVCKQVHFSSYDLWCVYNSPIRISCLMNIFPVLQPKIDDNSKETLAAECPRVTVNPQPSLFDLSGSKVPVEALASVPLDHSIVEDIDPKTWAVSAAPRRPVAPPNPNAPPEIPIAERFRLAYVEREARLAPKRAKRERQQRRRAERDYMMNDIDARSMALAAQASRNLRKS

SEQ ID NO: 180632 - protein, 185 aa, Zea Mays
MDKGKSVVAELAASFSDVRVTPRQNPKTKSFLPSPSFYSSSKKGKPQKLVSLCLGTLGQHLEDIITDISEFAALFPPHIKLTIMSIARRRRLLNDEVLTSLAESSWEILDISGSDVTDAGLATVANVCSNLRAVDISRCEKVTTSGVSEIVCHCPSLEILRCGYDFQQFVCIILGSISLNRLSKK

SEQ ID NO: 180633 - protein, 81 aa, Zea Mays
MDCEEKLTNVFWVDAKMLVDYAKFGDVYLTLCFNFRLEKQVLKVSIFTYCKTIKKFCYINTKTQLQIFAGPFSLKIISTKI

SEQ ID NO: 180634 - protein, 544 aa, Zea Mays
MGRRMEAPSSPASLVVVLLLGSLLLQARADDPYRFYTWNVTFGDIYPLGVKQEGILINGQFPGPQIDAVTNDNIIVNVFNNLPVPFLLSWQGIQQRRSSWQDGVYGTNCPIPPGGNFTYNMQFKDQIGSYYYFPSLLFHKAAGGYGAIRVLSRPRIPVPFDPPAGDFTILAGDWFKLNHTDLKGILDSGNDLPFPDGLLINGQGWNGNRFTVDQGKTYRFRVSNVGIATSVNIRIQGHSMLLVEVEGSHTMQSTYTSIDVHLGQSYSFLVTADQPPADYSIVVSTRFTTPVLTTAAILHYSSSNGAASVPPPPAPTVEIDFSLNQARSIRWNLTASGPRPNPQGSYHYGLVNTTRTIRLANSRATINGKLRYAVNGISFVPADTPLKVADFYSIPGVFTLGSMPDNPTGGGAYLQTSVMAANMRDYVEVVFENAENLVQSWHIDGYAFWVVGMDGGQWTPASRQGYNLRDAIARYTLQSWTAIYMPLDNVGMWNVRSESWARQYLGQQFYLRVYSPANSWRDENPIPKNALLCGRASGRRTRPL

SEQ ID NO: 180635 - protein, 209 aa, Zea Mays
MSWRWTLARRVATLAAIGGGGAQAQRLLSTSSAGGGTGLLGRHYIPLASQIRSKVVGCRGAALVSSRWLHEAQYQVRQDGASRAQQDPFELVADELSLLANRLRSMVAAEVPKLASAAEYFFKVGAEGKRFRPTVLLLMASALKFPLSESTEGRVLSILADKLRTRQQNIAEITEMIHVASLLHDDVLDDADTRRGVSSLNLIMGNKRL

SEQ ID NO: 180636 - protein, 211 aa, Zea Mays
MSWRWTLARRVATLAAIGGGGAQAQRLLSTSSAGGGTGLLGRHYIPLASQIRSKVVGCRGAALVSSRWLHEAQYQVRQDGASRAQEQQDPFELVADELSLLANRLRSMVAAEVPKLASAAEYFFKVGAEGKRFRPTVLLLMASALKFPLSESTEGRVLSILADKLRTRQQNIAEITEMIHVASLLHDDVLDDADTRRGVSSLNLIMGNKRL

SEQ ID NO: 180637 - protein, 275 aa, Zea Mays
MSWRWAFARHVAQAQRLLPTSSAGGGTGLLGRHHHHMPLASQIRSKVPKLASTAEYFFKVGVEGKRFQPTVLLLMASAVKFSLSESTEGKVLSILADKLRSRQQNIAEITEMIHVASLMHDDVLDNADTRCGVRSLNLIKGNKLSVLAGDFLLSRACVALAALGNTEVASLMATTVEHLVTGETMQISTSTEQQRSMEYYLQKTYYKTSSLISNSCKAVAILAGHTAEVSVLAYEYGRNLGLAFQLIDDVLNFTGTSASLGNGSLSHIRHVRITT

SEQ ID NO: 180638 - protein, 329 aa, Zea Mays
MSWRWAFARHVAQAQRLLPTSSAGGGTGLLGRHHHHMPLASQIRSKEQQDPFELVADEVSLLVNRLRFMVSAEVPKLASTAEYFFKVGVEGKRFQPTVLLLMASAVKFSLSESTEGKVLSILADKLRSRQQNIAEITEMIHVASLMHDDVLDNADTRCGVRSLNLIKGNKLSVLAGDFLLSRACVALAALGNTEVASLMATTVEHLVTGETMQISTSTEQQRSMEYYLQKTYYKTSSLISNSCKAVAILAGHTAEVSVLAYEYGRNLGLAFQLIDDVLNFTGTSASLGNGSLSHIRHGIITAPMLYAMEEFPQLLEVVDRGFGNPANVE

SEQ ID NO: 180639 - protein, 310 aa, Zea Mays
MSWRWAFARHVAQAQRLLPTSSAGGGTGLLGRHHHHMPLASQIRSKVPKLASTAEYFFKVGVEGKRFQPTVLLLMASAVKFSLSESTEGKVLSILADKLRSRQQNIAEITEMIHVASLMHDDVLDNADTRCGVRSLNLIKGNKLSVLAGDFLLSRACVALAALGNTEVASLMATTVEHLVTGETMQISTSTEQQRSMEYYLQKTYYKTSSLISNSCKAVAILAGHTAEVSVLAYEYGRNLGLAFQLIDDVLNFTGTSASLGNGSLSHIRHALDYLRKSHGVERTKELAREHSDRAVKAIESLPYPTTRMF

SEQ ID NO: 180640 - protein, 337 aa, Zea Mays
MSWRWAFARHVAQAQRLLPTSSAGGGTGLLGRHHHHMPLASQIRSKEQQDPFELVADEVSLLVNRLRFMVSAEVPKLASTAEYFFKVGVEGKRFQPTVLLLMASAVKFSLSESTEGKVLSILADKLRSRQQNIAEITEMIHVASLMHDDVLDNADTRCGVRSLNLIKGNKLSVLAGDFLLSRACVALAALGNTEVASLMATTVEHLVTGETMQISTSTEQQRSMEYYLQKTYYKTSSLISNSCKAVAILAGHTAEVSVLAYEYGRNLGLAFQLIDDVLNFTGTSASLGNGSLSHIRHALDYLRKSHGVERTKELAREHSDRAVKAIESLPYPTTRMF

SEQ ID NO: 180641 - protein, 261 aa, Zea Mays
MVSAEVPKLASTAEYFFKVGVEGKRFQPTVLLLMASAVKFSLSESTEGKVLSILADKLRSRQQNIAEITEMIHVASLMHDDVLDNADTRCGVRSLNLIKGNKLSVLAGDFLLSRACVALAALGNTEVASLMATTVEHLVTGETMQISTSTEQQRSMEYYLQKTYYKTSSLISNSCKAVAILAGHTAEVSVLAYEYGRNLGLAFQLIDDVLNFTGTSASLGNGSLSHIRHGIITAPMLYAMEEFPQLLEVVDRGFGNPANVE

SEQ ID NO: 180642 - protein, 55 aa, Zea Mays
MNLSEVVPKRLYHQLATLVLIILTKYIPLNLRRCLLNFLVSVLAVADRKSASANL

SEQ ID NO: 180643 - protein, 917 aa, Zea Mays
MRLSSSSGSVLPAQPGSPEAVEEHKCLNSELWHACAGPLVSLPAVGSRVVYFPQGHSEQVAASTNKEIESQIPNYPNLPPQLICQLHNVTMHADAETDEVYAQMTLQPLNPQELKDPYLPAELGSANKQPTNYFCKTLTASDTSTHGGFSVPRRAAEKVFPPLDFTQQPPCQELMAKDLHGNEWKFRHIFRGQPKRHLLTTGWSVFVSAKRLVAGDSVLFIWNDNNQLLLGIRRANRPQTVMPSSVLSSDSMHIGLLAAAAHAASTNSRFTIFYNPSCFCRASPSEFVIPLVKYVKAVYHTRISVGMRFRMLFETEESSVRRYMGTITGICDLDSVRWPNSHWRSVKVGWDESTAGERQPRVSLWEIEPLTTFPMYPSPFPLRLKRPWPTGLPSLHGGKDDDLANSLMWLRDTANPGFQSLNFGGLGMSPWMQPRLDATLLGLQPDMYQAMATAAFQDATKQASPTMLQFQQPQNIAGRASPLLSSQILQQAHHQFQQQPYLQNISESTIQAQGQSEFLKQQIQRSQSFNEQKPQMQHQQESQQQQQPQCLPVPQHQQMQQQNMTNYQSISNALSPFSQLSPVSQSSPMALQTILPFSQAQSFTDTNVGSLSPSNGNTMQNTLRPFSSEAVSHLSMPRPTAIPVADPWSSKRVAVESLLPSRPQVSSQMEQLDPAPASIPHSSALAPLPGRGCLVDQDVNSDPQNHLLFGVSIDSQSLLMQGGIPGLQNGNDSAAIPYSTSNFLSPSQNDFPLDHTLNSSGCLDDSGYVPPCSDNSDKVNRPPATFVKVYKSGTYGRSLDITRFSSYHELRRELGRLFGLEGQLEDPLRSGWQLVFVDREEDVLLVGDDPWQEFVSTVSCIKILSPQEVQQMGKQGLELLSSAPARRLGSSCDDYVSRQESRSLSTGIASVGSVELG

SEQ ID NO: 180644 - protein, 899 aa, Zea Mays
MVSFEAVEEHKCLNSELWHACAGPLVSLPAVGSRVVYFPQGHSEQVAASTNKEIESQIPNYPNLPPQLICQLHNVTMHADAETDEVYAQMTLQPLNPQELKDPYLPAELGSANKQPTNYFCKTLTASDTSTHGGFSVPRRAAEKVFPPLDFTQQPPCQELMAKDLHGNEWKFRHIFRGQPKRHLLTTGWSVFVSAKRLVAGDSVLFIWNDNNQLLLGIRRANRPQTVMPSSVLSSDSMHIGLLAAAAHAASTNSRFTIFYNPRASPSEFVIPLVKYVKAVYHTRISVGMRFRMLFETEESSVRRYMGTITGICDLDSVRWPNSHWRSVKVGWDESTAGERQPRVSLWEIEPLTTFPMYPSPFPLRLKRPWPTGLPSLHGGKDDDLANSLMWLRDTANPGFQSLNFGGLGMSPWMQPRLDATLLGLQPDMYQAMATAAFQDATKQASPTMLQFQQPQNIAGRASPLLSSQILQQAHHQFQQQPYLQNISESTIQAQGQSEFLKQQIQRSQSFNEQKPQMQHQQESQQQQQPQCLPVPQHQQMQQQNMTNYQSISNALSPFSQLSPVSQSSPMALQTILPFSQAQSFTDTNVGSLSPSNGNTMQNTLRPFSSEAVSHLSMPRPTAIPVADPWSSKRVAVESLLPSRPQVSSQMEQLDPAPASIPHSSALAPLPGRGCLVDQDVNSDPQNHLLFGVSIDSQSLLMQGGIPGLQNGNDSAAIPYSTSNFLSPSQNDFPLDHTLNSSGCLDDSGYVPPCSDNSDKVNRPPATFVKVYKSGTYGRSLDITRFSSYHELRRELGRLFGLEGQLEDPLRSGWQLVFVDREEDVLLVGDDPWQEFVSTVSCIKILSPQEVQQMGKQGLELLSSAPARRLGSSCDDYVSRQESRSLSTGIASVGSVELG

SEQ ID NO: 180645 - protein, 85 aa, Zea Mays
MHLGGGRHCRHWWRAICRRWQFGSTPSFWSRQVVWELRVCSRMVCIVVLIRDLHRVRVNCSLSTGFRRGLSGSVAGGGSSAPLPR

SEQ ID NO: 180646 - protein, 484 aa, Zea Mays
MDPGNKLAFAKAPFSSRTASPELLPKNFDTTCPPSLDSCGSSSSSSNPSWRAPRDRPRTPVIERLRRTYGILSLHLFIKLDEAPVQDGNGQTTPGHNSRRPNLSLQIPARTLDTNIPSSTRVTISCSPSSTRVGLPPRPNSTRTKSSIKNMNPQHSFRARSSAQEGDRVVLLNPGTSSEGQQDNPSTARSFSFRKVINSLSAKRTHSLPVTPVGTTDKAASPPNQLDTLPTTTNEGVEAKIRRSLSVPGNRKNRSLRRADSLGVIRVIPTTPRPVPVEATTSSDIIEETIDVPEDGGEDIPEEEAVCRICFVELNEGGETLKMECSCKGELALAHQDCAVKWFSIKGNKICDVCKQEVQNLPVMLLRIPTQTANRRVANAAQQRAAQQYRFWQDIPILVMVSMLAYFCFLEQLLVTDLQSRALAISLPFSCVLGLLSSMIASTMVSKSYLWAYASFQFAIVILFAHIFYNVYELSTSRVFEVES

SEQ ID NO: 180647 - protein, 289 aa, Zea Mays
MFPLLLWIILVASCAALIIQSLAARLGVVTGKHLAEHCRAEYPKVTNFVLWILAELAVVACDIPEVIGTAFALNMLFRIPVWCGVLITGLSTLMLLLLQQYGVRKLEFLIAFLVFLIATCFLVELGYSKPNAPEVVRGLFVPELKGNGATGLAISLLGAMVMPHNLFLHSALVLSRKVPRSVHGIKEACRFYTIESAFALTVAFLINISIISVSGSVCGSGNLNPEDQANCSDLDLNKASFLLKNVLGNWSSKLFAVALLASGQSSTITGTYAGQYVMQVFGTYTLFQF

SEQ ID NO: 180648 - protein, 220 aa, Zea Mays
MLLLLQQYGVRKLEFLIAFLVFLIATCFLVELGYSKPNAPEVVRGLFVPELKGNGATGLAISLLGAMVMPHNLFLHSALVLSRKVPRSVHGIKEACRFYTIESAFALTVAFLINISIISVSGSVCGSGNLNPEDQANCSDLDLNKASFLLKNVLGNWSSKLFAVALLASGQSSTITGTYAGQYVMQICNEQAWAYEFQCQPPRFSWSARLQRKRTDTGGF

SEQ ID NO: 180649 - protein, 261 aa, Zea Mays
MSVPGQCSSQPQFITSVGRSNRSNGPGTPLIESIDVDQIVIPEKNSWKNLFSYIGPGFLVSIAYIDPGNFETDLQAGAQYKYELLWIILVASCAALIIQSLAARLGVVTGKHLAEHCRAEYPKVTNFVLWILAELAVVACDIPEVIGTAFALNMLFRIPVWCGVLITGLSTLMLLLLQQYGVRKLEFLIAFLVFLIATCFLVELGYSKPNAPEVVRGLFVPELKGNGATGLAISLLGAMAQSFSALSISIVKKSATVCSWD

SEQ ID NO: 180650 - protein, 218 aa, Zea Mays
MLLLLQQYGVRKLEFLIAFLVFLIATCFLVELGYSKPNAPEVVRGLFVPELKGNGATGLAISLLGAMVMPHNLFLHSALVLSRKVPRSVHGIKEACRFYTIESAFALTVAFLINISIISVSGSVCGSGNLNPEDQANCSDLDLNKASFLLKNVLGNWSSKLFAVALLASGQSSTITGTYAGQYVMQICNEQAWAYEFQCQPPRFSWSARLQRKRTDTG

SEQ ID NO: 180651 - protein, 62 aa, Zea Mays
MLSVMIILVSFFWILSIVLTVVKMHSLAGLFGSTSRCLVMLVPGNTQWPWNWQIEILEMVAH

SEQ ID NO: 180652 - protein, 63 aa, Zea Mays
MTVVHNYFLIDVNVATLVSFMLLLMEVLYCSNLEKYYIYVFEHILLQLRCLPTQVLTCGCLLV

SEQ ID NO: 180653 - protein, 505 aa, Zea Mays
MAPPAPSSPGKSIQPSASSLARAARLLFGENAPPPITNITWSKGSTTAAANLQVLGKRKPVEVNAPGGISTSSSTPISIPSDEPNPSGTRTTATGTGSGTTGTNTGTDTPQQRKLEVLAIDGVDVQDSADRKRTKKLTSDVWQYFTKNEKVVEVGGKKYIQMWGYCNFPNCRAKYRAESNYGTTGFRNHLKSTHSIVKGQLQLKTEKDHGKDITVIEPYKYDQEVSLKKLYLAIVMHEYPFNMVEHDYFVEFIKSLRPSFPLKSRVTVRKDIMDIFLEQKEKLYSYLKTVQCRFSTTMDMWTSCQNKSYMCVTIHWVDEEWCMQKRIIGFFHVEGRHTGQKLSQTFSELMVKWYIEKKLFSLTLDNASANEVAVKDVIADLQESNGNLVCGGMFFHVRCACHILNLVARDGMSVISSTIDKIKAIVLVAKGSPLQMEELMKRATECGLDTTKGLSIDVSTRWNSTYLMLRDALYYKPAFLRLKSSDRRRLVSFMIPFSFNLLTLL

SEQ ID NO: 180654 - protein, 745 aa, Zea Mays
MAKRWAEEATEIEKFRADELEQAGIDEAQRREEEWQREIECVHGQHAADLETLVNTTEELERLRRDLSMVNDAKKAALGHADDAMKIAEANAEKVEILSNEAARLKGLLDSSAASEESKSREAELLVKNLRSEVSSLKGKLEKAIVLEERLAEAEKIIEELKSEIADAQKVKADICLQLEEWKEKSGSLEMKLVGVTLSEKLKSDSLASTTEELDKVKSILQDRELEIDVLKGKITAMEIEVARLLADVTDSNEHLDASQQEVFGLQTTIDVLRNKLDAAELAASEALDNERTAITKIEGLAEEKIKLISELDDARDREEREKMAIEDLTAALDKASCEAQEAHDRFQKKEDDYEHALAQIGDLKMSAKTMEECYSVMLDEAKHDITGLRETVEKLEAEVSKCREECECKELDLITASKQSEQEIAALKEEAQHLSASLQVAEHELEAVNEERERFQEKLACTESAVAEANHAVQEAKAEKERLQEKLAHTESEVAVANMAAHESKIEFDRLQEKLTYTELVVAEANKAVQEAKAESSHLKERLLDKENALQSITQENDEFRMREADAMKKIDELSALLAEAMTKKHPEEEEKLVVVDEAHNSMRDEVICSVAENGDTEETDDKKPKLEVEAVDMKSNGQSKHEEKDDSKVEQEELKTELSLQESKKVSFDKDTWTKNKKQETESPNDELGSKKVSSSTENASRAIIPEDTATKVSASPTKPQHQKKNKPLLKKFGSLLKKKNSK

SEQ ID NO: 180655 - protein, 720 aa, Zea Mays
MVEGRSYLPAEVRSGLETLKQRRLERMRLSAQNEEGGNPALAARSGGDALRSPTNCRVRLHPDNNTGGLPGDVQGKNPFAKRKVEKFDMSNLEWINKIPECPVYCPTKVEFEDPIAYIQMISPEAAKYGICKIVSPVCASVPAGVVLMKEQPSFKFMTRVQPLRLAEWAEDDTVTFFMSGRKYTFRDYEKMANKVFSKRYSSSSCLPGRYVEEEFWREIAFGKMDFVEYACDVDGSAFSSSPHDQLGKSNWNLKNFSRLPGSVLRLLQTPIPGVTDPMLYIGMLFSMFAWHVEDHYLYSINYHHCGASKTWYGIPGDAAPGFERVASQYVYNKDILIGDGEDAAFDVLLGKTTMFPPNVLLDHNVPVYKAVQRPGEFVITFPRSYHAGFSHEQELRSCPCKSSRVVYVREDILELEALSRKFEHDVYLYKERSSIRSCKEAEISDANVEHVPNLGITLDFANSKAGSSGFITVDGGNSSSAVSILTSSAHHEALMHSEARVHATQTDQIYSTAKQAINTSVTKGTCTTDESSSGMDCACNEHGSCNASVMECSDDSGSENEIFRVKRRSTLFDKPTSETKTSTLSEQQVLRRLKKVRPGVQQVSKRPEESGNGSVRSTHMSPSSNHASSDDEIDMAPLFLRIKRRQLENQDVTSRGARSQSYPSSSGSREEFVERSRDAAAELRPKRVKIRLPSSASRQIEQQRSSGQRFAREDKLPLAF

SEQ ID NO: 180656 - protein, 813 aa, Zea Mays
MRLSAQNEEGGNPALAARSGGDALRSPTNCRVRLHPDNNTGGLPGDVQGKNPFAKRKVEKFDMSNLEWINKIPECPVYCPTKVEFEDPIAYIQMISPEAAKYGICKIVSPVCASVPAGVVLMKEQPSFKFMTRVQPLRLAEWAEDDTVTFFMSGRKYTFRDYEKMANKVFSKRYSSSSCLPGRYVEEEFWREIAFGKMDFVEYACDVDGSAFSSSPHDQLGKSNWNLKNFSRLPGSVLRLLQTPIPGVTDPMLYIGMLFSMFAWHVEDHYLYSINYHHCGASKTWYGIPGDAAPGFERVASQYVYNKDILIGDGEDAAFDVLLGKTTMFPPNVLLDHNVPVYKAVQRPGEFVITFPRSYHAGFSHGFNCGEAVNFAVGDWFPLGSLASKRYALLNRTPLLAHEELLCRSAMLLSQKLLNCDPRSLDKLEHPCSQYSVKSCFVRLIKFQRRARDLLAKMGSEICYKPKTSPNLSCSICRRGCYITHVLCGCNFDPVCLHHEQELRSCPCKSSRVVYVREDILELEALSRKFEHDVYLYKERSSIRSCKEAEISDANVEHVPNLGITLDFANSKAGSSGFITVDGGNSSSAVSILTSSAHHEALMHSEARAINTSVTKGTCTTDESSSGMDCACNEHGSCNASVMECSDDSGSENEIFRVKRRSTLFDKPTSETKTSTLSEQQVLRRLKKVRPGVQQVSKRPEESGNGSVRSTHMSPSSNHASSDDEIDMAPLFLRIKRRQLENQDVTSRGARSQSYPSSSGSREEFVERSRDAAAELRPKRVKIRLPSSASRQIEQQRSSGQRFAREDKLPLAF

SEQ ID NO: 180657 - protein, 716 aa, Zea Mays
MVEGRSYLPAEVRSGLETLKQRRLERMRLSAQNEEGGNPALAARSGGDALRSPTNCRVRLHPDNNTGGLPGDVQGKNPFAKRKVEKFDMSNLEWINKIPECPVYCPTKVEFEDPIAYIQMISPEAAKYGICKIVSPVCASVPAGVVLMKEQPSFKFMTRVQPLRLAEWAEDDTVTFFMSGRKYTFRDYEKMANKVFSKRYSSSSCLPGRYVEEEFWREIAFGKMDFVEYACDVDGSAFSSSPHDQLGKSNWNLKNFSRLPGSVLRLLQTPIPGVTDPMLYIGMLFSMFAWHVEDHYLYSINYHHCGASKTWYGIPGDAAPGFERVASQYVYNKDILIGDGEDAAFDVLLGKTTMFPPNVLLDHNVPVYKAVQRPGEFVITFPRSYHAGFSHGFNCGEAVNFAVGDWFPLGSLASKRYALLNRTPLLAHEELLCRSAMLLSQKLLNCDPRSLDKLEHPCSQYSVKSCFVRLIKFQRRARDLLAKMGSEICYKPKTSPNLSCSICRRGCYITHVLCGCNFDPVCLHHEQELRSCPCKSSRVVYVREDILELEALSRKFEHDVYLYKERSSIRSCKEAEISDANVEHVPNLGITLDFANSKAGSSGFITVDGGNSSSAVSILTSSAHHEALMHSEARAINTSVTKGTCTTDESSSGMDCACNEHGSCNASVMECSDDSGSENEIFRVKRRSTLFDKPTSETKTSTLSEQQWPPFFDCAM

SEQ ID NO: 180658 - protein, 694 aa, Zea Mays
MRLSAQNEEGGNPALAARSGGDALRSPTNCRVRLHPDNNTGGLPGDVQGKNPFAKRKVEKFDMSNLEWINKIPECPVYCPTKVEFEDPIAYIQMISPEAAKYGICKIVSPVCASVPAGVVLMKEQPSFKFMTRVQPLRLAEWAEDDTVTFFMSGRKYTFRDYEKMANKVFSKRYSSSSCLPGRYVEEEFWREIAFGKMDFVEYACDVDGSAFSSSPHDQLGKSNWNLKNFSRLPGSVLRLLQTPIPGVTDPMLYIGMLFSMFAWHVEDHYLYSINYHHCGASKTWYGIPGDAAPGFERVASQYVYNKDILIGDGEDAAFDVLLGKTTMFPPNVLLDHNVPVYKAVQRPGEFVITFPRSYHAGFSHEQELRSCPCKSSRVVYVREDILELEALSRKFEHDVYLYKERSSIRSCKEAEISDANVEHVPNLGITLDFANSKAGSSGFITVDGGNSSSAVSILTSSAHHEALMHSEARVHATQTDQIYSTAKQAINTSVTKGTCTTDESSSGMDCACNEHGSCNASVMECSDDSGSENEIFRVKRRSTLFDKPTSETKTSTLSEQQVLRRLKKVRPGVQQVSKRPEESGNGSVRSTHMSPSSNHASSDDEIDMAPLFLRIKRRQLENQDVTSRGARSQSYPSSSGSREEFVERSRDAAAELRPKRVKIRLPSSASRQIEQQRSSGQRFAREDKLPLAF

SEQ ID NO: 180659 - protein, 333 aa, Zea Mays
MHAPPLVTFAGGACPTTASASPSPWLASPRDAIFAAPARPLRSRRGTLRLEAKAAWRAAGGGRGPRVPAKGAVLASYMGAEEVVGPSSLLDEEEFISHIRKELDNGKLPADVASNLEELYYNYRNAVLQNGDPNAYEVMLSNMMTLFDRVLLDVQNPFNFPPYHKALREPFDYYMFGQNYIRPLVDFRNSYVGNISLFHDIEENLHQGHNVVLMSNHQSEADPAIIALLLEKTNPWISENIVYVAGDRVVTDPLCKPFSMGRNLICVYSKKHMNDFPELIEMKRRSNTRSLKEMALLLRGGSQLIWIAPSGGRDRPNPSSGEWYPVNGLIFPF

SEQ ID NO: 180660 - protein, 436 aa, Zea Mays
MHAPPLVTFAGGACPTTASASPSPWLASPRDAIFAAPARPLRSRRGTLRLEAKAAWRAAGGGRGPRVPAKGAVLASYMGAEEVVGPSSLLDEEEFISHIRKELDNGKLPADVASNLEELYYNYRNAVLQNGDPNAYEVMLSNMMTLFDRVLLDVQNPFNFPPYHKALREPFDYYMFGQNYIRPLVDFRNSYVGNISLFHDIEENLHQSEADPAIIALLLEKTNPWISENIVYVAGDRVVTDPLCKPFSMGRNLICVYSKKHMNDFPELIEMKRRSNTRSLKEMALLLRGGSQLIWIAPSGGRDRPNPSSGEWYPAPFDSSAVDNMRRLLEHAGVPGHIYPLSLLCYEVMPPPQQVEKEIGEQRVISFHGAGLSVTEEINYGDITAHTKNADEGRELFTNTLYNSVVNQYNVLKSAIFRDRGAAVSNNVISLSQPWR

SEQ ID NO: 180661 - protein, 251 aa, Zea Mays
MHAPPLVTFAGGACPTTASASPSPWLASPRDAIFAAPARPLRSRRGTLRLEAKAAWRAAGGGRGPRVPAKGAVLASYMGAEEVVGPSSLLDEEEFISHIRKELDNGKLPADVASNLEELYYNYRNAVLQNGDPNAYEVMLSNMMTLFDRVLLDVQNPFNFPPYHKALREPFDYYMFGQNYIRPLVDFRNSYVGNISLFHDIEENLHQGHNVVLMSNHQSEADPAIIALLLEKTNPWISENIGCYRSALQAI

SEQ ID NO: 180662 - protein, 337 aa, Zea Mays
MHAPPLVTFAGGACPTTASASPSPWLASPRDAIFAAPARPLRSRRGTLRLEAKAAWRAAGGGRGPRVPAKGAVLASYMGAEEVVGPSSLLDEEEFISHIRKELDNGKLPADVASNLEELYYNYRNAVLQNGDPNAYEVMLSNMMTLFDRVLLDVQNPFNFPPYHKALREPFDYYMFGQNYIRPLVDFRNSYVGNISLFHDIEENLHQGHNVVLMSNHQSEADPAIIALLLEKTNPWISENIVYVAGDRVVTDPLCKPFSMGRNLICVYSKKHMNDFPELIEMKRRSNTRSLKEMALLLRGGSQLIWIAPSGGRDRPNPSSGEWYPGRHHSIHLQWTI

SEQ ID NO: 180663 - protein, 252 aa, Zea Mays
MHAPPLVTFAGGACPTTASASPSPWLASPRDAIFAAPARPLRSRRGTLRLEAKAAWRAAGGGRGPRVPAKGAVLASYMGAEEVVGPSSLLDEEEFISHIRKELDNGKLPADVASNLEELYYNYRNAVLQNGDPNAYEVMLSNMMTLFDRVLLDVQNPFNFPPYHKALREPFDYYMFGQNYIRPLVDFRNSYVGNISLFHDIEENLHQGHNVVLMSNHQSEADPAIIALLLEKTNPWISENIFSPDVGLCCWR

SEQ ID NO: 180664 - protein, 341 aa, Zea Mays
MHAAPMYIAETAPSQIRGMLISLKEFFIVLGMLLGYIAGNLYVEVVSGWRYMYASSTPLCLIMGVGMCWLPSSPRWLLLCAIQGKGNLPETKENATRCLCRLRGQASPDLVSEQIDLILEELSYIDQEKQASFGEIFQGKCLKAMIIGCGLVFFQQVTGQPSVLYYAATIFQSAGFSGASDATRVSILLGLLKLIMTGVAVLVVDRLGRRPLLIGGVSGITVALFLLSSYYTLLKDASYVAVIALLLYVGCYQLSFGPIGWLMISEVFPLRLRGRGLGVAVLVNFASNALVTFAFSPLEDLIGTGALFSGFGVIAVASLAFIFWIVPETKGLTLEEIEASL

SEQ ID NO: 180665 - protein, 518 aa, Zea Mays
MASHPPPAEPSSKSNKQGQSEHEEIHVSSGGVLAYTDDDDCESRRPLLLRTPASAECYSVSAAVFPFLFPALGGLLYGYDIGATSGATISLKSSTFSGTTWYNLSSVQTGLVVSGSLYGALIGSVLAYTIADFLGRRKELILASISYFIGAFLTAVAPNFTIMVVGRFLYGIGIGLAMHAAPMYIAETAPSQIRGMLISLKEFFIVLGMLLGYIAGNLYVEVVSGWRYMYASSTPLCLIMGVGMCWLPSSPRWLLLCAIQGKGNLPETKENATRCLCRLRGQASPDLVSEQIDLILEELSYIDQEKQASFGEIFQGKCLKAMIIGCGLVFFQQVTGQPSVLYYAATIFQSAGFSGASDATRVSILLGLLKLIMTGVAVLVVDRLGRRPLLIGGVSGITVALFLLSSYYTLLKDASYVAVIALLLYVGCYQLSFGPIGWLMISEVFPLRLRGRGLGVAVLVNFASNALVTFAFSPLEDLIGTGALFSGFGVIAVASLAFIFWIVPETKGLTLEEIEASL

SEQ ID NO: 180666 - protein, 353 aa, Zea Mays
MASHPPPAEPSSKSNKGQSEHEEIHVSSGGVLAYTDDDDCESRRPLLLRTPASAECYSVSAAVFPFLFPALGGLLYGYDIGATSGATISLKSSTFSGTTWYNLSSVQTGLVVSGSLYGALIGSVLAYTIADFLGRRKELILASISYFIGAFLTAVAPNFTIMVVGRFLYGIGIGLAMHAAPMYIAETAPSQIRGMLISLKEFFIVLGMLLGYIAGNLYVEVVSGWRYMYASSTPLCLIMGVGMCWLPSSPRWLLLCAIQGKGNLPETKENATRCLCRLRGQASPDLVSEQIDLILEELSYIDQEKQASFGEIFQGKCLKAMIIGCGLVFFQQVTGQPSVLYYAATIFQVVTYC

SEQ ID NO: 180667 - protein, 496 aa, Zea Mays
MASHPPPAEPSSKSNKGQSEHEEIHVSSGGVLAYTDDDDCESRRPLLLRTPASAECYSVSAAVFPFLFPALGGLLYGYDIGATSGATISLKSSTFSGTTWYNLSSVQTGLVVSGSLYGALIGSVLAYTIADFLVAPNFTIMVVGRFLYGIGIGLAMHAAPMYIAETAPSQIRGMLISLKEFFIVLGMLLGYIAGNLYVEVVSGWRYMYASSTPLCLIMGVGMCWLPSSPRWLLLCAIQGKGNLPETKENATRCLCRLRGQASPDLVSEQIDLILEELSYIDQEKQASFGEIFQGKCLKAMIIGCGLVFFQQVTGQPSVLYYAATIFQSAGFSGASDATRVSILLGLLKLIMTGVAVLVVDRLGRRPLLIGGVSGITVALFLLSSYYTLLKDASYVAVIALLLYVGCYQLSFGPIGWLMISEVFPLRLRGRGLGVAVLVNFASNALVTFAFSPLEDLIGTGALFSGFGVIAVASLAFIFWIVPETKGLTLEEIEASL

SEQ ID NO: 180668 - protein, 242 aa, Zea Mays
MALQYVEAQRQARPDLADWYASLADLYQQKLWHQLTLKLDQFLQLQAAQTGDTIIQLYNNFITDFETKINLLKLAHFAVIASRQYPDKDAAITFLEGVITKLRDTRESRINEPILYVKMQIAAINLEKGNQKECKNSLEDGKTTLDSMTDVDPTVHASFYWISSQYHKSCQEFAEFYKNALLYLAYTTVESLSESFKLDLAFDLSLAALLGDNIYNFGELLAHPILWCRMRGSCLRKSIFFV

SEQ ID NO: 180669 - protein, 95 aa, Zea Mays
MLDLLIMKPIMTNAFICHLSVHQIICMFAAYYAKWQLKEALKHASCTSTGLVAKLAVTTFQGLECFPACIKLLLTYDFRIQVFRHVLCIWLYVKL

SEQ ID NO: 180670 - protein, 228 aa, Zea Mays
MQIDLKGWGVGYVPSFQQHCLLHMLNSVAGLREWFSQSDESQVLPRIPVMVNMTQSVSSKKGRKAQESTTQTGIQMDPSRHSTVLEEESDEDDEFLIPESEPEPSNLEDAADVRKSGRNEEDSDLIDLSGFSGNLRRDDRDSSRDCWRMSDGNNFRVRSKNFVYDKSKIPAGKPLMELVAVDWFKDAKRMDHVARRKGCAVQVAAEKGLFALAINLQVPGTTNYIGSS

SEQ ID NO: 180671 - protein, 542 aa, Zea Mays
MPMGALQVMLLRLVLLAASAATTAVTVTAAPPPSEVAVGALFTYDSTIGRAARLAIELAVDDVNADRTVLAGTRLNLLAQDTNCSGFLGAVEALQLMERNVVAVIGPQSSGIGHVISHVVNELHVPLLSFAATDPTLSASEYPYFIRTTISDYFQMNAVASIVDYYQWKEVTAIFVDDDYGRGGVSALGDALAAKRARISYKAAIPPNSNTDVINDVLFKANMMESRVMVVHVNPDTGTRIFSVANKLQMMATGYVWIVTDWLAAVLDSSTSRDRKEMSHIQGLIVLRQHTPESVAKNKFISKWNNAARNRSITSGLNSYGFYAYDSVWAIARGVDQFLNNGQQINFSTDPVLHDTNGSSLHLSTLKIFDGGEQMLQQLLLTNFTGLTGRVQFNSDRNLVHPAYDILNIGGSGSRLIGYWSNYSGLSVAAPEILYQKPPDTSSIAQRLHNVVWPGDSTTTPKGWVFPNNGQPLRVGVPIKPSFKELVAAGKGPDNVTGYCIDIFNAAIRLLPYPVPCQFIAIGDGRKNPNYDDIISMVAANL

SEQ ID NO: 180672 - protein, 289 aa, Zea Mays
MFFSHQENTRTALGRFVLIIWMFVVLIITSSYTASLTSILTVQQLATGITGLDSLISSSLPIGYQTGKFTKKYLMLNLNVPESRLVQLNTIEEYADALNRGPKNGGVAAIIDEKPYIDIFLSHYCNFKIVGQQFTREGWGFAFQKDSPLAADMSTAILQLSESGQLQSIHDEWFTQPSCATNDESNVGATRLGLGSFWGLFLICALICLFAVVVFFIRVCWQYKQYSNSEDADESNEAGADGAGKRQRKLSRLGSFQEILKFFDMKEEEVMKSSMKRRPGEKDNHAAGF

SEQ ID NO: 180673 - protein, 642 aa, Zea Mays
MMGGVAQLVVVAALLATAAAAPTAAAAGALPSEVAVGALFTYDSTIGRAAQLAIELAVDDVNADDKVLAWTKLNLVSMDTNCSGFLGTIKALELMEKNVVAVIGPQSSGIGHAISQVVNELHVPLLSFAATDPTLSASEYPYFLRTTTSDYFQMNAVASIVDYYQWKRVTAVYIDDEYGRGGVSALGDALALKRAQVSYKATIPPNSNTDVIRDVLFKANMMESRVMVVHVNPDTGLRVFSAAKKLQMMASGYVWIVTDWLAAVLDSSASRNPKYMSNIQGVIVLRQHTPDSDAKNKFISRWNNVARNRSMTPGLNSYGFYAYDSVWAVARSVDQFLNAGNQINFSTDPRLHDPNGTTLRLSTLKIFDGGDQMLQQLLLTNFTGLTGAVKFDSGGNLLHPAYDILNVGRSGTHLIGYWSNYSGLSVAAPEILYQMSPNASTSTHQLNSVVWPGDSTDIPRGWVFPNDGQPLRVGVPVKPSFKALVSGSTPDSVRGYCIDVFKSAIKLLPYPVPYQFIPIGDGTKNPSYVSIVGMVASNTLDAAVGDFAIVRNGTRLAEYTQPYIDSGLVIVAPVKHITSSAWAFLKPFTWEMWFITGALFILVGIVVWLLEHRSNPEFRGPPCNQVITIFWVQLLHNVLLTP

SEQ ID NO: 180674 - protein, 644 aa, Zea Mays
MMGGVAQLVVVAALLATAAAAPTAAAAGALPSEVAVGALFTYDSTIGRAAQLAIELAVDDVNADDKVLAWTKLNLVSMDTNCSGFLGTIKALELMEKNVVAVIGPQSSGIGHAISQVVNELHVPLLSFAATDPTLSASEYPYFLRTTTSDYFQMNAVASIVDYYQWKRVTAVYIDDEYGRGGVSALGDALALKRAQVSYKATIPPNSNTDVIRDVLFKANMMESRVMVVHVNPDTGLRVFSAAKKLQMMASGYVWIVTDWLAAVLDSSASRNPKYMSNIQGVIVLRQHTPDSDAKNKFISRWNNVARNRSMTPGLNSYGFYAYDSVWAVARSVDQFLNAGNQINFSTDPRLHDPNGTTLRLSTLKIFDGGDQMLQQLLLTNFTGLTGAVKFDSGGNLLHPAYDILNVGRSGTHLIGYWSNYSGLSVAAPEILYQMSPNASTSTHQLNSVVWPGDSTDIPRGWVFPNDGQPLRVGVPVKPSFKALVSGSTPDSVRGYCIDVFKSAIKLLPYPVPYQFIPIGDGTKNPSYVSIVGMVASNTLDAAVGDFAIVRNGTRLAEYTQPYIDSGLVIVAPVKHITSSAWAFLKPFTWEMWFITGALFILVGIVVWLLEHRSNPEFRGPPCNQVITIFWFSFSTMFFSHQTS

SEQ ID NO: 180675 - protein, 828 aa, Zea Mays
MEKNVVAVIGPQSSGIGHAISQVVNELHVPLLSFAATDPTLSASEYPYFLRTTTSDYFQMNAVASIVDYYQWKRVTAVYIDDEYGRGGVSALGDALALKRAQVSYKATIPPNSNTDVIRDVLFKANMMESRVMVVHVNPDTGLRVFSAAKKLQMMASGYVWIVTDWLAAVLDSSASRNPKYMSNIQGVIVLRQHTPDSDAKNKFISRWNNVARNRSMTPGLNSYGFYAYDSVWAVARSVDQFLNAGNQINFSTDPRLHDPNGTTLRLSTLKIFDGGDQMLQQLLLTNFTGLTGAVKFDSGGNLLHPAYDILNVGRSGTHLIGYWSNYSGLSVAAPEILYQMSPNASTSTHQLNSVVWPGDSTDIPRGWVFPNDGQPLRVGVPVKPSFKALVSGSTPDSVRGYCIDVFKSAIKLLPYPVPYQFIPIGDGTKNPSYVSIVGMVASNTLDAAVGDFAIVRNGTRLAEYTQPYIDSGLVIVAPTVNMIPDMILVVYKLSDPRHGSEMGACDTTSMSFARAHAPNQTHGSASPQCSSHTKLLDEKLSPSEENTRTALGRFVLIIWMFVVLIITSSYTASLTSILTVQQLATGITGLDSLISSSLPIGYQTGKFTKKYLMLNLNVPESRLVQLNTIEEYADALNRGPKNGGVAAIIDEKPYIDIFLSHYCNFKIVGQQFTREGWGFAFQKDSPLAADMSTAILQLSESGQLQSIHDEWFTQPSCATNDESNVGATRLGLGSFWGLFLICALICLFAVVVFFIRVCWQYKQYSNSEDADESNEAGADGAGKRQRKLSRLGSFQEILKFFDMKEEEVMKSSMKRRPGEKDNHAAGF

SEQ ID NO: 180676 - protein, 569 aa, Zea Mays
MEKNVVAVIGPQSSGIGHAISQVVNELHVPLLSFAATDPTLSASEYPYFLRTTTSDYFQMNAVASIVDYYQWKRVTAVYIDDEYGRGGVSALGDALALKRAQVSYKATIPPNSNTDVIRDVLFKANMMESRVMVVHVNPDTGLRVFSAAKKLQMMASGYVWIVTDWLAAVLDSSASRNPKYMSNIQGVIVLRQHTPDSDAKNKFISRWNNVARNRSMTPGLNSYGFYAYDSVWAVARSVDQFLNAGNQINFSTDPRLHDPNGTTLRLSTLKIFDGGDQMLQQLLLTNFTGLTGAVKFDSGGNLLHPAYDILNVGRSGTHLIGYWSNYSGLSVAAPEILYQMSPNASTSTHQLNSVVWPGDSTDIPRGWVFPNDGQPLRVGVPVKPSFKALVSGSTPDSVRGYCIDVFKSAIKLLPYPVPYQFIPIGDGTKNPSYVSIVGMVASNTLDAAVGDFAIVRNGTRLAEYTQPYIDSGLVIVAPVKHITSSAWAFLKPFTWEMWFITGALFILVGIVVWLLEHRSNPEFRGPPCNQVITIFWFSFSTMFFSHRKSTTRCLGDINLPMIFFSLHR

SEQ ID NO: 180677 - protein, 210 aa, Zea Mays
MIANRKSTTGQDAIGKLSKSDDLTAAATVSRIPNSTLTLRSASAAVGQDSSGRSPSRGDRGRTERAAMGDGQGEQEKGNEGAHWKLGPRHREPAMEVGELRTEANRETGAMGELHSRRACTRRETERAGELEREERVPSVSRGISALDSRRSRGQVESREGRAMEMGGRARRPWNALGHGKDSTRGDVVLVADEQEGRDTRESRSNELRG

SEQ ID NO: 180678 - protein, 830 aa, Zea Mays
MGAAQLVILFLALATAVGAPPSEVAVGALFTYDSTIGRAAKLAIELAVDDVNSDGKVLPRTQLNLVPQDTNCSGFLGTIEALQLMEKNVVALIGPQSSGIGHVISHVVNELHVPLLSFAATDPTLSASEYPYFIRTTISDYFQMNAIASIVDYYQWKRVTAIFVDDDYGRGGVEALGDALALKRAKISYKAAIPPNSNTDVINDVLFKANMMESRVMIVHVNPDTGMRIFSVAKNLQMMASGYVWIVTDWLAAVLDSSANRGLKDMSHIQGLIVLRQHIPESEAKDKFISKWNNVAHNRNITSGLNSYGFYAYDSVWAVARAVDKFLSNGQQINFSTDPRLEDSNGSTLHLSSLKIFDGGEQMLHQLLLTNFTGVTGPVQFDSEHNLMPRNTSTSAQQLHDVVWPGDSTTKPKGWVFPNTGLPLRVGVPIKASFKELVSGRGDNMSGYCIEIFNAAIKLLPYPVPCQFITIGDGTKNPSYIDIIRMVAANSLDAAVGDFAIVRNGTQLAEYTQPYIESGLVIVAPVKHVTSIVWLLEHRTNEEFRGSPRRQVITMLWFSFSTMFFSHRENTVSTLGRFVLIIWLFVVLIITSSYTASLTSILTVQQLSTGITGIDSLVSSSLPIGYQAGKFTKRYLTENFNVPLSRLVPLNSIQEYADALNRGPKNGGVAAIVDEKPYIDIFLSNYCSFRIVGEEFTKEGWGFAFQRDSPLAADLSTAILQLSESGQLQRIHDEWFSRSSCSSDDSEVGATRLGLGSFWGLFLVCALICLFALLVFFIRVCRQYNQYSSSEAAGEPQHSCCGSCPKTAATITPWQLQRPDPVRRQEGGGD

SEQ ID NO: 180679 - protein, 491 aa, Zea Mays
MGAAQLVILFLALATAVGAPPSEVAVGALFTYDSTIGRAAKLAIELAVDDVNSDGKVLPRTQLNLVPQDTNCSGFLGTIEALQLMEKNVVALIGPQSSGIGHVISHVVNELHVPLLSFAATDPTLSASEYPYFIRTTISDYFQMNAIASIVDYYQWKRVTAIFVDDDYGRGGVEALGDALALKRAKISYKAAIPPNSNTDVINDVLFKANMMESRVMIVHVNPDTGMRIFSVAKNLQMMASGYVWIVTDWLAAVLDSSANRGLKDMSHIQGLIVLRQHIPESEAKDKFISKWNNVAHNRNITSGLNSYGFYAYDSVWAVARAVDKFLSNGQQINFSTDPRLEDSNGSTLHLSSLKIFDGGEQMLHQLLLTNFTGVTGPVQFDSEHNLMPRNTSTSAQQLHDVVWPGDSTTKPKGWVFPNTGLPLRVGVPIKASFKELVSGRGDNMSGYCIEIFNAAIKLLPYPVPCQFITIGDGTKNPSYIDIIRMVAANL

SEQ ID NO: 180680 - protein, 268 aa, Zea Mays
MFFSHRENTVSTLGRFVLIIWLFVVLIITSSYTASLTSILTVQQLSTGITGIDSLVSSSLPIGYQAGKFTKRYLTENFNVPLSRLVPLNSIQEYADALNRGPKNGGVAAIVDEKPYIDIFLSNYCSFRIVGEEFTKEGWGFAFQRDSPLAADLSTAILQLSESGQLQRIHDEWFSRSSCSSDDSEVGATRLGLGSFWGLFLVCALICLFALLVFFIRVCRQYNQYSSSEAAGEPQHSCCGSCPKTAATITPWQLQRPDPVRRQEGGGD

SEQ ID NO: 180681 - protein, 440 aa, Zea Mays
MTSTRTARSSREPNSIWCPRIPTAADFLGPSKLMEKNVVALIGPQSSGIGHVISHVVNELHVPLLSFAATDPTLSASEYPYFIRTTISDYFQMNAIASIVDYYQWKRVTAIFVDDDYGRGGVEALGDALALKRAKISYKAAIPPNSNTDVINDVLFKANMMESRVMIVHVNPDTGMRIFSVAKNLQMMASGYVWIVTDWLAAVLDSSANRGLKDMSHIQGLIVLRQHIPESEAKDKFISKWNNVAHNRNITSGLNSYGFYAYDSVWAVARAVDKFLSNGQQINFSTDPRLEDSNGSTLHLSSLKIFDGGEQMLHQLLLTNFTGVTGPVQFDSEHNLMPRNTSTSAQQLHDVVWPGDSTTKPKGWVFPNTGLPLRVGVPIKASFKELVSGRGDNMSGYCIEIFNAAIKLLPYPVPCQFITIGDGTKNPSYIDIIRMVAANL

SEQ ID NO: 180682 - protein, 441 aa, Zea Mays
MGAAQLVILFLALATAVGAPPSEVAVGALFTYDSTIGRAAKLAIELAVDDVNSDGKVLPRTQLNLVPQDTNCSGFLGTIEAVGDFAIVRNGTQLAEYTQPYIESGLVIVAPVKHVTSSAWAFLEPFTLEMWCVTVALFILVGIVVWLLEHRTNEEFRGSPRRQVITMLWFSFSTMFFSHKNTVSTLGRFVLIIWLFVVLIITSSYTASLTSILTVQQLSTGITGIDSLVSSSLPIGYQAGKFTKRYLTENFNVPLSRLVPLNSIQEYADALNRGPKNGGVAAIVDEKPYIDIFLSNYCSFRIVGEEFTKEGWGFAFQRDSPLAADLSTAILQLSESGQLQRIHDEWFSRSSCSSDDSEVGATRLGLGSFWGLFLVCALICLFALLVFFIRVCRQYNQYSSSEAAGEPQHSCCGSCPKTAATITPWQLQRPDPVRRQEGGGD

SEQ ID NO: 180683 - protein, 442 aa, Zea Mays
MGAAQLVILFLALATAVGAPPSEVAVGALFTYDSTIGRAAKLAIELAVDDVNSDGKVLPRTQLNLVPQDTNCSGFLGTIEAVGDFAIVRNGTQLAEYTQPYIESGLVIVAPVKHVTSSAWAFLEPFTLEMWCVTVALFILVGIVVWLLEHRTNEEFRGSPRRQVITMLWFSFSTMFFSHRENTVSTLGRFVLIIWLFVVLIITSSYTASLTSILTVQQLSTGITGIDSLVSSSLPIGYQAGKFTKRYLTENFNVPLSRLVPLNSIQEYADALNRGPKNGGVAAIVDEKPYIDIFLSNYCSFRIVGEEFTKEGWGFAFQRDSPLAADLSTAILQLSESGQLQRIHDEWFSRSSCSSDDSEVGATRLGLGSFWGLFLVCALICLFALLVFFIRVCRQYNQYSSSEAAGEPQHSCCGSCPKTAATITPWQLQRPDPVRRQEGGGD

SEQ ID NO: 180684 - protein, 805 aa, Zea Mays
MTSTRTARSSREPNSIWCPRIPTAADFLGPSKLMEKNVVALIGPQSSGIGHVISHVVNELHVPLLSFAATDPTLSASEYPYFIRTTISDYFQMNAIASIVDYYQWKRVTAIFVDDDYGRGGVEALGDALALKRAKISYKAAIPPNSNTDVINDVLFKANMMESRVMIVHVNPDTGMRIFSVAKNLQMMASGYVWIVTDWLAAVLDSSANRGLKDMSHIQGLIVLRQHIPESEAKDKFISKWNNVAHNRNITSGLNSYGFYAYDSVWAVARAVDKFLSNGQQINFSTDPRLEDSNGSTLHLSSLKIFDGGEQMLHQLLLTNFTGVTGPVQFDSEHNLMPRNTSTSAQQLHDVVWPGDSTTKPKGWVFPNTGLPLRVGVPIKASFKELVSGRGDNMSGYCIEIFNAAIKLLPYPVPCQFITIGDGTKNPSYIDIIRMVAANSLDAAVGDFAIVRNGTQLAEYTQPYIESGLVIVAPVKHVTSSAWAFLEPFTLEMWCVTVALFILVGIVVWLLEHRTNEEFRGSPRRQVITMLWFSFSTMFFSHRENTVSTLGRFVLIIWLFVVLIITSSYTASLTSILTVQQLSTGITGIDSLVSSSLPIGYQAGKFTKRYLTENFNVPLSRLVPLNSIQEYADALNRGPKNGGVAAIVDEKPYIDIFLSNYCSFRIVGEEFTKEGWGFAFQRDSPLAADLSTAILQLSESGQLQRIHDEWFSRSSCSSDDSEVGATRLGLGSFWGLFLVCALICLFALLVFFIRVCRQYNQYSSSEAAGEPQHSCCGSCPKTAATITPWQLQRPDPVRRQEGGGD

SEQ ID NO: 180685 - protein, 815 aa, Zea Mays
MGAAQLVILFLALATAVGAPPSEVAVGALFTYDSTIGRAAKLAIELAVDDVNSDGKVLPRTQLNLVPQDTNCSGFLGTIEDPTLSASEYPYFIRTTISDYFQMNAIASIVDYYQWKRVTAIFVDDDYGRGGVEALGDALALKRAKISYKAAIPPNSNTDVINDVLFKANMMESRVMIVHVNPDTGMRIFSVAKNLQMMASGYVWIVTDWLAAVLDSSANRGLKDMSHIQGLIVLRQHIPESEAKDKFISKWNNVAHNRNITSGLNSYGFYAYDSVWAVARAVDKFLSNGQQINFSTDPRLEDSNGSTLHLSSLKIFDGGEQMLHQLLLTNFTGVTGPVQFDSEHNLMPRNTSTSAQQLHDVVWPGDSTTKPKGWVFPNTGLPLRVGVPIKASFKELVSGRGDNMSGYCIEIFNAAIKLLPYPVPCQFITIGDGTKNPSYIDIIRMVAANSLDAAVGDFAIVRNGTQLAEYTQPYIESGLVIVAPVKHVTSSAWAFLEPFTLEMWCVTVALFILVGIVVWLLEHRTNEEFRGSPRRQVITMLWFSFSTMFFSHRENTVSTLGRFVLIIWLFVVLIITSSYTASLTSILTVQQLSTGITGIDSLVSSSLPIGYQAGKFTKRYLTENFNVPLSRLVPLNSIQEYADALNRGPKNGGVAAIVDEKPYIDIFLSNYCSFRIVGEEFTKEGWGFAFQRDSPLAADLSTAILQLSESGQLQRIHDEWFSRSSCSSDDSEVGATRLGLGSFWGLFLVCALICLFALLVFFIRVCRQYNQYSSSEAAGEPQHSCCGSCPKTAATITPWQLQRPDPVRRQEGGGD

SEQ ID NO: 180686 - protein, 808 aa, Zea Mays
MGAAQLVILFLALATAVGAPPSEVAVGALFTYDSTIGRAAKLAIELAVDDVNSDGKVLPRTQLNLVPQDTNCSGFLGTIEEYPYFIRTTISDYFQMNAIASIVDYYQWKRVTAIFVDDDYGRGGVEALGDALALKRAKISYKAAIPPNSNTDVINDVLFKANMMESRVMIVHVNPDTGMRIFSVAKNLQMMASGYVWIVTDWLAAVLDSSANRGLKDMSHIQGLIVLRQHIPESEAKDKFISKWNNVAHNRNITSGLNSYGFYAYDSVWAVARAVDKFLSNGQQINFSTDPRLEDSNGSTLHLSSLKIFDGGEQMLHQLLLTNFTGVTGPVQFDSEHNLMPRNTSTSAQQLHDVVWPGDSTTKPKGWVFPNTGLPLRVGVPIKASFKELVSGRGDNMSGYCIEIFNAAIKLLPYPVPCQFITIGDGTKNPSYIDIIRMVAANSLDAAVGDFAIVRNGTQLAEYTQPYIESGLVIVAPVKHVTSSAWAFLEPFTLEMWCVTVALFILVGIVVWLLEHRTNEEFRGSPRRQVITMLWFSFSTMFFSHRENTVSTLGRFVLIIWLFVVLIITSSYTASLTSILTVQQLSTGITGIDSLVSSSLPIGYQAGKFTKRYLTENFNVPLSRLVPLNSIQEYADALNRGPKNGGVAAIVDEKPYIDIFLSNYCSFRIVGEEFTKEGWGFAFQRDSPLAADLSTAILQLSESGQLQRIHDEWFSRSSCSSDDSEVGATRLGLGSFWGLFLVCALICLFALLVFFIRVCRQYNQYSSSEAAGEPQHSCCGSCPKTAATITPWQLQRPDPVRRQEGGGD

SEQ ID NO: 180687 - protein, 808 aa, Zea Mays
MTSTRTARSSREPNSIWCPRIPTAADFLGPSKALQLMEKNVVALIGPQSSGIGHVISHVVNELHVPLLSFAATDPTLSASEYPYFIRTTISDYFQMNAIASIVDYYQWKRVTAIFVDDDYGRGGVEALGDALALKRAKISYKAAIPPNSNTDVINDVLFKANMMESRVMIVHVNPDTGMRIFSVAKNLQMMASGYVWIVTDWLAAVLDSSANRGLKDMSHIQGLIVLRQHIPESEAKDKFISKWNNVAHNRNITSGLNSYGFYAYDSVWAVARAVDKFLSNGQQINFSTDPRLEDSNGSTLHLSSLKIFDGGEQMLHQLLLTNFTGVTGPVQFDSEHNLMPRNTSTSAQQLHDVVWPGDSTTKPKGWVFPNTGLPLRVGVPIKASFKELVSGRGDNMSGYCIEIFNAAIKLLPYPVPCQFITIGDGTKNPSYIDIIRMVAANSLDAAVGDFAIVRNGTQLAEYTQPYIESGLVIVAPVKHVTSSAWAFLEPFTLEMWCVTVALFILVGIVVWLLEHRTNEEFRGSPRRQVITMLWFSFSTMFFSHRENTVSTLGRFVLIIWLFVVLIITSSYTASLTSILTVQQLSTGITGIDSLVSSSLPIGYQAGKFTKRYLTENFNVPLSRLVPLNSIQEYADALNRGPKNGGVAAIVDEKPYIDIFLSNYCSFRIVGEEFTKEGWGFAFQRDSPLAADLSTAILQLSESGQLQRIHDEWFSRSSCSSDDSEVGATRLGLGSFWGLFLVCALICLFALLVFFIRVCRQYNQYSSSEAAGEPQHSCCGSCPKTAATITPWQLQRPDPVRRQEGGGD

SEQ ID NO: 180688 - protein, 196 aa, Zea Mays
MVRRTVLAALLVAAALAGGARAQLKEGFYDYSCPQAEKIVKDYVKAHIPHAPDVASTLLRTHFHDCFVRGCDASVLLNATGGSEAEKDAAPNLTLRGFGFIDRIKALLEKECPGVVSCADIVALAARDSVGVIGGPFWSVPTGRRDGTVSIKQEALDQIPAPTMNFTQLLQSFQNKSLNLADLVWLSGTYFPKPNT

SEQ ID NO: 180689 - protein, 242 aa, Zea Mays
MLEPATRGTINVLRSCVRAGTVRRVVFTSSVSTLTAVDAVGRRKAVLDESCLRALDDVWRTKPVGWVYILSKRLTEEAAFRFARENGVHLVSLVLPTVAGPFLTTSVPTSIQLLLSPITGDPKLYSVLASVHARFGCVPLAHVQDVCDAHVLLMEAPRAEGRYLCAAGGYAAAQLARLLASRYLPAGDRLSKDFDDVSCSPPVVSSRRLLDLGFRFRHDVEDVVKDSVAQCLAHGFLEHPET

SEQ ID NO: 180690 - protein, 61 aa, Zea Mays
MATSGLFRLSKDFDDVSCSPPVVSSRRLLDLGFRFRHDVEDVVKDSVAQCLAHGFLEHPET

SEQ ID NO: 180691 - protein, 189 aa, Zea Mays
MMGWGEEVVALSLRGYGYGNEEDDRPEKPRRYGVTEMRSPFYSFRPANQALQEILDSLSPFVDGLKFSGGCHSLMGKELVREITDLAHRHDIYVSTGDWAEHLLRQGPSSFKQYVEECKALGFDTIELNAGSLNLPEEALLRLVRLIKSSGLRAKPMFSVKFDSSDIPASGDRAFGAYIAPVKGKTSAC

SEQ ID NO: 180692 - protein, 286 aa, Zea Mays
MMGWGEEVVALSLRGYGYGNEEDDRPEKPRRYGVTEMRSPFYSFRPANQALQEILDSLSPFVDGLKFSGGCHSLMGKELVREITDLAHRHDIYVSTGDWAEHLLRQGPSSFKQYVEECKALGFDTIELNAGSLNLPEEALLRLVRLIKSSGLRAKPMFSVKFDSSDIPASGDRAFGAYIAPVKGKTSERCLEAGADMIMIDADDVCQRAESLRTDIIAKIVGRLGLDKTMFEASNSNTSEWFVRRYGPRVNLFVEHSDVMNLERLRGFNMRRSNSASRFASPFFLI

SEQ ID NO: 180693 - protein, 136 aa, Zea Mays
MRRTASNEKSKKEILTSRGRNVVHYEKRDTQCLWRKRSEDGTCSSKSAKLRCHRHPPTLHRPNCLCLCNANFILHNSKVKNWSRGFACLSNRRVACAPRRWNGESGGGHASPKQSRVASRSVRGDTQRGREREREP

SEQ ID NO: 180694 - protein, 64 aa, Zea Mays
MIVEMFLLLLLPPPLAAVHIAGWIRTCADRSMDSIHVYSSAVLSFPIPMFQWSLDSLTCFLLSD

SEQ ID NO: 180695 - protein, 66 aa, Zea Mays
MKILLKWMTGRNVVKLTCVHVGNAKKSSTPGPLKAAAAPAHHRHPHRPRSDGQSPLSLGVVLDVAL

SEQ ID NO: 180696 - protein, 544 aa, Zea Mays
MGLVGGVVGFCLGLPIGLAAAYFVYLRYFAAARRLQDPVIKPLRDLDSETLQATIPHIPLWVKSPDYERIDWMNKFIFDMWPFLDKVLSTFYSYLAICKHINRATRPIFDQYVGQYGIESIEFGELTLGTLPPTFQGIKVYEMLEKELVIEPVIRWASTSNVTVNVKVQSFEVTVQLEDLHIMLTPRVILKSLVPSFPCFANLCVSLMEKPRIDFGLKLLCGDVMAIPGLYQYVQDQLSKQISNLYHWPKVIQIPILDGASGATKKPVGILHVKVIRALNLLKMDFLGKSDPYVKMRLSGERLPSKKTSVKMSNLNPEWNEHFRFIVKDPDTQVLELHMFDWEKVKMHDKLGMQVIPLRLLTPYESKLFTLDLVRSMNPNDPQNKKNRGKLIVELTFDPLREDNMSSDAEGNASVRRDADGGGGGVLLVSVENAEDVEGKRHTNPYAEVLFRGERKKTKVIRKTREPRWSEEFQFMVDEPPVEDKIHIQVKSKRRGLPFRNKESLGHVNINLVDVVNNGRINEKYHLINSRNGMIHVEIKWSTV

SEQ ID NO: 180697 - protein, 196 aa, Zea Mays
MNKFIFDMWPFLDKAICKHINRATRPIFDQYVGQYGIESIEFGELTLGTLPPTFQGIKVYEMLEKELVIEPVIRWASTSNVTVNVKVQSFEVTVQLEDLHIMLTPRVILKSLVPSFPCFANLCVSLMEKVCIICAFRLHLIILLKTTNSSFVGIATYRFWIETLVWRCHGNTRLVSICSSNCSSGFCIKKHSQTLE

SEQ ID NO: 180698 - protein, 463 aa, Zea Mays
MNKFIFDMWPFLDKAICKHINRATRPIFDQYVGQYGIESIEFGELTLGTLPPTFQGIKVYEMLEKELVIEPVIRWASTSNVTVNVKVQSFEVTVQLEDLHIMLTPRVILKSLVPSFPCFANLCVSLMEKPRIDFGLKLLCGDVMAIPGLYQYVQDQLSKQISNLYHWPKVIQIPILDGASGATKKPVGILHVKVIRALNLLKMDFLGKSDPYVKMRLSGERLPSKKTSVKMSNLNPEWNEHFRFIVKDPDTQVLELHMFDWEKVKMHDKLGMQVIPLRLLTPYESKLFTLDLVRSMNPNDPQNKKNRGKLIVELTFDPLREDNMSSDAEGNASVRRDADGGGGGVLLVSVENAEDVEGKRHTNPYAEVLFRGERKKTKVIRKTREPRWSEEFQFMVDEPPVEDKIHIQVKSKRRGLPFRNKESLGHVNINLVDVVNNGRINEKYHLINSRNGMIHVEIKWSTV

SEQ ID NO: 180699 - protein, 225 aa, Zea Mays
MGLVGGVVGFCLGLPIGLAAAYFVYLRYFAAARRLQDPVIKPLRDLDSETLQATIPHIPLWVKSPDYERIDWMNKFIFDMWPFLDKVLSTFYSYLAICKHINRATRPIFDQYVGQYGIESIEFGELTLGTLPPTFQGIKVYEMLEKELVIEPVIRWASTSNVTVNVKVQSFEVTVQLEDLHIMLTPRVILKSLVPSFPCFANLCVSLMEKWRYKEASWNLACKGN

SEQ ID NO: 180700 - protein, 198 aa, Zea Mays
MHDKLGMQVIPLRLLTPYESKLFTLDLVRSMNPNDPQNKKNRGKLIVELTFDPLREDNMSSDAEGNASVRRDADGGGGGVLLVSVENAEDVEGKRHTNPYAEVLFRGERKKTKVIRKTREPRWSEEFQFMVDEPPVEDKIHIQVKSKRRGLPFRNKESLGHVNINLVDVVNNGRINEKYHLINSRNGMIHVEIKWSTV

SEQ ID NO: 180701 - protein, 65 aa, Zea Mays
MFLRTFRRRRPLTVAPRSISLFLCNKFRLRYKRRHLAEGPKKHIPFARIVKHSISWGLSKWMNEL

SEQ ID NO: 180702 - protein, 68 aa, Zea Mays
MLIISLSLDPPDLASSTDGSSQDLPPGLAPAPDGTPVAQGGGETRRGSDGETGTRRQRQDRDEAATAR

SEQ ID NO: 180703 - protein, 177 aa, Zea Mays
MDPCGRTVHVPAWVCAHSYSSWTKKKMCERVYSGWMDEEHKGTVVWLSVAFPARAACTACVLANACELSVPPLYDHPAVSIQKRVLCAVTTTRAWAEPAAAARCALPCDWDASASASARGRRACRSQRQSSPRDPTQTEFSKIKGLPVSRGELLRPRNQQGPTWGSMPLINNYAEIG

SEQ ID NO: 180704 - protein, 51 aa, Zea Mays
MLLLLLSVQVAITIMQLPLVTVTDRMCCVHRTVDLRTRLLKDYYYFFVFLI

SEQ ID NO: 180705 - protein, 180 aa, Zea Mays
MPPPGPPRPILSPAIPAASLRFSILAHMSSLNPAPALSMESASSALGSPRSSLNPAPALRYPWNVGPLPRITAPALDPRPRQPDLACGLGTPLPQIVASARHQRPCPRCGVRSLHGRQSRAWIRHPSAGASTAHSGPRAALAVPCATIGLLRWDFPFRILRSEAAAGSRGDNDFPEFKRH

SEQ ID NO: 180706 - protein, 184 aa, Zea Mays
MLHAGNLHRNPSSSPRLQVPNHRSGLQGIACCPPTVDLVAVPVDSVIDPVDLAAPAVDRTSRLGAALMGGSGWHGVGELGACGVRASPVTASKCRGHGELAAGAAGRGARRPCGTCRGRERQVSRRKRGGGGCAWIHGSHLWWIGGSAASGSTTSGSATQAVRVDSEEQRGGGWGSVERRDCRC

SEQ ID NO: 180707 - protein, 535 aa, Zea Mays
MGADEQPSPTRKRDREEGEDLSDGGAAEKRPRAEVASLLGLATYEDEEEDEAARGHTNGRHAVEPELEDDEDDDDEDDDVRRAPERRPRQVLDFDFEKFCSISLSNLNVYACLVCGKYFQGRGLKSHAYTHSLEAGHHVFINLQTEKAYCLPDGYEINDPSLEDIRHVLNPRFTKEQVLNLDKNKQWSRALDGSNYLPGMVGLNNIKETDFVNVTIQSLMRVTPLRNFFLIPENYQHSKSPLVHRFGELTRKIWHARNFKGQVSPHEFLQAVMKASDKKFQIGVQSDPVEFMTWLLNTLHAKLKSSKKKNRSIIHDCFQGELEVVKEVHRKHIMEKREDGGELNGEAGSVVGTADGIVTETSKVPFLMLGLDLPPPPLFKDAMEKNIIPQVPLFNILKKFDGETVTEVVRPSIARMRYRVTRLPKYLILHMRRFTKNNFFVEKNPTLVNFPVKNLELKDYIPLPKPKENHKLRSKYDLIANIVHDGKPGEGCYRVFVQRKSEEAWYEMQDLHVTETLPQMVALSETYMQIYEQHE

SEQ ID NO: 180708 - protein, 57 aa, Zea Mays
MSLNHVLALDCTIGPSPNCSKECFHELRPKSVSKVSCGKVLKSFAQLFQTSARLLVM

SEQ ID NO: 180709 - protein, 82 aa, Zea Mays
MNSLLGLPNRVMLAMFTIRWWQWQQLRSSHSVGRFLRIHELLVASLVVCISIKFRMLQWTLPVLSHKMICTYDTINICLAVY

SEQ ID NO: 180710 - protein, 331 aa, Zea Mays
MNKPGFVDVYPASRITRNIQHHFESVSRFNTSKLMNTEKQKGLRIVTEPRNLSSALRWISDEEVRKQVYIVGNSEPRENIGVLNELIHARDELAKIMGCKSYAEFAIRPNMAASADVVMSFLENLSNTVKHKAEEEFKTIHNFKRRTCNEKSADLEPWDEDYFIGMMKSSVYDLDASVIAKYFPLSQCLKGLNVLVESLFGATFHQIPMRDGESWHPDVIKLRLHHPDEGDLGFMYLDLYSRKGKHPGCAHFAIQGGRRLSDSNYQLPVLVEKLQGLTMGMLKLFFMSLGMPFTLCCQERNISISLVLGLLLMWLKPPQTYLNIMPGTIVS

SEQ ID NO: 180711 - protein, 511 aa, Zea Mays
MNKPGFVDVYPASRITRNIQHHFESVSRFNTSKLMNTEKQKGLRIVTEPRNLSSALRWISDEEVRKQVYIVGNSEPRENIGVLNELIHARDELAKIMGCKSYAEFAIRPNMAASADVVMSFLENLSNTVKHKAEEEFKTIHNFKRRTCNEKSADLEPWDEDYFIGMMKSSVYDLDASVIAKYFPLSQCLKGLNVLVESLFGATFHQIPMRDGESWHPDVIKLRLHHPDEGDLGFMYLDLYSRKGKHPGCAHFAIQGGRRLSDSNYQLPIIALICNFSGACRKTARLNHGDVETLFHEFGHALHSLLSRTEYQHFSGTRVALDVAETPSNLFEYYAWDYRVLKTFALDETTGDAIPEKLVKALNASRNMFPATELQRQIFYSIMDLTLFGEQSSKPMDTISTVADLRRKHTSGKYAEGTHWHTRFTHLVTYGAGYYTYLYARCFATTIWQEVCQEDPLSRSAGSAIRDKFLRFGGSKDPSSLLKDFAGDAVIRNSGSGIIPNASSLCKEIGL

SEQ ID NO: 180712 - protein, 232 aa, Zea Mays
MDPANTGIFWQNALRLLLKCIIKFYDPSLLITSLMQEFKTIHNFKRRTCNEKSADLEPWDEDYFIGMMKSSVYDLDASVIAKYFPLSQCLKGLNVLVESLFGATFHQIPMRDGESWHPDVIKLRLHHPDEGDLGFMYLDLYSRKGKHPGCAHFAIQGGRRLSDSNYQLPVLVEKLQGLTMGMLKLFFMSLGMPFTLCCQERNISISLVLGLLLMWLKPPQTYLNIMPGTIVS

SEQ ID NO: 180713 - protein, 269 aa, Zea Mays
MRKKQVYIVGNSEPRENIGVLNELIHARDELAKIMGCKSYAEFAIRPNMAASADVVMSFLENLSNTVKHKAEEEFKTIHNFKRRTCNEKSADLEPWDEDYFIGMMKSSVYDLDASVIAKYFPLSQCLKGLNVLVESLFGATFHQIPMRDGESWHPDVIKLRLHHPDEGDLGFMYLDLYSRKGKHPGCAHFAIQGGRRLSDSNYQLPVLVEKLQGLTMGMLKLFFMSLGMPFTLCCQERNISISLVLGLLLMWLKPPQTYLNIMPGTIVS

SEQ ID NO: 180714 - protein, 286 aa, Zea Mays
MRKKQVYIVGNSEPRENIGVLNELIHARDELAKIMGCKSYAEFAIRPNMAASADVVMSFLENLSNTVKHKAEEEFKTIHNFKRRTCNEKSADLEPWDEDYFIGMMKSSVYDLDASVIAKYFPLSQCLKGLNVLVESLFGATFHQIPMRDGESWHPDVIKLRLHHPDEGDLGFMYLDLYSRKGKHPGCAHFAIQGGRRLSDSNYQLPIIALICNFSGACRKTARLNHGDVETLFHEFGHALHSLLSRTEYQHFSGTRVALDVAETPSNLFEYILCLGLSCLEDICSR

SEQ ID NO: 180715 - protein, 181 aa, Zea Mays
MRKKQVYIVGNSEPRENIGVLNELIHARDELAKIMGCKSYAEFAIRPNMAASADVVMSFLENLSNTVKHKAEEEFKTIHNFKRRTCNEKSADLEPWDEDYFIGMMKSSVYDLDASVIAKYFPLSQCLKGLNVLVESLFGATFHQIPMRDGESWHPDVIKLRLHHPDELQLLEICRCYHYHH

SEQ ID NO: 180716 - protein, 120 aa, Zea Mays
MLSRAAAIRRGAAAAFSTVSEKPETGLYGFDVLRTAKGFRRFVDDAIHRSDELVARVARLPSSTEIVRTMDEISNTVCSVIDSAELCRNTHPDREFVDEADKASMRIYEHLQVSLALNMA

SEQ ID NO: 180717 - protein, 152 aa, Zea Mays
MLSRAAAIRRGAAAAFSTVSEKPETGLYGFDVLRTAKGFRRFVDDAIHRSDELVARVARLPSSTEIVRTMDEISNTVCSVIDSAELCRNTHPDREFVDEADKASMRIYEHLQLRVKVSCSQRKLEGQQLPCILTFKKEGFIFLKINLRMLIS

SEQ ID NO: 180718 - protein, 94 aa, Zea Mays
MLSRAAAIRRGAAAAFSTVSEKPETGLYGFDVLRTAKGFRRFVDDAIHRSDELVARVARLPSSTEIVRTMDEISNTVCSVIDSAELCRNTHPDR

SEQ ID NO: 180719 - protein, 564 aa, Zea Mays
MGCAQGKSSRGSPARSDGRGVDRLKRDNDYRPGSSVSRLSDPLPATAESVPAPAAPPTKEHARRAAAVVPGGKTPDDGNGDAAAQQATTAATPATPPLLPPHPPRREDELRLDHPNVMKLEGIATSRMHRSIYLVFDFMYSDLGRLVLRSQQRLTEPQIKCYMQQLLAGLQHCHERGILHRDIKGSNLLIDRHGVLKIGDFGLANYYGAGRRHPLTSRVVTLWYRAPELLLGSTSYGVGIDLWSAGCLLAEMFFGKPLMPGSGEVDQLLKIFRLCGSPPDDYWRKMKLSPSFKPPKPYKATTGERFRDLPPSSLGLLATLLALDPAARGTAGQALQSSFFTTPPMPCDLSSLPVVYKEEEEVDSRKPRTRQRSHRRKDGNGKRSETNSGSPPEKEAQPMQPLDITISLSGPGFQRLGLGASPLRAPLNLFQDQEDDELTGTANSVTDTTREHDIGQGSAAAVMTAAKASSGVHDSSSSEKTIVNGSSSTVAKQLPTARHSGSDDDDHGNIHLVPAPDEEEADGEPASGSGVNRVGPESKSSAFVSDFEAAAAALRASEELPSSN

SEQ ID NO: 180720 - protein, 364 aa, Zea Mays
MNQKCNLTGNYCWTSILHLLFLQELLSLQKVDVARDCVCNSLLKVLYVCCNRRTVKNVPKYASAQFYIDNVFPRIKEKKIMSIKPFVDRLGYDNVPMEINRLRCRVNYHALKFLPDIEEMADKLATRMRNRTGSLNPYMALHLRFEKGMVGLSFCDFAGTREEKAMMATYRQQQWPRRYKNGSHLWSLALEKRKEGRCPLEPGEIGIILREMGYTKETQIYVASGQVYGGNNRMAPLRNMFPNLVSKEDLASKEEMEPFKKHVTSLAALDFLVCLKSDVFVMTHGGNFAKLIIGYRRYMGRHRLKSIKPDKGLMSKFFGDPYMPWATFVENVMITHETRTGLPESTFPHYDLWENPLTPCMCRA

SEQ ID NO: 180721 - protein, 284 aa, Zea Mays
MSIKPFVDRLGYDNVPMEINRLRCRVNYHALKFLPDIEEMADKLATRMRNRTGSLNPYMALHLRFEKGMVGLSFCDFAGTREEKAMMATYRQQQWPRRYKNGSHLWSLALEKRKEGRCPLEPGEIGIILREMGYTKETQIYVASGQVYGGNNRMAPLRNMFPNLVSKEDLASKEEMEPFKKHVTSLAALDFLVCLKSDVFVMTHGGNFAKLIIGYRRYMGRHRLKSIKPDKGLMSKFFGDPYMPWATFVENVMITHETRTGLPESTFPHYDLWENPLTPCMCRA

SEQ ID NO: 180722 - protein, 333 aa, Zea Mays
MNATLILPVLKQDQIWKDQTKFEDIFDVDHFINYLKEDVRIVRDIPDWFTEKDELFTSIKYDNVPMEINRLRCRVNYHALKFLPDIEEMADKLATRMRNRTGSLNPYMALHLRFEKGMVGLSFCDFAGTREEKAMMATYRQQQWPRRYKNGSHLWSLALEKRKEGRCPLEPGEIGIILREMGYTKETQIYVASGQVYGGNNRMAPLRNMFPNLVSKEDLASKEEMEPFKKHVTSLAALDFLVCLKSDVFVMTHGGNFAKLIIGYRRYMGRHRLKSIKPDKGLMSKFFGDPYMPWATFVENVMITHETRTGLPESTFPHYDLWENPLTPCMCRA

SEQ ID NO: 180723 - protein, 443 aa, Zea Mays
MIEQYSAFMSPVAAADSMTPKKFMALVSAKIQTYFCRGGSIQRAVRRMAGGGGGRRRPGALADPRTGDASSASASCSGDDTSIGSATAKREGARRCIMQRYRSQLEQEVKKLQRQLQEEIDLHLALADAITYNAALILKSSIKLPDKAHELLISISSLEIAITKLEEDLNHLHYQLYHARNERFLAENKPGYLLPTRSDCQPSTACNCTWEEPEQMLRELIFRDYHSVQEDFSTEPEDQQDDEKYVKGRERVSLNMLLEKHQDISSTGLFVHRDEEMQEACSMEKEGEEDQKIDMLPFNLPNLKKGNMSENLWNNPNQLSEEMVLSMKDIFLNLSTSSKMSPEEPFSNSSSSAEHLSGSTLTTLSDSSVIASVQPSPSMYLNHDDGNFDPYNVNGKEAQRDIGSYSSVAEVSWMYIGNEQLEYASGALRKFRFRVSCGATIKG

SEQ ID NO: 180724 - protein, 445 aa, Zea Mays
MLRELIFRDYHSVQEDFSTEPEDQQDDEKYVKGRERVSLNMLLEKHQDISSTGLFVHRDEEMQEACSMEKEGEEDQKIDMLPFNLPNLKKGNMSENLWNNPNQLSEEMVLSMKDIFLNLSTSSKMSPEEPFSNSSSSAEHLSGSTLTTLSDSSVIASVQPSPSMYLNHDDGNFDPYNVNGKEAQRDIGSYSSVAEVSWMYIGNEQLEYASGALRKFRFLVEQLSKVDTSCMNCDERLAFWINLYNALIMHAYLAYGVPENDIKLFALMQKACYTICGQPVSAAEIEFVILKVKTPVHRPQLSLMLALHKFKTSENLKKYSIDGTEPRVLFALCCGMFSSPAVRIFSAENVRAELQESMRDYIRASVGVNDKGELMVPKLLQSYAKGIVEDSLLADWICRHLTLDQLAAVQDTSSSHTQRLLGVRSFSVIPFDSRFRYLFLFDNSR

SEQ ID NO: 180725 - protein, 549 aa, Zea Mays
MIEQYSAFMSPVAAADSMTPKKFMALVSAKIQTYFCRGGSIQRAVRRMAGGGGGRRRPGALADPRTGDASSASASCSGDDTSIGSATAKREGARRCIMQRYRSQLEQEVKKLQRQLQEEIDLHLALADAITYNAALILKSSIKLPDKAHELLISISSLEIAITKLEEDLNHLHYQLYHARNERFLAENKPGYLLPTRSDCQPSTACNCTWEEPEQMLRELIFRDYHSVQEDFSTEPEDQQDDEKYVKGRERVSLNMLLEKHQDISSTGLFVHRDEEMQEACSMEKEGEEDQKIDMLPFNLPNLKKGNMSENLWNNPNQLSEEMVLSMKDIFLNLSTSSKMSPEEPFSNSSSSAEHLSGSTLTTLSDSSVIASVQPSPSMYLNHDDGNFDPYNVNGKEAQRDIGSYSSVAEVSWMYIGNEQLEYASGALRKFRFLVEQLSKVDTSCMNCDERLAFWINLYNALIMHAYLAYGVPENDIKLFALMQKACYTICGQPVSAAEIEFVILKSLMLALHKFKTSENLKKYSIDGTEPRVLFALCCGMFSSPAVSD

SEQ ID NO: 180726 - protein, 176 aa, Zea Mays
MMKNTLKMQEACSMEKEGEEDQKIDMLPFNLPNLKKGNMSENLWNNPNQLSEEMVLSMKDIFLNLSTSSKMSPEEPFSNSSSSAEHLSGSTLTTLSDSSVIASVQPSPSMYLNHDDGNFDPYNVNGKEAQRDIGSYSSVAEVSWMYIGNEQLEYASGALRKFRFRVKHLPSAIDYN

SEQ ID NO: 180727 - protein, 88 aa, Zea Mays
MDSRAFFLSGRGRPPEGSSRQPRLLTFALEIWGEKGESNSRSGAQDSRFQWALVEGVAGASKSTTHSSWQRGLWLIEQAASGWRRPAG

SEQ ID NO: 180728 - protein, 180 aa, Zea Mays
MDRGGHAALLLLLLALAVVNGGSEQAQPQEQELVLGGTFRAFSNASFYQLRRRIEEPCTPPSPRGSSPNTTPSWAWPPPTTRTPRPSAVGTAWGVWPRRSVGTAGMVAECGLGLLFRFCGRWALGGPTCPRADVPTVQVFFPSVFRLGEQGKEPCCAGAVMLMQIVGCSTYVFLSLFGMS

SEQ ID NO: 180729 - protein, 472 aa, Zea Mays
MDRGGHAALLLLLLALAVIPVTGAAGAAFLEEDAILGAVERAMMRGGGGKGAATANASGRHQHRRQRYGVGAPWREEIAGLAGRPELAAWLRSVRRRIHERPELAYEEVETSRLVRDELGALGVGFRHPVARTGVVATLGTGRPPVVALRADMDALPIQEAVEWEHRSRVPGKMHACGHDAHVAMLLGAASILKAREHQLKGTVKLLFQPAEESGCGAKRMIEDGALEGVEAIFAVHVSHQHPTSVVGSRTGALLAGCGFFKAVIRGGGGGGDRASDPVVLAAASTVISLQGIVSREADPLDSQVVSVAVVNGGSEQAQPQEQELVLGGTFRAFSNASFYQLRRRIEEVVTPPSPRGSSPNTTPSWAWPPPTTRTPRPSAVGTAWGVWPRRSVGTAGMVAECGLGLLFRFCGRWALGGPTCPRADVPTVQVFFPSVFRLGEQGKEPCCAGAVMLMQIVGCSTYVFLSLFGMS

SEQ ID NO: 180730 - protein, 299 aa, Zea Mays
MHACGHDAHVAMLLGAASILKAREHQLKGTVKLLFQPAEESGCGAKRMIEDGALEGVEAIFAVHVSHQHPTSVVGSRTGALLAGCGFFKAVIRGGGGGGDRASDPVVLAAASTVISLQGIVSREADPLDSQVVSVAVVNGGSEQAQPQEQELVLGGTFRAFSNASFYQLRRRIEEPCTPPSPRGSSPNTTPSWAWPPPTTRTPRPSAVGTAWGVWPRRSVGTAGMVAECGLGLLFRFCGRWALGGPTCPRADVPTVQVFFPSVFRLGEQGKEPCCAGAVMLMQIVGCSTYVFLSLFGMS

SEQ ID NO: 180731 - protein, 299 aa, Zea Mays
MHACGHDAHVAMLLGAASILKAREHQLKGTVKLLFQPAEESGCGAKRMIEDGALEGVEAIFAVHVSHQHPTSVVGSRTGALLAGCGFFKAVIRGGGGGGDRASDPVVLAAASTVISLQGIVSREADPLDSQVVSVAVVNGGSEQAQPQEQELVLGGTFRAFSNASFYQLRRRIEEVVTPPSPRGSSPNTTPSWAWPPPTTRTPRPSAVGTAWGVWPRRSVGTAGMVAECGLGLLFRFCGRWALGGPTCPRADVPTVQVFFPSVFRLGEQGKEPCCAGAVMLMQIVGCSTYVFLSLFGMS

SEQ ID NO: 180732 - protein, 877 aa, Zea Mays
MSSTSSGRRAPSSSAAVASSPGQKRARDEASSGSPSDPDAAKNPRRAFASSPFADFGTYMAAKNSKLAAQFDADANTSGTDAGGLFDGVSIFVDGFTVPSSQELKEIMLNNGGRFVNYFSRHTVTHIVCSNLPDSKMKNLRAFSRGLPVVKPAWVVDSLAENRLLNCAPYQINQNSSSSRKQMKLSSFFSEKQNEICHKGEQNNQNKDIEFQPSSAQEGSQYQSGDCESEASMDTLELSKDSLSSDEQKASAFEERESGDFTVDEGEYDYETACSESRNDTDGNLGVPQSPNAKSRCSNLFSTRSTGSHLSLSLEKSAAKPSGRPHSTLTDPNFVENYFKYSRLHFIGTWRNRYRKRFSNLLEAKGIKLSADHSGKKKTIIHIDMDCFFVSVVIRNMPELHDKPVAVCHSDNPKGTAEISSANYPARNYGIKAGMFVRDAKARCPHLMIVPYNFDAYEEVADQFYGTLHKHCSKVQALSCDEAFLDMTECLHDNPEEVTQRIRSEIFHATKCTASAGIAENMLLARLATRSAKPNGQCFIPSEKADDYLSSLSIKALPGIGHTVSSKLKSKEIEYCSQLRNVSKETKSVGAEINWGVRFNDNKDAEHFLNNLCKEVSLRLQGCGVQGRTITLKVKTRREGAGEPIKYMGCGDCETTSRSMTIAGATDSFVTLQRIAKQLFSALHLDVKEVRGIGLSLSKLEHADLGRGASQGHMLESWLASPAAKLKKQQSEILGNVNVAGTSGLKDLRSGPSHTAEANLRNDRSTVFHNVELPPLSQLDLEVLKNLPPEIMSEMNEMYKGELQSLVDTLNSDKGKENSSKSLALPAVIRKSVPADAKLQGYRDHRDSMHLEEEHTKVSCVTGNKVALELFKQSAST

SEQ ID NO: 180733 - protein, 715 aa, Zea Mays
MSSTSSGRRAPSSSAAVASSPGQKRARDEASSGSPSDPDAAKNPRRAFASSPFADFGTYMAAKNSKLAAQFDADANTSGTDAGGLFDGVSIFVDGFTVPSSQELKEIMLNNGGRFVNYFSRHTVTHIVCSNLPDSKMKNLRAFSRGLPVVKPAWVVDSLAENRLLNCAPYQINQNSSSSRKQMKLSSFFSEKQNEICHKGEQNNQNKDIEFQPSSAQEGSQYQSGDCESEASMDTLELSKDSLSSDEQKASAFEERESGDFTVDEGEYDYETACSESRNDTDGNLGVPQSPNAKSRCSNLFSTRSTGSHLSLSLEKSAAKPSGRPHSTLTDPNFVENYFKYSRLHFIGTWRNRYRKRFSNLLEAKGIKLSADHSGKKKTIIHIDMDCFFVSVVIRNMPELHDKPVAVCHSDNPKGTAEISSANYPARNYGIKAGMFVRDAKARCPHLMIVPYNFDAYEEVADQFYGTLHKHCSKVQALSCDEAFLDMTECLHDNPEEVTQRIRSEIFHATKCTASAGIAENMLLARLATRSAKPNGQCFIPSEKADDYLSSLSIKALPGIGHTVSSKLKSKEIEYCSQLRNVSKDALHKDFGKKTGDLLWNYCRGIDHSIVGSVQETKSVGAEINWGVRFNDNKDAEHFLNNLCKEVSLRLQGCGVQGRTITLKVKTRREGAGEPIKYMGCGDCETTSRSMTVQLTVLSLSRELQNNYFQLFILM

SEQ ID NO: 180734 - protein, 722 aa, Zea Mays
MSSTSSGRRAPSSSAAVASSPGQKRARDEASSGSPSDPDAAKNPRRAFASSPFADFGTYMAAKNSKLAAQFDADANTSGTDAGGLFDGVSIFVDGFTVPSSQELKEIMLNNGGRFVNYFSRHTVTHIVCSNLPDSKMKNLRAFSRGLPVVKPAWVVDSLAENRLLNCAPYQINQNSSSSRKQMKLSSFFSEKQNEICHKGEQNNQNKDIEFQPSSAQEGSQYQSGDCESEASMDTLELSKDSLSSDEQKASAFEERESGDFTVDEGEYDYETACSESRNDTDGNLGVPQSPNAKSRCSNLFSTRSTGSHLSLSLEKSAAKPSGRPHSTLTDPNFVENYFKYSRLHFIGTWRNRYRKRFSNLLEAKGIKLSADHSGKKKTIIHIDMDCFFVSVVIRNMPELHDKPVAVCHSDNPKGTAEISSANYPARNYGIKAGMFVRDAKARCPHLMIVPYNFDAYEEVADQFYGTLHKHCSKVQALSCDEAFLDMTECLHDNPEEVTQRIRSEIFHATKCTASAGIAENMLLARLATRSAKPNGQCFIPSEKETKSVGAEINWGVRFNDNKDAEHFLNNLCKEVSLRLQGCGVQGRTITLKVKTRREGAGEPIKYMGCGDCETTSRSMTIAGATDSFVTLQRIAKQLFSALHLDVKEVRGIGLSLSKLEHADLGRGASQGHMLESWLASPAAKLKKQQSEILGNVNVAGRWKGFFIKLLLLLDTRWTYRI

SEQ ID NO: 180735 - protein, 388 aa, Zea Mays
MKLSSFFSEKQNEICHKGEQNNQNKDIEFQPSSAQEGSQYQSGDCESEASMDTLELSKDSLSSDEQKASAFEERESGDFTVDEGEYDYETACSESRNDTDGNLGVPQSPNAKSRCSNLFSTRSTGSHLSLSLEKSAAKPSGRPHSTLTDPNFVENYFKYSRLHFIGTWRNRYRKRFSNLLEAKGIKLSADHSGKKKTIIHIDMDCFFVSVVIRNMPELHDKPVAVCHSDNPKGTAEISSANYPARNYGIKAGMFVRDAKARCPHLMIVPYNFDAYEEVADQFYGTLHKHCSKVQALSCDEAFLDMTECLHDNPEEVTQRIRSEIFHATKCTASAGIAENMLLARLATRSAKPNGQCFIPSEKKMAQCFLERSTLREYPRPRSILQRRC

SEQ ID NO: 180736 - protein, 638 aa, Zea Mays
MDCFFVSVVIRNMPELHDKPVAVCHSDNPKGTAEISSANYPARNYGIKAGMFVRDAKARCPHLMIVPYNFDAYEEVADQFYGTLHKHCSKVQALSCDEAFLDMTECLHDNPEEVTQRIRSEIFHATKCTASAGIAENMLLARLATRSAKPNGQCFIPSEKADDYLSSLSIKALPGIGHTVSSKLKSKEIEYCSQLRNVSKDALHKDFGKKTGDLLWNYCRGIDHSIVGSVQETKSVGAEINWGVRFNDNKDAEHFLNNLCKEVSLRLQGCGVQGRTITLKVKTRREGAGEPIKYMGCGDCETTSRSMTIAGATDSFVTLQRIAKQLFSALHLDVKEVRGIGLSLSKLEHADLGRGASQGHMLESWLASPAAKLKKQQSEILGNVNVAGTSGLKDLRSGPSHTAEANLRNDRSTVFHNVELPPLSQLDLEVLKNLPPEIMSEMNEMYKGELQSLVDTLNSDKGKENSSKSLALPAVIRKSVPADAKLQGYRDHRDSMHLEEEHTKGKSDKQLSEAKPANNASCSRVSASIEKTTKSVTQLDLMPDSLSQADLTVLQELPEDVKADLFSALPLHRSGDPACSTSNVSESKSPNVVRAENRSSNDGGTDDLKTPRATHRFQLSTTIVFCSRACSFVPTFVS

SEQ ID NO: 180737 - protein, 616 aa, Zea Mays
MSSTSSGRRAPSSSAAVASSPGQKRARDEASSGSPSDPDAAKNPRRAFASSPFADFGTYMAAKNSKLAAQFDADANTSGTDAGGLFDGVSIFVDGFTVPSSQELKEIMLNNGGRFVNYFSRHTVTHIVCSNLPDSKMKNLRAFSRGLPVVKPAWVVDSLAENRLLNCAPYQINQNSSSSRKQMKLSSFFSEKQNEICHKGEQNNQNKDIEFQPSSAQEGSQYQSGDCESEASMDTLELSKDSLSSDEQKASAFEERESGDFTVDEGEYDYETACSESRNDTDGNLGVPQSPNAKSRCSNLFSTRSTGSHLSLSLEKSAAKPSGRPHSTLTDPNFVENYFKYSRLHFIGTWRNRYRKRFSNLLEAKGIKLSADHSGKKKTIIHIDMVADQFYGTLHKHCSKVQALSCDEAFLDMTECLHDNPEEVTQRIRSEIFHATKCTASAGIAENMLLARLATRSAKPNGQCFIPSEKGHLSDTCGIRPNTSSKYMLVLLYRTAAAQSRLSASSCVLSVAAVCRSLVASAAIRGFAAAFAAVRRSVAASAVVRRSVAVAAVTRQSPIEAVASALRGLWLSACQSPARREVCGCQPVSRRLELPPQGLWPRSSPLASQTPFFSIC

SEQ ID NO: 180738 - protein, 546 aa, Zea Mays
MSSTSSGRRAPSSSAAVASSPGQKRARDEASSGSPSDPDAAKNPRRAFASSPFADFGTYMAAKNSKLAAQFDADANTSGTDAGGLFDGVSIFVDGFTVPSSQELKEIMLNNGGRFVNYFSRHTVTHIVCSNLPDSKMKNLRAFSRGLPVVKPAWVVDSLAENRLLNCAPYQINQNSSSSRKQMKLSSFFSEKQNEICHKGEQNNQNKDIEFQPSSAQEGSQYQSGDCESEASMDTLELSKDSLSSDEQKASAFEERESGDFTVDEGEYDYETACSESRNDTDGNLGVPQSPNAKSRCSNLFSTRSTGSHLSLSLEKSAAKPSGRPHSTLTDPNFVENYFKYSRLHFIGTWRNRYRKRFSNLLEAKGIKLSADHSGKKKTIIHIDMDCFFVSVVIRNMPELHDKPVAVCHSDNPKGTAEISSANYPARNYGIKAGMFVRDAKARCPHLMIVPYNFDAYEEVADQFYGTLHKHCSKVQALSCDEAFLDMTECLHDNPEEVTQRIRSEIFHATKCTASAGIAENMLLARLATRSAKPNGQCFIPSEKEL

SEQ ID NO: 180739 - protein, 483 aa, Zea Mays
MYLLQADDYLSSLSIKALPGIGHTVSSKLKSKEIEYCSQLRNVSKDALHKDFGKKTGDLLWNYCRGIDHSIVGSVQETKSVGAEINWGVRFNDNKDAEHFLNNLCKEVSLRLQGCGVQGRTITLKVKTRREGAGEPIKYMGCGDCETTSRSMTIAGATDSFVTLQRIAKQLFSALHLDVKEVRGIGLSLSKLEHADLGRGASQGHMLESWLASPAAKLKKQQSEILGNVNVAGTSGLKDLRSGPSHTAEANLRNDRSTVFHNVELPPLSQLDLEVLKNLPPEIMSEMNEMYKGELQSLVDTLNSDKGKENSSKSLALPAVIRKSVPADAKLQGYRDHRDSMHLEEEHTKGKSDKQLSEAKPANNASCSRVSASIEKTTKSVTQLDLMPDSLSQADLTVLQELPEDVKADLFSALPLHRSGDPACSTSNVSESKSPNVVRAENRSSNDGGTDDLKTPRATHRFQLSTTIVFCSRACSFVPTFVS

SEQ ID NO: 180740 - protein, 655 aa, Zea Mays
MKLSSFFSEKQNEICHKGEQNNQNKDIEFQPSSAQEGSQYQSGDCESEASMDTLELSKDSLSSDEQKASAFEERESGDFTVDEGEYDYETACSESRNDTDGNLGVPQSPNAKSRCSNLFSTRSTGSHLSLSLEKSAAKPSGRPHSTLTDPNFVENYFKYSRLHFIGTWRNRYRKRFSNLLEAKGIKLSADHSGKKKTIIHIDMDCFFVSVVIRNMPELHDKPVAVCHSDNPKGTAEISSANYPARNYGIKAGMFVRDAKARCPHLMIVPYNFDAYEEVADQFYGTLHKHCSKVQALSCDEAFLDMTECLHDNPEEVTQRIRSEIFHATKCTASAGIAENMLLARLATRSAKPNGQCFIPSEKETKSVGAEINWGVRFNDNKDAEHFLNNLCKEVSLRLQGCGVQGRTITLKVKTRREGAGEPIKYMGCGDCETTSRSMTIAGATDSFVTLQRIAKQLFSALHLDVKEVRGIGLSLSKLEHADLGRGASQGHMLESWLASPAAKLKKQQSEILGNVNVAGTSGLKDLRSGPSHTAEANLRNDRSTVFHNVELPPLSQLDLEVLKNLPPEIMSEMNEMYKGELQSLVDTLNSDKGKENSSKSLALPAVIRKSVPADAKLQGYRDHRDSMHLEEEHTKVSCVTGNKVALELFKQSAST

SEQ ID NO: 180741 - protein, 869 aa, Zea Mays
MSSTSSGRRAPSSSAAVASSPGQKRARDEASSGSPSDPDAAKNPRRAFASSPFADFGTYMAAKNSKLAAQFDADANTSGTDAGGLFDGVSIFVDGFTVPSSQELKEIMLNNGGRFVNYFSRHTVTHIVCSNLPDSKMKNLRAFSRGLPVVKPAWVVDSLAENRLLNCAPYQINQNSSSSRKQMKLSSFFSEKQNEICHKGEQNNQNKDIEFQPSSAQEGSQYQSGDCESEASMDTLELSKDSLSSDEQKASAFEERESGDFTVDEGEYDYETACSESRNDTDGNLGVPQSPNAKSRCSNLFSTRSTGSHLSLSLEKSAAKPSGRPHSTLTDPNFVENYFKYSRLHFIGTWRNRYRKRFSNLLEAKGIKLSADHSGKKKTIIHIDMDCFFVSVVIRNMPELHDKPVAVCHSDNPKGTAEISSANYPARNYGIKAGMFVRDAKARCPHLMIVPYNFDAYEEVADQFYGTLHKHCSKVQALSCDEAFLDMTECLHDNPEEVTQRIRSEIFHATKCTASAGIAENMLLARLATRSAKPNGQCFIPSEKADDYLSSLSIKALPGIGHTVSSKLKSKEIEYCSQLRNVSKETKSVGAEINWGVRFNDNKDAEHFLNNLCKEVSLRLQGCGVQGRTITLKVKTRREGAGEPIKYMGCGDCETTSRSMTIAGATDSFVTLQRIAKQLFSALHLDVKEVRGIGLSLSKLEHADLGRGASQGHMLESWLASPAAKLKKQQSEILGNVNVAGTSGLKDLRSGPSHTAEANLRNDRSTVFHNVELPPLSQLDLEVLKNLPPEIMSEMNEMYKGELQSLVDTLNSDKGKENSSKSLALPAVIRKSVPADAKLQGYRDHRDSMHLEEEHTKILVSIRVFSGST

SEQ ID NO: 180742 - protein, 453 aa, Zea Mays
MDCFFVSVVIRNMPELHDKPVAVCHSDNPKGTAEISSANYPARNYGIKAGMFVRDAKARCPHLMIVPYNFDAYEEVADQFYGTLHKHCSKVQALSCDEAFLDMTECLHDNPEEVTQRIRSEIFHATKCTASAGIAENMLLARLATRSAKPNGQCFIPSEKETKSVGAEINWGVRFNDNKDAEHFLNNLCKEVSLRLQGCGVQGRTITLKVKTRREGAGEPIKYMGCGDCETTSRSMTIAGATDSFVTLQRIAKQLFSALHLDVKEVRGIGLSLSKLEHADLGRGASQGHMLESWLASPAAKLKKQQSEILGNVNVAGTSGLKDLRSGPSHTAEANLRNDRSTVFHNVELPPLSQLDLEVLKNLPPEIMSEMNEMYKGELQSLVDTLNSDKGKENSSKSLALPAVIRKSVPADAKLQGYRDHRDSMHLEEEHTKVSCVTGNKVALELFKQSAST

SEQ ID NO: 180743 - protein, 1018 aa, Zea Mays
MSSTSSGRRAPSSSAAVASSPGQKRARDEASSGSPSDPDAAKNPRRAFASSPFADFGTYMAAKNSKLAAQFDADANTSGTDAGGLFDGVSIFVDGFTVPSSQELKEIMLNNGGRFVNYFSRHTVTHIVCSNLPDSKMKNLRGLPVVKPAWVVDSLAENRLLNCAPYQINQNSSSSRKQMKLSSFFSEKQNEICHKGEQNNQNKDIEFQPSSAQEGSQYQSGDCESEASMDTLELSKDSLSSDEQKASAFEERESGDFTVDEGEYDYETACSESRNDTDGNLGVPQSPNAKSRCSNLFSTRSTGSHLSLSLEKSAAKPSGRPHSTLTDPNFVENYFKYSRLHFIGTWRNRYRKRFSNLLEAKGIKLSADHSGKKKTIIHIDMDCFFVSVVIRNMPELHDKPVAVCHSDNPKGTAEISSANYPARNYGIKAGMFVRDAKARCPHLMIVPYNFDAYEEVADQFYGTLHKHCSKVQALSCDEAFLDMTECLHDNPEEVTQRIRSEIFHATKCTASAGIAENMLLARLATRSAKPNGQCFIPSEKADDYLSSLSIKALPGIGHTVSSKLKSKEIEYCSQLRNVSKDALHKDFGKKTGDLLWNYCRGIDHSIVGSVQETKSVGAEINWGVRFNDNKDAEHFLNNLCKEVSLRLQGCGVQGRTITLKVKTRREGAGEPIKYMGCGDCETTSRSMTIAGATDSFVTLQRIAKQLFSALHLDVKEVRGIGLSLSKLEHADLGRGASQGHMLESWLASPAAKLKKQQSEILGNVNVAGTSGLKDLRSGPSHTAEANLRNDRSTVFHNVELPPLSQLDLEVLKNLPPEIMSEMNEMYKGELQSLVDTLNSDKGKENSSKSLALPAVIRKSVPADAKLQGYRDHRDSMHLEEEHTKGKSDKQLSEAKPANNASCSRVSASIEKTTKSVTQLDLMPDSLSQADLTVLQELPEDVKADLFSALPLHRSGDPACSTSNVSESKSPNVVRAENRSSNDGGTDDLKTPRATHRFQLSTTIVFCSRACSFVPTFVS

SEQ ID NO: 180744 - protein, 389 aa, Zea Mays
MDCFFVSVVIRNMPELHDKPVAVCHSDNPKGTAEISSANYPARNYGIKAGMFVRDAKARCPHLMIVPYNFDAYEEVADQFYGTLHKHCSKVQALSCDEAFLDMTECLHDNPEEVTQRIRSEIFHATKCTASAGIAENMLLARLATRSAKPNGQCFIPSEKADDYLSSLSIKALPGIGHTVSSKLKSKEIEYCSQLRNVSKDALHKDFGKKTGDLLWNYCRGIDHSIVGSVQETKSVGAEINWGVRFNDNKDAEHFLNNLCKEVSLRLQGCGVQGRTITLKVKTRREGAGEPIKYMGCGDCETTSRSMTIAGATDSFVTLQRIAKQLFSALHLDVKEVRGIGLSLSKLEHADLGRGASQGHMLESWLASPAAKLKKQQSEILGNVNVAAD

SEQ ID NO: 180745 - protein, 709 aa, Zea Mays
MFVRDAKARCPHLMIVPYNFDAYEEVADQFYGTLHKHCSKVQALSCDEAFLDMTECLHDNPEEVTQRIRSEIFHATKCTASAGIAENMLLARLATRSAKPNGQCFIPSEKKITSGATPSKRMYFVLHAADDYLSSLSIKALPGIGHTVSSKLKSKEIEYCSQLRNVSKDALHKDFGKKTGDLLWNYCRGIDHSIVGSVQETKSVGAEINWGVRFNDNKDAEHFLNNLCKEVSLRLQGCGVQGRTITLKVKTRREGAGEPIKYMGCGDCETTSRSMTIAGATDSFVTLQRIAKQLFSALHLDVKEVRGIGLSLSKLEHADLGRGASQGHMLESWLASPAAKLKKQQSEILGNVNVAGTSGLKDLRSGPSHTAEANLRNDRSTVFHNVELPPLSQLDLEVLKNLPPEIMSEMNEMYKGELQSLVDTLNSDKGKENSSKSLALPAVIRKSVPADAKLQGYRDHRDSMHLEEEHTKGKSDKQLSEAKPANNASCSRVSASIEKTTKSVTQLDLMPDSLSQADLTVLQELPEDVKADLFSALPLHRSGDPACSTSNVSESKSPNVVRAENRSSNDGGTDDLKTPRSFLPPGSSQKWIEQFRVSSCLILNVIAEQHTDSSCQRPLSSVLEPVASFLPLCPNPGSEEWNETHSCLSELLRHYIQLKVEYDIEELYKCFCLLKRFSSASEFFLDLHDSILPFLQDSISQHYGGTLQF

SEQ ID NO: 180746 - protein, 200 aa, Zea Mays
MSEMNEMYKGELQSLVDTLNSDKGKENSSKSLALPAVIRKSVPADAKLQGYRDHRDSMHLEEEHTKGKSDKQLSEAKPANNASCSRVSASIEKTTKSVTQLDLMPDSLSQADLTVLQELPEDVKADLFSALPLHRSGDPACSTSNVSESKSPNVVRAENRSSNDGGTDDLKTPRATHRFQLSTTIVFCSRACSFVPTFVS

SEQ ID NO: 180747 - protein, 502 aa, Zea Mays
MMIVKVTKSWEDSTLNRIVQLTEEGQLNKPKLQRWLDEFGEYYSRVVVALSLVVALLGPLLFKWPFFGNSVCRGSIYRGLGLMVAASPCALAVAPLAYATAISSLASKGILLKGGHVLDALSSCQSIAFDKTGTLTTGKLMCKAIEPIHGHLGVKSGRSNPSCCTPNCESEALAVAAAMEKGTTHPIGRAVLDHSVGKELPVVAVESFECLPGRGVVATLSGVKVRENENELSEASIGSVDYISSLYRSNGESEQIRAAAKSSAYGPEFVQAALSVDKKVTLFHFEDEPRSGVCEVISTLREKAKLRIMMLTGDHESSAQRVAKAVCIEEVHFSLKPEDKLNKVKAVSREGGGGLIMVGDGINDAPALAAATVGMVLAQRASATAVAVADVLLLQDNICGVPFCIAKARQTTSLVKQSVALALTCIVFAALPSVLGFLPLWLTVLLHEGGTLLVCLNSIRALNTPTWSLVDDIRKLVDSLRNYFPSKFNSSPSSYTANTAPL

SEQ ID NO: 180748 - protein, 125 aa, Zea Mays
MGWTIIHVVETIPFISCRLLGLSLRFLGPCVNPDHNAISACSAASSSYLAITFCEVGQASCLFPGTCTGCTERAATGSRSLDSNSSPSSSSGFASSSSCKFFRCNGCLVCKTMHNKVANLKCPPW

SEQ ID NO: 180749 - protein, 364 aa, Zea Mays
MKPLHLRSSGSFKRLLLLSIGHRSPPTTNPPVADADARESPEEPGSPRCSSSGPAWRCFSYDEVDRATGGFHERNLVGRGGSSEVYRGELPGGRAVAVKRLLGASACERRERDFLAELGTVGHARHPNVCGLLGCCVDRDLYLVFDLSRRGSVAANLHDEALPAMGWAARYGIAVGTARGLEYLHKGCRRRIIHRDIKASNVLLTDDLQPQISDFGLAKWLPSEWTHRAIAPIEGTFGCLAPEYYTHGIVDEKTDVFAFGVFLLELVTGRKPVDGRHRSLLSWARPLLSGDGKVEALVDPRLGGDYDGEQARRVTFVASLCVRAAATWRPSMTEEDTGKHMPPCVQLPAQLQPTAHSTVCLVYL

SEQ ID NO: 180750 - protein, 376 aa, Zea Mays
MPHAAATAAAALPRASLLVISAPLRDSLAAAPYEPPAGASASVKSLLASLLPSPSPPQPQLQEPAGKESGDLLLFCAAVLAASPEYPALHWVPASLVGAAAAAVNELAAAGGWGSVGDMVVAVAPEVVPPLKAVVKDSCVDADSDEIGAVKPPKEHAAVAAHQFRWLVSQVQGMVSFVHIAKNVKATELSLYEDAILDACCQNIPADDELWYQVIEVSVMLLTFTQRSNPRSPWYDRMLSEMLGHLERQPLNKERRVAWLTLIGPVFDAMGLFLLAHFRRLFSLFFQWMHTDDNKTVLLTLKQIHAIIKLTWIRKSPYTLRSTYLWIGWWTSLFYYIKNQPQGATVKSCEIISWRYLYCFRTARDINLRKLGRNMN

SEQ ID NO: 180751 - protein, 98 aa, Zea Mays
MDDESTRLTCCLKTLSCSTIVVRTESLLSRTQCSSIGSSKIIATGNLQMLAGTQNGRKLAQLYPQHPLLISEPMKQTAPFCISPRAYDQRVLSKTLGE

SEQ ID NO: 180752 - protein, 567 aa, Zea Mays
MATRPSLRSSDGARPRSKSGAGRPPSSSRSPGPSRPSSAAAADKPVPSFLRPTVSSSMHSSSSSSSLPLPCASSSSAAGSKGAAAATARRSADKAPARPVGAPRPITPKDRASAQPVGAPRPITPKDRASAQPVGAPRPITLKDKAPAQPVGVPRPAKAKAPASASLWGAVSPRQLMQRASNAFKASSRSRSKKGKEEAAASASSGGKGGAGASARAKGQTSRAQHQQQQPETPAEPSPAVTPLELEAEEPVLLESDAAGQNGQDVATSQEAASTDITTVAVRCQEEQVGAGQPKEKAEAEMSDLQEERPQSSEVVETETGAHERTDDGSPAVVGEAAATPEGEDELATSAAEEKIVEEIQRAEATENSKANANPEEPDQETGVISEEPKEGTSVVSEEPKPKEAADPTTAQKREEASDEPKTAAGSNASAPTTPLTEAANYDGNDDVEATPKQVSASEPVTPVAEGISKGKEVMETQQQSASAPTTPASKQAAIPEDAASALAFRGRRVRTAMERRSEEEQPKRKEVARSNDVIEEAKSKLMEKRKSKVKALVGAFETVMDSPRAS

SEQ ID NO: 180753 - protein, 222 aa, Zea Mays
MRSITREEEGVGKSWLGLGIGGGSGGCDLMQRNNRPPVQFDLLFPPQGVVEGVAASKKAEKGGGGRKRLKVVTGTADEDGQQPPGARKKLRLTKAQSTLLEDTFRAHSILSNAQKQELARQVDLSARQVEVWFQNRRARTKLKQTEADCEILKRCCESLTGENQRLRLELAQLQGSEAGLYLQSSFPPLAAAMASVCPSCDKVITVASGGETSGRSSTSYSS

SEQ ID NO: 180754 - protein, 93 aa, Zea Mays
MVIYFFLILLVYLFHGLFMYGHDYNMQLCSLCLYDIRFELKVVSNVCYLFAFVIIYSNVYYLFGNFFNQFLINLKMHFEIKKEKKTLPNPKAH

SEQ ID NO: 180755 - protein, 96 aa, Zea Mays
MGYFLQKIQRQGGLSRRFSNVSYYGLTTPPYKLDALEPYMSKRTVELHWGKHHQDYMDGLNNQLATSPLYGYTLEDLIKKAYNNDNPLPEYNNTAQ

SEQ ID NO: 180756 - protein, 109 aa, Zea Mays
MGYAEIAIRPSGSGKKIQRQGGLSRRFSNVSYYGLTTPPYKLDALEPYMSKRTVELHWGKHHQDYMDGLNNQLATSPLYGYTLEDLIKKAYNNDNPLPEYNNTAQVTRL

SEQ ID NO: 180757 - protein, 60 aa, Zea Mays
MRHSSDTSDQILLEEPESWKISCLTRNAYHPNVIYAKISCWDFTIALGYSYKEITSQHPV

SEQ ID NO: 180758 - protein, 691 aa, Zea Mays
MKLPENEHSRQLHNATSDVLSKLHVVMRTVDNLHLKHRQLAANYQKQRDSSAWNRAEQKRLKEELTSVVAKLEGSKQKLAVLKAQGDNKQATPILVPTLGNKNMTAEKVRDKQTELQDLEATHKELMELISKRLEEIRRLHTERIEILNKLATFQNILTDFKSIHSSKAFQLVNDQLQKSQAELDDHQTLLEKLQVEMDTFVWRERQFNQKVDLAEIPQKVSAYCVSRIADLEKDVQKLCNEKNMLVLKLEEASREPGRNQVISEFKALVSSLPREMGAVQSELSKHKDASLQLHSLRAEVHSLSSIQTRKEQEIEEMSFRSAHAGSDISQLQSLVRELRENTQELKLFVELYKHESTDSRQLMESRDRELAEWARVHILKYSLSESKLEQRVISANEAEAISQQRLATAEAEIAELGQKLETSRRDLVKQSDILKSKHEECEAYVVEIESIGHAYEDIMSQNQQLLQQIIERDDHNTKLFMEGVKSKQSHDALHLEVRSLQRNLQHASTLMDLCNQKTIRLEDQLRGWSERLRRLSEDGMQQSISLGNYQKKLSGMHGEAPKLRQSMDVLQAKAGSNRLEIAELLIELENERFGKKRLEDDLDLMSSKANSLREKTDNSAVLQKLLHEAKEYRGILKCGICHDRQKEVVIAKCYHLFCSQCIQKPLGSRQKRCPSCGLSFGVNDVKPIYI

SEQ ID NO: 180759 - protein, 811 aa, Zea Mays
MSTCLHVQDPRNIAMSRPLDFAVLKYKNQKLAEQLEVHKFEFCALESRFNDLKEKQRTHNKTLVLVKSYWERLIADLGIVSVCKNESSRSSCSTGNNNIRKDFLNGLLEAGATESSGSPNCQLGNDVSSEQSTTIDILQKLFLPSSGPWHVNNEFVSAALMKLPENEHSRQLHNATSDVLSKLHVVMRTVDNLHLKHRQLAANYQKQRDSSAWNRAEQKRLKEELTSVVAKLEGSKQKLAVLKAQGDNKQATPILVPTLGNKNMTAEKVRDKQTELQDLEATHKELMELISKRLEEIRRLHTERIEILNKLATFQVEMDTFVWRERQFNQKVDLAEIPQKVSAYCVSRIADLEKDVQKLCNEKNMLVLKLEEASREPGRNQVISEFKALVSSLPREMGAVQSELSKHKDASLQLHSLRAEVHSLSSIQTRKEQEIEEMSFRSAHAGSDISQLQSLVRELRENTQELKLFVELYKHESTDSRQLMESRDRELAEWARVHILKYSLSESKLEQRVISANEAEAISQQRLATAEAEIAELGQKLETSRRDLVKQSDILKSKHEECEAYVVEIESIGHAYEDIMSQNQQLLQQIIERDDHNTKLFMEGVKSKQSHDALHLEVRSLQRNLQHASTLMDLCNQKTIRLEDQLRGWSERLRRLSEDGMQQSISLGNYQKKLSGMHGEAPKLRQSMDVLQAKAGSNRLEIAELLIELENERFGKKRLEDDLDLMSSKANSLREKTDNSAVLQKLLHEAKEYRGILKCGICHDRQKEVVIAKCYHLFCSQCIQKPLGSRQKRCPSCGLSFGVNDVKPIYI

SEQ ID NO: 180760 - protein, 494 aa, Zea Mays
MDTFVWRERQFNQKVDLAEIPQKVSAYCVSRIADLEKDVQKLCNEKNMLVLKLEEASREPGRNQVISEFKALVSSLPREMGAVQSELSKHKDASLQLHSLRAEVHSLSSIQTRKEQEIEEMSFRSAHAGSDISQLQSLVRELRENTQELKLFVELYKHESTDSRQLMESRDRELAEWARVHILKYSLSESKLEQRVISANEAEAISQQRLATAEAEIAELGQKLETSRRDLVKQSDILKSKHEECEAYVVEIESIGHAYEDIMSQNQQLLQQIIERDDHNTKLFMEGVKSKQSHDALHLEVRSLQRNLQHASTLMDLCNQKTIRLEDQLRGWSERLRRLSEDGMQQSISLGNYQKKLSGMHGEAPKLRQSMDVLQAKAGSNRLEIAELLIELENERFGKKRLEDDLDLMSSKANSLREKTDNSAVLQKLLHEAKEYRGILKCGICHDRQKEVVIAKCYHLFCSQCIQKPLGSRQKRCPSCGLSFGVNDVKPIYI

SEQ ID NO: 180761 - protein, 605 aa, Zea Mays
MSTCLHVQDPRNIAMSRPLDFAVLKYKNQKLAEQLEVHKFEFCALESRFNDLKEKQRTHNKTLVLVKSYWERLIADLGIVSVCKNESSRSSCSTGNNNIRKETDFLNGLLEAGATESSGSPNCQLGNDVSSEQSTTIDILQKLFLPSSGPWHVNNEFVSAALMKLPENEHSRQLHNATSDVLSKLHVVMRTVDNLHLKHRQLAANYQKQRDSSAWNRAEQKRLKEELTSVVAKLEGSKQKLAVLKAQGDNKQATPILVPTLGNKNMTAEKVRDKQTELQDLEATHKELMELISKRLEEIRRLHTERIEILNKLATFQNILTDFKSIHSSKAFQLVNDQLQKSQAELDDHQTLLEKLQVEMDTFVWRERQFNQKVDLAEIPQKVSAYCVSRIADLEKDVQKLCNEKNMLVLKLEEASREPGRNQVISEFKALVSSLPREMGAVQSELSKHKDASLQLHSLRAEVHSLSSIQTRKEQEIEEMSFRSAHAGSDISQLQSLVRELRENTQELKLFVELYKHESTDSRQLMESRDRELAEWARVHILKYSLSESKLEQRVISANEAEAISQQRLATAEAEIAELGQKLETSRRPQNVIFYDRALAMPMKI

SEQ ID NO: 180762 - protein, 788 aa, Zea Mays
MSTCLHVQDPRNIAMSRPLDFAVLKYKNQKLAEQLEVHKFEFCALESRFNDLKEKQRTHNKTLVLVKSYWERLIADLGIVSVCKNESSRSSCSTGNNNIRKETDFLNGLLEAGATESSGSPNCQLGNDVSSEQSTTIDILQKLFLPSSGPWHVNNEFVSAALMKLPENEHSRQLHNATSDVLSKLHVVMRTVDNLHLKHRQLAANYQKQRDSSAWNRAEQKRLKEELTSVVAKLEGSKQKLAVLKAQGDNKQATPILVPTLGNKNMTAEKVRDKQTELQDLEATHKELMELISKRLEEIRRLHTERIEILNKLATFQNILTDFKSIHSSKAFQLVNDQLQKSQAELDDHQTLLEKLQVEMDTFVWRERQFNQKVDLAEIPQKVSAYCVSRIADLEKDVQKLCNEKNMLVLKLEEASREPGRNQVISEFKALVSSLPREMGAVQSELSKHKDASLQLHSLRAEVHSLSSIQTRKEQEIEEMSFRSAHAGSDISQLQSLVRELRENTQELKLFVELYKHESTDSRDLVKQSDILKSKHEECEAYVVEIESIGHAYEDIMSQNQQLLQQIIERDDHNTKLFMEGVKSKQSHDALHLEVRSLQRNLQHASTLMDLCNQKTIRLEDQLRGWSERLRRLSEDGMQQSISLGNYQKKLSGMHGEAPKLRQSMDVLQAKAGSNRLEIAELLIELENERFGKKRLEDDLDLMSSKANSLREKTDNSAVLQKLLHEAKEYRGILKCGICHDRQKEVVIAKCYHLFCSQCIQKPLGSRQKRCPSCGLSFGVNDVKPIYI

SEQ ID NO: 180763 - protein, 523 aa, Zea Mays
MSTCLHVQDPRNIAMSRPLDFAVLKYKNQKLAEQLEVHKFEFCALESRFNDLKEKQRTHNKTLVLVKSYWERLIADLGIVSVCKNESSRSSCSTGNNNIRKETDFLNGLLEAGATESSGSPNCQLGNDVSSEQSTTIDILQKLFLPSSGPWHVNNEFVSAALMKLPENEHSRQLHNATSDVLSKLHVVMRTVDNLHLKHRQLAANYQKQRDSSAWNRAEQKRLKEELTSVVAKLEGSKQKLAVLKAQGDNKQATPILVPTLGNKNMTAEKVRDKQTELQDLEATHKELMELISKRLEEIRRLHTERIEILNKLATFQNILTDFKSIHSSKAFQLVNDQLQKSQAELDDHQTLLEKLQVEMDTFVWRERQFNQKVDLAEIPQKVSAYCVSRIADLEKDVQKLCNEKNMLVLKLEEASREPGRNQVISEFKALVSSLPREMGAVQSELSKHKDASLQLHSLRAEVHSLSSIQTRKEQEIEEMSFRSAHAGSDISQLQSLVRELRENTQELKLFVELYKHESTDSS

SEQ ID NO: 180764 - protein, 417 aa, Zea Mays
MRTVDNLHLKHRQLAANYQKQRDSSAWNRAEQKRLKEELTSVVAKLEGSKQKLAVLKAQGDNKQATPILVPTLGNKNMTAEKVRDKQTELQDLEATHKELMELISKRLEEIRRLHTERIEILNKLATFQNILTDFKSIHSSKAFQLVNDQLQKSQAELDDHQTLLEKLQVEMDTFVWRERQFNQKVDLAEIPQKVSAYCVSRIADLEKDVQKLCNEKNMLVLKLEEASREPGRNQVISEFKALVSSLPREMGAVQSELSKHKDASLQLHSLRAEVHSLSSIQTRKEQEIEEMSFRSAHAGSDISQLQSLVRELRENTQELKLFVELYKHESTDSRQLMESRDRELAEWARVHILKYSLSESKLEQRVISANEAEAISQQRLATAEAEIAELGQKLETSRRPQNVIFYDRALAMPMKI

SEQ ID NO: 180765 - protein, 729 aa, Zea Mays
MNLHVQAAVQGTTIYERKLFLPSSGPWHVNNEFVSAALMKLPENEHSRQLHNATSDVLSKLHVVMRTVDNLHLKHRQLAANYQKQRDSSAWNRAEQKRLKEELTSVVAKLEGSKQKLAVLKAQGDNKQATPILVPTLGNKNMTAEKVRDKQTELQDLEATHKELMELISKRLEEIRRLHTERIEILNKLATFQNILTDFKSIHSSKAFQLVNDQLQKSQAELDDHQTLLEKLQVEMDTFVWRERQFNQKVDLAEIPQKVSAYCVSRIADLEKDVQKLCNEKNMLVLKLEEASREPGRNQVISEFKALVSSLPREMGAVQSELSKHKDASLQLHSLRAEVHSLSSIQTRKEQEIEEMSFRSAHAGSDISQLQSLVRELRENTQELKLFVELYKHESTDSRQLMESRDRELAEWARVHILKYSLSESKLEQRVISANEAEAISQQRLATAEAEIAELGQKLETSRRDLVKQSDILKSKHEECEAYVVEIESIGHAYEDIMSQNQQLLQQIIERDDHNTKLFMEGVKSKQSHDALHLEVRSLQRNLQHASTLMDLCNQKTIRLEDQLRGWSERLRRLSEDGMQQSISLGNYQKKLSGMHGEAPKLRQSMDVLQAKAGSNRLEIAELLIELENERFGKKRLEDDLDLMSSKANSLREKTDNSAVLQKLLHEAKEYRGILKCGICHDRQKEVVIAKCYHLFCSQCIQKPLGSRQKRCPSCGLSFGVNDVKPIYI

SEQ ID NO: 180766 - protein, 638 aa, Zea Mays
MGASHDDEAGPLASLLAARRALRAGLDKSRALSRALAPRLEGIQARLPAMEASVRPIRAPPEALATAGPNIDRAVGPAAAVLKVFDAVHGLEPPLLDRAAAAADLPGYLAVLAQLEAALRLLSDNCGLATQWLADIVAYLGERRLADARFVAGLAAALDRLRDDASAGLDAGLLAAALDMLQAEFRRLLKDHSAPLAMKDPDGSGSDPPPVVPSRIPAAVVHKLSLILDRLAANGRLDHCSSAYGDARGDTVCASLRALGLDYLKETSGDAQALSPSVERWARHLEFAVHHLLEAERKLCVAVFERRPEAAPLCFAEIAARAGILDFLDFGRALADARKDPIKLLRLLDVFHCLNKLRLDFNRLFGGKACVEIQSRTRELVKRVVDGAVEIFEELLVQVELQRTIPPPVDGGVPRLVSFVAKYCNQLLGEQYRSVLTQVITIHRSWRKEVFNDKMLVDAVLNIVKTLELNFDTWSKAYGDTTLSSLFMMNIHWHFFKHLKGTKLGELLGDPWLREHEQYKDYYSAMFLRESWGTLAPLLSREGLIMFSKGRATARDLVKQRLKSFNASFDEMFQKQSKWVISDRDLQQKTCHLVVQAVVPVYRSFMQNYGPLVEQDVSASRYVKYSAEDLDKMLNTLF

SEQ ID NO: 180767 - protein, 180 aa, Zea Mays
MTEYVVTRWYRAPELLLCCDNYGTSIDVWSVGCIFAELLGRKPIFPGTECLNQLKLIVNVLGTMGEADLAFIDNPKARKYIKSLPYAPGAPFTGMYPQAHPLAIDLLQKMLVFDPSKRISVTEALEHPYMSPLYDPSANPPAQVPIDLDIDENLGVDMIREMMWQEMIHYHPEVLTRISM

SEQ ID NO: 180768 - protein, 219 aa, Zea Mays
MASSCIPAGGIRLPDLEMVKAAPPAHSAASSTLSEASSASAVSSSATSSSVASLSLKRPRTPRKRSSQTYNEAAALLASMYPSVFPVARGGAAPRRLLGLASALADDSSCSDLLPPFPVPGGHAAFLLRDLTPRIPAAESCPSPAAVSSVFSEFRDPAPSPATPDDAAAAPDERRDLGFDDDDGFDADSILCGVDQSAAEGIDGIMGSEYHHQSSAEAA

SEQ ID NO: 180769 - protein, 569 aa, Zea Mays
MGFRCECMVTSLAKQVAWPHVLAVYKVLYRLFGGYVADVVAAIDQAVQDGVDILNLSVGPNSPPTATRTTFLNPFDAALLSAVKAGVFVAQAAGNGGPFPKTLVSFSPWITTVAAGVDDRRYKNHLTLGNGKLISGLGVSPATHGNMSFSLISAADALLGSSASKYSALDCQRPELLNKRKVQGKILLCGYSFNYISGTASIKKVSQTARSLGAAGFVVAVENSYPGTKFDPVPVSIPGILITDVSKTEDLIDYYNSSTVRDWAGRATAFKATAGIADGLAPTLYNSAPQVALFSSRGPDVKDFSFQDADVLKPDILAPGNLIWAAWAPNGTDESNYAGEGFAMVSGTSMAAPHIAGIAALIKQKNPKWSPSAIKSALMTTANTLDKGSHPLRAQQYTASEMMTLSRATPFDCGSGAVNPKGALDPGLVLDASHEDYITFLCSIPDVNQSEVSNIAGSACNSNSKGQRPFDLNIPSIAVSQLRGTVVVKRTVTSVSDETETYTIMTRMPPEVALEVTPPAVTVVPGASREITVTLTARSVTGTYSFGEIAMKGDRGHLVRIPVVAMGFK

SEQ ID NO: 180770 - protein, 423 aa, Zea Mays
MSFSLISAADALLGSSASKYSALDCQRPELLNKRKVQGKILLCGYSFNYISGTASIKKVSQTARSLGAAGFVVAVENSYPGTKFDPVPVSIPGILITDVSKTEDLIDYYNSSTVRDWAGRATAFKATAGIADGLAPTLYNSAPQVALFSSRGPDVKDFSFQDADVLKPDILAPGNLIWAAWAPNGTDESNYAGEGFAMVSGTSMAAPHIAGIAALIKQKNPKWSPSAIKSALMTTANTLDKGSHPLRAQQYTASEMMTLSRATPFDCGSGAVNPKGALDPGLVLDASHEDYITFLCSIPDVNQSEVSNIAGSACNSNSKGQRPFDLNIPSIAVSQLRGTVVVKRTVTSVSDETETYTIMTRMPPEVALEVTPPAVTVVPGASREITVTLTARSVTGTYSFGEIAMKGDRGHLVRIPVVAMGFK

SEQ ID NO: 180771 - protein, 506 aa, Zea Mays
MHGHEFGKASGMAPRARVAVYKVLYRLFGGYVADVVAAIDQAVQDGVDILNLSVGPNSPPTATRTTFLNPFDAALLSAVKAGVFVAQAAGNGGPFPKTLVSFSPWITTVAAGVDDRRYKNHLTLGNGKLISGLGVSPSIKKVSQTARSLGAAGFVVAVENSYPGTKFDPVPVSIPGILITDVSKTEDLIDYYNSSTVRDWAGRATAFKATAGIADGLAPTLYNSAPQVALFSSRGPDVKDFSFQDADVLKPDILAPGNLIWAAWAPNGTDESNYAGEGFAMVSGTSMAAPHIAGIAALIKQKNPKWSPSAIKSALMTTANTLDKGSHPLRAQQYTASEMMTLSRATPFDCGSGAVNPKGALDPGLVLDASHEDYITFLCSIPDVNQSEVSNIAGSACNSNSKGQRPFDLNIPSIAVSQLRGTVVVKRTVTSVSDETETYTIMTRMPPEVALEVTPPAVTVVPGASREITVTLTARSVTGTYSFGEIAMKGDRGHLVRIPVVAMGFK

SEQ ID NO: 180772 - protein, 583 aa, Zea Mays
MVMEATQLQLLLETMGFRCECMVTSLAKQVAWPHVLAVYKVLYRLFGGYVADVVAAIDQAVQDGVDILNLSVGPNSPPTATRTTFLNPFDAALLSAVKAGVFVAQAAGNGGPFPKTLVSFSPWITTVAAGVDDRRYKNHLTLGNGKLISGLGVSPATHGNMSFSLISAADALLGSSASKYSALDCQRPELLNKRKVQGKILLCGYSFNYISGTASIKKVSQTARSLGAAGFVVAVENSYPGTKFDPVPVSIPGILITDVSKTEDLIDYYNSSTVRDWAGRATAFKATAGIADGLAPTLYNSAPQVALFSSRGPDVKDFSFQDADVLKPDILAPGNLIWAAWAPNGTDESNYAGEGFAMVSGTSMAAPHIAGIAALIKQKNPKWSPSAIKSALMTTANTLDKGSHPLRAQQYTASEMMTLSRATPFDCGSGAVNPKGALDPGLVLDASHEDYITFLCSIPDVNQSEVSNIAGSACNSNSKGQRPFDLNIPSIAVSQLRGTVVVKRTVTSVSDETETYTIMTRMPPEVALEVTPPAVTVVPGASREITVTLTARSVTGTYSFGEIAMKGDRGHLVRIPVVAMGFK

SEQ ID NO: 180773 - protein, 502 aa, Zea Mays
MTHKRHAATGLRTGGTILHALSAASAAHLHAHALKVGVLFTCLHLCSGLLKTYASSGRIAAARQLFDEAPRRNVPLWNTLVSAYARCGHPRSALAAASAMARGGGGGAGARPNVVTVAILMSACAKLRRPAPGREVHGYAARNVAALDLHALNALVHMYGRCGRLRDARTAFAGIGAGARNAVSWTAMIDACRENGRPAEALGVFEEMRRLAGAEVDEAALLAAVSACASLDCAAGLGDWVEACAAESGFLRRGTTSARVANALIHMHGKAGQVERSCAIFDSMGAARRTVVSWTAMVQALATNGHAVAALVRFAQMLREGFVPDEVAFLSAIGACACAGLVSEGRRLFESMVEEHRIAPQMEHYGSMVELLCRAGSLADAFEFVLAMPVAPDPVIWRALAGACRDHGDAGLARRVMDHVIAMEPHHAGNYLLASNLCAADEDWGRVVDVRLEMGARKATISRTASGAVSSVQVNACAGWKDGAAVNKSGSPLPHCEVELEK

SEQ ID NO: 180774 - protein, 129 aa, Zea Mays
MFVSMAMAMASSLTVSTRSLGLFAVAMLMVMALVLAGEARAAELFAAVMAMPMAMVIATVALYKQQLVACLFAVAMGVAVVMADMLFCNHMAAGLFAVVMAVAVIMTGMPFRPVVARLFAVGVGMAMIT

SEQ ID NO: 180775 - protein, 122 aa, Zea Mays
MLNGDASTAERWRVVVKPSVSSLDSLLFHTRLPCFSVRALGMSTKTLAHDDQWIHGAEGTLVSNPPARDDPLDWTKPCAHPPCLGESPRLLHRGSSTTKARVDAGYFTLCLLLLGGRALGAC

SEQ ID NO: 180776 - protein, 645 aa, Zea Mays
MEREDADGALDSWAQFCTLSNELLAGDGDLAVGPRLAPVVGDLCTRGLATLVRDYFLHSLEETFRNHAVKKFWQHFHPYCSASTVDRIKFCVKEHWPEEILSKALEDICLERGYQEKCVLVLVQVLQSYEDRMPRKKIKEVVCSSSLMPRYQLMVSSVLLTTLPLSFPDILNIYFKKKLEELNSIMAGSYESDQLVDHEPFQRSNTSDWHSGMDIDGSEVSENSSLVKNIGKVVRDLRCIGFTSMTEDAYSSAIIWLLKSKVYELAGDDYRVSVLWCVKKWIQAVPLQFLHALLTYLGDSVDHGSGSSGLKSPLASRPSSFPGIGVPSEALVRWHMRLEYFAYETLQDLRIGKLFEIIVDYPESSPAIEDLKLCLEYTGQHSKLVDSFISSLRYRLLTAGASTNDILHQYVSTIKALRTIDPTGVFLEAVGEPIRDYLRGRKDTIKCIVTMLTDGSGGSGSGTGNAGDNLLEELNRDAENQENADYDDHANIDEKQAWLNSESWEPDPVEADPLKGNRNRRKVDILGLMVSIIGSKDQLVNEYRVMLAEKLLNKSDFEIDSDIRTLELLKIHFGESSMQKCEIMLNDLIDSKRTNSNIKTSLLKSSQTVPGQEEAEVSHDVLDATIISSNFWPPIQGWHERILSL

SEQ ID NO: 180777 - protein, 576 aa, Zea Mays
MPRKKIKEVVCSSSLMPRYQLMVSSVLLTTLPLSFPDILNIYFKKKLEELNSIMAGSYESDQLVDHEPFQRSNTSDWHSGMDIDGSEVSENSSLVKNIGKVVRDLRCIGFTSMTEDAYSSAIIWLLKSKVYELAGDDYRVSVLWCVKKWIQAVPLQFLHALLTYLGDSVDHGSGSSGLKSPLASRPSSFPGIGVPSEALVRWHMRLEYFAYETLQDLRIGKLFEIIVDYPESSPAIEDLKLCLEYTGQHSKLVDSFISSLRYRLLTAGASTNDILHQYVSTIKALRTIDPTGVFLEAVGEPIRDYLRGRKDTIKCIVTMLTDGSGGSGSGTGNAGDNLLEELNRDAENQENADYDDHANIDEKQAWLNSESWEPDPVEADPLKGNRNRRKVDILGLMVSIIGSKDQLVNEYRVMLAEKLLNKSDFEIDSDIRTLELLKIHFGESSMQKCEIMLNDLIDSKRTNSNIKTSLLKSSQTVPGQEEAEVSHDVLDATIISSNFWPPIQIEDLVVPASVDQLLSDYAKRFHQIKTPRKLLWKKNLGTVKLELQFDGRSVQFTVAPVHAAIIMRFQEKSRGS

SEQ ID NO: 180778 - protein, 728 aa, Zea Mays
MPRKKIKEVVCSSSLMPRYQLMVSSVLLTTLPLSFPDILNIYFKKKLEELNSIMAGSYESDQLVDHEPFQRSNTSDWHSGMDIDGSEVSENSSLVKNIGKVVRDLRCIGFTSMTEDAYSSAIIWLLKSKVYELAGDDYRVSVLWCVKKWIQAVPLQFLHALLTYLGDSVDHGSGSSGLKSPLASRPSSFPGIGVPSEALVRWHMRLEYFAYETLQDLRIGKLFEIIVDYPESSPAIEDLKLCLEYTGQHSKLVDSFISSLRYRLLTAGASTNDILHQYVSTIKALRTIDPTGVFLEAVGEPIRDYLRGRKDTIKCIVTMLTDGSGGSGSGTGNAGDNLLEELNRDAENQENADYDDHANIDEKQAWLNSESWEPDPVEADPLKGNRNRRKVDILGLMVSIIGSKDQLVNEYRVMLAEKLLNKSDFEIDSDIRTLELLKIHFGESSMQKCEIMLNDLIDSKRTNSNIKTSLLKSSQTVPGQEEAEVSHDVLDATIISSNFWPPIQIEDLVVPASVDQLLSDYAKRFHQIKTPRKLLWKKNLGTVKLELQFDGRSVQFTVAPVHAAIIMRFQEKSSWTSKALATEIGIPMDSLNRRISFWTSKGVLTESAGPDADDRTFTVVDSMSDVNKDSIVNERMAEYQMTEEEGESSVASVEEQLKKEMTVYEKYIVGMLTNFGSMSLDRIHNTLKMFCIAEPSYDKSLQQLQSFLSGLVADEKLETRDGLYLLKR

SEQ ID NO: 180779 - protein, 634 aa, Zea Mays
MAGSYESDQLVDHEPFQRSNTSDWHSGMDIDGSEVSENSSLVKNIGKVVRDLRCIGFTSMTEDAYSSAIIWLLKSKVYELAGDDYRVSVLWCVKKWIQAVPLQFLHALLTYLGDSVDHGSGSSGLKSPLASRPSSFPGIGVPSEALVRWHMRLEYFAYETLQDLRIGKLFEIIVDYPESSPAIEDLKLCLEYTGQHSKLVDSFISSLRYRLLTAGASTNDILHQYVSTIKALRTIDPTGVFLEAVGEPIRDYLRGRKDTIKCIVTMLTDGSGGSGSGTGNAGDNLLEELNRDAENQENADYDDHANIDEKQAWLNSESWEPDPVEADPLKGNRNRRKVDILGLMIHFGESSMQKCEIMLNDLIDSKRTNSNIKTSLLKSSQTVPGQEEAEVSHDVLDATIISSNFWPPIQIEDLVVPASVDQLLSDYAKRFHQIKTPRKLLWKKNLGTVKLELQFDGRSVQFTVAPVHAAIIMRFQEKSSWTSKALATEIGIPMDSLNRRISFWTSKGVLTESAGPDADDRTFTVVDSMSDVNKDSIVNERMAEYQMTEEEGESSVASVEEQLKKEMTVYEKYIVGMLTNFGSMSLDRIHNTLKMFCIAEPSYDKSLQQLQSFLSGLVADEKLETRDGLYLLKR

SEQ ID NO: 180780 - protein, 858 aa, Zea Mays
MEREDADGALDSWAQFCTLSNELLAGDGDLAVGPRLAPVVGDLCTRGLATLVRDYFLHSLEETFRNHAVKKFWQHFHPYCSASTVDRIKFCVKEHWPEEILSKALEDICLERGYQEKCVLVLVQVLQSYEDRMPRKKIKEVVCSSSLMPRYQLMVSSVLLTTLPLSFPDILNIYFKKKLEELNSIMAGSYESDQLVDHEPFQRSNTSDWHSGMDIDGSEVSENSSLVKNIGKVVRDLRCIGFTSMTEDAYSSAIIWLLKSKVYELAGDDYRVSVLWCVKKWIQAVPLQFLHALLTYLGDSVDHGSGSSGLKSPLASRPSSFPGIGVPSEALVRWHMRLEYFAYETLQDLRIGKLFEIIVDYPESSPAIEDLKLCLEYTGQHSKLVDSFISSLRYRLLTAGASTNDILHQYVSTIKALRTIDPTGVFLEAVGEPIRDYLRGRKDTIKCIVTMLTDGSGGSGSGTGNAGDNLLEELNRDAENQENADYDDHANIDEKQAWLNSESWEPDPVEADPLKGNRNRRKVDILGLMVSIIGSKDQLVNEYRVMLAEKLLNKSDFEIDSDIRTLELLKIHFGESSMQKCEIMLNDLIDSKRTNSNIKTSLLKSSQTVPGQEEAEVSHDVLDATIISSNFWPPIQIEDLVVPASVDQLLSDYAKRFHQIKTPRKLLWKKNLGTLELQFDGRSVQFTVAPVHAAIIMRFQEKSSWTSKALATEIGIPMDSLNRRISFWTSKGVLTESAGPDADDRTFTVVDSMSDVNKDSIVNERMAEYQMTEEEGESSVASVEEQLKKEMTVYEKYIVGMLTNFGSMSLDRIHNTLKMFCIAEPSYDKSLQQLQSFLSGLVADEKLETRDGLYLLKR

SEQ ID NO: 180781 - protein, 673 aa, Zea Mays
MAGSYESDQLVDHEPFQRSNTSDWHSGMDIDGSEVSENSSLVKNIGKVVRDLRCIGFTSMTEDAYSSAIIWLLKSKVYELAGDDYRVSVLWCVKKWIQAVPLQFLHALLTYLGDSVDHGSGSSGLKSPLASRPSSFPGIGVPSEALVRWHMRLEYFAYETLQDLRIGKLFEIIVDYPESSPAIEDLKLCLEYTGQHSKLVDSFISSLRYRLLTAGASTNDILHQYVSTIKALRTIDPTGVFLEAVGEPIRDYLRGRKDTIKCIVTMLTDGSGGSGSGTGNAGDNLLEELNRDAENQENADYDDHANIDEKQAWLNSESWEPDPVEADPLKGNRNRRKVDILGLMVSIIGSKDQLVNEYRVMLAEKLLNKSDFEIDSDIRTLELLKIHFGESSMQKCEIMLNDLIDSKRTNSNIKTSLLKSSQTVPGQEEAEVSHDVLDATIISSNFWPPIQIEDLVVPASVDQLLSDYAKRFHQIKTPRKLLWKKNLGTLELQFDGRSVQFTVAPVHAAIIMRFQEKSSWTSKALATEIGIPMDSLNRRISFWTSKGVLTESAGPDADDRTFTVVDSMSDVNKDSIVNERMAEYQMTEEEGESSVASVEEQLKKEMTVYEKYIVGMLTNFGSMSLDRIHNTLKMFCIAEPSYDKSLQQLQSFLSGLVADEKLETRDGLYLLKR

SEQ ID NO: 180782 - protein, 578 aa, Zea Mays
MAGSYESDQLVDHEPFQRSNTSDWHSGMDIDGSEVSENSSLVKNIGKVVRDLRCIGFTSMTEDAYSSAIIWLLKSKVYELAGDDYRVSVLWCVKKWIQAVPLQFLHALLTYLGDSVDHGSGSSGLKSPLASRPSSFPGIGVPSEALVRWHMRLEYFAYETLQDLRIGKLFEIIVDYPESSPAIEDLKLCLEYTGQHSKLVDSFISSLRYRLLTAGASTNDILHQYVSTIKALRTIDPTGVFLEAVGEPIRDYLRGRKDTIKCIVTMLTDGSGGSGSGTGNAGDNLLEELNRDAENQENADYDDHANIDEKQAWLNSESWEPDPVEADPLKGNRNRRKVDILGLMVSIIGSKDQLVNEYRVMLAEKLLNKSDFEIDSDIRTLELLKIHFGESSMQKCEIMLNDLIDSKRTNSNIKTSLLKSSQTVPGQEEAEVSHDVLDATIISSNFWPPIQGVLTESAGPDADDRTFTVVDSMSDVNKDSIVNERMAEYQMTEEEGESSVASVEEQLKKEMTVYEKYIVGMLTNFGSMSLDRIHNTLKMFCIAEPSYDKSLQQLQSFLSGLVADEKLETRDGLYLLKR

SEQ ID NO: 180783 - protein, 253 aa, Zea Mays
MTMGTVVGEMLASAVLKVVMGKLGAVIGPEVNMLWKFKDDLESIRSTLLTLQAVLNDAEKRSSREERVRLWLKRLKFAAYDIHDILEEMESNNDIGYGSFKKVGCVRHIEQENGICQNVSVDKVGCTSSIDVIVVPPRVRADPAASQNPAVVARRMVLKSPRLRIKRPVVVAQLMKGSHRKRPAARKTRTGDKASSSTRQGTPNDSNITGEVDIGDLIDFLREEYGCRGTSTRSYQARQMTVMSGFSCMNLFC

SEQ ID NO: 180784 - protein, 1370 aa, Zea Mays
MTMGTVVGEMLASAVLKVVMGKLGAVIGPEVNMLWKFKDDLESIRSTLLTLQAVLNDAEKRSSREERVRLWLKRLKFAAYDIHDILEEMESNNDIGYGSFKKLSAHITIAHKMKKMRQRLEKIKEEAKLDIFNFKADCCSLDENVNSRATFSCISEDIVGRSTEKETIVAMLTTYSEEEILTICIYGFGGLGKTTLARLAFNDENVGGVFDYRVWVYVSMKFDLKKIGESILSEIDEGNCGHHGNLQEVTRHLQRVLDGKKFLVVLDDLWEDNWIQLQNLKAMLSCGAKGSKIVVTTRTGKIASLMDHCMPYKMDVLSDDDCWILFKRRAFVPGRDDPRIEVIGRDIVKKCNGVPLSAQALGFMMRFKEGVAAWEAVRDSEIWEIEDQNIMPSLKLSYCLMPCHLKLCFAYCVVFSKGAAIDKDMLIQQWIALGFIQPTSGSLTHVKRGEEYIRELADNHHMKAARVFQMHDLVYDLARCVANEEFLFMDAKKSGMTSARNDHYRHIVLMNYVEVPMNSKAALCKAKSLHFRDCKRLQISGRSLSLTLSKFLRVLDISGCSMLGLPSQLNQMKQLRYLDASGMQNELKQESFAGLKCLNALNLSAGYFQKLPVQIVNLEKLHYLNLHGCSRLMLIPESICELRDLVHLDLSGCINLRVLPTSFGKLHKLSFLDMSGCLNLVSLPESFCDLRSLENLNLSSFHELRELPLGNHQELLILDMSNCHKIQILPMSFCNLLHLEDLNLSCCYELQELPEDFGKNRGLRILDLSNCHRLQTLPDSFTDLVNIEKLILSDCWELVQLPELLGFLQKIQVLDLSCCSQLFALPESVTKLTNLEHLNLSCCISLEKMPGDYGSLKKLKLLNISYCFKVRIPNGIANMSNLKCLMAVGLDGYSCGNKDDFNIVSSLLCMPRIDLSKKDSPIGDFHGILKHKRLHLFGLGNVQSIDEFENLGLCRHQQLNSLRLSSSYMNGNEVAKFIPDDIVLEKIIPPRTLEHFELLGYHGSEFPEWMLNLTTILPNLVHLKLSGLATCDHLPPLGQLPNLQSLVIECIPNVKAVGEVFAGGSRAFLKLRDLTISGMPNLERWLTTLSTTNEEAHVYVFPNLHHLKVSWCPKLIFEPSLPQCLLLEIDACGEILQGWTASHSQINLRPTRRLSFQFCDLSFSRGDQLHFFSSLSSLKFLTLPFLRQLQIVCCNAKLELPGEITRAILARIPNISIHNVGCVRHIEQENGICQNVSVDKVGCTSSIDVIVVPPRVRADPAASQNPAVVARRMVLKSPRLRIKRPVVVAQLMKGSHRKRPAARKTRTGDKASSSTRQGTPNDSNITGEVDIGDLIDFLREEYGCRGTSTRSYQARQMTVMSGFSCMNLFC

SEQ ID NO: 180785 - protein, 429 aa, Zea Mays
MMVNQYPMRKPGSFSVRIHPKSMKTSFYSSTKFQLLNMFAYLRSQLSYLRWAAYVAGTILVLMTELGAQFTDSISILVSSAVPEGKGVSSSASVEVATMSAIAAAYGLNIIPRDLALLCQKVENHVVGAPCGVMDQMASACGEANKLLAMVCQPAEVKELVSIPTHIRFWGLDSGIRHSVGGGDYGSVRVGTYMGRKMIKCTASDLVSESLTSGSPAQSDCYKENGVGVLKSEAALEYLCNLPPHRYEAVYAKDIPEVISGEAFSEKYGDHDDTVTVIDPKRSYSVKAPTRHPIYENFRVEAFKTLLEAGNTDEQLSALGELMYQCHNSYSACGLGSDGTDRLVNLVREVQHRRTSEGGSPSLFGAKITGGGSGGTVCVVGKNCARSSEEIAEIQHRYKAETGYLPILFDGSSPGAGKFGYLKIRRRCP

SEQ ID NO: 180786 - protein, 402 aa, Zea Mays
MDDGKPISYEKARELFCQDPSQKWAAYVAGTILVLMTELGAQFTDSISILVSSAVPEGKGVSSSASVEVATMSAIAAAYGLNIIPRDLALLCQKVENHVVGAPCGVMDQMASACGEANKLLAMVCQPAEVKELVSIPTHIRFWGLDSGIRHSVGGGDYGSVRVGTYMGRKMIKCTASDLVSESLTSGSPAQSDCYKENGVGVLKSEAALEYLCNLPPHRYEAVYAKDIPEVISGEAFSEKYGDHDDTVTVIDPKRSYSVKAPTRHPIYENFRVEAFKTLLEAGNTDEQLSALGELMYQCHNSYSACGLGSDGTDRLVNLVREVQHRRTSEGGSPSLFGAKITGGGSGGTVCVVGKNCARSSEEIAEIQHRYKAETGYLPILFDGSSPGAGKFGYLKIRRRCP

SEQ ID NO: 180787 - protein, 282 aa, Zea Mays
MTPAGGANHSPAPRSLVFAFYLTGHGFGHATRAIEVVRHLIADGHEVHVATAVPEFVFTAEVRSPRLRIRRVILDCGAVQADALTVDPLATLDKYREAAVLPREFILRAEAEWLSSIKADLVVSDVVPIVCKVASDLGVRSVCIGNFSWDFIYAEYIMEAGYHHRSIVWQIAEDYSHCDILLRLPGYGPMPAFRNVIDVPLVVRGLRKSRSEVRKELGIEENAKVLVFNFGGQPAGWKLKQECLPDGWICLVCGASDSQDVPPNFIKLAKDAYTPDVMAASD

SEQ ID NO: 180788 - protein, 592 aa, Zea Mays
MTPAGGANHSPAPRSLVFAFYLTGHGFGHATRAIEVVRHLIADGHEVHVATAVPEFVFTAEVRSPRLRIRRVILDCGAVQADALTVDPLATLDKYREAAVLPREFILRAEAEWLSSIKADLVVSDVVPIVCKVASDLGVRSVCIGNFSWDFIYAEYIMEAGYHHRSIVWQIAEDYSHCDILLRLPGYGPMPAFRNVIDVPLVVRGLRKSRSEVRKELGIEENAKVLVFNFGGQPAGWKLKQECLPDGWICLVCGASDSQDVPPNFIKLAKDAYTPDVMAASDCMLGKIGYGTASEALACKLPLVFVRRDYFNEEPFLRNLLEHYQNSIEMVRSDFLAGHWKPYLLRALTLQPCYNGPINGGEVVSQILQDTAIGNKCISDKASGARRLQDAMVSGYVLQRVPGRDAGIPDWYSVSETKTGGGPTSQNVATKESAALCIEDIEILHGDLQGLTDTVDFLKSLSELNGNDLKSPKKQDLERTAASVLFDWETEIYVARAPGRLDVMGGIADYSGSLVLQMPLREACHVAVQRNHPSKQKLWKHTKARQLVNGGLVPVIQIILWMMVNQYPMRKPGSFSVRIHPKNGLPMLLEQF

SEQ ID NO: 180789 - protein, 1110 aa, Zea Mays
MIKQQQQQAPPAPAPAAAPPPSACEGEKKAPPINSELWHACAGPLVSLPPAGSLVVYFPQGHSEQFLDIKLTVNGDQYGKEALQLSELALKQPRPQTEFFCKTLTASDTSTHGGFSVPRRAAEKIFPPLDFSMQPPAQEIQARDLHDNVWTFRHIYRGQPKRHLLTTGWSLFVSGKRLLAGDSVIFVRDEKQQLLLGTRRANRQPTNISSSVLSSDSMHIGILAAAAHAAANNSPFTIFYNPSPTEFVVPFAKYQKALYGNQISLGMRFRMMFETEELGTRRYMGTITGISDLDPVRWKNSQWRNIQVGWDESAAGERRNRVSIWEIEPVAAPFFICPPPFFGSKRPRQLDDESSEMENLLKRAMPWLGEEICIKDPQTQNTIMPGLSLVQWMNMNMQQNSFANSAMQSEYLRSLSNPNMQNLGVADLSRQLNLQNQILQQNSIQFSSPKLPQQMQLANELSKASLPLNQIGVGTKPQEQTQDPNNLQRQQQSMNQLLPLSQSQTNLVQAQVLIQNQMQQQKQPTSMAQNQQPAASQSLILPQQQQQQQQHQQQKLVHQQQQILLQQQQLQQQQQLQQQQQNQQQLNKMAAQMPNLASHQPQLSDQQLQLQLLQKLQQQQQSLLSQPAVTLAQLPLIQEQQKLIIDMQQQLSNSQPLSQQQTMPQQSIQVPSRATPPPTTTVQQESQQKLPQKHVGFTDTSHTTIPPTTSVNTISVVGSPLMATGATHSVVTDEIPSCSTSPSTANGNHIVQPVLGRNQLCSMINYEKVPQSTPMSIPSSLEAVTATPRSIKELPKLNSNVKQSVMASKLPNAGHVAQNLTNNAPPTDYPETASSATSVWLSQADGLLHHSFPMSNFNQQQQMFKAAAPETDIQGADPSNNTLFGINGDGQLGFPMGADDFLSNGIDASKYQGHISTDIDGNYRISKDGQQEISSSMVSQSFGASDMAFNSIDSGMNDGGFVNRTSWPPAPPLKRMRTFTKVYKRGAVGRSIDISQFSGYDELKHALARMFSMEGQLEERQRIGWKLVYKDHEDDILLLGDDPWEEFVNCVKCIRILSPQEVQQISLDGDLGNNILPNQACSSSDGGNAWRARCDQNSGNPSTGSYDQFE

SEQ ID NO: 180790 - protein, 1112 aa, Zea Mays
MIKQQQQQAPPAPAPAAAPPPSACEGEKKAPPINSELWHACAGPLVSLPPAGSLVVYFPQGHSEQFLDIKLTVNGDQYGKEALQLSELALKQPRPQTEFFCKTLTASDTSTHGGFSVPRRAAEKIFPPLDFSMQPPAQEIQARDLHDNVWTFRHIYRGQPKRHLLTTGWSLFVSGKRLLAGDSVIFVRDEKQQLLLGTRRANRQPTNISSSVLSSDSMHIGILAAAAHAAANNSPFTIFYNPRASPTEFVVPFAKYQKALYGNQISLGMRFRMMFETEELGTRRYMGTITGISDLDPVRWKNSQWRNIQVGWDESAAGERRNRVSIWEIEPVAAPFFICPPPFFGSKRPRQLDDESSEMENLLKRAMPWLGEEICIKDPQTQNTIMPGLSLVQWMNMNMQQNSFANSAMQSEYLRSLSNPNMQNLGVADLSRQLNLQNQILQQNSIQFSSPKLPQQMQLANELSKASLPLNQIGVGTKPQEQTQDPNNLQRQQQSMNQLLPLSQSQTNLVQAQVLIQNQMQQQKQPTSMAQNQQPAASQSLILPQQQQQQQQHQQQKLVHQQQQILLQQQQLQQQQQLQQQQQNQQQLNKMAAQMPNLASHQPQLSDQQLQLQLLQKLQQQQQSLLSQPAVTLAQLPLIQEQQKLIIDMQQQLSNSQPLSQQQTMPQQSIQVPSRATPPPTTTVQQESQQKLPQKHVGFTDTSHTTIPPTTSVNTISVVGSPLMATGATHSVVTDEIPSCSTSPSTANGNHIVQPVLGRNQLCSMINYEKVPQSTPMSIPSSLEAVTATPRSIKELPKLNSNVKQSVMASKLPNAGHVAQNLTNNAPPTDYPETASSATSVWLSQADGLLHHSFPMSNFNQQQQMFKAAAPETDIQGADPSNNTLFGINGDGQLGFPMGADDFLSNGIDASKYQGHISTDIDGNYRISKDGQQEISSSMVSQSFGASDMAFNSIDSGMNDGGFVNRTSWPPAPPLKRMRTFTKVYKRGAVGRSIDISQFSGYDELKHALARMFSMEGQLEERQRIGWKLVYKDHEDDILLLGDDPWEEFVNCVKCIRILSPQEVQQISLDGDLGNNILPNQACSSSDGGNAWRARCDQNSGNPSTGSYDQFE

SEQ ID NO: 180791 - protein, 1083 aa, Zea Mays
MQKDVDGHVPSYPNLPSKLICLLHNVTLHADPETDEVYAQMTLLPVTSYGKEALQLSELALKQPRPQTEFFCKTLTASDTSTHGGFSVPRRAAEKIFPPLDFSMQPPAQEIQARDLHDNVWTFRHIYRGQPKRHLLTTGWSLFVSGKRLLAGDSVIFVRDEKQQLLLGTRRANRQPTNISSSVLSSDSMHIGILAAAAHAAANNSPFTIFYNPRASPTEFVVPFAKYQKALYGNQISLGMRFRMMFETEELGTRRYMGTITGISDLDPVRWKNSQWRNIQVGWDESAAGERRNRVSIWEIEPVAAPFFICPPPFFGSKRPRQLDDESSEMENLLKRAMPWLGEEICIKDPQTQNTIMPGLSLVQWMNMNMQQNSFANSAMQSEYLRSLSNPNMQNLGVADLSRQLNLQNQILQQNSIQFSSPKLPQQMQLANELSKASLPLNQIGVGTKPQEQTQDPNNLQRQQQSMNQLLPLSQSQTNLVQAQVLIQNQMQQQKQPTSMAQNQQPAASQSLILPQQQQQQQQHQQQKLVHQQQQILLQQQQLQQQQQLQQQQQNQQQLNKMAAQMPNLASHQPQLSDQQLQLQLLQKLQQQQQSLLSQPAVTLAQLPLIQEQQKLIIDMQQQLSNSQPLSQQQTMPQQSIQVPSRATPPPTTTVQQESQQKLPQKHVGFTDTSHTTIPPTTSVNTISVVGSPLMATGATHSVVTDEIPSCSTSPSTANGNHIVQPVLGRNQLCSMINYEKVPQSTPMSIPSSLEAVTATPRSIKELPKLNSNVKQSVMASKLPNAGHVAQNLTNNAPPTDYPETASSATSVWLSQADGLLHHSFPMSNFNQQQQMFKAAAPETDIQGADPSNNTLFGINGDGQLGFPMGADDFLSNGIDASKYQGHISTDIDGNYRISKDGQQEISSSMVSQSFGASDMAFNSIDSGMNDGGFVNRTSWPPAPPLKRMRTFTKVYKRGAVGRSIDISQFSGYDELKHALARMFSMEGQLEERQRIGWKLVYKDHEDDILLLGDDPWEEFVNCVKCIRILSPQEVQQISLDGDLGNNILPNQACSSSDGGNAWRARCDQNSGNPSTGSYDQFE

SEQ ID NO: 180792 - protein, 980 aa, Zea Mays
MQPPAQEIQARDLHDNVWTFRHIYRGQPKRHLLTTGWSLFVSGKRLLAGDSVIFVRDEKQQLLLGTRRANRQPTNISSSVLSSDSMHIGILAAAAHAAANNSPFTIFYNPRASPTEFVVPFAKYQKALYGNQISLGMRFRMMFETEELGTRRYMGTITGISDLDPVRWKNSQWRNIQVGWDESAAGERRNRVSIWEIEPVAAPFFICPPPFFGSKRPRQLDDESSEMENLLKRAMPWLGEEICIKDPQTQNTIMPGLSLVQWMNMNMQQNSFANSAMQSEYLRSLSNPNMQNLGVADLSRQLNLQNQILQQNSIQFSSPKLPQQMQLANELSKASLPLNQIGVGTKPQEQTQDPNNLQRQQQSMNQLLPLSQSQTNLVQAQVLIQNQMQQQKQPTSMAQNQQPAASQSLILPQQQQQQQQHQQQKLVHQQQQILLQQQQLQQQQQLQQQQQNQQQLNKMAAQMPNLASHQPQLSDQQLQLQLLQKLQQQQQSLLSQPAVTLAQLPLIQEQQKLIIDMQQQLSNSQPLSQQQTMPQQSIQVPSRATPPPTTTVQQESQQKLPQKHVGFTDTSHTTIPPTTSVNTISVVGSPLMATGATHSVVTDEIPSCSTSPSTANGNHIVQPVLGRNQLCSMINYEKVPQSTPMSIPSSLEAVTATPRSIKELPKLNSNVKQSVMASKLPNAGHVAQNLTNNAPPTDYPETASSATSVWLSQADGLLHHSFPMSNFNQQQQMFKAAAPETDIQGADPSNNTLFGINGDGQLGFPMGADDFLSNGIDASKYQGHISTDIDGNYRISKDGQQEISSSMVSQSFGASDMAFNSIDSGMNDGGFVNRTSWPPAPPLKRMRTFTKVYKRGAVGRSIDISQFSGYDELKHALARMFSMEGQLEERQRIGWKLVYKDHEDDILLLGDDPWEEFVNCVKCIRILSPQEVQQISLDGDLGNNILPNQACSSSDGGNAWRARCDQNSGNPSTGSYDQFE

SEQ ID NO: 180793 - protein, 208 aa, Zea Mays
MSTGQYFEVAELYTVTFLCIVSQDSETAISWAEKAHLTEQSRQDLLKKLHAVQLAANKKLSTVEGVKQTAERNLSTSTNDSTPSPHEDPPKIVPACDGLKKVLLKSAQQAQHVANHFDPFFWWFHSIRLKFGKIHIVLPSGKLVFLFSLLFSAMYVLRRKTAGLKRAVFQQAASLRRAFFDALQLAFSVQMNPLAAVQQVPQAPRGSW

SEQ ID NO: 180794 - protein, 119 aa, Zea Mays
MTFISEFSHRSAVTSFPSSSHPSRPPPPGSRRRQFLGPDRDTPAILHQVPRPSPIKEIPDSSYLVSGSFDQAVLTALSVADEIHMASLESASDQDELLEMLESAGMVLVQALKELRRTY

SEQ ID NO: 180795 - protein, 259 aa, Zea Mays
MTFISEFSHRSAVTSFPSSSHPSRPPPPGSRRRQFLGPDRDTPAILHQVPRPSPIKEIPDSSYLVSGSFDQAVLTALSVADEIHMASLESASDQDELLEMLESAGMVLVQALKELRRASEMFAQLKMMFGSVPSVPARVFLTGATIQMAEGSISDLRPIFEEYLANWRYTDDEVYVFDGGNDSTSNGFVVKSIMSTGQYFEVAELYTVTFLCIVSQDSETAISWAEKAHLTEQSRQVFFFCKRYLIILLQHKNLSVPLC

SEQ ID NO: 180796 - protein, 91 aa, Zea Mays
MTFISEFSHRSAVTSFPSSSHPSRPPPPGSRRRQFLGPDRDTPAILHQVPRPSPIKEIPDSRSVRALLLEPWGPLPRNRLSGSVSTMPSTI

SEQ ID NO: 180797 - protein, 491 aa, Zea Mays
MPPHIPFSRRRAASDYRASKPFASTELNPQSVVAMDQIATPDETAHASAPSVHKLFDAKLGHHSVMDGTLASTSQSSNIKTQLIRSSSLSRSISVNLEKRSPESDPESPQSHVSHPKFAEPMFSNSSTFCTSLFSSSSTTEPCRQMGTLPFLPHPPKCEQQVSAGHSSSSSLLLSGDTGLDVAEQSDDLNDLLNLSGDASDGSFHGENNALAFDEQMEFQFLSEQLEIAITDNEKNPHLDDIYGTPPQLSSLPVSSCSNQNLGSPVKVQLSSSQSSSSSATANKSRLRWTLELHERFVEAVKKLEGPEKATPKGVLKLMKVEGLTIYHVKSHLQKYRLAKYIPEPKDDKKASSEDKKAQLGKGSIDSSKNKNLQVAEALRMQIEVQKQLHEQLEVQRQLQLRIEEHARYLQKILEEQQKAGNVPLKAPTKAQATKSSPESTSDERTESEVDTISPRPPKNRNPGVDAECKSPGRIKRTKVQADLENEGLCS

SEQ ID NO: 180798 - protein, 319 aa, Zea Mays
MDQIATPDETAHASAPSVHKLFDAKLGHHSVMDGTLASTSQSSNIKTQLIRSSSLSRSISVNLEKRSPESDPESPQSHVSHPKFAEPMFSNSSTFCTSLFSSSSTTEPCRQMGTLPFLPHPPKCEQQVSAGHSSSSSLLLSGDTGLDVAEQSDDLNDLLNLSGDASDGSFHGENNALAFDEQMEFQFLSEQLEIAITDNEKNPHLDDIYGTPPQLSSLPVSSCSNQNLGSPVKVQLSSSQSSSSSATANKSRLRWTLELHERFVEAVKKLEGPEKATPKGVLKLMKVEGLTIYHVKSHLQKYRLAKYIPEPKDEGFLGG

SEQ ID NO: 180799 - protein, 372 aa, Zea Mays
MDQIATPDETAHASAPSVHKLFDAKLGHHSVMDGTLASTSQSSNIKTQLIRSSSLSRSISVNLEKRSPESDPESPQSHVSHPKFAEPMFSNSSTFCTSLFSSSSTTEPCRQMGTLPFLPHPPKCEQQVSAGHSSSSSLLLSGDTGLDVAEQSDDLNDLLNLSGDASDGSFHGENNALAFDEQMEFQFLSEQLEIAITDNEKNPHLDDIYGTPPQLSSLPVSSCSNQNLGSPVKVQLSSSQSSSSSATANKSRLRWTLELHERFVEAVKKLEGPEKATPKGVLKLMKVEGLTIYHVKSHLQKYRLAKYIPEPKDDKKASSEDKKAQLGKGSIDSSKNKNLQVAEALRMQIEVQKQLHEQLEMFSALMISIPPP

SEQ ID NO: 180800 - protein, 61 aa, Zea Mays
MKVEGLTIYHVKSHLQKYRLAKYIPEPKDDKKASSEDKKAQLGKGSIDSSKNKCKGSCSYG

SEQ ID NO: 180801 - protein, 449 aa, Zea Mays
MDQIATPDETAHASAPSVHKLFDAKLGHHSVMDGTLASTSQSSNIKTQLIRSSSLSRSISVNLEKRSPESDPESPQSHVSHPKFAEPMFSNSSTFCTSLFSSSSTTEPCRQMGTLPFLPHPPKCEQQVSAGHSSSSSLLLSGDTGLDVAEQSDDLNDLLNLSGDASDGSFHGENNALAFDEQMEFQFLSEQLEIAITDNEKNPHLDLSSLPVSSCSNQNLGSPVKVQLSSSQSSSSSATANKSRLRWTLELHERFVEAVKKLEGPEKATPKGVLKLMKVEGLTIYHVKSHLQKYRLAKYIPEPKDDKKASSEDKKAQLGKGSIDSSKNKNLQVAEALRMQIEVQKQLHEQLEVQRQLQLRIEEHARYLQKILEEQQKAGNVPLKAPTKAQATKSSPESTSDERTESEVDTISPRPPKNRNPGVDAECKSPGRIKRTKVQADLENEGLCS

SEQ ID NO: 180802 - protein, 397 aa, Zea Mays
MDQIATPDETAHASAPSVHKLFDAKLGHHSVMDGTLASTSQSSNIKTQLIRSSSLSRSISVNLEKRSPESDPESPQSHVSHPKFAEPMFSNSSTFCTSLFSSSSTTEPCRQMGTLPFLPHPPKCEQQVSAGHSSSSSLLLSGDTGLDVAEQSDDLNDLLNLSGDASDGSFHGENNALAFDEQMEFQFLSEQLEIAITDNEKNPHLDDIYGTPPQLSSLPVSSCSNQNLGSPVKVQLSSSQSSSSSATANKSRLRWTLELHERFVEAVKKLEGPEKATPKGVLKLMKVEGLTIYHVKSHLQVQRQLQLRIEEHARYLQKILEEQQKAGNVPLKAPTKAQATKSSPESTSDERTESEVDTISPRPPKNRNPGVDAECKSPGRIKRTKVQADLENEGLCS

SEQ ID NO: 180803 - protein, 79 aa, Zea Mays
MKVEGLTIYHVKSHLQKYRLAKYIPEPKDDKKASSEDKKAQLGKGSIDSSKNKNLQVAEALRMQIEVQKQLHEQLEVGP

SEQ ID NO: 180804 - protein, 290 aa, Zea Mays
MDQIATPDETAHASAPSVHKLFDAKLGHHSVMDGTLASTSQSSNIKTQLIRSSSLSRSISVNLEKRSPESDPESPQSHVSHPKFAEPMFSNSSTFCTSLFSSSSTTEPCRQMGTLPFLPHPPKCEQQVSAGHSSSSSLLLSGDTGLDVAEQSDDLNDLLNLSGDASDGSFHGENNALAFDEQMEFQFLSEQLEIAITDNEKNPHLDDIYGTPPQLSSLPVSSCSNQNLGSPVKVQLSSSQSSSSSATANKSRLRWTLELHERFVEAVKKLEGPESKLVILLYLSHVFRLS

SEQ ID NO: 180805 - protein, 577 aa, Zea Mays
MSDRAFQNLKTLLDQAVKPNPRSPVSRPPRQSPPCSCCRQWRWCRLSSVLTPPHPSGSAGPTPSDLAVSAPRAGRSRQGEPDATPRRATMPLPLAKARRGSSPQPSPQPARSSCRSQLEQDVKRLRKALQDETALHAVLEGALGRAAVTLADMAYLPTNAQELLSTICILETAVTKLEEEMVSLHFQLTQERNERRLVEYRLKHLPPPPSACSCHSGKLGPDDPTGEKCSSQTEEVYPRAVLHEQAVKLQRQISVKSFVDPNQLSEDIVRCMRNIFISLSDSCRDSSRNSNMENQQSIPSPTGNYSISAFWTLSEPSSISSWVQSPQVDLNYNNNVLASETVFDPYKAREKLSWADIGSYGAAAEVSWMSVGKKQLEYAAESLRKFRLFIEQLAEINPIHLSDDARLAFWINLYNALMMHAYLAYGVPRSDMKLFSLMQKAAYTIGGHSFSAAFIEYVILKMKPPSHRPQMVKIYTANNVREELQDAQRDFIRASVGVSRKGKLLAPKILHCFARGFVDDNSFPIWISHFLPQQQATFVDHCVSQRRQSLLGTRTFGVVPFDSRFRYLFLPDAGSLN

SEQ ID NO: 180806 - protein, 308 aa, Zea Mays
MDRRQELCRNFQRGSCKYGSHCRFVHASSQQQQQAKPNPFGFGLGSRQQQQQQSSFRAQFQQQQQQKPNPFGFGVQGSAAAQSRNAPGQAKPFQNKWVRDPSAPTKQQEAAQPPAAAHTSCTDPESCRQQIAEDFKNETPLWKLTCYAHLRSGPCDITGDISFEELRANAYEQGRQGHPLQSIVEGEKNLKNAKLTDFNNFLNTPRLSVSQTPSFPTVASFPEVKNNSAFGVSQNNGPPVFSSFSQIGVTTNMGPGSRTTPGVPTNTLFGQSTQPSHPTFPAPTFGRSDMKFGVSGTIKMKIRMIVSG

SEQ ID NO: 180807 - protein, 243 aa, Zea Mays
MYLLEQQDLYLSELNWSCAFCSNTTVEGEKNLKNAKLTDFNNFLNTPRLSVSQTPSFPTVASFPEVKNNSAFGVSQNNGPPVFSSFSQIGVTTNMGPGSRTTPGVPTNTLFGQSTQPSHPTFPAPTFGRSDMKFGVSGPFGSQISQQSSGTFQGSNMSSFGNFSKPHASYQQSPSSSSHHRDIDRQSQDLLSGIVVPTSATNEAPVEDNKNENQDDSIWLKEKWSIGEIPLGEPPQRHVSHVF

SEQ ID NO: 180808 - protein, 208 aa, Zea Mays
MPRMAKLLLQLKAAADRRHGPGPGRRHPLAPRHAAASATRFVPACLALAAAATTLVALALTLQNRGLGPADPSPSSVSPRGGGFAVVVNTWRRPALLRRSVAHYAACGGVDAVHVVWSEPRPPPEPLRRGVLGLGGARRRVRFEINAGDSLNNRFRPIRALESDAVFSVDDDLIVPCSALRFAFSVWRTAPSAMVGFVPRMHWPTDPV

SEQ ID NO: 180809 - protein, 64 aa, Zea Mays
MQLSPSSSPEQRNVVDSFNSSLATLFTSVSKLDPESSKSAFVSSATALEKWIALAGLGGQLKGY

SEQ ID NO: 180810 - protein, 60 aa, Zea Mays
MIFKKENGLGMMEASSRGDEFIIQAGYLCQVSNFENLFKMRPDVELDRSPVCVDQGLYRL

SEQ ID NO: 180811 - protein, 423 aa, Zea Mays
MLPPSRREFQDIYVVFELMESDLHQVIRANDDLTPEHHQFFLYQLLRALKYIHAANVFHRDLKPKNILANSDCKLKICDFGLARASFNDAPSAIFWTDYVATRWYRAPELCGSFFSKYTPAIDIWSIGCIFAELLTGRPLFPGKNVVHQLDIITDLLGTPSSETLSRIRNEKARRYLSCMRKKYPVPFTHKFRHADPLALRLLERLLAFDPKDRPSAEEALADPYFASLANVEREPSRHPISKLEFEFERKKLAKDDVRELIYREILEYHPQMLEEYMKGGEQISFLYPSGVDRFKLQFAHLEEHYSKGERGSPLQRKHASLPRERVVVSKDGNTEQQINDQERSADSVARTTVSPPRSEDADMDDVKPTSLSSRSYLKSASISASKCVVVRNKHPEPEDDGIPEEMEGTVDGLSEKVSRMHS

SEQ ID NO: 180812 - protein, 228 aa, Zea Mays
MCLFDRDLLKIGTGAANHVERRKANRLHVEVVIVIAHIASDSDCCMANCSSTQVLYFEDFVPCQILQSSFDVLMSTDWQSYGFKLKGATAMQERQGSPQDRYLLRKALKSALTHLKADHAGDFLSCHGQRVREYVPDLAESIAGLILSSTDEEFQGECFALLGLGSEQDVSGGAVQSSICEKMIRIIEINDTKDNSEDNVPYLFECEKLDEDSELDEGGGDEDMASDF

SEQ ID NO: 180813 - protein, 224 aa, Zea Mays
MASTSSPHRKLLHSLVYWAVQRCRMSELPCRLTVSLKRPAEPASSPPLRVSVSDTGVGSKLEEFLELDALAREIPVERWDGTLLVTTTGINDEAIYRYQINLQEETSSARFSKLATAYKNHARFSGTEVCLCLSNDADVDDFVLWLVCFFKKIQVLRAANLACELFVEQTGNTGSRNVCLPQDSDDVHHSVTASSIDQLVSGLKDYSLSHVNSCDKCGMCLFDR

SEQ ID NO: 180814 - protein, 212 aa, Zea Mays
MANCSSTQVLYFEDFVPCQILQSSFDVLMSTDWQSYGFKLKGGLMGDDGNAVLEWDNMAFARIDISIHTYHECAMQERQGSPQDRYLLRKALKSALTHLKADHAGDFLSCHGQRVREYVPDLAESIAGLILSSTDEEFQGECFALLGLGSEQDVSGGAVQSSICEKMIRIIEINDTKDNSEDNVPYLFECEKLDEDSELDEGGGDEDMASDF

SEQ ID NO: 180815 - protein, 347 aa, Zea Mays
MASTSSPHRKLLHSLVYWAVQRCRMSELPCRLTVSLKRPAEPASSPPLRVSVSDTGVGSKLEEFLELDALAREIPVERWDGTLLVTTTGINDEAIYRYQINLQEETSSARFSKLATAYKNHARFSGTEVCLCLSNDADVDDFVLWLVCFFKKIQVLRAANLACELFVEQTGNTGSRNVCLPQDSDDVHHSVTASSIDQLVSGLKDYSLSHVNSCDKCGMCLFDRDLLKIGTGAANHVERRKANRLHVEVVIVIAHIASDSDCCMANCSSTQVLYFEDFVPCQILQSSFDVLMSTDWQSYGFKLKGGLMGDDGNAVLEWDNMAFARIDISIHTYHECCYARTAGISTG

SEQ ID NO: 180816 - protein, 146 aa, Zea Mays
MAPSGWRRSAAARVAWRPATVCLWLALAAAALTLAQAKKDLTEVTHKVYFDIEIDGKPAGRIVMGLFGKTVPKTAENFRALCTGEKGVGKSGKALHYKGSKFHRIIPSFMLQGGDFTLGDGRGGESIYGLKFADENFKIKHTGPDS

SEQ ID NO: 180817 - protein, 144 aa, Zea Mays
MGLFGKTVPKTAGEKGVGKSGKALHYKGSKFHRIIPSFMLQGGDFTLGDGRGGESIYGLKFADENFKIKHTGPGLLSMANAGRDTNGSQFFITTVTTSWLDGKHVVFGKVLSGMDVVYKVEAEGRQSGEPKSKVVIADSGELPM

SEQ ID NO: 180818 - protein, 74 aa, Zea Mays
MTGKAKPPPPSPSPASAAASRSKLAGLGWLARLHGAQFPSVSIPSADPIYNQSNRRPPAWRLPQSACGVLLVCC

SEQ ID NO: 180819 - protein, 322 aa, Zea Mays
MADVQGDNEAVLEDDAFPDDGPLDTEEGGGGEPISGGDEEEEEDVDGLASFLESEILSGSSDEDPIDRQQKEEGDAAKNKRKQGSGSDGDGCSGSEGEQTKRARREEKRRQAKGKAVAPQIDTGLFSNVPPELFLQIFKFLSSEDLISCALVCRFMNAAASDETLWRRLYCMRWGLASNAKFRECAWKNLYIQRDREDMVEFVRNTPTEFKEYYIQMQAAKRSQAPRPSEVNDDKVMLDKTVADQVSSWKNSRGLTDEAVKGHSCSGNTCSYTQIGDAYICEKTGRVHVGCFFVRYLATALRGGCVLMMNGMLMIPICNRLV

SEQ ID NO: 180820 - protein, 131 aa, Zea Mays
MYCRQNPLHPDAIANCIERPPLASDLETQGGGDSAMPRQSPTSAPTISADPVTPSLAHCLRHRFGKRTRGNRLAKRFQHKTVRARRLKRSQFSSCSNHPTVFQLSFAHPRRGMKPNWQLRQLNHYQMTMTT

SEQ ID NO: 180821 - protein, 493 aa, Zea Mays
MDACSLVHCHLPRPLQLPLLAPPTPSRHRPRVASALVCCCCPAAAADHHQERPWEWYDRAIQSHAGSDLARSLGLLADMQASGGRPSGSAYARLIRALSRAGRALEAEALLLEMRRLGPRPEAAHYNALLEGLLAAAHLRLADLLLLQMADDGVARNRRTYTLLLGAYARAGRLEDSWWVLGEMRRWGIRLDTAGYSMLVRLYRDNGMWKKATDLVMEMQEVGVELDVKIYSGLIDTFGKYGQLADARRMFDKMRAEGVRPDISTWNALIQWHCRVGNMKRALRFFTSMQEEGMYPDPKIFVMIISRLGEQGKWDEIKKLFDGMNNRGFKESGAVYAILVDIYGQYGHFRDAQDCIAALRAENTQLLPRVFCVIANAYAQQGLCEQTVNVLQLMEEEGFEPNLVMLNSLINAFGTAGRHLEALAVFQHIKDSGMSPDVVTYTTLMKTFMRAKKFEKVSEVYREMERAGCAPDRKAREMLHDATVVLEQRGCIY

SEQ ID NO: 180822 - protein, 512 aa, Zea Mays
MDACSLVHCHLPRPLQLPLLAPPTPSRHRPRVASALVCCCCPAAAADHHQERPWEWYDRAIQSHAGSDLARSLGLLADMQASGGRPSGSAYARLIRALSRAGRALEAEALLLEMRRLGPRPEAAHYNALLEGLLAAAHLRLADLLLLQMADDGVARNRRTYTLLLGAYARAGRLEDSWWVLGEMRRWGIRLDTAGYSMLVRLYRDNGMWKKATDLVMEMQEVGVELDVKIYSGLIDTFGKYGQLADARRMFDKMRAEGVRPDISTWNALIQWHCRVGNMKRALRFFTSMQEEGMYPDPKIFVMIISRLGEQGKWDEIKKLFDGMNNRGFKESGAVYAILVDIYGQYGHFRDAQDCIAALRAENTQLLPRVFCVIANAYAQQLMEEEGFEPNLVMLNSLINAFGTAGRHLEALAVFQHIKDSGMSPDVVTYTTLMKTFMRAKKFEKVSIEFGIIAVVIGPLSMHMIMYWFSSRLKHYACEDLDGYGIKPITLSKAPECLYVDQKSEKVQDNRV

SEQ ID NO: 180823 - protein, 572 aa, Zea Mays
MDACSLVHCHLPRPLQLPLLAPPTPSRHRPRVASALVCCCCPAAAADHHQERPWEWYDRAIQSHAGSDLARSLGLLADMQASGGRPSGSAYARLIRALSRAGRALEAEALLLEMRRLGPRPEAAHYNALLEGLLAAAHLRLADLLLLQMADDGVARNRRTYTLLLGAYARAGRLEDSWWVLGEMRRWGIRLDTAGYSMLVRLYRDNGMWKKATDLVMEMQEVGVELDVKIYSGLIDTFGKYGQLADARRMFDKMRAEGVRPDISTWNALIQWHCRVGNMKRALRFFTSMQEEGMYPDPKIFVMIISRLGEQGKWDEIKKLFDGMNNRGFKESGAVYAILVDIYGQYGHFRDAQDCIAALRAENTQLLPRVFCVIANAYAQQGLCEQTVNVLQLMEEEGFEPNLVMLNSLINAFGTAGRHLEALAVFQHIKDSGMSPDVVTYTTLMKTFMRAKKFEKVSIEFGIIAVVIGPLSMHMIMYWFSSRLKHYACEDLDGYGIKPITLSKAPECLYVDQKSEKVMVMVKARLSGINIRMNQKIYIGHEQREAYRHSENEAHQLGGISLQVSFFPSHIL

SEQ ID NO: 180824 - protein, 482 aa, Zea Mays
MDACSLVHCHLPRPLQLPLLAPPTPSRHRPRVASALVCCCCPAAAADHHQERPWEWYDRAIQSHAGSDLARSLGLLADMQASGGRPSGSAYARLIRALSRAGRALEAEALLLEMRRLGPRPEAAHYNALLEGLLAAAHLRLADLLLLQMADDGVARNRRTYTLLLGAYARAGRLEDSWWVLGEMRRWGIRLDTAGYSMLVRLYRDNGMWKKATDLVMEMQEVGVELDVKIYSGLIDTFGKYGQLADARRMFDKMRAEGVRPDISTWNALIQWHCRVGNMKRALRFFTSMQEEGMYPDPKIFVMIISRLGEQGKWDEIKKLFDGMNNRGFKESGAVYAILVDIYGQYGHFRDAQDCIAALRAENTQLLPRVFCVIANAYAQQLMEEEGFEPNLVMLNSLINAFGTAGRHLEALAVFQHIKDSGMSPDVVTYTTLMKTFMRAKKFEKVSEVYREMERAGCAPDRKAREMLHDATVVLEQRGCIY

SEQ ID NO: 180825 - protein, 216 aa, Zea Mays
MTEKQKKLFELRLKMNEARKANQQAMVAEKKRMEPRGESRGVSKQKWLDDRKKKIGKLLDSNGLDMKMAYMLDTQETAEAKYKKWEKEPAPYGWDVFNQKTLYDAYKKRTKNIEVDMESYNKAKEADPEFYRDASSLQYGKVSNVPEENIDKMVKELREREEKRKSFSRRRKFNEDKDIDSINDRNEHFNKKVERAFGKYTLEIKNNLERGTALPD

SEQ ID NO: 180826 - protein, 325 aa, Zea Mays
MASTCLAPASLSTPLLSDSIARAPAANGHATNHRHHHHDDSDGAAAVSVCDDGGGDPFAFLSEDRPPRDRGPSPADPFRNGTPAWGGGVYAWSRTLLLLPVALVRLALFGLSIAIGYAATWVALRGWADTHGRPRVGGGPMPAWRRRLMWITRISARCILFSFGYHWIRKKGRPARRELAPIVVSNHISYIEPIFFFYELFPTIVSSESHDALPFVGTIIRAMQVIYVDRFSPASRKAAVNEIKRKAACNSFPRVLLFPEGTTTNGRFLISFQHGAFIPGYPVQPVVVRYPHVHFDQSWGNISLLKLMFKMFTQFHNFMEVCMAC

SEQ ID NO: 180827 - protein, 270 aa, Zea Mays
MASTCLAPASLSTPLLSDSIARAPAANGHATNHRHHHHDDSDGAAAVSVCDDGGGDPFAFLSEDRPPRDRGPSPADPFRNGTPAWGGGVYAWSRTLLLLPVALVRLALFGLSIAIGYAATWVALRGWADTHGRPRVGGGPMPAWRRRLMWITRISARCILFSFGYHWIRKKGRPARRELAPIVVSNHISYIEPIFFFYELFPTIVSSESHDALPFVGTIIRAMQVIYVDRFSPASRKAAVNEIKVKTVPLNMCCDHLVAFKNVALYFVTC

SEQ ID NO: 180828 - protein, 78 aa, Zea Mays
MTGASPSAPTRDQRGQWPAPPVCLFSSHLSSLMTHMAVFFRCAVLPWWWRWTGTGSSGQGSASSCATRPAPSARWTSS

SEQ ID NO: 180829 - protein, 431 aa, Zea Mays
MQAQRSPAMAGGGGAATAVAAGAAVGMPSQATLPVRRRCEGTAMGAITLDLRPGLGVGPFTLGMPISDAFTQIERQPNIYDVVHVKYFDEEPLKLDFVISFPDHGFHLRFDPWSQRLRLVEIYDVKRLQLRYATSLIGGPSTLATFAAVYALFGPTFPGIYDKERGIYTLFYPGLSFAFPIPSQYTNLFTNGEVADLPLEFPDGTTPVTCRVCIYDSSTDSKVGVGSLMDKAMVPALPAGSLYMEEVHAKLGEELWFTIGGQHIPFGASPQDVWTDLGRPCGIHQKQVDQMVIHSASEARPRTTLCGDYFYNYFSRGIDILFNGQTHRIKKFVLHTNFPGHSDFNSYKKCNFVIYDAEGTCQPNNASKNCITPSTKWEQVKEILGDCGRAAIQTQGSMNNPFGSTFVYGYQNIAFEVMKNGYIATVTLFQS

SEQ ID NO: 180830 - protein, 307 aa, Zea Mays
MKLIDFGLSDFIRPDERLNDIVGSAYYVAPEVLHRSYSMEADIWSIGVITYILLCGSRPFWARTESGIFRSVLRADPNFDDSPWPSVSAEAKDFVKRFLNKDYRKRMTAVQALTHPWLRDEQRQIPLDILIFRLVKQYLRATPLKRLALKALSKALSEDELLYLRLQFKLLEPRDGFVSLDNFRAALTRYSTDAMRESRVLEFQHALEPLAYRKMDFEEFCAAAISPYQLEALERWEEIAGTAFQHFEQEGNRVISVEELAQELNLAPTHYSIVQDWIRKSDGKLNFLGFTKFLHGVTIRGSNTRRH

SEQ ID NO: 180831 - protein, 584 aa, Zea Mays
MGQCYGKARGASSRADHDADPSGAGSVAPPSPLPANGAPLPATPRRHKSGSTTPVHHHQAATPGAAAWPSPYPAGGASPLPAGVSPSPARSTPRRFFKRPFPPPSPAKHIKATLADRPLDKTFGFAKNFGAKYDLGKEVGRGHFGHTCSAVVKKGEHKGHTVAVKIISKAKMTTAISIEDVRREVKILKALSGHDNLVRFYDACEDALNVYIVMELCEGGELLDRILARGGRYTEEDAKAIIVQILSVVAFCHLQGVVHRDLKPENFLFTTRDESAPMKLIDFGLSDFIRPDERLNDIVGSAYYVAPEVLHRSYSMEADIWSIGVITYILLCGSRPFWARTESGIFRSVLRADPNFDDSPWPSVSAEAKDFVKRFLNKDYRKRMTAVQALTHPWLRDEQRQIPLDILIFRLVKQYLRATPLKRLALKALSKALSEDELLYLRLQFKLLEPRDGFVSLDNFRAALTRYSTDAMRESRVLEFQHALEPLAYRKMDFEEFCAAAISPYQLEALERWEEIAGTAFQHFEQEGNRVISVEELAQELNLAPTHYSIVQDWIRKSDGKLNFLGFTKFLHGVTIRGSNTRRH

SEQ ID NO: 180832 - protein, 372 aa, Zea Mays
MRSSEASSRLVQELVLYAASAALSCLVLFAGLRHLDPNRAASQKAQQQKKEIAKRLGRPLVSTTPYEDVIACDVINPDSIDVEFDSIGGLDQIKQALYELVILPLRRPELFTFGKLLSPQKGVLLYGPPGTGKTMLAKAIARESGAVFINVRISNLMSKWFGDAQKLVAAVFSLAHKLQPAIIFIDEVDSFLGQRRTTDHEAMTNMKTEFMSLWDGFTTDQNARVMVLAATNRPSELDEAILRRFTQIFEIGIPVESERSKILQVVLKGENVEHNIDYDRIASLCEGFTGSDILELCKQAAFYPIRELLDDEKKGRKLDKPRPLRQSDLERALSVSRKGKKAASSALQSPLWVRPTDSEDDQLVKWQACPRV

SEQ ID NO: 180833 - protein, 149 aa, Zea Mays
MYGQNLTVQNFFNASVPVSVQATFPYKFVVSKFLQPGAYDLVGYIVYEIDQHPYQNVFYNGTIEVVEAGGLLSVESVFLITLGTALLGLFGLWAYGQVQQLSKKTKKAPKVELGTGTTDANIDEWLEGTSFVQRSKSKKADLKLALQSS

SEQ ID NO: 180834 - protein, 215 aa, Zea Mays
MQKTLRWLLPIAENTIRAHQGFGWVGEWANLGSDMSKKSGSQHSVTRIQTLHHADKAKTEHYMLELVALLHHLVIQVKNRGYGTSKSSRHDASSRSRKAAATDLRPETETRHNTSPVNSRTASSPLSDCERAALDHLSFRRTAYGRSQSCEPPPGHRRSKAHRSWDPCRSHGSSPATEFGRTPAVQQRGRGRDLDVIDGLDRLPSYSHPPSPTFC

SEQ ID NO: 180835 - protein, 385 aa, Zea Mays
MASRGSPSSYSSPRTPTSSKANPWPAPSAPPLYPTLSMADLAPVEIGPASSPTASDDYNAPPPSEDVLLRVPGARLHLVDRSRSHPLAAGDLSLLRIRSGDTSLAAIALLGPVQWPLARDVAAVKLDPCHYAFSLTVPASADDPSPDPLHYGLTLSRPDVRLDGVLAAYTSFSVHAVVGAVARTIATGAEHLAKGILWCGEVTVERLRWGNEVLKRRMQPGDANAEVSPEMLRRIKRAKRVSQISEKVATGILSGVVKVTGYFTSSLANSKAGKKFFNMLPGEIVLASLDGFGKICDAVEVAGKNVLSTSSTVTTGLVSHRYGDKAAAATNEGLDAAGHAIGTAWAVFKIRQALNPKSVLKPTALATSTIRANVAELRAMHGSSK

SEQ ID NO: 180836 - protein, 357 aa, Zea Mays
MASRGSPSSYSSPRTPTSSKANPWPAPSAPPLYPTLSMADLAPVEIGPASSPTASDDYNAPPPSEDVLLRVPGARLHLVDRSRSHPLAAGDLSLLRIRSGDTSLAAIALLGPVQWPLARDVAAVKLDPCHYAFSLTVPASADDPSPDPLHYGLTLSRPDVRLDGVLAAYTSFSVHAVVGAGQLEARVRDEAEAAAYWTAVAPNVEAYGGAVARTIATGAEHLAKGILWCGEVTVERLRWGNEVLKRRMQPGDANAEVSPEMLRRIKRAKRVSQISEKVATGILSGVVKVTGYFTSSLANSKAGKKFFNMLPGEIVLASLDGFGTLLLLTLVSYKAKCPCGITRLSFHSSGIVRYNIN

SEQ ID NO: 180837 - protein, 81 aa, Zea Mays
MHACFFTFQTTQEKGKKKHASRKRKNMHEKCCLYIACLTNDHVWSVHARMHVPNSHTLLNKLVEKHGYYYRDSVGSIYLSI

SEQ ID NO: 180838 - protein, 105 aa, Zea Mays
MRDVLDDLESFDLGNGGKMVARFQKRHEEGIKGYDPLVLDEFDWNNEWVNASSKQTNEIAGHDGLTWDHVDDVIGASSHLQDCSLPRRAHGQTIVLHKKGAASGG

SEQ ID NO: 180839 - protein, 162 aa, Zea Mays
MVVGVMSITAMAAAGMATAGLRLPCTLPTGRVGIIIPPTRTAGTTLPTGTAGTTLLPTGTLGTTTKAGVAGATRRLLMVVVGQGGTDRFHRIGCQKGATVEAAGWVAADMTGNVEVFSPPVAAAAMAAYGSRSSGDMVRLLPVAVYLVYCLPAYVDLVKTSV

SEQ ID NO: 180840 - protein, 272 aa, Zea Mays
MADSPRRRYSRSPSYSRGHPKGRSRSQSPARSQSRSPVPDPRSQAREEDAVNRGNTLYVTGLSSRVTERDVKDYFSKHGRVVGCHVVLEPHTRVSRGFAFVSMDTVEEAERCIKYLNGSVMEGRNITVEKSRRGRPRTPTPGSYLGHRYERRERGRFHRGYGGGRDEYYGNGGGGYGYRRSPPPMYSSYRESRDYYPSYKDSRDYPPYRDGRDYSPPHRDPRDYYESRGGRGYSPPPYGGGRSRRDRSVSPYRMPERGYGGGRRVGGGGYDR

SEQ ID NO: 180841 - protein, 170 aa, Zea Mays
MDTVEEAERCIKYLNGSVMEGRNITVEKSRRGRPRTPTPGSYLGHRYERRERGRFHRGYGGGRDEYYGNGGGGYGYRRSPPPMYSSYRESRDYYPSYKDSRDYPPYRDGRDYSPPHRDPRDYYESRGGRGYSPPPYGGGRSRRDRSVSPYRMPERGYGGGRRVGGGGYDR

SEQ ID NO: 180842 - protein, 55 aa, Zea Mays
MLVRTRRSRRNEQYLYRGVEDASSSGSIADADSESRRNQKAAAAACCSQQRQVFC

SEQ ID NO: 180843 - protein, 512 aa, Zea Mays
MDKKIELQMRNAAINSSRNFNNKVRGSYNIWRQEFRLVNTDSTLRLMKDQIIMAKLYATIALSQKEPDMYALLMKRIKESQTSIGDALIDSELDSSALERAKAMGHVLSSARDVLYSSGEVSRKLRVMLQSTELNIDAVKKQNSFLVQHAAKTVPMPLHCLHMQLTTDYYFRDYVTKEHFDDDALKAGQYKEKLEDLSLYHYAIFSDNVLAASVVVKSTVANANEPEKHVFHIVTDRLNFAAMKMWFITHPPQLATVHVENIDNFKWLNSSYCSVLRQLESARLKEYYFKAHDPSSLSDGNENLKYRNPKYLSMLNHLRFYMPEIHPKLEKILFLDDDVVVQKDLTPLWDVDLKGMVNGAVETCKESFHRFDTYLNFSHPKISENFDPHACGWAFGMNMFDLKEWKKRNITGIYHYWQDLNEDRKLWKLGTLPPGLITFYNLTYPLNRTWHVLGLGYDPAVDIAEIDNAAVVHYNGNYKPWLDLAISKYKPFWSKYVDVDNSHVRRCYEGKQ

SEQ ID NO: 180844 - protein, 211 aa, Zea Mays
MGCTKDGRLAFLTNVLEPDAMPGARTRGDLPLKFLQSNKSPLEVATEVAEEADEYNGFNLILADLTTNIMVYVSNRPKGQPATIQLVSPGLHVLSNARLDSPWQKAILLGKNFRELLREHGADEVEVKDIVERLMTDTTKADKDRLPNTGCDPNWEHGLSSIFIEVQTDQGPYGTRSTAVLSVNYDGEASLYEKYLESGIWKDHTVSYQIE

SEQ ID NO: 180845 - protein, 332 aa, Zea Mays
MEPPPDLNTHLPPRKRLLAGLRTAATAAEPLPPPPAHADLAARLREMALAANASASSPEETIEAARAAAQAAADAAVAARAVAAEKAAVAAKARAAARAAMEFIDSFSTRAGASRNGSGLQFKIRSRKKHVQVKMLYRPNGTLGPAEAPKPRRRKQSDEEVPHNLHRLMNSSPRISHAGLPKRPRTTAAGDAKNGAVAPGGGNGAGVCNGSSVQVPTEAGGWLGNGCSEAKSHERTVPLLNHEVSGEDSSRHAAKSSGGIADNGVGVGNSSAGQKVKKEKNQKRPHKQSPLYVLSRSMNRNQTQKEKEGQTQMGMEQKGLQALQIRRAVAKA

SEQ ID NO: 180846 - protein, 647 aa, Zea Mays
MQSLMKLQSLIRKSKSWRRRSLILERRPSFIARRCRSLFFTKVGATIGLMKSQKVCLLINVQSLSAKYDERCKKVGDVASKLTMDEATFREIQEKKLEIYNAIVKLQKGDDSDEKFQERANKIQSDLEELVKSLNEQCKRYGLRAKPTTLVELPFGWQPGIQETAYAWDEEWDNFGDEGFSIIKELTVEVEPPVVAKSQPTEDVKASSNGASTEKEDNKGDKSAAAVEQVVKPETAPSNIKPESAKSPPVSPVKNKEDGPDEHDKKQSGTNDVSPRESISNRGAMDSPTHGDKTHDGHSWGMDNDSLWNFDHKEGENGDSDLFFGPQGLPPIRTGGSSSGNSVVKEQKPFFDSVPGTPVEKSVFDSIPGTPFQKSVFDSIPGTPVQKSVFDYSVPSTPMQNSVFDYSVPSTPMQKSLFDSVPGTPVQRSVFDSVPSTPMQRSVFDSVPSTPTQKPFFDSFPSTPMQRSLFDSGPSRAESPTASSMYGKEQKGFFDSSVPSTPMYNSSFTPRYSEAGDDSFDTMSQYSSFGMHESNSFGQRDSLSRFDSFSSNADNGGNDTFARFDSFRSTSDQGGGNSFMRYDSMNSSSDHDGIGTFARFDSMKSSNYNSRGYSFDDEDPFGTGPFKSTETTSHSPTKHGTDTWSAF

SEQ ID NO: 180847 - protein, 637 aa, Zea Mays
MEAAFDAYFRAADLDRDGRISGQEAVAFFKGSGLPQPVLAQIWTYADKNRSGFLGREDFFNALKLVTVAQSGRELTPDIVRSALFGPAAAKIPAPRINVSTAAPQASSVANLPNATQAPGPVQQTPVVRGTQGLPGISSNPQVRPPQPPNANTAPPAHGQGVASRPPVGSGPTGINHTSSTTPSLATDWFSGKRSASPLGATSQTPTRGISPQANLSSAGISVQNSAPVPGYNSHTPGVNAISTNLNVMSSQPSVNDSKALVPLGNGLSSNSTFGADPFSATPRPEQGSPFPPNVPNNLLSSTPPASAAGHHHPPKPMQAGPVQSISSLSPHTSQLPHNQPPPRQQQFNATPSAPGPVSSNIPTGQIPSSPSQPQAPWPKITQVDVRKYMIVFIKVDRDRDGKITGEEARNLFLSWRLPRDVLRKVWDLSDQDKDGMLSFKEFCIAVYLMERHREHRPLPDTVTDAIWAEGTALPSTGQFAENPSAPAPQASAGYTSRTMQGPHHGMLPSSMKPPSRRPLPLDADDTIKPEQQKPKVPVLEEHLVGQLSKEEQDTLDAKFNEASVADKKSWRRRSLILERRPSFIARRCRSLFFTKVGATIGLMKSQKVCLLINVRSNLFLQNMMRDARRLEMWHQS

SEQ ID NO: 180848 - protein, 1139 aa, Zea Mays
MEAAFDAYFRAADLDRDGRISGQEAVAFFKGSGLPQPVLAQIWTYADKNRSGFLGREDFFNALKLVTVAQSGRELTPDIVRSALFGPAAAKIPAPRINVSTAAPQASSVANLPNATQAPGPVQQTPVVRGTQGLPGISSNPQVRPPQPPNANTAPPAHGQGVASRPPVGSGPTGINHTSSTTPSLATDWFSGKRSASPLGATSQTPTRGISPQANLSSAGISVQNSAPVPGYNSHTPGVNAISTNLNVMSSQPSVNDSKALVPLGNGLSSNSTFGADPFSATPRPEQGSPFPPNVPNNLLSSTPPASAAGHHHPPKPMQAGPVQSISSLSPHTSQLPHNQPPPRQQQFNATPSAPGPVSSNIPTGQIPSSPSQPQAPWPKITQVDVRKYMIVFIKVDRDRDGKITGEEARNLFLSWRLPRDVLRKVWDLSDQDKDGMLSFKEFCIAVYLMERHREHRPLPDTVTDAIWAEGTALPSTGQFAENPSAPAPQASAGYTSRTMQGPHHGMLPSSMKPPSRRPLPLDADDTIKPEQQKPKVPVLEEHLVGQLSKEEQDTLDAKFNEASVADKKVQELEKEILDSREKTEFYRTKMQELILYKSRCDNRFNEVSESMSADKREVQSLSAKYDERCKKVGDVASKLTMDEATFREIQEKKLEIYNAIVKLQKGDDSDEKFQERANKIQSDLEELVKSLNEQCKRYGLRAKPTTLVELPFGWQPGIQETAYAWDEEWDNFGDEGFSIIKELTVEVEPPVVAKSQPTEDVKASSNGASTEKEDNKGDKSAAAVEQVVKPETAPSNIKPESAKSPPVSPVKNKEDGPDEHDKKQSGTNDVSPRESISNRGAMDSPTHGDKTHDGHSWGMDNDSLWNFDHKEGENGDSDLFFGPQGLPPIRTGGSSSGTPVQKSVFDYSVPSTPMQNSVFDYSVPSTPMQKSLFDSVPGTPVQRSVFDSVPSTPMQRSVFDSVPSTPTQKPFFDSFPSTPMQRSLFDSGPSRAESPTASSMYGKEQKGFFDSSVPSTPMYNSSFTPRYSEAGDDSFDTMSQYSSFGMHESNSFGQRDSLSRFDSFSSNADNGGNDTFASSSDHDGIGTFARFDSMKSSNYNSRGYSFDDEDPFGTGPFKSTETTSHSPTKHGTDTWSAF

SEQ ID NO: 180849 - protein, 363 aa, Zea Mays
MDSPTHGDKTHDGHSWGMDNDSLWNFDHKEGENGDSDLFFGPQGLPPIRTGGSSSGNSVVKEQKPFFDSVPGTPVEKSVFDSIPGTPFQKSVFDSIPGTPVQKSVFDYSVPSTPMQNSVFDYSVPSTPMQKSLFDSVPGTPVQRSVFDSVPSTPMQRSVFDSVPSTPTQKPFFDSFPSTPMQRSLFDSGPSRAESPTASSMYGKEQKGFFDSSVPSTPMYNSSFTPRYSEAGDDSFDTMSQYSSFGMHESNSFGQRDSLSRFDSFSSNADNGGNDTFARFDSFRSTSDQGGGNSFMRYDSMNSSSDHDGIGTFARFDSMKSSNYNSRGYSFDDEDPFGTGPFKSTETTSHSPTKHGTDTWSAF

SEQ ID NO: 180850 - protein, 778 aa, Zea Mays
MTPQSQMEHNDTEQCDIDQSLRSSHGCVNIEKPMFPTDNAEVQQETMADVVNGSETGNVQKDPPAPTSVFHQPCMHESRSYIPPQEDTIDVVGLGDRSLERSPIVEGNMSIGSVLASAGCDAPLQGRITEPFSQQDKHDHTATVEPKSCRQKSPNLSHCADGEGADDGGSSNQSSKVSIHEGPSAHAPVTSGFDRISGVLSTDASEPEHLSECIPAQDTSMISQLDSRKAHLSALQQERVEKVNQGPEDISANIGPVEKEHVHGDLTLQSASVLLSISCNGSNQGTKSETNLQPGTATEDRMAFEEQNAEKSHLELSGTNKANQALFDDGSVMKNNTVHGGLTAHTAPVSQSCSVTLHDKTSEANCFSEWKNEKNGQKDNCHTSIPGSSQDGGGESAKKTSNEVNSGDTSSKICVHSKDKDINDTLEGLSQQDLCIKCGKVGQLLECSSCSLAAHNSCFGSSVTFEETNLFYCPVCFYKRATEAYKKAKKTYGEARKNVAAFLGTIQVTKQHNEQLNGVQPGGANREDHSDTSKRTHENEVYNLAHQDEEPHQQMKKQKINAIGIDYRKEVLTEKVPFQNSGPASINKHSVLQNNGKTRVKDPEKKQQAGDEEARKEAGNEKSHETGASSQRRCDPPSNHDVEADQEGSLTTSIQSSGSDELEAKGLQEKKAAVSSKSRKGISKRDQHMPTSPRKRNSVHLQKRYSNPLAPPGRRKKLFWTEEEEAVLREGMAKFTPQNNAQIPWILILEHGRGVFHRTRLPSDLRVKWRSMQRKKWI

SEQ ID NO: 180851 - protein, 784 aa, Zea Mays
MTPQSQMEHNDTEQCDIDQSLRSSHGCVNIEKPMFPTDNAEVQQETMADVVNGSETGNVQKDPPAPTSVFHQPCMHESRSYIPPQEDTIDVVGLGDRSLERSPIVEGNMSIGSVLASAGCDAPLQGRITEPFSQQDKHDHTATVEPKSCRQKSPNLSHCADGEGADDGGSSNQSSKVSIHEGPSAHAPVTSGFDRISGVLSTDASEPEHLSECIPAQDTSMISQLDSRKAHLSALQQERVEKVNQGPEDISANIGPVEKEHVHGDLTLQSASVLLSISCNGSNQGTKSETNLQPGTATEDRMAFEEQNAEKSHLELSGTNKANQALFDDGSVMKNNTVHGGLTAHTAPVSQSCSVTLHDKTSEANCFSEWKNEKNGQKDNCHTSIPGSSQDGGGESAKKTSNEVNSGDTSSKICVHSKDKDINDTLEGLSQQDLCIKCGKVGQLLECSSCSLAAHNSCFGSSVTFEETNLFYCPVCFYKRATEAYKKAKKTYGEARKNVAAFLGTIQVTKQHNEQLNGVQPGGANREDHSDTSKRTHENEVYNLAHQDEEPHQQMKKQKINAIGIDYRKEVLTEKVPFQNSGPASINKHSVLQNNGKTRVKDPEKKQQAGDEEARKEAGNEKSHETGASSQRRCDPPSNHDVEADQEGSLTTSIQSSGSDELEAKGLQEKKAAVSSKSRKGISKRDQHMPTSPRKRNSVHLQKRYSNPLAPPGRRKKLFWTEEEEAVLREGMAKFTPQNNAQIPWILILEHGRGVFHRTRLPSDLRVKWRSMQRKKSDAVDMEH

SEQ ID NO: 180852 - protein, 879 aa, Zea Mays
MPPPSASAIATRFATHWIADALADDESFDFSVLQDLVRASSKPLAGAPEATRERVALRCLQEASSVIAAGGDAAATAGVLRVDGARSCEDVLLRLIREVGSSRELEKDLLPPFSQDIQETICTKKSTLPETSFQLLKGLEPWITSMTPQSQMEHNDTEQCDIDQSLRSSHGCVNIEKPMFPTDNAEVQQETMADVVNGSETGNVQKDPPAPTSVFHQPCMHESRSYIPPQEDTIDVVGLGDRSLERSPIVEGNMSIGSVLASAGCDAPLQGRITEPFSQQDKHDHTATVEPKSCRQKSPNLSHCADGEGADDGGSSNQSSKVSIHEGPSAHAPVTSGFDRISGVLSTDASEPEHLSECIPAQDTSMISQLDSRKAHLSALQQERVEKVNQGPEDISANIGPVEKEHVHGDLTLQSASVLLSISCNGSNQGTKSETNLQPGTATEDRMAFEEQNAEKSHLELSGTNKANQALFDDGSVMKNNTVHGGLTAHTAPVSQSCSVTLHDKTSEANCFSEWKNEKNGQKDNCHTSIPGSSQDGGGESAKKTSNEVNSGDTSSKICVHSKDKDINDTLEGLSQQDLCIKCGKVGQLLECSSCSLAAHNSCFGSSVTFEETNLFYCPVCFYKRATEAYKKAKKTYGEARKNVAAFLGTIQVTKQHNEQLNGVQPGGANREDHSDTSKRTHENEVYNLAHQDEEPHQQMKKQKINAIGIDYRKEVLTEKVPFQNSGPASINKHSVLQNNGKTRVKDPEKKQQAGDEEARKEAGNEKSHETGASSQRRCDPPSNHDVEADQEGSLTTSIQSSGSDELEAKGLQEKKAAVSSKSRKGISKRDQHMPTSPRKRNSVHLQKRYSNPLAPPGRRKKLFWTEEEEAVLRDAPAI

SEQ ID NO: 180853 - protein, 892 aa, Zea Mays
MPPPSASAIATRFATHWIADALADDESFDFSVLQGEAPNPKLLRRSPERFRSLTWPLAGAPEATRERVALRCLQEASSVIAAGGDAAATAGVLRVDGARSCEDVLLRLIREVGSSRELEKDLLPPFSQDIQETICTKKSTLPETSFQLLKGLEPWITSMTPQSQMEHNDTEQCDIDQSLRSSHGCVNIEKPMFPTDNAEVQQETMADVVNGSETGNVQKDPPAPTSVFHQPCMHESRSYIPPQEDTIDVVGLGDRSLERSPIVEGNMSIGSVLASAGCDAPLQGRITEPFSQQDKHDHTATVEPKSCRQKSPNLSHCADGEGADDGGSSNQSSKVSIHEGPSAHAPVTSGFDRISGVLSTDASEPEHLSECIPAQDTSMISQLDSRKAHLSALQQERVEKVNQGPEDISANIGPVEKEHVHGDLTLQSASVLLSISCNGSNQGTKSETNLQPGTATEDRMAFEEQNAEKSHLELSGTNKANQALFDDGSVMKNNTVHGGLTAHTAPVSQSCSVTLHDKTSEANCFSEWKNEKNGQKDNCHTSIPGSSQDGGGESAKKTSNEVNSGDTSSKICVHSKDKDINDTLEGLSQQDLCIKCGKVGQLLECSSCSLAAHNSCFGSSVTFEETNLFYCPVCFYKRATEAYKKAKKTYGEARKNVAAFLGTIQVTKQHNEQLNGVQPGGANREDHSDTSKRTHENEVYNLAHQDEEPHQQMKKQKINAIGIDYRKEVLTEKVPFQNSGPASINKHSVLQNNGKTRVKDPEKKQQAGDEEARKEAGNEKSHETGASSQRRCDPPSNHDVEADQEGSLTTSIQSSGSDELEAKGLQEKKAAVSSKSRKGISKRDQHMPTSPRKRNSVHLQKRYSNPLAPPGRRKKLFWTEEEEAVLRDAPAI

SEQ ID NO: 180854 - protein, 252 aa, Zea Mays
MSNIGSFYSSVTFLFFLFFCFFFCFEYGCKSCFSLSNIKMCSSPARTRKKTLNNRQWVADIRGVLTVQVLEEYVQVWDQVKGTILHHDLTDTYKWRLSQTGDYSSKSAYAAFFNGSIKFAPWKRIWKSWAPLRCKLFIWLVFKNRCWIADRLAKRELSHPEACPLCDQGEETIHHLLVSCVFTRQFWSHIFQALKLPDLAPTLIESSFPNWWRKMSRLVPKERQKGLNSLIILTAWETWKHRNSCVFEFLHS

SEQ ID NO: 180855 - protein, 605 aa, Zea Mays
MGSWRQKLPGLGEGSGSGSQAAEAGGGGRGFRGRGGFYHQQQSPQGGRGRGTGYYSGGGGGRGGRGAVPSAIAPELRQAMQTSNEPDNIPAPEAGSQSQDAPSPSEEAVDQLKGLSVQDIVQAFPVSSKFPHRPGNGSVGTRCLVKANHFFAELLPAKKDLHQYDVSVTPEVTSRIVNRSVMEELVRLHKLSYLGGRLPAYDGRKSLYTAGPLPFTSKEFHITLLEEDDGSGVERRKKTYKVVIKFAARADLRRLEQFLAGRQAEAPQEALQVLDIVLRELPTTRYAPFGRSFFSPDLGRRRSLGEGIESWRGFYQSIRPTQMGLSLNIDMSATAFFEPLPVIDFVAQLLNTDDIYSRPLLDAERVKIKKALRGVKVEVTHRGNMRRKYRIAGLTSQETRELTFPVDQGGTVKSVVQYFQETYGFAIQHTYLPCLQVGNQQHPNYLPMEVCKIVEGQRYSKRLNQSQIRALLEETCQRPHDRERDIIQMMNHNSYHEDPYAKEFGIKISERLASIEARILPAPRLKYNETGREKDCLPRVGQWNMMNKKMVNGGRVRSWTCVNFARNVQENVAIGFCRELARMCQASGMARLRAGAYPSAYIRAS

SEQ ID NO: 180856 - protein, 822 aa, Zea Mays
MYITQPKKKRIEFVSFTAHGMGSWRQKLPGLGEGSGSGSQAAEAGGGGRGFRGRGGFYHQQQSPQGGRGRGTGYYSGGGGGRGGRGAVPSAIAPELRQAMQTSNEPDNIPAPEAGSQSQDAPSPSEEAVDQLKGLSVQDIVQAFPVSSKFPHRPGNGSVGTRCLVKANHFFAELLPAKKDLHQYDVSVTPEVTSRIVNRSVMEELVRLHKLSYLGGRLPAYDGRKSLYTAGPLPFTSKEFHITLLEEDDGSGVERRKKTYKVVIKFAARADLRRLEQFLAGRQAEAPQEALQVLDIVLRELPTTRYAPFGRSFFSPDLGRRRSLGEGIESWRGFYQSIRPTQMGLSLNIDMSATAFFEPLPVIDFVAQLLNTDDIYSRPLLDAERVKIKKALRGVKVEVTHRGNMRRKYRIAGLTSQETRELTFPVDQGGTVKSVVQYFQETYGFAIQHTYLPCLQVGNQQHPNYLPMEVCKIVEGQRYSKRLNQSQIRALLEETCQRPHDRERDIIQMMNHNSYHEDPYAKEFGIKISERLASIEARILPAPRLKYNETGREKDCLPRVGQWNMMNKKMVNGGRVRSWTCVNFARNVQENVAIGFCRELARMCQASGMDFALEPILPPIYAHPDKVERALKARFHDAMNLLGPQRREQLDLLLIGILPDNNGSLYGDLKRICEIDLGLVSQCCCAKQVFKMNKQILANLALKINVKVGGRNTVLADAVSRRIPLVTDRPTIIFGADVTHPHPGEDSSPSIAAVVASQDWPEVTKYAGLVSAQSHRQELIEDLYNVTHDPQKGTVCGGMVRELLISFKKSTGQKPQRILFYR

SEQ ID NO: 180857 - protein, 239 aa, Zea Mays
MCDPARIHYCKLGLNSKSARFLIHTHIQPGVCLHGEFRPGDKNAIGIGVEPLAVANPGSSDVDGDVLLAHPLLVGLHRVRAESPDTDVAAVDLIHVPDAAVDQDTSPPVVLRLLDGVAAKDGAAHAAAAVDHEDPTVAFLLEELADQDVVLVDLERDDGAGEDLAPSVDLEDWLERAELAVHDQVRVSVAYFGGGQWQGSHIFLLLTPAQAQTDRIGSDQISGGGEGRGAAPMECGWRG

SEQ ID NO: 180858 - protein, 138 aa, Zea Mays
MAPPRAAAGVSIPADPAADSPEAESESKLRQGAADARWLETLSEPELDVLVSLREVAVTRASDAGHPGLADTVFHLRALRALGVVLLEELKERLRQSSADANVLDRSALLDDPEASQDHQMPAPNGIHKKRKNQTQDG

SEQ ID NO: 180859 - protein, 138 aa, Zea Mays
MGAEEDAAARRERLRALRAAKDLLSTPDGAPTPSTDGEHHELPAMKFRNYLPHDEQLRGGKLAPVSLPKFEDPISAETAEPKEVENLFGNIAPKNPNWDLKRDVQKRIDKLERRTQKALAEIALEQQREKEALEESQD

SEQ ID NO: 180860 - protein, 514 aa, Zea Mays
MAASSSPSSRSLLATRPLFLPLRTRRSLPPTSIPPRLSCLRSPSASSSPSASASAYNGWADLAAAPDTPFPFPLSFPLQPTTHGLLVLLPAAAIALSLSLARLPPLPLLAAAFTAGFAARHLSSSAQAQSPGRLSALLADLDAHARALREQLVSDAHPGLLVQAVDRLRDAVADAATVAAEQGDTGRTMSDALGPLGEVADYLGAWARHAVRDLSLSPPRKKPAKGNNSSDVQAAANPNNRAAQQQQEIGSNKPVDSTLQQQPFAFDPSAVDDANGRPLGMLQFDEDDNGSKDAGTGAQATLERLVSKHRHRRDPDGPPFEGRFSDESSSLLERTLEIRDRSYRLKIGVMSEAHPPVYGDDESAASAADSDGEEFSRNVKEAAEILRKARASMADEETADALLYKSARLLSTAVALRPTSLVAVGQLGNTYLLHGELKLKVSRELRTLLASSGAFLNGRERAPRSRKVDRRMVSRESISSALVDVCEECESLLVEAGRSYRMALSIDSGSSSRR

SEQ ID NO: 180861 - protein, 1125 aa, Zea Mays
MRQALPDLFDAQPDLLFHLVTMLNPSILQANSVPVYSVMQEPGNFIITFPRSFHGGFNLGLNCAEAVNFAPADWLPHGGIGANLYRLYRKAPVLSHEELLYVVAKNGVDAESLTHLKGEIKRLFINERRRRVELWINGTVKSSLMLPRINPNFIGSEEDPTCIICRQYLYLSAVSCNCRLSSYVCLEHWKHLCECSPKKHCLLYRHTLAELGDLVCEVSLVSPQRDNVMQNPHLLNDVYVPSKKVKDHYILYRQLAEDWVSNSEHILQMPFVERSYATALEEAEQFLWGDHAMDSVRNITVRLTKAMKWALGVRKCLSKIQDFLKDGCSEKVNYVEIEELVATKCAPCCEPSLTKLQAYAEEAKLLINEVNNALSSFLTVDKLETLYSRVSEFPVKLTESSTLFWELSSAKSWLKKASDCLEQNKLGIIDIDVLNKLKSEIIQLRVLLPEIDLISKLWKDVESWQTRCQLYLQDFPDLKELEGFLLAADGANFSIPELNILKQHYSNCCSWVSRAKNILRKLYATSDYHNAVEELTGILKEAELLGVKVDELPIVEKELKRSLCRKQASEALATVMPMEVVEEILKEASILHIEEEQPFDDLSRMLKEATSWEEKARLILERSASLSEFEDHMRCSEGIRVILPSKLHMKAEVDIAKLWIDKCQAYLRPGCNKLAFGDFLKVDDIKDLINQPANLKVILDTSELNSVLNNIEKWEHSSLSLLNNFRALLHLNSIGSTVDTLQRKLEELQGKMNTEIEVGLSLGFEFKVLWELKDSSLMLRWILNALSLCCMIPLLQDVDRLIEEAVHLPASLADCSLVTLLMRALSCLRKSLILLPGSGTSAKSKLEDVENILAEFKEVDVPYPIMTAKLEDAVNNHNSWIEQCNTFFMLSDGQSWAMLQNLRDNGQSVAFDCPEMDKVVDEVKNVEEWLNQCHCTLLLDGNNSSLLSILVKIRGLLDDVCTLYAEDCMKLRLCAVCSCDIGDRLASRCVTCQDWYHGSCVENLSATTQTTIEWMCSFCSLLQSEDQLKNQLSVKMSKGNCPALAALDELISSAKGLYTGIEEINLLKEIVDKARNLNAYLMQILDDSDCYHGEDLTVIFKSLLVALKVIIIKLLILKSPCSLSV

SEQ ID NO: 180862 - protein, 1333 aa, Zea Mays
MRQALPDLFDAQPDLLFHLVTMLNPSILQANSVPVYSVMQEPGNFIITFPRSFHGGFNLGLNCAEAVNFAPADWLPHGGIGANLYRLYRKAPVLSHEELLYVVAKNGVDAESLTHLKGEIKRLFINERRRRVELWINGTVKSSLMLPRINPNFIGSEEDPTCIICRQYLYLSAVSCNCRLSSYVCLEHWKHLCECSPKKHCLLYRHTLAELGDLVCEVSLVSPQRDNVMQNPHLLNDVYVPSKKVKDHYILYRQLAEDWVSNSEHILQMPFVERSYATALEEAEQFLWGDHAMDSVRNITVRLTKAMKWALGVRKCLSKIQDFLKDGCSEKVNYVEIEELVATKCAPCCEPSLTKLQAYAEEAKLLINEVNNALSSFLTVDKLETLYSRVSEFPVKLTESSTLFWELSSAKSWLKKASDCLEQNKLGIIDIDVLNKLKSEIIQLRVLLPEIDLISKLWKDVESWQTRCQLYLQDFPDLKELEGFLLAADGANFSIPELNILKQHYSNCCSWVSRAKNILRKLYATSDYHNAVEELTVDELPIVEKELKRSLCRKQASEALATVMPMEVVEEILKEASILHIEEEQPFDDLSRMLKEATSWEEKARLILERSASLSEFEDHMRCSEGIRVILPSKLHMKAEVDIAKLWIDKCQAYLRPGCNKLAFGDFLKVDDIKDLINQPANLKVILDTSELNSVLNNIEKWEHSSLSLLNNFRALLHLNSIGSTVDTLQRKLEELQGKMNTEIEVGLSLGFEFKVLWELKDSSLMLRWILNALSLCCMIPLLQDVDRLIEEAVHLPASLADCSLVTLLMRALSCLRKSLILLPGSGTSAKSKLEDVENILAEFKEVDVPYPIMTAKLEDAVNNHNSWIEQCNTFFMLSDGQSWAMLQNLRDNGQSVAFDCPEMDKVVDEVKNVEEWLNQCHCTLLLDGNNSSLLSILVKIRGLLDDVCTLYAEDCMKLRLCAVCSCDIGDRLASRCVTCQDWYHGSCVENLSATTQTTIEWMCSFCSLLQSEDQLKNQLSVKMSKGNCPALAALDELISSAKGLYTGIEEINLLKEIVDKARNLNAYLMQILDDSDCYHGEDLTVIFKSLLVALKATSASGLYDDNVSCRIESVLSRYLWKKQIHKLLYGGKKSSIQEVLCLDEEGSHLEICDQDFFKLEISKIKETSLQWLAKAEEVACDSGELALDLVYGLIAEGENLSVDFEKELKLLRDRSVLYCICCKPDDNRAMIACDQCDEWYHFDCINLLGPPPESFFCPACHPNNGEESVSLARSEDDEDRSSTGAGAHTPPDRVVERDLIKLLSCHSGSSWSESRRAPHRTARRRSSFVGLL

SEQ ID NO: 180863 - protein, 1201 aa, Zea Mays
MLPRINPNFIGSEEDPTCIICRQYLYLSAVSCNCRLSSYVCLEHWKHLCECSPKKHCLLYRHTLAELGDLVCEVSLVSPQRDNVMQNPHLLNDVYVPSKKVKDHYILYRQLAEDWVSNSEHILQMPFVERSYATALEEAEQFLWGDHAMDSVRNITVRLTKAMKWALGVRKCLSKIQDFLKDGCSEKVNYVEIEELVATKCAPCCEPSLTKLQAYAEEAKLLINEVNNALSSFLTVDKLETLYSRVSEFPVKLTESSTLFWELSSAKSWLKKASDCLEQNKLGIIDIDVLNKLKSEIIQLRVLLPEIDLISKLWKDVESWQTRCQLYLQDFPDLKELEGFLLAADGANFSIPELNILKQHYSNCCSWVSRAKNILRKLYATSDYHNAVEELTGILKEAELLGVKVDELPIVEKELKRSLCRKQASEALATVMPMEVVEEILKEASILHIEEEQPFDDLSRMLKEATSWEEKARLILERSASLSEFEDHMRCSEGIRVILPSKLHMKAEVDIAKLWIDKCQAYLRPGCNKLAFGDFLKVDDIKDLINQPANLKVILDTSELNSVLNNIEKWEHSSLSLLNNFRALLHLNSIGSTVDTLQRKLEELQGKMNTEIEVGLSLGFEFKVLWELKDSSLMLRWILNALSLCCMIPLLQDVDRLIEEAVHLPASLADCSLVTLLMRALSCLRKSLILLPGSGTSAKSKLEDVENILAEFKEVDVPYPIMTAKLEDAVNNHNSWIEQCNTFFMLSDGQSWAMLQNLRDNGQSVAFDCPEMDKVVDEVKNVEEWLNQCHCTLLLDGNNSSLLSILVKIRGLLDDVCTLYAEDCMKLRLCAVCSCDIGDRLASRCVTCQDWYHGSCVENLSATTQTTIEWMCSFCSLLQSEDQLKNQLSVKMSKGNCPALAALDELISSAKGLYTGIEEINLLKEIVDKARNLNAYLMQILDDSDCYHGEDLTVIFKSLLVALKATSASGLYDDNVSCRIESVLSRYLWKKQIHKLLYGGKKSSIQEVLCLDEEGSHLEICDQDFFKLEISKIKETSLQWLAKAEEVACDSGELALDLVYGLIAEGENLSVDFEKELKLLRDRSVLYCICCKPDDNRAMIACDQCDEWYHFDCINLLGPPPESFFCPACHPNNGEESVSLARSEDDEDRSSTGAGAHTPPDRVVERDLIKLLSCHSGSSWSESRRAPHRTARRRSSFVGLL

SEQ ID NO: 180864 - protein, 1113 aa, Zea Mays
MRQALPDLFDAQPDLLFHLVTMLNPSILQANSVPVYSVMQEPGNFIITFPRSFHGGFNLGLNCAEAVNFAPADWLPHGGIGANLYRLYRKAPVLSHEELLYVVAKNGVDAESLTHLKGEIKRLFINERRRRVELWINGTVKSSLMLPRINPNFIGSEEDPTCIICRQYLYLSAVSCNCRLSSYVCLEHWKHLCECSPKKHCLLYRHTLAELGDLVCEVSLVSPQRDNVMQNPHLLNDVYVPSKKVKDHYILYRQLAEDWVSNSEHILQMPFVERSYATALEEAEQFLWGDHAMDSVRNITVRLTKAMKWALGVRKCLSKIQDFLKDGCSEKVNYVEIEELVATKCAPCCEPSLTKLQAYAEEAKLLINEVNNALSSFLTVDKLETLYSRVSEFPVKLTESSTLFWELSSAKSWLKKASDCLEQNKLGIIDIDVLNKLKSEIIQLRVLLPEIDLISKLWKDVESWQTRCQLYLQDFPDLKELEGFLLAADGANFSIPELNILKQHYSNCCSWVSRAKNILRKLYATSDYHNAVEELTVDELPIVEKELKRSLCRKQASEALATVMPMEVVEEILKEASILHIEEEQPFDDLSRMLKEATSWEEKARLILERSASLSEFEDHMRCSEGIRVILPSKLHMKAEVDIAKLWIDKCQAYLRPGCNKLAFGDFLKVDDIKDLINQPANLKVILDTSELNSVLNNIEKWEHSSLSLLNNFRALLHLNSIGSTVDTLQRKLEELQGKMNTEIEVGLSLGFEFKVLWELKDSSLMLRWILNALSLCCMIPLLQDVDRLIEEAVHLPASLADCSLVTLLMRALSCLRKSLILLPGSGTSAKSKLEDVENILAEFKEVDVPYPIMTAKLEDAVNNHNSWIEQCNTFFMLSDGQSWAMLQNLRDNGQSVAFDCPEMDKVVDEVKNVEEWLNQCHCTLLLDGNNSSLLSILVKIRGLLDDVCTLYAEDCMKLRLCAVCSCDIGDRLASRCVTCQDWYHGSCVENLSATTQTTIEWMCSFCSLLQSEDQLKNQLSVKMSKGNCPALAALDELISSAKGLYTGIEEINLLKEIVDKARNLNAYLMQILDDSDCYHGEDLTVIFKSLLVALKVIIIKLLILKSPCSLSV

SEQ ID NO: 180865 - protein, 1350 aa, Zea Mays
MRQALPDLFDAQPDLLFHLVTMLNPSILQANSVPVYSVMQEPGNFIITFPRSFHGGFNLGLNCAEAVNFAPADWLPHGGIGANLYRLYRKAPVLSHEELLYVVAKNGVDAESLTHLKGEIKRLFINERRRRVELWINGTVKSSLMLPRINPNFIGSEEDPTCIICRQYLYLSAVSCNCRLSSYVCLEHWKHLCECSPKKHCLLYRHTLAELGDLVCEVSLVSPQRDNVMQNPHLLNDVYVPSKKVKDHYILYRQLAEDWVSNSEHILQMPFVERSYATALEEAEQFLWGDHAMDSVRNITVRLTKAMKWALGVRKCLSKIQDFLKDGCSEKVNYVEIEELVATKCAPCCEPSLTKLQAYAEEAKLLINEVNNALSSFLTVDKLETLYSRVSEFPVKLTESSTLFWELSSAKSWLKKASDCLEQNKLGIIDIDVLNKLKSEIIQLRVLLPEIDLISKLWKDVESWQTRCQLYLQDFPDLKELEGFLLAADGANFSIPELNILKQHYSNCCSWVSRAKNILRKLYATSDYHNAVEELTGILKEAELLGVKVDELPIVEKELKRSLCRKQASEALATVMPMEVVEEILKEASIFLPARLHIEEEQPFDDLSRMLKEATSWEEKARLILERSASLSEFEDHMRCSEGIRVILPSKLHMKAEVDIAKLWIDKCQAYLRPGCNKLAFGDFLKVDDIKDLINQPANLKVILDTSELNSVLNNIEKWEHSSLSLLNNFRALLHLNSIGSTVDTLQRKLEELQGKMNTEIEVGLSLGFEFKVLWELKDSSLMLRWILNALSLCCMIPLLQDVDRLIEEAVHLPASLADCSLVTLLMRALSCLRKSLILLPGSGTSAKSKLEDVENILAEFKEVDVPYPIMTAKLEDAVNNHNSWIEQCNTFFMLSDGQSWAMLQNLRDNGQSVAFDCPEMDKVVDEVKNVEEWLNQCHCTLLLDGNNSSLLSILVKIRGLLDDVCTLYAEDCMKLRLCAVCSCDIGDRLASRCVTCQDWYHGSCVENLSATTQTTIEWMCSFCSLLQSEDQLKNQLSVKMSKGNCPALAALDELISSAKGLYTGIEEINLLKEIVDKARNLNAYLMQILDDSDCYHGEDLTVIFKSLLVALKATSASGLYDDNVSCRIESVLSRYLWKKQIHKLLYGGKKSSIQEVLCLDEEGSHLEICDQDFFKLEISKIKETSLQWLAKAEEVACDSGELALDLVYGLIAEGENLSVDFEKELKLLRDRSVLYCICCKPDDNRAMIACDQCDEWYHFDCINLLGPPPESFFCPACHPNNGEESVSLARSEDDEDRSSTGAGAHTPPDRVVERDLIKLLSCHSGSSWSESRRAPHRTARRRSSFVGLL

SEQ ID NO: 180866 - protein, 555 aa, Zea Mays
MPMEVVEEILKEASIFLPARLHIEEEQPFDDLSRMLKEATSWEEKARLILERSASLSEFEDHMRCSEGIRVILPSKLHMKAEVDIAKLWIDKCQAYLRPGCNKLAFGDFLKVDDIKDLINQPANLKVILDTSELNSVLNNIEKWEHSSLSLLNNFRALLHLNSIGSTVDTLQRKLEELQGKMNTEIEVGLSLGFEFKVLWELKDSSLMLRWILNALSLCCMIPLLQDVDRLIEEAVHLPASLADCSLVTLLMRALSCLRKSLILLPGSGTSAKSKLEDVENILAEFKEVDVPYPIMTAKLEDAVNNHNSWIEQCNTFFMLSDGQSWAMLQNLRDNGQSVAFDCPEMDKVVDEVKNVEEWLNQCHCTLLLDGNNSSLLSILVKIRGLLDDVCTLYAEDCMKLRLCAVCSCDIGDRLASRCVTCQDWYHGSCVENLSATTQTTIEWMCSFCSLLQSEDQLKNQLSVKMSKGNCPALAALDELISSAKGLYTGIEEINLLKEIVDKARNLNAYLMQILDDSDCYHGEDLTVIFKSLLVALKVIIIKLLILKSPCSLSV

SEQ ID NO: 180867 - protein, 751 aa, Zea Mays
MRQALPDLFDAQPDLLFHLVTMLNPSILQANSVPVYSVMQEPGNFIITFPRSFHGGFNLGLNCAEAVNFAPADWLPHGGIGANLYRLYRKAPVLSHEELLYVVAKNGVDAESLTHLKGEIKRLFINERRRRVELWINGTVKSSLMLPRINPNFIGSEEDPTCIICRQYLYLSAVSCNCRLSSYVCLEHWKHLCECSPKKHCLLYRHTLAELGDLVCEVSLVSPQRDNVMQNPHLLNDVYVPSKKVKDHYILYRQLAEDWVSNSEHILQMPFVERSYATALEEAEQFLWGDHAMDSVRNITVRLTKAMKWALGVRKCLSKIQDFLKDGCSEKVNYVEIEELVATKCAPCCEPSLTKLQAYAEEAKLLINEVNNALSSFLTVDKLETLYSRVSEFPVKLTESSTLFWELSSAKSWLKKASDCLEQNKLGIIDIDVLNKLKSEIIQLRVLLPEIDLISKLWKDVESWQTRCQLYLQDFPDLKELEGFLLAADGANFSIPELNILKQHYSNCCSWVSRAKNILRKLYATSDYHNAVEELTGILKEAELLGVKVDELPIVEKELKRSLCRKQASEALATVMPMEVVEEILKEASILHIEEEQPFDDLSRMLKEATSWEEKARLILERSASLSEFEDHMRCSEGIRVILPSKLHMKAEVDIAKLWIDKCQAYLRPGCNKLAFGDFLKVDDIKDLINQPANLKVILDTSELNSVLNNIEKWEHSSLSLLNNFRALLHLNSIGSTVDTLQRKLEELQGC

SEQ ID NO: 180868 - protein, 1302 aa, Zea Mays
MTFALGLGYAKVAPNLGGRLPSKRREACPDLGSDQTPTLANSRNIPQARVSGWHVEPQAISRNGVDAESLTHLKGEIKRLFINERRRRVELWINGTVKSSLMLPRINPNFIGSEEDPTCIICRQYLYLSAVSCNCRLSSYVCLEHWKHLCECSPKKHCLLYRHTLAELGDLVCEVSLVSPQRDNVMQNPHLLNDVYVPSKKVKDHYILYRQLAEDWVSNSEHILQMPFVERSYATALEEAEQFLWGDHAMDSVRNITVRLTKAMKWALGVRKCLSKIQDFLKDGCSEKVNYVEIEELVATKCAPCCEPSLTKLQAYAEEAKLLINEVNNALSSFLTVDKLETLYSRVSEFPVKLTESSTLFWELSSAKSWLKKASDCLEQNKLGIIDIDVLNKLKSEIIQLRVLLPEIDLISKLWKDVESWQTRCQLYLQDFPDLKELEGFLLAADGANFSIPELNILKQHYSNCCSWVSRAKNILRKLYATSDYHNAVEELTGILKEAELLGVKVDELPIVEKELKRSLCRKQASEALATVMPMEVVEEILKEASILHIEEEQPFDDLSRMLKEATSWEEKARLILERSASLSEFEDHMRCSEGIRVILPSKLHMKAEVDIAKLWIDKCQAYLRPGCNKLAFGDFLKVDDIKDLINQPANLKVILDTSELNSVLNNIEKWEHSSLSLLNNFRALLHLNSIGSTVDTLQRKLEELQGKMNTEIEVGLSLGFEFKVLWELKDSSLMLRWILNALSLCCMIPLLQDVDRLIEEAVHLPASLADCSLVTLLMRALSCLRKSLILLPGSGTSAKSKLEDVENILAEFKEVDVPYPIMTAKLEDAVNNHNSWIEQCNTFFMLSDGQSWAMLQNLRDNGQSVAFDCPEMDKVVDEVKNVEEWLNQCHCTLLLDGNNSSLLSILVKIRGLLDDVCTLYAEDCMKLRLCAVCSCDIGDRLASRCVTCQDWYHGSCVENLSATTQTTIEWMCSFCSLLQSEDQLKNQLSVKMSKGNCPALAALDELISSAKGLYTGIEEINLLKEIVDKARNLNAYLMQILDDSDCYHGEDLTVIFKSLLVALKATSASGLYDDNVSCRIESVLSRYLWKKQIHKLLYGGKKSSIQEVLCLDEEGSHLEICDQDFFKLEISKIKETSLQWLAKAEEVACDSGELALDLVYGLIAEGENLSVDFEKELKLLRDRSVLYCICCKPDDNRAMIACDQCDEWYHFDCINLLGPPPESFFCPACHPNNGEESVSLARSEDDEDRSSTGAGAHTPPDRVVERDLIKLLSCHSGSSWSESRRAPHRTARRRSSFVGLL

SEQ ID NO: 180869 - protein, 384 aa, Zea Mays
MSAPFSHYFVFTGHNSYLTGNQLNSDSSDVPIVKALQRGVRVIELDMWPNPSKDNVDILHGGTLTAPVEMIKCLKSIKEYAFCASNYPLVITLEDHLTSDLQAKVATMLTETFGDLLFVPNPDPMKEFPSPASLMKRIIISTKPPQEYKEFLKAENNRSGSGNIAELPDQGSLRRIDSNADESDGKDELDEQDEEDSDEDDPKFQQDTACEYRKLITIQAGKPKGHLRDALKVDPDKVRRLSLSETQLAKATISHGAEVIRFTQKNILRVYPKGTRVNSSNYDPMNAWTHGAQMVAFNMQGHDKALRLMQGFFRANGGCGYVKKPDFLLRTGPNGEVFDPKASLPVKKTLKVKVYMGDGWRMDFSKTHFDAFSPPDFYTRGSQV

SEQ ID NO: 180870 - protein, 381 aa, Zea Mays
MGSYAYKYCMCFTRKFRSPDAQPPPDVRAAHLSFASDAHALRRFVAGVQGESPADVDRILAMLSGGHSHGIARLVTRSPAASTPTLEDFFAFLFSPDLNPPIAHQVHQDMSAPFSHYFVFTGHNSYLTGNQLNSDSSDVPIVKALQRGVRVIELDMWPNPSKDNVDILHGGTLTAPVEMIKCLKSIKEYAFCASNYPLVITLEDHLTSDLQAKVATMLTETFGDLLFVPNPDPMKEFPSPASLMKRIIISTKPPQEYKEFLKAENNRSGSGNIAELPDQGSLRRIDSNADESDGKDELDEQDEEDSDEDDPKFQQDTACEYRKLITIQAGKPKGHLRDALKVDPDKVRRLSLSETQLAKATISHGAEVIRARGLILQTTIQ

SEQ ID NO: 180871 - protein, 630 aa, Zea Mays
MEDEADGGGESFVLRSGVRAGLKREFAFAIASQAVLSSSYAPLGRTRRSSRILNPSAASTPSVAGAAVSTSSSSTPDTKPKAKRPRPPDPPPPPPFPPPPDYAPAPGEDHDGAAVGPVLALMAAAGPSPPPTPLTPQPHADADADPAHLANIIIPPESSPRRITRSMLQPKSRLPTAARSPDNAAPLKPKLEPPEEEDGKPVPALRRFTRSLLVKDKDSNDDDLSGTTTASNASSPSPKTNTTSTSRSSNKGNKNTNKIPTNLRELLATGMLEGQPVKYIMRKGKRAVLRGVIKRIGILCSCSSCKGRKVVSPYYFEVHAGSTKKHPSDYIFLENGNNLHDVLRACTNATLDMLEPAIRKAIGPAPQERIFRCKSCKSSFSTLRSGKFALFCDSCLESKGAKNNISSSKVGRSQTSSAKVYKSASPGAKSSSVGRLTRKDKGMHKVVFMSGILPEGTDVGYYVGGKRLLDGYIKELGIYCHCCSTVVSPSQFEGHAGRAARRKPYHNIYMSNGVSLHELSISLLKGQKMSNRQSDDLCSICSDGGQLLLCDTCPRAFHRECVGLSSATKGTWCCRYCENRQQRESCLAYNNNAIAAGRVEGVDALEQIFTRSIRIATTLETGFGGCALCK

SEQ ID NO: 180872 - protein, 596 aa, Zea Mays
MEDEADGGGESFVLRSGVRAGLKREFAFAIASQAVLSSSYAPLGRTRRSSRILNPSAASTPSVAGAAVSTSSSSTPDTKPKAKRPRPPDPPPPPPFPPPPDYAPAPGEDHDGAAVGPVLALMAAAGPSPPPTPLTPQPHADADADPAHLANIIIPPESSPRRITRSMLQPKSRLPTAARSPDNAAPLKPKLEPPEEEDGKPVPALRRFTRSLLVKDKDSNDDDLSGTTTASNASSPSPKTNTTSTSRSSNKGNKNTNKIPTNLRELLATGMLEGQPVKYIMRKGKRAVLRGVIKRIGILCSCSSCKGRKVVSPYYFEVHAGSTKKHPSDYIFLENGNNLHDVLRACTNATLDMLEPAIRKAIGPAPQERIFRCKSCKSSFSTLRSGKFALFCDSCLESKGAKNNISSSKVGRSQTSSAKVYKSASPGAKSSSVGRLTRKDKGMHKVVFMSGILPEGTDVGYYVGGKRLLDGYIKELGIYCHCCSTVVSPSQFEGHAGRAARRKPYHNIYMSNGVSLHELSISLLKGQKMSNRQSDDLCSICSDGGQLLLCDTCPRAFHRGSMISAKRNSVPEPCCFVTNVVENIMLVASRNIIWLI

SEQ ID NO: 180873 - protein, 545 aa, Zea Mays
MLEPAIRKAIGPAPQERIFRCKSCKSSFSTLRSGKFALFCDSCLESKGAKNNISSSKVGRSQTSSAKVYKSASPGAKSSSVGRLTRKDKGMHKVVFMSGILPEGTDVGYYVGGKRLLDGYIKELGIYCHCCSTVVSPSQFEGHAGRAARRKPYHNIYMSNGVSLHELSISLLKGQKMSNRQSDDLCSICSDGGQLLLCDTCPRAFHRECVGLSSATKGTWCCRYCENRQQRESCLAYNNNAIAAGRVEGVDALEQIFTRSIRIATTLETGFGGCALCKLHDFSKKKFSTRTVLLCDQCGREYHVGCLKEHNMADLTALPEGAWYCSTDCVRINQTLQDLLNSGGEPVLAMDLDVIKKKREVKGFNDDDADLDVRWRVLKDKSSDDSKLVLSKAVAIFHETFDPIIQVSTGRDLIPAMVYGRSARDQDYTGMYCTVLTVNNIVVSAGLFRIMGSEIAELPLVATSRDRQGLGYFQALFSCIERLLSSLEVKHFVLPAAEEAESIWTERFGFAKISQDELREYLKGGRTTVFQGTSNLHKLVAKLEC

SEQ ID NO: 180874 - protein, 272 aa, Zea Mays
MLFGRLHDFSKKKFSTRTVLLCDQCGREYHVGCLKEHNMADLTALPEGAWYCSTDCVRINQTLQDLLNSGGEPVLAMDLDVIKKKREVKGFNDDDADLDVRWRVLKDKSSDDSKLVLSKAVAIFHETFDPIIQVSTGRDLIPAMVYGRSARDQDYTGMYCTVLTVNNIVVSAGLFRIMGSEIAELPLVATSRDRQGLGYFQALFSCIERLLSSLEVKHFVLPAAEEAESIWTERFGFAKISQDELREYLKGGRTTVFQGTSNLHKLVAKLEC

SEQ ID NO: 180875 - protein, 283 aa, Zea Mays
MGTKCVGLSSATKGTWCCRYCENRQQRESCLAYNNNAIAAGRVEGVDALEQIFTRSIRIATTLETGFGGCALCKLHDFSKKKFSTRTVLLCDQCGREYHVGCLKEHNMADLTALPEGAWYCSTDCVRINQTLQDLLNSGGEPVLAMDLDVIKKKREVKGFNDDDADLDVRWRVLKDKSSDDSKLVLSKAVAIFHETFDPIIQVSTGRDLIPAMVYGRSARDQDYTGMYCTVLTVNNIVVSAGLFRIMGSEIAELPLVATSRDRQGLLQRKRSLSGLSVLGSQR

SEQ ID NO: 180876 - protein, 52 aa, Zea Mays
MLTFPPSSNAACPQAVADGKRFFCASASSQVACEASIPDQITWTMYQLHSER

SEQ ID NO: 180877 - protein, 60 aa, Zea Mays
MRVPLLSCLCEVLAPFGVVPSQIVLNGWCAIAGLVVLSHSIGRVRRKSASAETSSSDVYC

SEQ ID NO: 180878 - protein, 140 aa, Zea Mays
MVQVRRSLSMSRLRSCHDADDRGWNPLHVAARKGDLKEVRRLLDEGGMDVNAPAWGPKCPGATPLHLAAQGGHVKIMDELLERGANIDARTKGACGWTPLHIAAKERNKKAVRFLIENGAFLPPEMNDHRMKAIRLAKLR

SEQ ID NO: 180879 - protein, 1177 aa, Zea Mays
MASSSFAPDDQTDADFFDKLVDDDDPATDLPRAVSATSVADDPPPVLEPQVPAPAPSEGSGKGGAGVHTAVKQVQWASFGGGVDDGPDPFADLSGGAGDDDGFLGNTAGTQAALDHAAEVTDQDFFAGSSSSDQQNVHGQHDQGRGSAAVDSADPKSLEAMYPGWKYDEASQQWYQLDGSVNSTGNAAQALDDSAQNAHHHQQQLDAAYLHNSAHAGLGTIAEESTTAAGAANSWGQGAAPEYPPSMLFYAEYPGWYFDTNTQQWHSLESYQQAAVQAGTSSTGQTVVASDDVVATSSLTGHNAGQTEDLVAHNQVTQRNSSSNSFTHQNQWQTTDALGNNVQSESLASSFYGFEQHMNAETTSSSTSQQTGFHTAETITDHYGGRKAFESSSLQSGYSSSDSQQSSHKAFEPSTGYQAGYNGFEPASGHHTAFEPAMHNQSGYKAFDPSTGHHSASWGFMPSTGQQTDFKGSRASTVHQAGYEEFEISRGYNTNFKAFESSSSQNAGYNGSQPSSGHQPNYMGFDTSANHHGYTDVNGVASTQGFVPMQTTYQGQKQANATSQGHLSNSYLGTDNSMNFNQQQFLGANASNLQFGHSPHEGRSSAGRPPHALVAFGFGGKLIVMKETTSMPASFNSGNQGNSSSTVSVLNLLEVVFDKVDPSSVTNGSALSYFHALCRQPVPGPLVGGSAASKDVNKWLDEMIARYESSSSEFHRGDTRKLLISLLKILSQHYGKLRSPFASDPSQEETDGPEMAVTKLFSSCKRSTVHMGDYGSLVPCMKSIPSESQMQAVAQEVQSLLVSGRRKEALHCAQAGQLWGPAIILALQLGDKFYVDTVKKMAHFHFVSGSPLRTLCLLIAGQPADVFNVENNVNSDYGASHQPVEPGPNMLDDWEENLAIITANRTEGDVLVITHLGDCLWKEKNEVAAAHSCYLVAELNIDSYSESARLCLIGADHLKCPRTFASPEAIQRTEVYEYAKVLGNSQYILLSFQPYKLIYAYMLVEVGKVSDSLRYCQASIKVLKASGRAPELEVWKQLFSSLEERIRTHQQGGYGTNLAPGKIVGKIFTSLDKSISRMMGTPSAPLPPLPHGSFSDKESHSIPAAAKFVNSQSVMVMPSLIPSASMQSMTEIAEDSGGTGRKIAHNRSVSEPDFGRSSKQMVHRAVHQDPAVLDLVG

SEQ ID NO: 180880 - protein, 946 aa, Zea Mays
MASSSFAPDDQTDADFFDKLVDDDDPATDLPRAVSATSVADDPPPVLEPQVPAPAPSEGSGKGGAGVHTAVKQVQWASFGGGVDDGPDPFADLSGGAGDDDGFLGNTAGTQAALDHAAEVTDQDFFAGSSSSDQQNVHGQHDQGRGSAAVDSADPKSLEAMYPGWKYDEASQQWYQLDGSVNSTGNAAQALDDSAQNAHHHQQQLDAAYLHNSAHAGLGTIAEESTTAAGAANSWGQGAAPEYPPSMLFYAEYPGWYFDTNTQQWHSLESYQQAAVQAGTSSTGQTVVASDDVVATSSLTGHNAGQTEDLVAHNQVTQRNSSSNSFTHQNQWQTTDALGNNVQSESLASSFYGFEQHMNAETTSSSTSQQTGFHTAETITDHYGGRKAFESSSLQSGYSSSDSQQSSHKAFEPSTGYQAGYNGFEPASGHHTAFEPAMHNQSGYKAFDPSTGHHSASWGFMPSTGQQTDFKGSRASTVHQAGYEEFEISRGYNTNFKAFESSSSQNAGYNGSQPSSGHQPNYMGFDTSANHHGYTDVNGVASTQGFVPMQTTYQGQKQANATSQGHLSNSYLGTDNSMNFNQQQFLGANASNLQFGHSPHEGRSSAGRPPHALVAFGFGGKLIVMKETTSMPASFNSGNQGNSSSTVSVLNLLEVVFDKVDPSSVTNGSALSYFHALCRQPVPGPLVGGSAASKDVNKWLDEMIARYESSSSEFHRGDTRKLLISLLKILSQHYGKLRSPFASDPSQEETDGPEMAVTKLFSSCKRSTVHMGDYGSLVPCMKSIPSESQMQAVAQEVQSLLVSGRRKEALHCAQAGQLWGPAIILALQLGDKFYVDTVKKMAHFHFVSGSPLRTLCLLIAGQPADVFNVENNVNSDYGASHQPVEPGPNMLDDWEENLAIITANRTEGDVLVITHLGDCLWKEKNECKVMPHWCRPFEVSSNICQP

SEQ ID NO: 180881 - protein, 754 aa, Zea Mays
MASSSFAPDDQTDADFFDKLVDDDDPATDLPRAVSATSVADDPPPVLEPQVPAPAPSEGSGKGGAGVHTAVKQVQWASFGGGVDDGPDPFADLSGGAGDDDGFLGNTAGTQAALDHAAEVTDQDFFAGSSSSDQQNVHGQHDQGRGSAAVDSADPKSLEAMYPGWKYDEASQQWYQLDGSVNSTGNAAQALDDSAQNAHHHQQQLDAAYLHNSAHAGLGTIAEESTTAAGAANSWGQGAAPEYPPSMLFYAEYPGWYFDTNTQQWHSLESYQQAAVQAGTSSTGQTVVASDDVVATSSLTGHNAGQTEDLVAHNQVTQRNSSSNSFTHQNQWQTTDALGNNVQSESLASSFYGFEQHMNAETTSSSTSQQTGFHTAETITDHYGGRKAFESSSLQSGYSSSDSQQSSHKAFEPSTGYQAGYNGFEPASGHHTAFEPAMHNQSGYKAFDPSTGHHSASWGFMPSTGQQTDFKGSRASTVHQAGYEEFEISRGYNTNFKAFESSSSQNAGYNGSQPSSGHQPNYMGFDTSANHHGYTDVNGVASTQGFVPMQTTYQGQKQANATSQGHLSNSYLGTDNSMNFNQQQFLGANASNLQFGHSPHEGRSSAGRPPHALVAFGFGGKLIVMKETTSMPASFNSGNQGNSSSTVSVLNLLEVVFDKVDPSSVTNGSALSYFHALCRQPVPGPLVGGSAASKDVNKWLDEMIARYESSSSEFHRGDTRKLLISLLKILSQHYGKLRSPFASDPSQEMVQKWQ

SEQ ID NO: 180882 - protein, 933 aa, Zea Mays
MASSSFAPDDQTDADFFDKLVDDDDPATDLPRAVSATSVADDPPPVLEPQVPAPAPSEGSGKGGAGVHTAVKQVQWASFGGGVDDGPDPFADLSGGAGDDDGFLGNTAGTQAALDHAAEVTDQDFFAGSSSSDQQNVHGQHDQGRGSAAVDSADPKSLEAMYPGWKYDEASQQWYQLDGSVNSTGNAAQALDDSAQNAHHHQQQLDAAYLHNSAHAGLGTIAEESTTAAGAANSWGQGAAPEYPPSMLFYAEYPGWYFDTNTQQWHSLESYQQAAVQAGTSSTGQTVVASDDVVATSSLTGHNAGQTEDLVAHNQVTQRNSSSNSFTHQNQWQTTDALGNNVQSESLASSFYGFEQHMNAETTSSSTSQQTGFHTAETITDHYGGRKAFESSSLQSGYSSSDSQQSSHKAFEPSTGYQAGYNGFEPASGHHTAFEPAMHNQSGYKAFDPSTGHHSASWGFMPSTGQQTDFKGSRASTVHQAGYEEFEISRGYNTNFKAFESSSSQNAGYNGSQPSSGHQPNYMGFDTSANHHGYTDVNGVASTQGFVPMQTTYQGQKQANATSQGHLSNSYLGTDNSMNFNQQQFLGANASNLQFGHSPHEGRSSAGRPPHALVAFGFGGKLIVMKETTSMPASFNSGNQGNSSSTVSVLNLLEVVFDKVDPSSVTNGSALSYFHALCRQPVPGPLVGGSAASKDVNKWLDEMIARYESSSSEFHRGDTRKLLISLLKILSQHYGKLRSPFASDPSQEETDGPEMAVTKLFSSCKRSTVHMGDYGSLVPCMKSIPSESQMQAVAQEVQSLLVSGRRKEALHCAQAGQLWGPAIILALQLGDKFYVDTVKKMAHFHFVSGSPLRTLCLLIAGQPADVFNVENNVNSDYGASHQPVEPGPNMLDDWEENLAIITANRTEGDVLVITHLGDCLWKEKNEQLPIHAI

SEQ ID NO: 180883 - protein, 268 aa, Zea Mays
MIRYSDAIGLALKPSFFTLLLLLLVLIHRLLHCWKENQMPMKLQQQESAVEQQQGGEEKLPENLLLYFEQILHDDPLIDEVGFLHPTQFCSLDCARDGDSASQSTEFHCARYFWCRDHKLAISAEILPELYHAARDAYYNARDAPLSRTNLMRHTKALLILCPDLLTAWNSRKMVLSALYDFTKLKDELQLCALILSYSPKNESTWSHRRWVIKQVAEQHQDMLELIGNESILVKEIAEKSKMNYRAWRHRCWLIPYMTRKQLSISVF

SEQ ID NO: 180884 - protein, 172 aa, Zea Mays
MRHTKALLILCPDLLTAWNSRKMVLSALYDFTKLKDELQLCALILSYSPKNESTWSHRWVIKQVAEQHQDMLELIGNESILVKEIAEKSKMNYRAWRHRCWLIPYMTRKQVLDELNESTRWSELHVADNCCFHYRRSLLLALLDNFFGNEEDSLSWESDICLLWKCCKVDCI

SEQ ID NO: 180885 - protein, 222 aa, Zea Mays
MIRYSDAIGLALKPSFFTLLLLLLVLIHRLLHCWKENQMPMKLQQQESAVEQQQGGEEKLPENLLLYFEQILHDDPLIDEVGFLHPTQFCSLDCARDGDSASQSTEFHCARYFWCRDHKLAISAEILPELYHAARDAYYNARDAPLSRTNLMRHTKALLILCPDLLTAWNSRKMVLSALYDFTKLKDELQLCALILSYSPKNESTWSHRQFPSIWTLELILI

SEQ ID NO: 180886 - protein, 125 aa, Zea Mays
MEFEITVCHRRWVIKQVAEQHQDMLELIGNESILVKEIAEKSKMNYRAWRHRCWLIPYMTRKQVLDELNESTRWSELHVADNCCFHYRRSLLLALLDNFFGNEEDSLSWESDICLLWKCCKVDCI

SEQ ID NO: 180887 - protein, 255 aa, Zea Mays
MSGDGDGDVRGLEATAAAAAEATRELQEAAAALVATRAAEEDALRRSVVALDTDVRRLQGSLHLDPSTLDKMPMKLQQQESAVEQQQGGEEKLPENLLLYFEQILHDDPLIDEVGFLHPTQFCSLDCARDGDSASQSTEFHCARYFWCRDHKLAISAEILPELYHAARDAYYNARDAPLSRTNLMRHTKALLILCPDLLTAWNSRKMVLSALYDFTKLKDELQLCALILSYSPKNESTWSHRQFPSIWTLELILI

SEQ ID NO: 180888 - protein, 396 aa, Zea Mays
MDMISSCPICNIQVLTVELEWHANSHFDDDQLQRDIELAHQIAVAESSTDTMNDPKHYSGSFTSDSNTIGASSSHSGYSHHYSELLDEQISCMVRAQIRSKVQEVEGGIMSLLRSCLESEAGSSKSMISGYIDHHQSLSSEDKGWGCGWRNIQMLSSHLLKQRQEAREVLFGGSGFVPDIPSLQRWLEIAWDKKFDTIGSSHFHNKVYGAKKWIGTTECATLFRSFGLRAKIVDFDSTESSDLQSKNSSHAASQVRGLMDKFLIKSNSPKSSSEFCQEDAESMRGQHALVDWVWNYFACERSDRLTTQRATVSNKTPLYFQHQGHSRTIVGIQKEMVHRGSQEQYTLLILDPGHRTADLERSLRSKNGWQRLVKRGVHTLRKPQYQFRRDGATEDY

SEQ ID NO: 180889 - protein, 391 aa, Zea Mays
MDMISSCPICNIQVLTVELEWHANSHFDDDQLQRDIELAHQIAVAESSTDTMNDPKHYSGSFTSDSNTIGASSSHSGYSHHYSELLDEQISCMVRAQIRSKVQEVEGGIMSLLRSCLESEAGSSKSMISGYIDHHQSLSSEDKGWGCGWRNIQMLSSHLLKQRQEAREVLFGGSGFVPDIPSLQRWLEIAWDKKFDTIGSSHFHNKVYGAKKWIGTTECATLFRSFGLRAKIVDFDSTESSDLQSKNSSHAASQVRGLMDKFLIKSNSPKSSSEFCQEDAESMRGQHALVDWVWNYFACERSDRLTTQRATVSNKTPLYFQHQGHSRTIVGIQKEMVHRGSQEQYTLLILDPGHRTADLERSLRSKNGWQRLVKRGVHTLRKPQYQKRWSN

SEQ ID NO: 180890 - protein, 377 aa, Zea Mays
MDMISSCPICNIQVLTVELEWHANSHFDDDQLQRDIELAHQIAVAESSTDTMNDPKHYSGSFTSDSNTIGASSSHSGYSHHYSELLDEQISCMVRAQIRSKVQEVEGGIMSLLRSCLESEAGSSKSMISGYIDHHQSLSSEDKGWGCGWRNIQMLSSHLLKQRQEAREVLFGGSGFVPDIPSLQRWLEIAWDKKFDTIGSSHFHNKVYGAKKWIGTTECATLFRSFGLRAKIVDFDSTESSDLQSKNSSHAASQVRGLMDKFLIKSNSPKSSSEFCQEDAESMRGQHALVDWVWNYFACERSDRLTTQRATVSNKTPLYFQHQGHSRTIVGIQKEMVHRGSQEQYTLLILDPGHVSYSYHSFYWSELFPLYCHLAVI

SEQ ID NO: 180891 - protein, 268 aa, Zea Mays
MSGDGDARGLEAAAATAAEAARELREAAAALVATRAAEEDALRRRAVALEADVRRLQASLHALDPSTLDKVEEELERARVAITDSDVASFLPSKRNGKFLKTFLGPVNVRVARKEDKLKIKDEYNNYRDRTAYKFLLFPSILLLLRWWIWDGCLPALAVQIYQAWLLYLYTSFALRENVLIANGSDIRPWWIYHHYLAMLMALISLTWEIKGQPDCSSKQRGVQLFLRWAIMQGIAMHLQNRYQRQRLRTRIALGKVRPCLNLSIGNF

SEQ ID NO: 180892 - protein, 146 aa, Zea Mays
MGLPLDPSPWHGSAPASHGCRPPLPDGWHLHSLQQGRFPLLPALPPMANPCCGARPGSSPFHSRHPPHLLQIGEEEPQVLRREEIHVACARCLIEWMNQRSLLLLRIPSLFSVGRQSLNTNQRRCSLHRGRWSAARGRTVCDLARG

SEQ ID NO: 180893 - protein, 119 aa, Zea Mays
MGLPLDPSPWHGSAPASHGCRPPLPDGWHLHSLQQGRFPLLPALPPMANPCCGARPGSSPFHSRHPPHLLQIGEEEPQVLRREEIHVACARCLIEWMNQRSLLLLRIPSLFSVGKLIHY

SEQ ID NO: 180894 - protein, 607 aa, Zea Mays
MPSPSLLLRAPPLCPSPSHPPRRFAPPSLITSSPPARLLPLRLPSAASRHTPRAGDTRVPDDLIPIARCYEGRLARLELAGAARREQAVAAAAAAGGGASAEDHLAAGSDAMVVEAFLPGPHGGGTTASSTRVILQAKEVKDKASKIEKQFGSDFFFANQPDSESMLAMAFKQVVIQRLSNFRLEVFPPGSERDFQDFGKPRKGSLDCSISSSDGKLLSSLAEAIFSCVIEDVRKNHFGSIGSFFQKRQLNCSMDSSVCIHKTSEAEVVKNAKRCLEIVSLMKSSHEVRETKNGWWPPPHHESLVKIGGPELVLWANEYIPTYKLQINANALENSNLEVEGLYELESNRREVLLTHSQLVELGNVLDMYFEDQFTLPGKTFHPYWNPDLSKIKKNNLCWPQSFRDKRLFKESSNASLSQNYCSDIKSLYNSEVQAYCMSLVKKMKDSYGCPGDVMVDSHIGAWVGELPNCFKAISSEDAAASGSFQYPDTLSQENQSQPVPVNTKMSHLEQNDRTQEFPLQNIASFQVVMSEEGKVVGFQPTNLPAVNHWATNPLATLLYQGRSLSPGIIEPRLKISRPAKAAPIELLMSVNQDSFFALARPVEDPR

SEQ ID NO: 180895 - protein, 471 aa, Zea Mays
MPSPSLLLRAPPLCPSPSHPPRRFAPPSLITSSPPARLLPLRLPSAASRHTPRAGDTRVPDDLIPIARCYEGRLARLELAGAARREQAVAAAAAAGGGASAEDHLAAGSDAMVVEAFLPGPHGGGTTASSTRVILQAKEVKDKASKIEKQFGSDFFFANQPDSESMLAMAFKQVVIQRLSNFRLEVFPPGSERDFQDFGKPRKGSLDCSISSSDGKLLSSLAEAIFSCVIEDVRKNHFGSIGSFFQKRQLNCSMDSSVCIHKTSEAEVVKNAKRCLEIVSLMKSSHEVRETKNGWWPPPHHESLVKIGGPELVLWANEYIPTYKLQINANALENSNLEVEGLYELESNRREVLLTHSQLVELGNVLDMYFEDQFTLPGKTFHPYWNPDLSKIKKNNGYLNNLFTFLAGTCIFLFVTIFAQLCWPQSFRDKRLFKESSNASLSQNYCSDIKSLYNSEVLSYLVMGEFVVCPR

SEQ ID NO: 180896 - protein, 618 aa, Zea Mays
MPSPSLLLRAPPLCPSPSHPPRRFAPPSLITSSPPARLLPLRLPSAASRHTPRAGDTRVPDDLIPIARCYEGRLARLELAGAARREQAVAAAAAAGGGASAEDHLAAGSDAMVVEAFLPGPHGGGTTASSTRVILQAKEVKDKASKIEKQFGSDFFFANQPDSESMLAMAFKQVVIQRLSNFRLEVFPPGSERDFQDFGKPRKGSLDCSISSSDGKLLSSLAEAIFSCVIEDVRKNHFGSIGSFFQKRQLNCSMDSSVCIHKTSEAEVVKNAKRCLEIVSLMKSSHEVRETKNGWWPPPHHESLVKIGGPELVLWANEYIPTYKLQINANALENSNLEVEGLYELESNRREVLLTHSQLVELGNVLDMYFEDQFTLPGKTFHPYWNPDLSKIKKNNLCWPQSFRDKRLFKESSNASLSQNYCSDIKSLYNSEVQAYCMSLVKKMKDSYGCPGDVMVDSHIGAWVGELPNCFKAISSEDAAASGSFQYPDTLSQENQSQPVPVNTKMSHLEQNDRTQEFPLQNIASFQVVMSEEGKVVGFQPTNLPAVNHWATNPLATLLYQGRSLSPGIIEPRLKISRPAKAAPIELLMSVNQDSFFALARPVEDPSELPQIDSTARL

SEQ ID NO: 180897 - protein, 437 aa, Zea Mays
MDTPWVMVMAPRLVQSLFAAFGDLYLYKLSKLIFNGQVAKWTLFSQLVNWFMFFCITRTLSNSLETVLTVAGLYYWFAAIESSKATSIVSKQHAACEQSIPSRKVALLIAALSCAIRPTSAVTWLYVGLLDFIQMKSKCRFILLDVIPVGAIVLAVTTLLDWWMYGSWVIVPLNFLKFNLLSSGGDYYGTHVFHWYFTQGFPSMIWTFLPFALCGIVKSQEWRLSGLIAWVLGVYSILGHKEFRFVLPVLPLALMFSGYCLASMSQSKGKNQHRKGSLSRLQLSVILLVITNVPMALYMSLFHQRGTEDVMYYLSKEAYDGRVRSVLFLMPCHSTPYYSTLHYNLPMRFLDCTPSDSKGTLDESDRFLTSPSEFVGDVFGNLSAFSHIVLFESEERHVLQLLLHNSFLEMRRFFHSHFKIDRDLQSAVVVYSWRDVL

SEQ ID NO: 180898 - protein, 382 aa, Zea Mays
MVKLLSGRLETVLTVAGLYYWFAAIESSKATSIVSKQHAACEQSIPSRKVALLIAALSCAIRPTSAVTWLYVGLLDFIQMKSKCRFILLDVIPVGAIVLAVTTLLDWWMYGSWVIVPLNFLKFNLLSSGGDYYGTHVFHWYFTQGFPSMIWTFLPFALCGIVKSQEWRLSGLIAWVLGVYSILGHKEFRFVLPVLPLALMFSGYCLASMSQSKGKNQHRKGSLSRLQLSVILLVITNVPMALYMSLFHQRGTEDVMYYLSKEAYDGRVRSVLFLMPCHSTPYYSTLHYNLPMRFLDCTPSDSKGTLDESDRFLTSPSEFVGDVFGNLSAFSHIVLFESEERHVLQLLLHNSFLEMRRFFHSHFKIDRDLQSAVVVYSWRDVL

SEQ ID NO: 180899 - protein, 55 aa, Zea Mays
MFLHTNSDNWSVKAIRRKTTGTGRMRYMRHVPRRFKSNFREGTEAAPKKSAAAAN

SEQ ID NO: 180900 - protein, 140 aa, Zea Mays
MILVEMSEYKNVVGGRLKLKGKALDVKEGGVKKKKKKHQLEESSQIEHDELHKGGNSGLPADHNNELIEAGKVGDEERNLHPDYDHLTPAERRYIDQKQKIDMQKLAKVANKSHRDRIQDFNQYLANLSEHYDIPKVGPG

SEQ ID NO: 180901 - protein, 91 aa, Zea Mays
MEASDFPQGHVFCPHHHLTAVFFDVLLAQLRLLLSVNLFSHTLNSVSKQNDETGTPECYHVESTHMVFKFLWLLSMCTLYLSYPIHVCLVE

SEQ ID NO: 180902 - protein, 303 aa, Zea Mays
MKSKCCFILLDVIPVGAIVLAVTTLLDWWMYGSWVIVPLNFLKFNLLSSGGDYYGTHVFHWYFTQGFPSMIWTFLPFALCGIVKSQEWRLSGLIAWVLGVYSILGHKEFRFVLPVLPLALMFSGYCLASMSRSKGKNQHRKDSLSRMQPFVILLVITNVPMALYMSLFHQRGTEDAMYYLSKEAHDGRVRSVLFLMPCHSTPYYSTLHYNLPMRFLDCTPSDSKGTLDESDRFLTSPSEFVGEVFGNLSAFSHIVIFESEERHVLQLLLHNSFLEMRRFFHSHFKVDRDLQSAVVVYSRRNVL

SEQ ID NO: 180903 - protein, 458 aa, Zea Mays
MNLITKFARETGDIQTLSDVDIKIIALAYMLEAEIHGTSHLREHPPPLHEVNVRKLSEAQMPGWGSNVPNLKEWEELDQMSEAGGDINSRILPLKDIESQDILMCDTNSLCGAQEDTELQPSKKDAPVAWEDDENNVGWMPAVSRSMHRRYLQRKARRDALKESGQSFETSSVVPSIDDDKVLSENSGLEHGLTSTDGLSSVTEIISARSDDFEHQAENDTEIAGEHLHSDQRAYGDDADACTKELENLDIEGEDEGGGDAHFIVDESSEQSWTLRSLSESTVACVTSDYAMQNVILLIGLRLIAPGGMQIRQMHRWVLRCHACYKVTQEVGKIFCPKCGNGGTLRKVSVTVGENGITMASRRPRVTLRGTKFSLPMPQGGRDAITKNPILREDQLPQKVLHPKLKKSNKDDDFLGVVDIFSHGGDKKAPLKPPVRKALAMFSGKRNPNDNHFSRKKY

SEQ ID NO: 180904 - protein, 407 aa, Zea Mays
MQAFLQGKPRRENQSAEILPSEVDEKMTATDNKNYVDDGGNVLPSKLEDITESDWTRLENYASTGEKVEVELINCSAKGFVVSLDSLIGFLPYRNLATKWKFLAFETWLRRKGGDPSLYKQSLGLEDSFEVNDTNLEPESSSVSKIAGEDQESLSSKPKFEDLIRAYNQEKSKFLSSFIGQRLRVSVVLADRNSKRIFFSMKPKESEEMIQKKKNLMARLNVGDIIQCTIKRFVYFGIFVEVEGVPALIQQWEVSWDDTLDPAVSYKIGQVVDAKVIQLDYNNIRIFLSLKDVKPNPSVGALESVVGEDLSFGGALEPVQADFEWPEVDALMEEMRRTEGVRDVYKGRFFQSPGLAPTFQVYMAPVVGPKYKLLARYGNSVQEVMVETALGKEELKEAVLMCTNRVS

SEQ ID NO: 180905 - protein, 445 aa, Zea Mays
MSMNHLGSMMILLQPSAQTFIQETSTAGPVDNQSATSNNFSMQAFLQGKPRRENQSAEILPSEVDEKMTATDNKNYVDDGGNVLPSKLEDITESDWTRLENYASTGEKVEVELINCSAKGFVVSLDSLIGFLPYRNLATKWKFLAFETWLRRKGGDPSLYKQSLGLEDSFEVNDTNLEPESSSVSKIAGEDQESLSSKPKFEDLIRAYNQEKSKFLSSFIGQRLRVSVVLADRNSKRIFFSMKPKESEEMIQKKKNLMARLNVGDIIQCTIKRFVYFGIFVEVEGVPALIQQWEVSWDDTLDPAVSYKIGQVVDAKVIQLDYNNIRIFLSLKDVKPNPSVGALESVVGEDLSFGGALEPVQADFEVDALMEEMRRTEGVRDVYKGRFFQSPGLAPTFQVYMAPVVGPKYKLLARYGNSVQEVMVETALGKEELKEAVLMCTNRVS

SEQ ID NO: 180906 - protein, 767 aa, Zea Mays
MEAYAGAAPAAGVFAGYSTAATRPFIIFLRRRGSPRSGARRVRLVRAPPPPRAAEDLPPLDKWDIMELDFGRFLGEDPKLTLAKILLKKSDPDASSLDVEKLIAKNRDKLDDILRDCMEANKKGQGFDTSESGPSLNTTRPTISKPTESKSSLNISKPSMGRPIQGGTPLTLLRPAGSKPKQDGPSLAQSRPVGSKASEDAPLFILSRPIGSNPKLRGTPVQDSWPSKESLAAATEFSEAGSISRTGEVDVALRKPTVHQSQDDDLKSKLKIKPNVNLKMRKDMNEDLRNISLLQKPDVAKDTVNPEQDHASASPATVSATEDNSELEAENALDEKIATENVHESSGLDDDSAAGLQPSAQTFIQETSTAGPVDNQSATSNNFSMQAFLQGKPRRENQSAEILPSEVDEKMTATDNKNYVDDGGNVLPSKLEDITESDWTRLENYASTGEKVEVELINCSAKGFVVSLDSLIGFLPYRNLATKWKFLAFETWLRRKGGDPSLYKQSLGLEDSFEVNDTNLEPESSSVSKIAGEDQESLSSKPKFEDLIRAYNQEKSKFLSSFIGQRLRVSVVLADRNSKRIFFSMKPKESEEMIQKKKNLMARLNVGDIIQCTIKRFVYFGIFVEVEGVPALIQQWEVSWDDTLDPAVSYKIGQPNPSVGALESVVGEDLSFGGALEPVQADFEWPEVDALMEEMRRTEGVRDVYKGRFFQSPGLAPTFQVYMAPVVGPKYKLLARYGNSVQEVMVETALGKEELKEAVLMCTNRVS

SEQ ID NO: 180907 - protein, 235 aa, Zea Mays
MDDTTKVVRHKGTAGEPCRTRTRTRTQRRQRSCADRHLNSRPNPHAGRCTEQQPPVLLSAAYHTRHASPPVYMAGELRHRRAPSEDEGVASSQRLDSAPAGNGKAGTSSGGGEGAEPRGGKRDALGWLEWCRGWMAIVGEFLFQRIAASHLANPLELPPLDGVSIVVTGATSGIGLEIARQLALAGAHVVMAVRRPKVAQELIQKWQNENSETGRPLNAENPNIFRRMDMKNTCK

SEQ ID NO: 180908 - protein, 1089 aa, Zea Mays
MPAGDMASRASAVLLVTALCAAALSRSRIFGAAAQTQPCGAGDLAALRGFSAGLDAGVDGWPTAANASDDACCDWPGVTCGEAAAVVGLALPNRTLRGQVAASLAGLVALRVLDLSGNALRGALPAGLLRLRSLEVLDVSANAFAGGLLAAAAGAIDLPAARVFNVSYNAFNGTHPVLPGARNLSAYDVSGNAFGGPVHAAALCAESPALRVLRLSLNRLSGAFPAGFGQCRSLIELSLDGNGIHGALPDDLFGVTSLQFLSLHTNSISGGLSPRLRNLSRLVRLDFSFNAFSGPLPDVFDALAGLQELSAPSNQLSGELPATISRCRLLRVLNLRNNSFVGDIGLDFRALRGLVYLDLGANGFTGPIPASLPECRGMAALNLGRNKLTGEIPASFANFSALSFLSLTGNSFSNVSSALQTLQGLPNLTSLVLTRNFHGGEEMPSDDAGIAGFPSIQVLVIANCELHGTIPSWIAGLRKLRVLDLSWNRLAGPIPPWLGQFDRLFYLDISNNSLQGEIPGSLAQMPGLVAAGAHGDGGDDEAQVQDFPFFMRRNTSVQGRQYNQVDSFPPSLVLGHNNLTGGVPAALGALTRVHIVDLSWNRLSGPIPPDLSGMTSLESLDMSNNALSGVIPASLTQLSFLSHFDVSFNNLSGEVPVGGQFSTFSRGDFQGNPLLCGIHVARCTRKDEPPRTVDGGGGGKQERSAGTGVAAAIGVATALLVAVAAAVTWRVWSKRQEDNARVAADDDDDDDGSLESAAKSTLVLLFPAGDEEDSDEGERAMTLEDVMKATRNFDASCIVGCGGFGMVYRATLADGSEVAVKRLSGDFWQMEREFRAEVETLSRVRHRNLVPLQGYCRAGKDRLLIYPYMENGSLDHWLHERGGGALAWPARLGIARGAARGLAHLHASSEPRVLHRDIKSSNILLDARLEPKLADFGLARLVLPTDTHVTTDLVGTLGYIPPEYGSSSVATYRGDVYSLGVVLLELVTGRRPVDMARPVGGGRDVTSWAVRMRREARGDEVIDASVDERKHREEAAMVLDVACACVNDNPKSRPTARQVVEWLEAIAASASLAPRVTDTVHTVNTCNWR

SEQ ID NO: 180909 - protein, 102 aa, Zea Mays
MAMAAPPPTALCARRFRPHHFAYSSPATLRLPTASSSSQLRRRRRLAVSPRADAATGTGDVEALRAGVSVYKPRSYDVLVTDAARSLACAIDDGKTRLEIEF

SEQ ID NO: 180910 - protein, 97 aa, Zea Mays
MDKEIRTRLRVVDSIKRPLRIYYDDEPAVFFSHNNKSSGSAKYIDIKCYIVKETILDHTIQVEHIRTHQMLVDPLTKGLPPNVFSKHAAGMRLREYL

SEQ ID NO: 180911 - protein, 120 aa, Zea Mays
MPSCHLTCLTILKSCIHKMKYLAFRSHKTLQQHLWRNYLPVATKETRYETSCFLAMYNLLETSYFFHAYNLIKSIQLALCVLTYLDMLQYIKIPLVLLNSKLPYTHIVMYLLHSNTTNIN

SEQ ID NO: 180912 - protein, 287 aa, Zea Mays
MEKLSLVLPETSPYVPRHFGRCAVVGNSGDLLKTKFGDEIDSYDAVFRENGAPTQNYTEYVGRKSTFRLLNRGSAKALDKVVELDETKKEALIVKTTIHDIMNQMIRELPITNPVYLMLGTSFGSSAKGTGLKALEFALSICDSVDMYGFTVDPGYKEWTRYFSEVRKGHTPLHGRAYYQMMECLGLVKIHSPMRGDPGRTVRWLPTKATIEAARVASEKLLKRPGAGSDDPLGTCTMIKKRRKGKAPNRSGLRDAAMKHLEDMKGAARYPLERNAGGGYLCMINDR

SEQ ID NO: 180913 - protein, 297 aa, Zea Mays
MLCQMAGRNMHGEESTKESFCGNKCQNRSLCMEKLSLVLPETSPYVPRHFGRCAVVGNSGDLLKTKFGDEIDSYDAVFRENGAPTQNYTEYVGRKSTFRLLNRGSAKALDKVVELDETKKEALIVKTTIHDIMNQMIRELPITNPVYLMLGTSFGSSAKGTGLKALEFALSICDSVDMYGFTVDPGYKEWTRYFSELVKIHSPMRGDPGRTVRWLPTKATIEAARVASEKLLKRPGAGSDDPLGTCTMIKKRRKGKAPNRSGLRDAAMKHLEDMKGAARYPLERNAGGGYLCMINDR

SEQ ID NO: 180914 - protein, 545 aa, Zea Mays
MYSLPGATMSAAPARVISSSSSSSFVEPLLLAAASSAAANSHHQVRQRGHLVRTLAASSSSNTLLRSDFDLQEGLTTDVKRMLRQRQKKSGGGREMLVTIDNLKRLCIDHFFEEEIEGAMATGACTRLLHSDDLFDATLAFRLLREAGHDVSAKEDVLRRFIDGVSGDFKLSLNNDVRGLLGLHDMSHLDVGGEEAALLHRAKEFSSSHLASAVRHHLRYLQSLPSSCRDAAVERLAVAEFQLNKSLHQREMREIKRWWMDLGLAEEIPVVRDQVMKWYMWSMAALQGSSFSRYRVYVVDDIFDLVGTLEELSAFTEAVKMWDTAAADSLPSCMRSCYKALHTVTNEIAEIAHKEHGSNPINRLRKAWVVLFDGFMVEARWLATDQVPTAEDYLRNGVVTSGVPLTFLHIFSMLGYDDPSTEEEEEAIIDHMPSIISCPAKILRLWDDMGSAEDEAQEGFDGSYRDFYLMENPSRSPGEAEAHMRGLIAREWVELNRECFCRRTFPSDIAQVCLNTARMVSVMYSYNKEQRLLVLEDYAAMMLVL

SEQ ID NO: 180915 - protein, 64 aa, Zea Mays
MFLFRYIWFVSYDTILFMQKFQELCAEAVSVHQLEALDRWEQHVRSAYQSMPVHLVIRMLSLND

SEQ ID NO: 180916 - protein, 72 aa, Zea Mays
MIRIRFKTKTLLIILYINITNKNIHIKQQVNKKIHVTLKFSSNMFKYGRAINMSWLLTIRHFTELLDHILIV

SEQ ID NO: 180917 - protein, 1067 aa, Zea Mays
MPASSSPAMASQHAPPRRELDLDAFLPSSPTSSGASDADPADDDHRRAVDDLLRLLSSSDSDSDSEESSRIPSTSIQTLSRVQAPAPVAEPSPSPSPSASPSPRRSASALPSETLSSLVARTFSSNGASSSSKPLPSLFRGVRPSPKPGAALAAAAAASRAVLTPHAAAIKSRRSVSAPVEKVLEEEGSGSEGSKEFLPTGSLEAEVEEKGDSEAVADATKQTAGGNVGAELGEDKQAEVGGEENAEAIKLVEASPLDALAAEDSSGHEQGNDANLAETDQVGNQIEAVYEENEDDQTGGDNHVQSGQGMDLIAIALEESSDDEHEFERSDSILQEQVESGSLIDKVIEDRVEQLEASRKAENTEKKLKVSMKPLEWAEELEKRQASSGQHWEEGAAAQPMQLEGIGKGPPAIGYMQIEMDNPVTRVMSSPSFRSDHGSPQVLAVHRSYIAMGTSKGAVIVIPSKYSIHQADDTDAKMLFFWNQGEKTQSPVTAMCFNQQGDLLLVGYGDGHMTIWDVQKSAAAKVIYGEHTAPVVHACFIRQSKAITGDSKGVVLLHTFSIIPVINRLTVKGTQRLFDGNTGIVLSACPLVMDESFGFSNSSAQGNQTTSSSGGLGSMMGGVVGGVVGVDSGWKFFNEGSSPMEDGVVVMFIMHQHALVVRLRTNIDHVDHIETFSRPDGAREGSIAYAAWKYTSYLNESSSVDEERVSWLALAWDRQVQVAKFVKSKIFKHKEWKLDSSAVGVAWLDDQMLVVLNLRGQLCLFSKDGSELRRTTFVPDGLLFDDTILHHAHFFNRFGNPERHFNSSVAVRGATVYILGPSFLTVSRLLPWKERIEALKRAGDWMGALDMAMRLYDGQTQGVVDLPRTVDSIRDAIMPYLVELLLSYISYVFEYISIALPNHTGKGGESGVLIEADRSLLTQRDEQYARVGGVAVEYCVHIGRNDILFDTVFSKFAAAESGGMFLEVLEPYILKDMLGSLPPEIMQALVEHYSGKGWLQRVEQCILHMDISSLDFNQVVRLCREHGLYGALIYLFNQGLNDFRTPLEELLSVVQNTNSKDDASSGI

SEQ ID NO: 180918 - protein, 665 aa, Zea Mays
MPASSSPAMASQHAPPRRELDLDAFLPSSPTSSGASDADPADDDHRRAVDDLLRLLSSSDSDSDSEESSRIPSTSIQTLSRVQAPAPVAEPSPSPSPSASPSPRRSASALPSETLSSLVARTFSSNGASSSSKPLPSLFRGVRPSPKPGAALAAAAAASRAVLTPHAAAIKSRRSVSAPVEKVLEEEGSGSEGSKEFLPTGSLEAEVEEKGDSEAVADATKQTAGGNVGAELGEDKQAEVGGEENAEAIKLVEASPLDALAAEDSSGHEQGNDANLAETDQVGNQIEAVYEENEDDQTGGDNHVQSGQGMDLIAIALEESSDDEHEFERSDSILQEQVESGSLIDKVIEDRVEQLEASRKAENTEKKLKVSMKPLEWAEELEKRQASSGQHWEEGAAAQPMQLEGIGKGPPAIGYMQIEMDNPVTRVMSSPSFRSDHGSPQVLAVHRSYIAMGTSKGAVIVIPSKYSIHQADDTDAKMLFFWNQGEKTQSPVTAMCFNQQGDLLLVGYGDGHMTIWDVQKSAAAKVIYGEHTAPVVHACFIRQSKAITGDSKGVVLLHTFSIIPVINRLTVKGTQRLFDGNTGIVLSACPLVMDESFGFSNSSAQGNQTTSSSGGLGSMMGGVVGGVVGVDSGWKFFNEGSSPMEDGVVVMFIMHQHALVTPYQY

SEQ ID NO: 180919 - protein, 807 aa, Zea Mays
MLVVLNLRGQLCLFSKDGSELRRTTFVPDGLLFDDTILHHAHFFNRFGNPERHFNSSVAVRGATVYILGPSFLTVSRLLPWKERIEALKRAGDWMGALDMAMRLYDGQTQGVVDLPRTVDSIRDAIMPYLVELLLSYISYVFEYISIALPNHTGKGGESGVLIEADRSLLTQRDEQYARVGGVAVEYCVHIGRNDILFDTVFSKFAAAESGGMFLEVLEPYILKDMLGSLPPEIMQALVEHYSGKGWLQRVEQCILHMDISSLDFNQVVRLCREHGLYGALIYLFNQGLNDFRTPLEELLSVVQNTNSKDDASSGYRMLVYLKYCFQGLAFPPGHGIIPQSRLHSVREELLQFLLEESKPLTSEVFKGFNASCGKCLNICYLLWLDTEATLEVIKCAFVQDNFESRDELPSTVNTSASDNEDGIDAGRPEGQNAMVQNVVDAIIDIVGLENDVIRSVMGRTESELWPSEKDFGYLMEFVSFFVSHKRANASKRVVMHILTYLISSYDDTRTRIQKEKEVLQLFNAVPRNDWNSDFVLNLCSDAHFYQACGLIFTARNQNLAALDSYMKDKEEPFHAFIFIDKKLLELVDDEALSFHTTVISRFPELVKLSRECAFVLAIDHFCDKIQQILAELRSDRHSLFLFLKTAIEVHLSGKLDFSKLELRNKQTVELQYSSTEVEAYQQRLSNLSKLCHNPVYIDDELVELYLELLCQYERRSVLKFLETFDSYRLERCLHLCLDYGVTDAAAFLQERVGDVGSALDLILAGLDEKISLFISSVESTFSGVASKSIAEIKQPDIVLEMSSSSA

SEQ ID NO: 180920 - protein, 748 aa, Zea Mays
MGALDMAMRLYDGQTQGVVDLPRTVDSIRDAIMPYLVELLLSYISYVFEYISIALPNHTGKGGESGVLIEADRSLLTQRDEQYARVGGVAVEYCVHIGRNDILFDTVFSKFAAAESGGMFLEVLEPYILKDMLGSLPPEIMQALVEHYSGKGWLQRVEQCILHMDISSLDFNQVVRLCREHGLYGALIYLFNQGLNDFRTPLEELLSVVQNTNSKDDASSGYRMLVYLKYCFQGLAFPPGHGIIPQSRLHSVREELLQFLLEESKPLTSEVFKGFNASCGKCLNICYLLWLDTEATLEVIKCAFVQDNFESRDELPSTVNTSASDNEDGIDAGRPEGQNAMVQNVVDAIIDIVGLENDVIRSVMGRTESELWPSEKDFGYLMEFVSFFVSHKRANASKRVVMHILTYLISSYDDTRTRIQKEKEVLQLFNAVPRNDWNSDFVLNLCSDAHFYQACGLIFTARNQNLAALDSYMKDKEEPFHAFIFIDKKLLELVDDEALSFHTTVISRFPELVKLSRECAFVLAIDHFCDKIQQILAELRSDRHSLFLFLKTAIEVHLSGKLDFSKLELRNKQTVELQYSSTEVEAYQQRLSNLSKLCHNPVYIDDELVELYLELLCQYERRSVLKFLETFDSYRLERCLHLCLDYGVTDAAAFLQERVGDVGSALDLILAGLDEKISLFISSVESTFSGVASKSIAEIKQPDIVLEMSECLMHCMPPLDCAKGIHSAWTQRNLSPFGSNSLTPSQSH

SEQ ID NO: 180921 - protein, 735 aa, Zea Mays
MLVVLNLRGQLCLFSKDGSELRRTTFVPDGLLFDDTILHHAHFFNRFGNPERHFNSSVAVRGATVYILGPSFLTVSRLLPWKERIEALKRAGDWMGALDMAMRLYDGQTQGVVDLPRTVDSIRDAIMPYLVELLLSYISYVFEYISIALPNHTGKGGESGVLIEADRSLLTQRDEQYARVGGVAVEYCVHIGRNDILFDTVFSKFAAAESGGMFLEVLEPYILKDMLGSLPPEIMQALVEHYSGKGWLQRVEQCILHMDISSLDFNQVVRLCREHGLYGALIYLFNQGLNDFRTPLEELLSVVQNTNSKDDASSGYRMLVYLKYCFQGLAFPPGHGIIPQSRLHSVREELLQFLLEESKPLTSEVFKGFNASCGKCLNICYLLWLDTEATLEVIKCAFVQDNFESRDELPSTVNTSASDNEDGIDAGRPEGQNAMVQNVVDAIIDIVGLENDVIRSVMGRTESELWPSEKDFGYLMEFVSFFVSHKRANASKRVVMHILTYLISSYDDTRTRIQKEKEVLQLFNAVPRNDWNSDFVLNLCSDAHFYQACGLIFTARNQNLAALDSYMKDKEEPFHAFIFIDKKLLELVDDEALSFHTTVISRFPELVKLSRECAFVLAIDHFCDKIQQILAELRSDRHSLFLFLKTAIEVHLSGKLDFSKLELRNKQTVELQYSSTEVEAYQQRLSNLSKLCHNPVYIDDELVELYLELQIGTVLASLPRLWSYRCCCFLAREGW

SEQ ID NO: 180922 - protein, 1613 aa, Zea Mays
MPASSSPAMASQHAPPRRELDLDAFLPSSPTSSGASDADPADDDHRRAVDDLLRLLSSSDSDSDSEESSRIPSTSIQTLSRVQAPAPVAEPSPSPSPSASPSPRRSASALPSETLSSLVARTFSSNGASSSSKPLPSLFRGVRPSPKPGAALAAAAAASRAVLTPHAAAIKSRRSVSAPVEKVLEEEGSGSEGSKEFLPTGSLEAEVEEKGDSEAVADATKQTAGGNVGAELGEDKQAEVGGEENAEAIKLVEASPLDALAAEDSSGHEQGNDANLAETDQVGNQIEAVYEENEDDQTGGDNHVQSGQGMDLIAIALEESSDDEHEFERSDSILQEQVESGSLIDKVIEDRVEQLEASRKAENTEKKLKVSMKPLEWAEELEKRQASSGQHWEEGAAAQPMQLEGIGKGPPAIGYMQIEMDNPVTRVMSSPSFRSDHGSPQVLAVHRSYIAMGTSKGAVIVIPSKYSIHQADDTDAKMLFFWNQGEKTQSPVTAMCFNQQGDLLLVGYGDGHMTIWDVQKSAAAKVIYGEHTAPVVHACFIRQSKAITGDSKGVVLLHTFSIIPVINRLTVKGTQRLFDGNTGIVLSACPLVMDESFGFSNSSAQGNQTTSSSGGLGSMMGGVVGGVVGVDSGWKFFNEGSSPMEDGVVVMFIMHQHALVVRLRTNIDHVDHIETFSRPDGAREGSIAYAAWKYTSYLNESSSVDEERVSWLALAWDRQVQVAKFVKSKIFKHKEWKLDSSAVGVAWLDDQMLVVLNLRGQLCLFSKDGSELRRTTFVPDGLLFDDTILHHAHFFNRFGNPERHFNSSVAVRGATVYILGPSFLTVSRLLPWKERIEALKRAGDWMGALDMAMRLYDGQTQGVVDLPRTVDSIRDAIMPYLVELLLSYISYVFEYISIALPNHTGKGGESGVLIEADRSLLTQRDEQYARVGGVAVEYCVHIGRNDILFDTVFSKFAAAESGGMFLEVLEPYILKDMLGSLPPEIMQALVEHYSGKGWLQRVEQCILHMDISSLDFNQVVRLCREHGLYGALIYLFNQGLNDFRTPLEELLSVVQNTNSKDDASSGYRMLVYLKYCFQGLAFPPGHGIIPQSRLHSVREELLQFLLEESKPLTSEVFKGFNASCGKCLNICYLLWLDTEATLEVIKCAFVQDNFESRDELPSTVNTSASDNEDGIDAGRPEGQNAMVQNVVDAIIDIVGLENDVIRSVMGRTESELWPSEKDFGYLMEFVSFFVSHKRANASKRVVMHILTYLISSYDDTRTRIQKEKEVLQLFNAVPRNDWNSDFVLNLCSDAHFYQACGLIFTARNQNLAALDSYMKDKEEPFHAFIFIDKKLLELVDDEALSFHTTVISRFPELVKLSRECAFVLAIDHFCDKIQQILAELRSDRHSLFLFLKTAIEVHLSGKLDFSKLELRNKQTVELQYSSTEVEAYQQRLSNLSKLCHNPVYIDDELVELYLELLCQYERRSVLKFLETFDSYRLERCLHLCLDYGVTDAAAFLQERVGDVGSALDLILAGLDEKISLFISSVESTFSGVASKSIAEIKQPDIVLEMSEAHPVLDALHASIGLCQRNSQRLDPEESQSLWFQLLDSAIKKTVWDQGCKWKRCQVQLE

SEQ ID NO: 180923 - protein, 1593 aa, Zea Mays
MPASSSPAMASQHAPPRRELDLDAFLPSSPTSSGASDADPADDDHRRAVDDLLRLLSSSDSDSDSEESSRIPSTSIQTLSRVQAPAPVAEPSPSPSPSASPSPRRSASALPSETLSSLVARTFSSNGASSSSKPLPSLFRGVRPSPKPGAALAAAAAASRAVLTPHAAAIKSRRSVSAPVEKVLEEEGSGSEGSKEFLPTGSLEAEVEEKGDSEAVADATKQTAGGNVGAELGEDKQAEVGGEENAEAIKLVEASPLDALAAEDSSGHEQGNDANLAETDQVGNQIEAVYEENEDDQTGGDNHVQSGQGMDLIAIALEESSDDEHEFERSDSILQEQVESGSLIDKVIEDRVEQLEASRKAENTEKKLKVSMKPLEWAEELEKRQASSGQHWEEGAAAQPMQLEGIGKGPPAIGYMQIEMDNPVTRVMSSPSFRSDHGSPQVLAVHRSYIAMGTSKGAVIVIPSKYSIHQADDTDAKMLFFWNQGEKTQSPVTAMCFNQQGDLLLVGYGDGHMTIWDVQKSAAAKVIYGEHTAPVVHACFIRQSKAITGDSKGVVLLHTFSIIPVINRLTVKGTQRLFDGNTGIVLSACPLVMDESFGFSNSSAQGNQTTSSSGGLGSMMGGVVGGVVGVDSGWKFFNEGSSPMEDGVVVMFIMHQHALVVRLRTNIDHVDHIETFSRPDGAREGSIAYAAWKYTSYLNESSSVDEERVSWLALAWDRQVQVAKFVKSKIFKHKEWKLDSSAVGVAWLDDQMLVVLNLRGQLCLFSKDGSELRRTTFVPDGLLFDDTILHHAHFFNRFGNPERHFNSSVAVRGATVYILGPSFLTVSRLLPWKERIEALKRAGDWMGALDMAMRLYDGQTQGVVDLPRTVDSIRDAIMPYLVELLLSYISYVFEYISIALPNHTGKGGESGVLIEADRSLLTQRDEQYARVGGVAVEYCVHIGRNDILFDTVFSKFAAAESGGMFLEVLEPYILKDMLGSLPPEIMQALVEHYSGKGWLQRVEQCILHMDISSLDFNQVVRLCREHGLYGALIYLFNQGLNDFRTPLEELLSVVQNTNSKDDASSGYRMLVYLKYCFQGLAFPPGHGIIPQSRLHSVREELLQFLLEESKPLTSEVFKGFNASCGKCLNICYLLWLDTEATLEVIKCAFVQDNFESRDELPSTVNTSASDNEDGIDAGRPEGQNAMVQNVVDAIIDIVGLENDVIRSVMGRTESELWPSEKDFGYLMEFVSFFVSHKRANASKRVVMHILTYLISSYDDTRTRIQKEKEVLQLFNAVPRNDWNSDFVLNLCSDAHFYQACGLIFTARNQNLAALDSYMKDKEEPFHAFIFIDKKLLELVDDEALSFHTTVISRFPELVKLSRECAFVLAIDHFCDKIQQILAELRSDRHSLFLFLKTAIEVHLSGKLDFSKLELRNKQTVELQYSSTEVEAYQQRLSNLSKLCHNPVYIDDELVELYLELLCQYERRSVLKFLETFDSYRLERCLHLCLDYGVTDAAAFLQERVGDVGSALDLILAGLDEKISLFISSVESTFSGVASKSIAEIKQPDIVLEMSECLMHCMPPLDCAKGIHSAWTQRNLSPFGSNSLTPSQSH

SEQ ID NO: 180924 - protein, 505 aa, Zea Mays
MLVYLKYCFQGLAFPPGHGIIPQSRLHSVREELLQFLLEESKPLTSEVFKGFNASCGKCLNICYLLWLDTEATLEVIKCAFVQDNFESRDELPSTVNTSASDNEDGIDAGRPEGQNAMVQNVVDAIIDIVGLENDVIRSVMGRTESELWPSEKDFGYLMEFVSFFVSHKRANASKRVVMHILTYLISSYDDTRTRIQKEKEVLQLFNAVPRNDWNSDFVLNLCSDAHFYQACGLIFTARNQNLAALDSYMKDKEEPFHAFIFIDKKLLELVDDEALSFHTTVISRFPELVKLSRECAFVLAIDHFCDKIQQILAELRSDRHSLFLFLKTAIEVHLSGKLDFSKLELRNKQTVELQYSSTEVEAYQQRLSNLSKLCHNPVYIDDELVELYLELLCQYERRSVLKFLETFDSYRLERCLHLCLDYGVTDAAAFLQERVGDVGSALDLILAGLDEKISLFISSVESTFSGVASKSIAEIKQPDIVLEMSEEFTALGPRGISVPLVPTP

SEQ ID NO: 180925 - protein, 192 aa, Zea Mays
MKVISFSQQGPRAICILSANGVIANVTLRQQDSLGGTVTYEGRFELLSLSGSFTPTDSGGGTRSRSGGMSVSLAAADGRVIGGGVAGLLVAASPVQVVVGSFLPSYQLDQGANKKPVIEITTVPPAPVGFTISSGDMDDAYSGSQHPRSAAAKGGSTTTALFKVENWTAPAPAPDQARKAPAPEAKVPVPGG

SEQ ID NO: 180926 - protein, 241 aa, Zea Mays
MIRLEQQDMINRFESKSDPLVRLGCLQVYLTLCAALASSAVGAYLHVVWNIGGTLTMLGCVGSIAWLFSVPVYEERKRYGLLMAAALLEGASVGPLVKLAVEFDPSILVTAFVGTAIAFACFTGAAMVARRREYLYLGGLLSSGLSILLWLQLAGSIFGHSATSFMFEVYFGLLIFLGYVVYDTQEIIERAHRGDMDHVKHALTLFTDFVAVLVRVLVIMVSELFPLGDDAGLLPRIILVE

SEQ ID NO: 180927 - protein, 182 aa, Zea Mays
MRRRRRRGRGRGRGGGCRHRLVHRPPPPHHLRLGRRQVHGRQPFLHSAHNNNNKKKEQPVAVGVRWCRGGTWHHNNAYFARVGGVEVAEMNALELRLLFALRFRLNVAPDTFARYCAALECHVDTPDAGGPVPRMPPSSHVDGEEAVTSSKGKVAAAGGGSVVVQRSHRQRRAVVQIMTTAQ

SEQ ID NO: 180928 - protein, 363 aa, Zea Mays
MRRRRRRGRGRGRGGGCRHRLVHRPPPPHHLRLGRRQVHGRQVLVSAREEVEAELSPAMNAAIKIFKHINEIEDINSDGTLMAPAPEISSVRLLVPFAQALHVIGKQGVTIKSIQESTGSTVRIMDEDELLSHETMGERIVEINGASLEVLNALKLVLGLLRKFLVDHGVLHLFERKNPEVAQPQSRGNPKGSRFLYGHDPSFHAPYSRDLSQPADSLITKITRTMQIPLADVGEIIGVRGENVELIRSVSGAVVVLEKIGNGQEVRVMIEGTPSQVQTAHQLVQEALSGDRGLPSGSSYYSAEGGDGDPSLVKPPHAGPRFLHPISAIEASWDYLPWQYQEQTPRDDHRGYPTLSDYRGYLP

SEQ ID NO: 180929 - protein, 459 aa, Zea Mays
MEPPAWSPPREEEEEEETEIDFDEEEDPEEVEPWFTSSGSEPELEPEPEPKHPAPTPSPAPAWAEPEQQPAPVTAVEATKKGEGEDARPRWPGWPGASVFRLVVPADKVGGIIGRRGDTIKRLCDETRARVRVLDAPHGDGAFSRIVLVSAREEVEAELSPAMNAAIKIFKHINEIEDINSDGTLMAPAPEISSVRLLVPFAQALHVIGKQGVTIKSIQESTGSTVRIMDEDELLSHETMGERIVEINGASLEVLNALKLVLGLLRKFLVDHGVLHLFERKSRGNPKGSRFLYGHDPSFHAPYSRDLSQPADSLITKITRTMQIPLADVGEIIGVRGENVELIRSVSGAVVVLEKIGNGQEVRVMIEGTPSQVQTAHQLVQEALSGDRGLPSGSSYYSAEGGDGDPSLVKPPHAGPRFLHPISAIEASWDYLPWQYQEQTPRDDHRGYPTLSDYRGYLP

SEQ ID NO: 180930 - protein, 548 aa, Zea Mays
MVQCTQPPPQLKLPESKITEPTDDENQDLPPKPEKRTRMHHIERHRSCVVTLSDIELNGLQPRHLHQPIEISPGGSQCSLHEETPTDTNASHRHAIADAAWEALKRSMVYFRGQPIGTVAAIDKSQGAALNYDQVFMRDFIPSALAFLMKGEHLIVKNFLVETARLQSREKMVDLFKLGQGVMPASFKVHHRNPTQKTESLLADFGETAIGRVAPVDSGLWWIILLRAYTKWTGDNSLAESTNCQRAMHLILRLCLSEGCDTSPALLCADGCSMIDRRMGIYGYPIEIQALFFMAMRCALSLLKQESDADFVNHITKRIQALSYHLHSYYWLDFQRLNDIYRYKTEEYSQTALNKFNVMPESIPDWIFDFMPSRGGYFIGNVSPARMDFRWFCLGNFIAILSSLATGEQAEAILDLVEERWQELIGEMPLKICYPAMENQEWQIVTGCDPKNTRWSYHNGGSWPVLLWLLVAVSVKLGRPHLARRAVELMEQRLAKDDFPEYYDGKAGRGQEKEMARRLPGGDEHRRCRRLRHLHYPVVGMDEAVPPS

SEQ ID NO: 180931 - protein, 312 aa, Zea Mays
MVQCTQPPPQLKLPESKITEPTDDENQDLPPKPEKRTRMHHIERHRSCVVTLSDIELNGLQPRHLHQPIEISPGGSQCSLHEETPTDTNASHRHAIADAAWEALKRSMVYFRGQPIGTVAAIDKSQGAALNYDQVFMRDFIPSALAFLMKGEHLIVKNFLVETARLQSREKMVDLFKLGQGVMPASFKVHHRNPTQKTESLLADFGETAIGRVAPVDSGLWWIILLRAYTKWTGDNSLAESTNCQRAMHLILRLCLSEGCDTSPALLCADGCSMIDRRMRPGEGNGSKTTRRRRAQTMPSSSTPPLSRGGHG

SEQ ID NO: 180932 - protein, 94 aa, Zea Mays
MMWPTELMHLEDSSDWSALMLKPPEQAHHLVYCLSTRAVDGHVPGSLIKFAPGPHISGDGPAQRSVVCPIQRNNEQPRASQLKMKRKLPSYAGT

SEQ ID NO: 180933 - protein, 171 aa, Zea Mays
MGDASQGVLNQTMAMLPIQPGAMVGGVSSSTANLNIGVHYWEAPGSAAVSATHGKAPAGSARGDQWDERELKKQKRKQSNRESARRSRLRKQAECEELGQRAETLRSENSSLRAELERIRKEYEQLLSQNASLKEKLGGSSDPIPDMNEQNDGNGSDKKQSDSDAQPGSES

SEQ ID NO: 180934 - protein, 177 aa, Zea Mays
MRVVMLGLDAAGKTTILYRLHMGEVLSTVPTVGFNVEKVQYKNVAFTVWDVGGQEKLRSLWKMYLSNSDALIYVVDSLDRERIRDARQEFQTIIKDPLMANSIILVFANKQDLRGTMSTDEVSEGLGLHDLRNRIWHIQGTCALRGEGLYDGLDWLASTLKQLQESGHATSVAGPSI

SEQ ID NO: 180935 - protein, 156 aa, Zea Mays
MGEVLSTVPTVGFNVEKVQYKNVAFTVWDVGGQEKLRSLWKMYLSNSDALIYVVDSLDRERIRDARQEFQTIIKDPLMANSIILVFANKQDLRGTMSTDEVSEGLGLHDLRNRIWHIQGTCALRGEGLYDGLDWLASTLKQLQESGHATSVAGPSI

SEQ ID NO: 180936 - protein, 99 aa, Zea Mays
MLGLDAAGKTTILYRLHMGEVLSTVPTVGFNVEKVQYKNVAFTVWDVGGQEKLRSLWKMYLSNSDALLWVCCRSMSLILWTEKGSETRGKSSRPLSRTL

SEQ ID NO: 180937 - protein, 328 aa, Zea Mays
MEWNTAVYHHNHQSTECVRGCFSLPLLPPDAAGDPQLELLPAAAREEERHVPVDDEPVEAVPHLPVAVPDAPRRALPRQLPPAPAHLQAVPEPLRLALLAHEPQERHVHRRHPQHERLEVQAEVLPETLENRWLNVQPSCKSTLWSLMRWDTRNGTSPAIRHSEPAYGQLYGLNLQSSSCFSLLLYGWISVHPVLWYLHGSWSCSATFSRARHLMFPSSWRQVGQWFSTLCLQLEQIVWPFGHWSIGGRIELVHTGHSSKSFKPHSDDNATLASDADVDHGLLAESTSSMIPPSDSESPSSSPQSDSGTTVTMLLPGAIVKSSFQVRK

SEQ ID NO: 180938 - protein, 71 aa, Zea Mays
MFSWAAVDLINIPTATKQSKKKHTHIITEAGSNARHGGPTSAANRLLCLFLIEKRILIHEHHIFLSWTPNH

SEQ ID NO: 180939 - protein, 179 aa, Zea Mays
MEDGAGYVVARGLGPAAAKPALDERDGAGEVAGFWGYLLQIIYQANAGAVMLTDCVFWFIIFPFLTEKDYSLNFLLIGMHSVNAVFLLGEAALNSLRFPWFRVAYFFLWTALYVVFQWIVHAATPMWWPYPFLDLTSNLAPLWYLAVAALQLPCYVVFWLLIKVKHHLLARCFPVSYVR

SEQ ID NO: 180940 - protein, 158 aa, Zea Mays
MEQAGDETPGEIGREAARREAALRSGGGDAGERVDKAVVDGGEDERFRVQRKWRRFLAHVGPGALVAIGFLDPSNLETDMQAGADFKYQLLWVILVGMVFALLIQTLAANLGVKTGKHLAELCREEYPRSVNICLWIIAELAVISDDIPEATFGFTFT

SEQ ID NO: 180941 - protein, 75 aa, Zea Mays
MYSHLIPYHPLFQLFLCPCSLLDLSHGKMMYQQLHLFLELLPQQEQYYFSQFRCPQFLLLTVNCLLRCQNLVLLM

SEQ ID NO: 180942 - protein, 217 aa, Zea Mays
MLVFWNCLLKSNTALLHWCFSMNCFSHFSFFYSSFSFIYWFLVLRLNIYRLIPCCRVIFWYCLLRCWHVALVGCFFSLFIHWAIGFFNRFLIQHFKSISCWLISMFRFRHIFLHHVCIHCFSLLALSIFYFDHLFCRFCGRCIFLKALFLFRMNDTVRFSWFSCFCASISSIWNGIRDVPVDLNRSLNSRRCFGYNINIRNVCHACRLCVLSCIFWS

SEQ ID NO: 180943 - protein, 860 aa, Zea Mays
MAAGSGGGGFLGDVNDPWLKPRLLRAVVTGRLPQPGAAAELSPTEVASILEVVRTHGLLTEDLPGRGALVNPKLAEAWRAAVDAWVERVVALVESDSQSSSFQLVIVISCTSMSDLFVRLAKFSNLKKEGSSFAGRVVEPVLRLLNQNGLVADEAIDLLRTVIKLYPSSVNRHYNKVESAIAAKIMSNVKPSENSPSLTYTVSMLQKFARTLALLPSVRVSEDSWSLMIRRILIVVNNLLNDAFIGLEEEKKGHDIMLLLVPPGTDPLPTLGDEVMPGGNVHIMKKFRVFTVPTISALTLCCSVMLTSYYPVQVNVPIHALIALMRRVLLVDGSLHNKLFPSTTSLHQELICFDLPSLHSTFLDLLNATIKGMRSQLLPHGASIIRLITEYFKIAKLPTLRTKTYSILQLLLTSMGVGTSLHLLEATVRNAVADLNDDGEINMTMINTNSSQLTNESSSKVYSKKRKQEPQMQNSTISGSEKVAISPRKRKGSSIPITSKGVAPESTGDVTLSTPHSVKIAALETLEVLLNVGGSLRMDRWRSEVDMLLINVARSACGMGGSYEQKPSTFGEPNISDFQLASLKGLLASFLSSHARPPYLANGIELFRKGKLEIGTKVAEFCSHALLALDVLVHPRALSLERTVPASSGFNYTAQKKTVFGAGTHQISPFGDQPQAMEVEDMYDDWLISNNNEPPEVPVNGSDAVVSKGVLVEDGKQLNPIAEDPKVDPPRITDAAQDAPASTKTDVKVVDAAAATAAKPNTAENPSSSNAVPSPVRTTDSDSRKHASFPEQDSPHENKSAAVHPGEASATPGVGSSHHRHEAPEARSASFTELFGSESGIESESEDLMPDIVDGDPDSD

SEQ ID NO: 180944 - protein, 866 aa, Zea Mays
MAAGSGGGGFLGDVNDPWLKPRLLRAVVTGRLPQPGAAAELSPTEVASILEVVRTHGLLTEDLPGRGALVNPKLAEAWRAAVDAWVERVVALVESDSQSSSFQLVIVISCTSMSDLFVRLAKFSNLKKEGSSFAGRVVEPVLRLLNQNGLVAVWSTLFILMAYLFEFNHSMDEAIDLLRTVIKLYPSSVNRHYNKVESAIAAKIMSNVKPSEKFARTLALLPSVRVSEDSWSLMIRRILIVVNNLLNDAFIGLEEEKKGHDIMLLLVPPGTDPLPTLGDEVMPGGNVHIMKKFRVFTVPTISALTLCCSVMLTSYYPVQVNVPIHALIALMRRVLLVDGSLHNKLFPSTTSLHQELICFDLPSLHSTFLDLLNATIKGMRSQLLPHGASIIRLITEYFKIAKLPTLRTKTYSILQLLLTSMGVGTSLHLLEATVRNAVADLNDDGEINMTMINTNSSQLTNESSSKVYSKKRKQEPQMQNSTISGSEKVAISPRKRKGSSIPITSKGVAPESTGDVTLSTPHSVKIAALETLEVLLNVGGSLRMDRWRSEVDMLLINVARSACGMGGSYEQKPSTFGEPNISDFQLASLKGLLASFLSSHARPPYLANGIELFRKGKLEIGTKVAEFCSHALLALDVLVHPRALSLERTVPASSGFNYTAQKKTVFGAGTHQISPFGDQPQAMEVEDMYDDWLISNNNEPPEVPVNGSDAVVSKGVLVEDGKQLNPIAEDPKVDPPRITDAAQDAPASTKTDVKVVDAAAATAAKPNTAENPSSSNAVPSPVRTTDSDSRKHASFPEQDSPHENKSAAVHPGEASATPGVGSSHHRHEAPEARSASFTELFGSESGIESESEDLMPDIVDGDPDSD

SEQ ID NO: 180945 - protein, 492 aa, Zea Mays
MRRVLLVDGSLHNKLFPSTTSLHQELICFDLPSLHSTFLDLLNATIKGMRSQLLPHGASIIRLITEYFKIAKLPTLRTKTYSILQLLLTSMGVGTSLHLLEATVRNAVADLNDDGEINMTMINTNSSQLTNESSSKVYSKKRKQEPQMQNSTISGSEKVAISPRKRKGSSIPITSKGVAPESTGDVTLSTPHSVKIAALETFGEPNISDFQLASLKGLLASFLSSHARPPYLANGIELFRKGKLEIGTKVAEFCSHALLALDVLVHPRALSLERTVPASSGFNYTAQKKTVFGAGTHQISPFGDQPQAMEVEDMYDDWLISNNNEPPEVPVNGSDAVVSKGVLVEDGKQLNPIAEDPKVDPPRITDAAQDAPASTKTDVKVVDAAAATAAKPNTAENPSSSNAVPSPVRTTDSDSRKHASFPEQDSPHENKSAAVHPGEASATPGVGSSHHRHEAPEARSASFTELFGSESGIESESEDLMPDIVDGDPDSD

SEQ ID NO: 180946 - protein, 735 aa, Zea Mays
MSDLFVRLAKFSNLKKEGSSFAGRVVEPVLRLLNQNGLVADEAIDLLRTVIKLYPSSVNRHYNKVESAIAAKIMSNVKPSEKFARTLALLPSVRVSEDSWSLMIRRILIVVNNLLNDAFIGLEEEKKGHDIMLLLVPPGTDPLPTLGDEVMPGGNVHIMKKFRVFTVPTISALTLCCSVMLTSYYPVQVNVPIHALIALMRRVLLVDGSLHNKLFPSTTSLHQELICFDLPSLHSTFLDLLNATIKGMRSQLLPHGASIIRLITEYFKIAKLPTLRTKTYSILQLLLTSMGVGTSLHLLEATVRNAVADLNDDGEINMTMINTNSSQLTNESSSKVYSKKRKQEPQMQNSTISGSEKVAISPRKRKGSSIPITSKGVAPESTGDVTLSTPHSVKIAALETLEVLLNVGGSLRMDRWRSEVDMLLINVARSACGMGGSYEQKPSTFGEPNISDFQLASLKGLLASFLSSHARPPYLANGIELFRKGKLEIGTKVAEFCSHALLALDVLVHPRALSLERTVPASSGFNYTAQKKTVFGAGTHQISPFGDQPQAMEVEDMYDDWLISNNNEPPEVPVNGSDAVVSKGVLVEDGKQLNPIAEDPKVDPPRITDAAQDAPASTKTDVKVVDAAAATAAKPNTAENPSSSNAVPSPVRTTDSDSRKHASFPEQDSPHENKSAAVHPGEASATPGVGSSHHRHEAPEARSASFTELFGSESGIESESEDLMPDIVDGDPDSD

SEQ ID NO: 180947 - protein, 675 aa, Zea Mays
MSNVKPSENSPSLTYTVSMLQKFARTLALLPSVRVSEDSWSLMIRRILIVVNNLLNDAFIGLEEEKKGHDIMLLLVPPGTDPLPTLGDEVMPGGNVHIMKKFRVFTVPTISALTLCCSVMLTSYYPVQVNVPIHALIALMRRVLLVDGSLHNKLFPSTTSLHQELICFDLPSLHSTFLDLLNATIKGMRSQLLPHGASIIRLITEYFKIAKLPTLRTKTYSILQLLLTSMGVGTSLHLLEATVRNAVADLNDDGEINMTMINTNSSQLTNESSSKVYSKKRKQEPQMQNSTISGSEKVAISPRKRKGSSIPITSKGVAPESTGDVTLSTPHSVKIAALETLEVLLNVGGSLRMDRWRSEVDMLLINVARSACGMGGSYEQKPSTFGEPNISDFQLASLKGLLASFLSSHARPPYLANGIELFRKGKLEIGTKVAEFCSHALLALDVLVHPRALSLERTVPASSGFNYTAQKKTVFGAGTHQISPFGDQPQAMEVEDMYDDWLISNNNEPPEVPVNGSDAVVSKGVLVEDGKQLNPIAEDPKVDPPRITDAAQDAPASTKTDVKVVDAAAATAAKPNTAENPSSSNAVPSPVRTTDSDSRKHASFPEQDSPHENKSAAVHPGEASATPGVGSSHHRHEAPEARSASFTELFGSESGIESESEDLMPDIVDGDPDSD

SEQ ID NO: 180948 - protein, 709 aa, Zea Mays
MDEAIDLLRTVIKLYPSSVNRHYNKVESAIAAKIMSNVKPSENSPSLTYTVSMLQKFARTLALLPSVRVSEDSWSLMIRRILIVVNNLLNDAFIGLEEEKKGHDIMLLLVPPGTDPLPTLGDEVMPGGNVHIMKKFRVFTVPTISALTLCCSVMLTSYYPVQVNVPIHALIALMRRVLLVDGSLHNKLFPSTTSLHQELICFDLPSLHSTFLDLLNATIKGMRSQLLPHGASIIRLITEYFKIAKLPTLRTKTYSILQLLLTSMGVGTSLHLLEATVRNAVADLNDDGEINMTMINTNSSQLTNESSSKVYSKKRKQEPQMQNSTISGSEKVAISPRKRKGSSIPITSKGVAPESTGDVTLSTPHSVKIAALETLEVLLNVGGSLRMDRWRSEVDMLLINVARSACGMGGSYEQKPSTFGEPNISDFQLASLKGLLASFLSSHARPPYLANGIELFRKGKLEIGTKVAEFCSHALLALDVLVHPRALSLERTVPASSGFNYTAQKKTVFGAGTHQISPFGDQPQAMEVEDMYDDWLISNNNEPPEVPVNGSDAVVSKGVLVEDGKQLNPIAEDPKVDPPRITDAAQDAPASTKTDVKVVDAAAATAAKPNTAENPSSSNAVPSPVRTTDSDSRKHASFPEQDSPHENKSAAVHPGEASATPGVGSSHHRHEAPEARSASFTELFGSESGIESESEDLMPDIVDGDPDSD

SEQ ID NO: 180949 - protein, 535 aa, Zea Mays
MRRVLLVDGSLHNKLFPSTTSLHQELICFDLPSLHSTFLDLLNATIKGMRSQLLPHGASIIRLITEYFKIAKLPTLRTKTYSILQLLLTSMGVGTSLHLLEATVRNAVADLNDDGEINMTMINTNSSQLTNESSSKVYSKKRKQEPQMQNSTISGSEKVAISPRKRKGSSIPITSKGVAPESTGDVTLSTPHSVKIAALETLEVLLNGGSLRMDRWRSEVDMLLINVARSACGMGGSYEQKPSTFGEPNISDFQLASLKGLLASFLSSHARPPYLANGIELFRKGKLEIGTKVAEFCSHALLALDVLVHPRALSLERTVPASSGFNYTAQKKTVFGAGTHQISPFGDQPQAMEVEDMYDDWLISNNNEPPEVPVNGSDAVVSKGVLVEDGKQLNPIAEDPKVDPPRITDAAQDAPASTKTDVKVVDAAAATAAKPNTAENPSSSNAVPSPVRTTDSDSRKHASFPEQDSPHENKSAAVHPGEASATPGVGSSHHRHEAPEARSASFTELFGSESGIESESEDLMPDIVDGDPDSD

SEQ ID NO: 180950 - protein, 536 aa, Zea Mays
MRRVLLVDGSLHNKLFPSTTSLHQELICFDLPSLHSTFLDLLNATIKGMRSQLLPHGASIIRLITEYFKIAKLPTLRTKTYSILQLLLTSMGVGTSLHLLEATVRNAVADLNDDGEINMTMINTNSSQLTNESSSKVYSKKRKQEPQMQNSTISGSEKVAISPRKRKGSSIPITSKGVAPESTGDVTLSTPHSVKIAALETLEVLLNVGGSLRMDRWRSEVDMLLINVARSACGMGGSYEQKPSTFGEPNISDFQLASLKGLLASFLSSHARPPYLANGIELFRKGKLEIGTKVAEFCSHALLALDVLVHPRALSLERTVPASSGFNYTAQKKTVFGAGTHQISPFGDQPQAMEVEDMYDDWLISNNNEPPEVPVNGSDAVVSKGVLVEDGKQLNPIAEDPKVDPPRITDAAQDAPASTKTDVKVVDAAAATAAKPNTAENPSSSNAVPSPVRTTDSDSRKHASFPEQDSPHENKSAAVHPGEASATPGVGSSHHRHEAPEARSASFTELFGSESGIESESEDLMPDIVDGDPDSD

SEQ ID NO: 180951 - protein, 524 aa, Zea Mays
MAAGSGGGGFLGDVNDPWLKPRLLRAVVTGRLPQPGAAAELSPTEVASILEVVRTHGLLTEDLPGRGALVNPKLAEAWRAAVDAWVERVVALVESDSQSSSFQLVIVISCTSMSDLFVRLAKFSNLKKEGSSFAGRVVEPVLRLLNQNGLVADEAIDLLRTVIKLYPSSVNRHYNKVESAIAAKIMSNVKPSEKFARTLALLPSVRVSEDSWSLMIRRILIVVNNLLNDAFIGLEEEKKGHDIMLLLVPPGTDPLPTLGDEVMPGGNVHIMKKFRVFTVPTISALTLCCSVMLTSYYPVQVNVPIHALIALMRRVLLVDGSLHNKLFPSTTSLHQELICFDLPSLHSTFLDLLNATIKGMRSQLLPHGASIIRLITEYFKIAKLPTLRTKTYSILQLLLTSMGVGTSLHLLEATVRNAVADLNDDGEINMTMINTNSSQLTNESSSKVYSKKRKQEPQMQNSTISGSEKVAISPRKRKGSSIPITSKGVAPESTGDVTLSTPHSVKIAALETLEVLLNVEQIAY

SEQ ID NO: 180952 - protein, 918 aa, Zea Mays
MAAGSGGGGFLGDVNDPWLKPRLLRAVVTGRLPQPGAAAELSPTEVASILEVVRTHGLLTEDLPGRGALVNPKLAEAWRAAVDAWVERVVALVESDSTYSCWLGTCFLGVTFQECRNDRFAESHSIWFEKILSNLQQSSSFQLVIVISCTSMSDLFVRLAKFSNLKKEGSSFAGRVVEPVLRLLNQNGLVAVWSTLFILMAYLFEFNHSMDEAIDLLRTVIKLYPSSVNRHYNKVESAIAAKIMSNVKPSENSPSLTYTVSMLQKFARTLALLPSVRVSEDSWSLMIRRILIVFYHFRLIFTHSTVTEKKGHDIMLLLVPPGTDPLPTLGDEVMPGGNVHIMKKFRVFTVPTISALTLCCSVMLTSYYPVQVNVPIHALIALMRRVLLVDGSLHNKLFPSTTSLHQELICFDLPSLHSTFLDLLNATIKGMRSQLLPHGASIIRLITEYFKIAKLPTLRTKTYSILQLLLTSMGVGTSLHLLEATVRNAVADLNDDGEINMTMINTNSSQLTNESSSKVYSKKRKQEPQMQNSTISGSEKVAISPRKRKGSSIPITSKGVAPESTGDVTLSTPHSVKIAALETLEVLLNVGGSLRMDRWRSEVDMLLINVARSACGMGGSYEQKPSTFGEPNISDFQLASLKGLLASFLSSHARPPYLANGIELFRKGKLEIGTKVAEFCSHALLALDVLVHPRALSLERTVPASSGFNYTAQKKTVFGAGTHQISPFGDQPQAMEVEDMYDDWLISNNNEPPEVPVNGSDAVVSKGVLVEDGKQLNPIAEDPKVDPPRITDAAQDAPASTKTDVKVVDAAAATAAKPNTAENPSSSNAVPSPVRTTDSDSRKHASFPEQDSPHENKSAAVHPGEASATPGVGSSHHRHEAPEARSASFTELFGSESGIESESEDLMPDIVDGDPDSD

SEQ ID NO: 180953 - protein, 717 aa, Zea Mays
MCKLYLFLQDEAIDLLRTVIKLYPSSVNRHYNKVESAIAAKIMSNVKPSENSPSLTYTVSMLQKFARTLALLPSVRVSEDSWSLMIRRILIVVNNLLNDAFIGLEEEKKGHDIMLLLVPPGTDPLPTLGDEVMPGGNVHIMKKFRVFTVPTISALTLCCSVMLTSYYPVQVNVPIHALIALMRRVLLVDGSLHNKLFPSTTSLHQELICFDLPSLHSTFLDLLNATIKGMRSQLLPHGASIIRLITEYFKIAKLPTLRTKTYSILQLLLTSMGVGTSLHLLEATVRNAVADLNDDGEINMTMINTNSSQLTNESSSKVYSKKRKQEPQMQNSTISGSEKVAISPRKRKGSSIPITSKGVAPESTGDVTLSTPHSVKIAALETLEVLLNVGGSLRMDRWRSEVDMLLINVARSACGMGGSYEQKPSTFGEPNISDFQLASLKGLLASFLSSHARPPYLANGIELFRKGKLEIGTKVAEFCSHALLALDVLVHPRALSLERTVPASSGFNYTAQKKTVFGAGTHQISPFGDQPQAMEVEDMYDDWLISNNNEPPEVPVNGSDAVVSKGVLVEDGKQLNPIAEDPKVDPPRITDAAQDAPASTKTDVKVVDAAAATAAKPNTAENPSSSNAVPSPVRTTDSDSRKHASFPEQDSPHENKSAAVHPGEASATPGVGSSHHRHEAPEARSASFTELFGSESGIESESEDLMPDIVDGDPDSD

SEQ ID NO: 180954 - protein, 759 aa, Zea Mays
MKLILCLWEQSSSFQLVIVISCTSMSDLFVRLAKFSNLKKEGSSFAGRVVEPVLRLLNQNGLVADEAIDLLRTVIKLYPSSVNRHYNKVESAIAAKIMSNVKPSEKFARTLALLPSVRVSEDSWSLMIRRILIVVNNLLNDAFIGLEEEKKGHDIMLLLVPPGTDPLPTLGDEVMPGGNVHIMKKFRVFTVPTISALTLCCSVMLTSYYPVQVNVPIHALIALMRRVLLVDGSLHNKLFPSTTSLHQELICFDLPSLHSTFLDLLNATIKGMRSQLLPHGASIIRLITEYFKIAKLPTLRTKTYSILQLLLTSMGVGTSLHLLEATVRNAVADLNDDGEINMTMINTNSSQLTNESSSKVYSKKRKQEPQMQNSTISGSEKVAISPRKRKGSSIPITSKGVAPESTGDVTLSTPHSVKIAALETLEVLLNVGGSLRMDRWRSEVDMLLINVARSACGMGGSYEQKPSTFGEPNISDFQLASLKGLLASFLSSHARPPYLANGIELFRKGKLEIGTKVAEFCSHALLALDVLVHPRALSLERTVPASSGFNYTAQKKTVFGAGTHQISPFGDQPQAMEVEDMYDDWLISNNNEPPEVPVNGSDAVVSKGVLVEDGKQLNPIAEDPKVDPPRITDAAQDAPASTKTDVKVVDAAAATAAKPNTAENPSSSNAVPSPVRTTDSDSRKHASFPEQDSPHENKSAAVHPGEASATPGVGSSHHRHEAPEARSASFTELFGSESGIESESEDLMPDIVDGDPDSD

SEQ ID NO: 180955 - protein, 225 aa, Zea Mays
MIWVLFIMQLASHGTQTEETMQFVPHCDHAEVSDSQSTSSQLNLIERSTEHLASCEINPVSVDDDNDNEHIDANEETHLVIQDVPQCRICLDSEGDDLIAPCRCKGTQKYVHRSCLDNWRSTKVVAFMGMVIYRFYGDELREMFGYEEHPYAFYAMAILAIVLVGLLYGFFIAIICGQRITERHYHVLAKQELTKEYIVEDLEGADHVPDLDPSHVIELKILGLY

SEQ ID NO: 180956 - protein, 156 aa, Zea Mays
MQFVPHCDHAEVSDSQSTSSQLNLIERSTEHLASCEINPVSVDDDNDNEHIDANEETHLVIQDVPQCRICLDSEGDDLIAPCRCKGTQKYVHRSCLDNWRSTKEGFAFSHCTECRAAFFLRANVPPDRWWLRLKFQLLVVRDHTLIFFIVQLILWR

SEQ ID NO: 180957 - protein, 254 aa, Zea Mays
MQFVPHCDHAEVSDSQSTSSQLNLIERSTEHLASCEINPVSVDDDNDNEHIDANEETHLVIQDVPQCRICLDSEGDDLIAPCRCKGTQKYVHRSCLDNWRSTKEGFAFSHCTECRAAFFLRANVPPDRWWLRLKFQLLVVRDHTLIFFIVQLVVAFMGMVIYRFYGDELREMFGYEEHPYAFYAMAILAIVLVGLLYGFFIAIICGQRITERHYHVLAKQELTKEYIVEDLEGADHVPDLDPSHVIELKILGLY

SEQ ID NO: 180958 - protein, 176 aa, Zea Mays
MIWVLFIMQLASHGTQTEETMQFVPHCDHAEVSDSQSTSSQLNLIERSTEHLASCEINPVSVDDDNDNEHIDANEETHLVIQDVPQCRICLDSEGDDLIAPCRCKGTQKYVHRSCLDNWRSTKEGFAFSHCTECRAAFFLRANVPPDRWWLRLKFQLLVVRDHTLIFFIVQLILWR

SEQ ID NO: 180959 - protein, 274 aa, Zea Mays
MAAAEVYSPIAAAAAQQQREKATSQIWRAVVGWWGGSTKRRSRRDVRAYNTVLHALSRAGQSNFLSTKFMISNMQSPYNGAVVPHAGRTNRRFDSRNVSLREVSRKVPTGLQLGDASNLGMSDEELMEQCDMGTFKASGPGGQHRNKRESAVRLKHLPTGIIAQKRNYSASVRRPINLEDYTPPVEILQILPLKSSVRGKDVGPQIGPNNSKFSPEMQALLDLLFAVEGSVSDAAKILGLSTGALSRLILSDDSLRTAANELRASKRSELNSVL

SEQ ID NO: 180960 - protein, 61 aa, Zea Mays
MDTHYKICFEPYSSVQNKDGWHQVVPKTSFLSITVHPCLQNRNSLVHGDNSVSFSVQAGCI

SEQ ID NO: 180961 - protein, 392 aa, Zea Mays
MSRACKTARELIQRLQKIDNDNYPETLYQMFIVNAGPGFRLLWNTVKSFLDPKTTAKIHVLGNKYQSKLLEIIDASELPEFLGGTCTCPEYGGCLKAEKGPWKDPNILKIVQSGEVHCARQIVTISNGEEKIITYAKPKHHSMRGSDTSTAESGSEADDAISPKALRSYIQHPKLTPVREEVKIVRATSFSTRLPEYDVPVVDKAVDATWRREQPRKIPFMPQDADSSVKTMSRPSDSSWDKIVATLMACLMAIVMLVRSVKDLVTRRLPYKGGSEEIHSTLYPDPIQKEEFRPPSPIPGFAEADLFAVVLQRLGELEEKVQMLQEKPSEMPCEKEELLNAAVRRVDALEAELIVTKKALHEALIRQEELLAYIDRKEIAKAQRKKKAMLCY

SEQ ID NO: 180962 - protein, 149 aa, Zea Mays
MFRNQYDTDVTTWSPQGRLFQVEYAMEAVKQGSACVGLRSSTHAVLAAVNKPASELSSYQRKVFRVADHAGVALAGLTADGRVLSRFLRNECINHSFVYEAPLPVSRLALKLADKAQVRTSPCASQTPLPPVIPISSLTSPRGDRKSEP

SEQ ID NO: 180963 - protein, 375 aa, Zea Mays
MAAAPARHLAAAFTAAAAHQRVAFRRVQVRAPVSASLSFPPRHPATFRGRASLACPAAASLSVPSGAAPPGSVPFNLLPPDSDPFIEWDPPPGDSAPSPLAGGGAAGGATLVVLLGWLGARQKHLRRYADLYRERGVGAVRFVVPVRELVGLDLGRRVERRVADLSEQVAAWCDADRRRTLLFHTFSNTGWLAYGAVLENLQSRADLTERIRGCIVDSAPVLEIRPEVWAAGFSAAMLKKSSSMTGPTTESLDGPVVNGTLNRVGSNVTQPSWGECFLLSTLRKFFEIVLYVPDVNKRLCKVLSVLSEQQPPCPQFYLYSSADRVIPAECVERFVESQRSLGRSVFAHDFVSSPHVDHYRSFPHVYSAKIDEFLK

SEQ ID NO: 180964 - protein, 199 aa, Zea Mays
MAMEEGSGAVEKGPAVGTVADASASVIGEGAVKEEAGGRRQPPAGYAAVVIGGTFDRLHQGHHLFLKYADLIQPIEKRMQNAMDYIKFIKPDLDVRVEPIVDPFGPSIVDQGLEAIIVSKETLPGGHAVNRKRAERGLTQLQIEVIELVPEESTGDKISSTAFRKMEAERALQQQNKQDDTAVGTPVGVQNIAVQSHGA

SEQ ID NO: 180965 - protein, 246 aa, Zea Mays
MAMEEGSGAVEKGPAVGTVADASASVIGEGAVKEEAGGRRQPPAGYAAVVIGGTFDRLHQGHHLFLKYADLIQPIEKRMQNAMDYIKFIKPDLDVRVEPIVDPFGPSIVDQGLEAIIVSKETLPGGHAVNRKRAERGLTQLQIEVIELVPEESTGDKISSTAFRKMEAERALQQQNKQDDTAVGTPAINWRCARNSWEILDDDLTSIAKDSSSVLFVAALRHPRKDSAALALKPGRAKALRRQLRM

SEQ ID NO: 180966 - protein, 167 aa, Zea Mays
MAMEEGSGAVEKGPAVGTVADASASVIGEGAVKEEAGGRRQPPAGYAAVVIGGTFDRLHQGHHLFLKAAAELARERIVVGVCDGPMLAKKQYADLIQPIEKRMQNAMDYIKFIKPDLDVRVEPIVDPFGPSIVDQGLEAIIVSKETLPGGHAVNRKRAERGLTQLSR

SEQ ID NO: 180967 - protein, 453 aa, Zea Mays
MKSSLRSRQEPRRVSNGVIIGAMLLSLCVLSIVKARYCATPFGKAEDQLQEQMNSSIRMEPEESSPARTPGEEEEEDDGENGASATTTTAPAVTKTPAAVAAGGNRGKGKPTCYMTSKRSERCDASGDIRVDGNRSTIYVSGIDREWKTKPYARYHDPVAMAHVREYTLKPLPEAAPAPACTRNHSVPGFLFSNGGFSGNLYHDYTDVLVPLFISTHQFRGRVQFLLSGMKPWWVAKFTPFFRQLTRYDVIDVDNDQEVHCFPRIVVGATFHKDMGVDPRRSPGHVSVVDFKRALRRAFGLPREAASRGGATGRGKPRLLIISRRGSRRFLNEREMARAAAGAGFEVRVAEPDQHTDTAAFAALVNSADVMVGVHGAGLTNMVFLPRGAVLVQVVPFGGLEWLTGVTFKDPAADMEGWDALKAAYLDKQNIRMDLDRFRATLREAMSRLPPAP

SEQ ID NO: 180968 - protein, 170 aa, Zea Mays
MSSPWSPMSLEEEEEIQELDAEEQQDGEQPQQGDGLQQGSTAEARAQQTGKKRARSVANSSTKSEAKIKVEESAPGAATGVILSLRESLQDCKQSLASCQVELEAAKSEIEKWHSAFQSIPAVPSGTSPDPVSVVSYLSNLKSSEESLKEQVFFVFLQGTVKMVLPLLQF

SEQ ID NO: 180969 - protein, 366 aa, Zea Mays
MSSPWSPMSLEEEEEIQELDAEEQQDGEQPQQGDGLQQGSTAEARAQQTGKKRARSVANSSTKSEAKIKVEESAPGAATGVILSLRESLQDCKQSLASCQVELEAAKSEIEKWHSAFQSIPAVPSGTSPVVSYLSNLKSSEESLKEQLEKAKKREAAFIVTFAKREQEIAELKSAVRDLKTQLRPPSMQTRRLLLDPAIHEEFTRLKNLVEEKEKKIKELQDNVAAVNFTPSSKLGKMLMAKCRTLQEENEEIGAMASEGKIHELGMKIAVLKSQNNELRNQFDVLYKHMDGVTNDVERSNELVAILQEELEAKELEVTRLKEETLSQKEGTQEAPAPAPAPVEEGDGAGNDLKPASDPLQVKLES

SEQ ID NO: 180970 - protein, 273 aa, Zea Mays
MSSPWSPMSLEEEEEIQELDAEEQQDGEQPQQGDGLQQGSTAEARAQQTGKKRARSVANSSTKSEAKIKVEESAPGAATGVILSLRESLQDCKQSLASCQVELEAAKSEIEKWHSAFQSIPAVPSGTSPDPVSVVSYLSNLKSSEESLKEQLEKAKKREAAFIVTFAKREQEIAELKSAVRDLKTQLRPPSMQTRRLLLDPAIHEEFTRLKNLVEEKEKKIKELQDNVAAVNFTPSSKLGKMLMAKCRTLQEENEEIGAMASEGKFCISTWTA

SEQ ID NO: 180971 - protein, 900 aa, Zea Mays
MLVREATSQHDISTSSGKKHKKNKKASSCEDNRRNLRNFCEVIIEGSLLLSSHDRKHLAFSILVSLLPKLSPSAIQVVLSSKVVQGLMDILSNESSWLYNAGKHFLKELMSVASHDNDRCAAVIINLQKYSGGRFDSMTKTKTVKELLLKFHNVEDCLYLVQNLMALFVDEESVTDEPSDQSQTTDDNSENGPTEEQDLFSQGNADLLKSWVVNTISCVLKNLKLTSKGNSDSEMARCIEEKFQVQTEILKFLAVQGLFSASLGTEVTSFELQEKFKWPKNPISTSLRKECIERLQFLLEDAQKDASLHVPNEVKSNDLGYYLMCFINTVCNIPSVSLFRILSGHDDNAFKKLMAVESMLFHEERKTGPGLESTKMHAMRYLLIQLLLQVLLHPDEYWEAAVDVTICCKKSFPVIAQGDNSSAQESAEHGSQESDEDGFEESDEDGSEDPNEEVSLEFMDVLVQTFLSILPHASGPVCFTVEQVFRVFCDDITETGLLDMLRVVKIDLKDRHQTDSDDEDDGRVDIEDDDETVMEDEEVGEIDNVTDGLDENTDDDSTDEDDLDQDDFNKTVPNETKGGGKTETTKDGDDSDDSDGMDDDAMFRIDPYIARIFKERNLPGSDTKQSQLMRFKLRVLTLLDIYLQRNPGKVLVLEVYSFLMQAFVKSHGADGTEQFRQRISGILQRRVFKGNEYPKGDAVEFGKLESLLEKALRLTSRSRYNTVASVAQNATFWILKIINSKHCSEQELARVVDLFRSILSDYDRKKSRLKLGFVKQVAKRNPWIGQKLFGFVLQRAENTKAQYRRNQLLELAEFILKSWADGTSEMFLNHLSQLCGLIQAALSAVAENKSRRKEVRNFCTGILQTVLKLGLKDQFQKALSPETYSLCEAKLGAAFTAFKK

SEQ ID NO: 180972 - protein, 1077 aa, Zea Mays
MKLIPNLLEHSSSMKGPEAKDNLLGRLFGFGAIERSGRVSRQWSRDKSSPIVKEFVSVVVELGGKKRYLTEPAVAVILDLVRKLPDEAILSEVLEVPGVQDWFNKAAEVGDPDALFLALKLQERTIVQKEIFGKLLPYPFSSDNFFAEQHLRSIAACFKESSFCLPRIHSLWLVITEMLVREATSQHDISTSSGKKHKKNKKASSCEDNRRNLRNFCEVIIEGSLLLSSHDRKHLAFSILVSLLPKLSPSAIQVVLSSKVVQGLMDILSNESSWLYNAGKHFLKELMSVASHDNDRCAAVIINLQKYSGGRFDSMTKTKTVKELLLKFHNVEDCLYLVQNLMALFVDEESVTDEPSDQSQTTDDNSENGPTEEQDLFSQGNADLLKSWVVNTISCVLKNLKLTSKGNSDSEMARCIEEKFQVQTEILKFLAVQGLFSASLGTEVTSFELQEKFKWPKNPISTSLRKECIERLQFLLEDAQKDASLHVPNEVKSNDLGYYLMCFINTVCNIPSVSLFRILSGHDDNAFKKLMAVESMLFHEERKTGPGLESTKMHAMRYLLIQLLLQVLLHPDEYWEAAVDVTICCKKSFPVIAQGDNSSAQESAEHGSQESDEDGFEESDEDGSEDPNEEVSLEFMDVLVQTFLSILPHASGPVCFTVEQVFRVFCDDITETGLLDMLRVVKIDLKDRHQTDSDDEDDGRVDIEDDDETVMEDEEVGEIDNVTDGLDENTDDDSTDEDDLDQDDFNKTVPNETKGGGKTETTKDGDDSDDSDGMDDDAMFRIDPYIARIFKERNLPGSDTKQSQLMRFKLRVLTLLDIYLQRNPGKVLVLEVYSFLMQAFVKSHGADGTEQFRQRISGILQRRVFKGNEYPKGDAVEFGKLESLLEKALRLTSRSRYNTVASVAQNATFWILKIINSKHCSEQELARVVDLFRSILSDYDRKKSRLKLGFVKQVAKRNPWIGQKLFGFVLQRAENTKAQYRRNQLLELAEFILKSWADGTSEMFLNHLSQLCGLIQAALSAVAENKSRRKEVRNFCTGILQTVLKLGLKDQFQKALSPETYSLCEAKLGAAFTAFKK

SEQ ID NO: 180973 - protein, 563 aa, Zea Mays
MCTEAPACLNCCGTTHVSLQLICFNAERKTGPGLESTKMHAMRYLLIQLLLQVLLHPDEYWEAAVDVTICCKKSFPVIAQGDNSSAQESAEHGSQESDEDGFEESDEDGSEDPNEEVSLEFMDVLVQTFLSILPHASGPVCFTVEQVFRVFCDDITETGLLDMLRVVKIDLKDRHQTDSDDEDDGRVDIEDDDETVMEDEEVGEIDNVTDGLDENTDDDSTDEDDLDQDDFNKTVPNETKGGGKTETTKDGDDSDDSDGMDDDAMFRIDPYIARIFKERNLPGSDTKQSQLMRFKLRVLTLLDIYLQRNPGKVLVLEVYSFLMQAFVKSHGADGTEQFRQRISGILQRRVFKGNEYPKGDAVEFGKLESLLEKALRLTSRSRYNTVASVAQNATFWILKIINSKHCSEQELARVVDLFRSILSDYDRKKSRLKLGFVKQVAKRNPWIGQKLFGFVLQRAENTKAQYRRNQLLELAEFILKSWADGTSEMFLNHLSQLCGLIQAALSAVAENKSRRKEVRNFCTGILQTVLKLGLKDQFQKALSPETYSLCEAKLGAAFTAFKK

SEQ ID NO: 180974 - protein, 169 aa, Zea Mays
MECLTTSFPRNVGKEYICSSKLVSGNQWIPKRICCYVSCSTNSSRCHKFTDVACPMSPVIRKRLRWRCFAASLNLEDGPAPSDSTSSSSEQTTDADGTTNGDVSENLLSRKPSSDELKALLADSERSRLLRRLSEANQYNRFLKRQLQIKDDAVVKFKGELAVLELEMQ

SEQ ID NO: 180975 - protein, 303 aa, Zea Mays
MECLTTSFPRNVGKEYICSSKLVSGNQWIPKRICCYVSCSTNSSRCHKFTDVACPMSPVIRKRLRWRCFAASLNLEDGPAPSDSTSSSSEQTTDADGTTNGDVSENLLSRKPSSDEALLADSERSRLLRRLSEANQYNRFLKRQLQIKDDAVVKFKGELAVLELEMQALVGLAEEVANFDVPLGSRKINGKYIQSHLLSRLEAVHDKIMEQVKSVDALKTQEIPVYWIGMAENVQIMGSFDGWSQGEAMSMEYSGDYGRFSATLKLRPGRYEIKFLVDGEWRLSPEYPTAGDGLTQNNILVVE

SEQ ID NO: 180976 - protein, 171 aa, Zea Mays
MECLTTSFPRNVGKEYICSSKLVSGNQWIPKRICCYVSCSTNSSRCHKFTDVACPMSPVIRKRLRWRCFAASLNLEDGPAPSDSTSSSSEQTTDADGTTNGDVSENLLSRKPSSDELKALLADSERSRLLRRLSEANQYNRFLKRQLQIKDDAVVKFKGELAVLELEMQRV

SEQ ID NO: 180977 - protein, 173 aa, Zea Mays
MECLTTSFPRNVGKEYICSSKLVSGNQWIPKRICCYVSCSTNSSRCHKFTDVACPMSPVIRKRLRWRCFAASLNLEDGPAPSDSTSSSSEQTTDADGTTNGDVSENLLSRKPSSDELKALLADSERSRLLRRLSEANQYNRFLKRQLQIKDDAVVKFKGELAVLELEMQGLGR

SEQ ID NO: 180978 - protein, 81 aa, Zea Mays
MRSRADRADRATPRPRHRRASALPCAPAATRRPTELPAPIEPPARHFLHGHFLSVTSSMVEVWERQGYAFFLRERYSFSNC

SEQ ID NO: 180979 - protein, 643 aa, Zea Mays
MASSAAPPASPSSRSHGNAAGAGSSATAMMLPGPPGRGNGGCIDLSPAGLLAHGAGSSVVVSDPRSMQLLCVLPMPSSSLASFVTAVRWAPPDTPSLDDDDDDRRPLRLAAGDRHGRIAVWDARARAVLHWLNLDEARGVAPGSGGGVQDLCWVHHGSGWHLASIHGPSLLCIWETSNSPRVLWMFDAAPEYLSCLRRDPFDARHLCAIGLRGFLLSAIPRQDSDISLQEHRVNCGAGDVADLQRLEKEISAPVPAPALAAFPLFSSRICFSPLWRQILFVTFPRELIVFDLSYSTALSVTPLPRGFGKFSDVMADPDIDMLYCTHLDGKLSIWRRKEGEQVHLLCAVEELMPSIGTVVPSPAVLAATIWQSESIFRSIEKQCQDLAQPHSFMIDTNSDQNACQGTMTYLTSISEDGKIWSWLLKFDKSALPSKANLGRPSHNNAATANTCSNRPDFIIKINLVGQLHLLSSTVTTLAVPSPSLLATVARGGNNPAPAVPLVALGTQNGTIEVVDVVANAVSASFSVHSSTVRGLRWLGNSRLVSFTYNQVNDKTGGYNNKLVITCLRSGLNRSFRVLQKPERAPIRALRASSSGRYLLILFRDAPVEVWAMTKNPMMVLGASFYSIRMDTASCTSARSKCII

SEQ ID NO: 180980 - protein, 873 aa, Zea Mays
MASSAAPPASPSSRSHGNAAGAGSSATAMMLPGPPGRGNGGCIDLSPAGLLAHGAGSSVVVSDPRSMQLLCVLPMPSSSLASFVTAVRWAPPDTPSLDDDDDDRRPLRLAAGDRHGRIAVWDARARAVLHWLNLDEARGVAPGSGGGVQDLCWVHHGSGWHLASIHGPSLLCIWETSNSPRVLWMFDAAPEYLSCLRRDPFDARHLCAIGLRGFLLSAIPRQDSDISLQEHRVNCGAGDVADLQRLEKEISAPVPAPALAAFPLFSSRICFSPLWRQILFVTFPRELIVFDLSYSTALSVTPLPRGFGKFSDVMADPDIDMLYCTHLDGKLSIWRRKEGEQVHLLCAVEELMPSIGTVVPSPAVLAATIWQSESIFRSIEKQCQDLAQPHSFMIDTNSDQNACQGTMTYLTSISEDGKIWSWLLKFDKSALPSKANLGRPSHNNAATANTCSNRPDFIIKINLVGQLHLLSSTVTTLAVPSPSLLATVARGGNNPAPAVPLVALGTQNGTIEVVDVVANAVSASFSVHSSTVRGLRWLGNSRLVSFTYNQVNDKTGGYNNKLVITCLRSGLNRSFRVLQKPERAPIRALRASSSGRYLLILFRDAPVEVWAMTKNPMMLRSLALPFTVLEWTLPAAPRPGQNASSKQSSTSKERSAEASGAESSDETCESFAFALVNGALGVFEVHGRRIRDFRPKWPSSSFASSDGLVTAMAYRLPHVVMGDRSGNIRWWDVTSGLSSSFSTHREGIRRIKFSPVVHGDRSRGRIAVLFYDNTFSIFDLDSPDPLANALLQPQSPGTLVLELDWLSTRTRKDEPLMLCIAGADSSFRLIEVNIDAKGSSISKPVATKERFRPMPFCLPVLFPTAHALVRLCE

SEQ ID NO: 180981 - protein, 831 aa, Zea Mays
MASSAAPPASPSSRSHGNAAGAGSSATAMMLPGPPGRGNGGCIDLSPAGLLAHGAGSSVVVSDPRSMQLLCVLPMPSSSLASFVTAVRWAPPDTPSLDDDDDDRRPLRLAAGDRHGRIAVWDARARAVLHWLNLDEARGVAPGSGGGVQDLCWVHHGSGWHLASIHGPSLLCIWETSNSPRVLWMFDAAPEYLSCLRRDPFDARHLCAIGLRGFLLSAIPRQDSDISLQEHRVNCGAGDVADLQRLEKEISAPVPAPALAAFPLFSSRICFSPLWRQILFVTFPRELIVFDLSYSTALSVTPLPRGFGKFSDVMADPDIDMLYCTHLDGKLSIWRRKEGEQVHLLCAVEELMPSIGTVVPSPAVLAATIWQSESIFRSIEKQCQDLAQPHSFMIDTNSDQNACQGTMTYLTSISEDGKIWSWLLKFDKSALPSKANLGRPSHNNAATANTCSNRPDFIIKINLVGQLHLLSSTVTTLAVPSPSLLATVARGGNNPAPAVPLVALGTQNGTIEVVDVVANAVSASFSVHSSTVRGLRWLGNSRLVSFTYNQVNDKTGGYNNKLVITCLRSGLNRSFRVLQKPERAPIRALRASSSGRYLLILFRDAPVEVWAMTKNPMMLRSLALPFTVLEWTLPAAPRPGQNASSKQSSTSKERSAEASGAESSDETCESFAFALVNGALGVFEVHGRRIRDFRPKWPSSSFASSDGLVTAMAYRLPHVVMGDRSGNIRWWDVTSGLSSSFSTHREGIRRIKFSPVVHGDRSRGRIAVLFYDNTFSIFDLDSPDPLANALLQPQSPGTLVLELDWLSTRTRKDEPLMLCIAGADSSFRLIE

SEQ ID NO: 180982 - protein, 446 aa, Zea Mays
MPFCLPVLFPTAHALALRMILQLGVKPSWFECNSSDKLTGDSFKVAPTFGDLRSYMIETTLPPIGDAVVAELLLKVLEPYRKEGCILDDGRASLYSAIVNKGACARFAFAAAIFGDFQEALFWLQLPQALRHFLGKSTSRSREKISQSSLHPDSEQSSRFNRIASRERSASEKFTKNAANYGQLSSMAFNQEQLWFNASERIPWHDKLDGEDALQKHVHELVSLGNLEAAVSLLLSTPPEGSNFYPNALRAVVLSSAVSQSLHELAVKVVAANMVRTDKSLSGTHLLCAVGRYQEACSQLQDAGCWNDAATLAASHLHGSDYARVLQRWADYVLRGEHNMWRALILYVAAGALPEALDTLRKSQRPDTAAMFLLACHETYSQALSESEPEDDTSVLALTPTPEQTEKLRFPSKNVADEDLIAVSEVFGQYQQKLVHLCMDAEPTSD

SEQ ID NO: 180983 - protein, 1499 aa, Zea Mays
MGSVGVQRQLPHMIPTPGFSNQQNVPSNPDYSNGTGYFNGEPAVASHMQHQNQFPSNQIQHIGGHNNSGIHSSMLDSSSAYGLSDGHMNGGIGVHGSNMQLTNRTTAPQTYMNISPYGNSSKPMQQQFNQHPQQRIPTSVEMTGSGSFYATGSTPLTTANSQSMNVANLQSRSRMNQMLVSNQLNIQSIQQQPQIKNEVLDQTEKVNFQSPQLTHDQLLRQHPMPQHQVQPNSQFVQNQYHINQQQPNSQHQQAMLRNNSFKQSQMASTHSMQLAEQGSLLHTELVSSQTSDPADLPSFQGQYQQRNALDNVKGGQMLGHLSSSQNFHPSVSHGSQQLLPSNQQLDDGSNAVSYVLKGSQAEQMLRPQWQPQTMEKAPVTTNSTLEKQIQEDFCQRAMSQDGAQQPFSSDWRLSNCTAASIDPALPKPAAGGFEQVNGNIHYLRQIKWLLLLFHAKTCTYPVGSCKFHGCVQVQELLKHFQNCQSKDCSYRSCSKSKMMSHHYKTCVDEQCPVCSVVRKFLRQSTEQASKQKALESRKLAQQNVPQRIMNGIEGDRMDVDPMSVEAFDDQPFVPKRLKTHPPSPSGLENDISVVSNYHVNSGFALQETQPEQLDHNNRTSYLKREVDAKADMRAPQKPIKISYGIDGNVTASRHNVIPGVPSEINSHIKQENLLVDKETSETALEVKNETNDPTDATVSKSGKPKIKGVSMTELFTPEQIMEHIDSLRLWVGQSKAKAEKNQAIGHSENENSCQLCRVEKLTFEPPPIYCSPCGARIKRNAPYYTVGTGDTRHYFCIPCYNESRGETIEVEGQTFPKARLEKKRNDEETEEWWVQCDKCECWQHQICALFNGRRNDGGQAEYTCPNCYVEEVKCGLRKPLPQSAVLGAKDLPRTVLSDHIEDRLFKRLKQEKQDRAAAAGKNIDEIPGAEGLVVRVVSSVDKKLEVKPRFLEIFQEDNYPTEFPYKSKAVLLFQKIEGVEVCLFGMYVQEFGAECSFPNQRRVYLSYLDSVKYFRPEIKTVSGEALRTFVYHEILIGYLEYCKLRGFTSCYIWACPPLKGEDYILYCHPEIQKTPKSDKLREWYLSMLRKASKEEIVVELTNLYDHFFLTMGECKAKVTASRLPYFDGDYWPGAAEDMINQLRQEEDDRKLQKKSKTKKIITKRALKAAGHTDLSGNASKDAMLMQKLGETIYPMKEDFIMVHLQYSCSHCCTLMVSGRRWVCHQCRSFYICDKCYDAEQQLDDRERHPSNNRDTHMLHPVDILGVPKDTKDRDDILESEFFDTRQAFLSLCQGNHYQYDTLRRAKHSSMMVLYHLHNPTAPAFVTTCNVCSHDIETGQGWRCEICPDFDVCNSCFQKGVVTHPHKLTNHPSAADRDAQNAEARQMRVQQLRKMLDLLVHASTCRSGSCQYPNCRKVKGLFRHGMQCKTRASGGCVLCKKMWYMLQLHARACKDSDCNVPRCRDLKEHLRRLQQQSDSRRRAAVNEMMRQRAAEVAANE

SEQ ID NO: 180984 - protein, 255 aa, Zea Mays
MAAARRLFSFHLQARPLAAGVAVATPHCHGKHDAVSCKATGKTKPKAKAGKGGERQHRRALEEHLKRRTRSAAAFDADLYGRRAHEHHIPVLLGEVLAAFRRPRPLRSFVDCTLGAAGHSLAMMEAHPELELYIGMDVDPSALGIGHGHIEAFLAGREREANGGEDDALLGTLRAYTHVKNFKYIKQVLSSVDESLVVGSSGVDGILIDLGMSSMQVNKSNRGFSVLQDGPLDMRMDPKTGNFKSRGHFEFLAGA

SEQ ID NO: 180985 - protein, 321 aa, Zea Mays
MAAARRLFSFHLQARPLAAGVAVATPHCHGKHDAVSCKATGKTKPKAKAGKGGERQHRRALEEHLKRRTRSAAAFDADLYGRRAHEHHIPVLLGEVLAAFRRPRPLRSFVDCTLGAAGHSLAMMEAHPELELYIGMDVDPSALGIGHGHIEAFLAGREREANGGEDDALLGTLRAYTHVKNFKYIKQVLSSVDESLVVGSSGVDGILIDLGMSSMQVNKSNRGFSVLQDGPLDMRMDPKATLRAEDILNSWPELELGRILREYGEESNWQSVQKQIVKARSVGGLHSTGDLVKLIQRMCTISSGLDQDFNKSVSGPQDCSQ

SEQ ID NO: 180986 - protein, 416 aa, Zea Mays
MAAARRLFSFHLQARPLAAGVAVATPHCHGKHDAVSCKATGKTKPKAKAGKGGERQHRRALEEHLKRRTRSAAAFDADLYGRRAHEHHIPVLLGEVLAAFRRPRPLRSFVDCTLGAAGHSLAMMEAHPELELYIGMDVDPSALGIGHGHIEAFLAGREREANGGEDDALLGTLRAYTHVKNFKYIKQVLSSVDESLVVGSSGVDGILIDLGMSSMQVNKSNRGFSVLQDGPLDMRMDPKATLRAEDILNSWPELELGRILREYGEESNWQSVQKQIVKARSVGGLHSTGDLVKLIQRMCTISSGRQGWIKTSTRVFQALRIAVNDELRVLEDSLHSCFDCLATGGRLAVISFHSLEDRIVKKTFLELIHGGEANEEDDKDDQALTDIEDGDEPWSGQRVQGRNGTFFFFLRESLCM

SEQ ID NO: 180987 - protein, 113 aa, Zea Mays
MGGVKFCLFNIRYIDIDWNPTFCVPNISMTRDLLPHELVLHPGSIKCRTSAVKSHRTGRSWYLGESYIEYLCDSIQMGVHRITVVWLSSVVALPLSVFLQNQKKLDWIRRRGT

SEQ ID NO: 180988 - protein, 245 aa, Zea Mays
MEPEIFKSLASYLRREGLVRDTRIKVEEKLAFFLYMLSHNASFEDLIEEFGHSGDTYHRHIKHFFDLVVPTLSKQFLKPPNPNHVHQKIERNPRFYPYFKMEMKAMIKAVNKATILETQLHNKWKTRANWNSMLEKTLVDLLHEHNTPEYKGNNGWTPDAWNKIAKEFQERERYAGFSKVQIQEKEKELKRDYRMLKDARKQSGVSWDEKRCMIQADPPIWDNIIKVSLFPCFYKLEIFLCVLSS

SEQ ID NO: 180989 - protein, 168 aa, Zea Mays
MEKKPCFSSTRSRCLMEWMNRRSLLLLRNLSLFSVGTLAENRAKRRVWIKTTHKTMSANEPEDGWTKRMSKRKLIVKWPSSNNTNIVFISGTLAENRAKRRVWIKTTHKTMSANEPEDGWTKRMSKRKLIVKWPSSNNTNIVFISGKPRCICHLLVVLKLLSLICCIR

SEQ ID NO: 180990 - protein, 113 aa, Zea Mays
MEKKPCFSSTRSRCLMEWMNRRSLLLLRNLSLFSVGTLAENRAKRRVWIKTTHKTMSANEPEDGWTKRMSKRKLIVKWPSSNNTNIVFISGKPRCICHLLVVLKLLSLICCIR

SEQ ID NO: 180991 - protein, 97 aa, Zea Mays
MVSSLQCPRFPWPPLPHLPPQAELAQPLSAPWFLPTPAAMAPPSPARPPSVPSLLSVLPWSSSPPLILQQQLPLFLLFSMNESPSASPLPFVKWYAS

SEQ ID NO: 180992 - protein, 97 aa, Zea Mays
MVSSLHCPRFPWPPLPHLPPQTELAQPLSAPWFLPTPAAMAPPSPARPPSVPSLLSVLPWSSSPPLILQQQLPLFLLFSMNESPSASPLPFVKWYAS

SEQ ID NO: 180993 - protein, 328 aa, Zea Mays
MDIRRDFHMAEGEGEWSYSKNCRRQLSARPGQWSRLPSSRCTQLLPRTMVVADLGCSAGPNTLLFISSVLSSIAAAAAAERCKPPSGGGDDDDHHVELQFVLNDLPGNDFNHLFRSVEEEFRRAAGCERAPHPPYYVMGLPESYYNRLFPRQSVHLFHSSYCLQWRSQEPEGLEAWRKPCLNEDNIYIARTTTPSVAKLFQEQFQKDFSLFLKLRHEELVHGGRMVLIFLGRKNEDVYSGDLNQLFALVATALQSLVLKGLVEKEKLESFNLPVYGPSVGEVEELVTRSGLQFSMDLIKQFEMNWDPFDDSEGDNDVASSSRTALAVA

SEQ ID NO: 180994 - protein, 529 aa, Zea Mays
MLLQIRPVPAASTTRTLSVLNLFLSTILLLQRGSCLGRQVGAAAQTSDLGMGSFGMDWNQKASVLWDWENLPPVAVGASGSENPRMAAAPQALHSACGTISSSSEMGYGSSKSSVSASADDSSPKAKGKSMELNFAPDKVPDKNTDSGKVDDARTSPSSPVIAISSAEPVLSLKLGKRTYFEDVCGGQSVKSLPSDTSAVTPPPASPKKTKVTPNKKSYCQVEGCKVDLSSAKEYHRKHRVCEPHSKAPKVVVAGLERRFCQQCSRFHGLAEFDQKKKSCRRRLNDHNARRRKPQPEALSFGSSRLSAMFYDTRQHTSLLFGQGPYGQMRSCASSSWDNPGGGFKFAETKGPWLRAGGVDGLHQPSQQVWNNFMPHGVHQDFDGFTAFKGTNAKVLHQGVEASAVASNQNGAPQPDLHRALSLLSNSWAGGGTGTGTDQHPTAQLRHAALSSSLAASSVSVAQASPAGLWQDGGAALGHHDYAHAFQAINTPGGGGAAAPIAVGQELLQLPRPPSLYDDGSSSRYDLMR

SEQ ID NO: 180995 - protein, 201 aa, Zea Mays
MRSCASSSWDNPGGGFKFAETKGPWLRAGGVDGLHQPSQQVWNNFMPHGVHQDFDGFTAFKGTNAKVLHQGVEASAVASNQNGAPQPDLHRALSLLSNSWAGGGTGTGTDQHPTAQLRHAALSSSLAASSVSVAQASPAGLWQDGGAALGHHDYAHAFQAINTPGGGGAAAPIAVGQELLQLPRPPSLYDDGSSSRYDLMR

SEQ ID NO: 180996 - protein, 412 aa, Zea Mays
MEHIHYEDENTQYLCICPVNKALNMVCCWVEDPNSDAFKRHLARIPDFLWISEDGMKAQVYDGCQSWETSFIIQAFCATDLVNDYGSTLQRAYEFMKNSQVMRNHPGDQRYWHRHRSKGSWTLSSADNGWAVSDTTGEALKAVLLLSKISNKNNLVGDPIERERLHDAIDCLLSFANKDGTFSTYECKRTYSWLEILSPCETFPNIVVDYPYPECTSSVLQALILFKDLYPGYRTEEIEALVRSAATFIETKQQEDGSWLGNWGICFTYGAFFSIKGLVASGRTYKNSPCIRKACHFILSKQLSTGGWGESHIAIETQVYVNLKGDRAHAVNTAWAMLALIYAGQFERDPTPLHRAAKELINMQLETGEFPQQEHVGCFNCSLYFNYPSYRNLFPIWALGEYHRGLRAKKDN

SEQ ID NO: 180997 - protein, 697 aa, Zea Mays
MWRLTVAEGGGPWLRSTNGFVGRAVWEFDPDLGTPEERDEVERVRQEFSDHRFQRRESADLLMRMQCAKQNRSQRRDLPRIKLGEDEHVTEEIVLSSLRSALDQFSSLQASDGHWPGDFSGIMFIMPGLIFALYVTGSLNVVISPEHRHEICRYIYNHQVLGLFDWSGNNPIFPELWSIPQFLPFHPGKFWCFARMVYLPMAYLYGKKFVGPITPTILALREEIYDTPYGKIDWSDARSKCAKEDLICPRTLLQNVIWTSLYRCVEPVLSSWPINKLRERALGNIMEHIHYEDENTQYLCICPVNKALNMVCCWVEDPNSDAFKRHLARIPDFLWISEDGMKAQVYDGCQSWETSFIIQAFCATDLVNDYGSTLQRAYEFMKNSQVMRNHPGDQRYWHRHRSKGSWTLSSADNGWAVSDTTGEALKAVLLLSKISNKNNLVGDPIERERLHDAIDCLLSFANKDGTFSTYECKRTYSWLEILSPCETFPNIVVDYPYPECTSSVLQALILFKDLYPGYRTEEIEALVRSAATFIETKQQEDGSWLGNWGICFTYGAFFSIKGLVASGRTYKNSPCIRKACHFILSKQLSTGGWGESHIAIETQVYVNLKGDRAHAVNTAWAMLALIYAGQFERDPTPLHRAAKELINMQLETGEFPQQEHVGCFNCSLYFNYPSYRNLFPIWALGEYHRGLRAKKDN

SEQ ID NO: 180998 - protein, 756 aa, Zea Mays
MWRLTVAEGGGPWLRSTNGFVGRAVWEFDPDLGTPEERDEVERVRQEFSDHRFQRRESADLLMRMQCAKQNRSQRRDLPRIKLGEDEHVTEEIVLSSLRSALDQFSSLQASDGHWPGDFSGIMFIMPGLIFALYVTGSLNVVISPEHRHEICRYIYNHQNEDGGWGTLILGSSTMFGTCSNYITLRLLGEEPYANNSVLAKGRAWILSHGGATLIPQWGKIWLSVLGLFDWSGNNPIFPELWSIPQFLPFHPGKFWCFARMVYLPMAYLYGKKFVGPITPTILALREEIYDTPYGKIDWSDARSKCAKEDLICPRTLLQNVIWTSLYRCVEPVLSSWPINKLRERALGNIMEHIHYEDENTQYLCICPVNKALNMVCCWVEDPNSDAFKRHLARIPDFLWISEDGMKAQSWETSFIIQAFCATDLVNDYGSTLQRAYEFMKNSQVMRNHPGDQRYWHRHRSKGSWTLSSADNGWAVSDTTGEALKAVLLLSKISNKNNLVGDPIERERLHDAIDCLLSFANKDGTFSTYECKRTYSWLEILSPCETFPNIVVDYPYPECTSSVLQALILFKDLYPGYRTEEIEALVRSAATFIETKQQEDGSWLGNWGICFTYGAFFSIKGLVASGRTYKNSPCIRKACHFILSKQLSTGGWGESHIAIETQVYVNLKGDRAHAVNTAWAMLALIYAGQFERDPTPLHRAAKELINMQLETGEFPQQEHVGCFNCSLYFNYPSYRNLFPIWALGEYHRGLRAKKDN

SEQ ID NO: 180999 - protein, 510 aa, Zea Mays
MWRLTVAEGGGPWLRSTNGFVGRAVWEFDPDLGTPEERDEVERVRQEFSDHRFQRRESADLLMRMQCAKQNRSQRRDLPRIKLGEDEHVTEEIVLSSLRSALDQFSSLQASDGHWPGDFSGIMFIMPGLIFALYVTGSLNVVISPEHRHEICRYIYNHQNEDGGWGTLILGSSTMFGTCSNYITLRLLGEEPYANNSVLAKGRAWILSHGGATLIPQWGKIWLSVLGLFDWSGNNPIFPELWSIPQFLPFHPGKFWCFARMVYLPMAYLYGKKFVGPITPTILALREEIYDTPYGKIDWSDARSKCAKEDLICPRTLLQNVIWTSLYRCVEPVLSSWPINKLRERALGNIMEHIHYEDENTQYLCICPVNKALNMVCCWVEDPNSDAFKRHLARIPDFLWISEDGMKAQVYDGCQSWETSFIIQAFCATDLVNDYGSTLQRAYEFMKNSQVMRNHPGDQRYWHRHRSKGSWTLSSADNGWAVSDTTGEALKVSYPLLFLSNTQRSCVSLY

SEQ ID NO: 181000 - protein, 149 aa, Zea Mays
MASPPPVATAGPHSVFVYGTLMEEEVVRVLLGRAPPSSSPALLPDHRRFSLRGRVYPAILPARAHAVIQGLTDRELHVFDMFEDEEYVKTTVEVSLTDASEKSLAYAYIWGNQGDPDLYGEWDFEEWRKVHLKYYLEMTREFMLELGQF

SEQ ID NO: 181001 - protein, 791 aa, Zea Mays
MAAPAARRIVGAEVPIPGSDKLRWIDLTIPSSSAAAPASPSDPFVCVPPRAASGCHIIPSGDSQYYLSWRIHEEHPNVLEVIELSPSKEFPSFGLRLAFQEALSPFAFLCEREGRRQGELVYMLYVLTVSGVALLCHLRSPFSYVSGSVLHQDDIAEFNLQTQAQSAKVTAVTAKPGCIVIGRQDGSICSYSLGKLAPNSPGFSNELRDDAGIGRLWTLMSRTKTVGPVQDIVATVVNERDLLFVLHLDGHLRIWDNHMKLLNYNVHSNDIEGHPSRLWVGKADDDQELISLAILHQNTVVQGCDYVAVYGFGFSAAERFMFSSEPSISTIPLLEGKLADLKIATYKLWILKEFGSMLYEILQYDIDTETAKCCSEKVCCYVLQEDAISEQLFQSSDNALDDLVWTADSMFSSLKEQAFTLISSMFLRRLLQPGVNHCSALRETLLEHKRFLSDSEFQSLTANGLRKEILSIIEQEGSSQTASATAYHWKQFSARYLHNWCWHNKPYGLFLDTTNEVFGLVRKGSFSLFRCLEGLEMLIYGYDHGVNLLDDVSDFELLNEVLRCMGNIHHLLGRSSTAAYYESLISSIISSDEIVSHIVKILETGFSHQSSSSLSTLLGMDTYVERRQAAHKSQRKFSVEMLRSFHTLQSRSASWSAVFDVIEKFMKCLNTNMNVQSYGSKRVCNVNSVLLVQATSQVARTMFECAFDLFLFLSYLVGVGGQVSLLQNDVARIKLKLFPMIQDILGQWIVLHFVGTSPTSPPTIDDFSYQLSSLQLDLAQLCEAFPLSQRS

SEQ ID NO: 181002 - protein, 727 aa, Zea Mays
MAAPAARRIVGAEVPIPGSDKLRWIDLTIPSSSAAAPASPSDPFVCVPPRAASGCHIIPSGDSQYYLSWRIHEEHPNVLEVIELSPSKEFPSFGLRLAFQEALSPFAFLCEREGRRQGELVYMLYVLTVSGVALLCHLRSPFSYVSGSVLHQDDIAEFNLQTQAQSAKVTAVTAKPGCIVIGRQDGSICSYSLGKLAPNSPGFSNELRDDAGIGRLWTLMSRTKTVGPVQDIVATVVNERDLLFVLHLDGHLRIWDNHMKLLNYNVHSNDIEGHPSRLWVGKADDDQELISLAILHQNTVVQGCDYVAVYGFGFSAAERFMFSSEPSISTIPLLEGKLADLKIATYKLWILKEFGSMLYEILQYDIDTETAKCCSEKVCCYVLQEDAISEQLFQSSDNALDDLVWTADSMFSSLKEQAFTLISSMFLRRLLQPGVNHCSALRETLLEHKRFLSDSEFQSLTANGLRKEILSIIEQEGSSQTASATAYHWKQFSARYLHNWCWHNKPYGLFLDTTNEVFGLVRKGSFSLFRCLEGLEMLIYGYDHGVNLLDDVSDFELLNEVLRCMGNIHHLLGRSSTAAYYESLISSIISSDEIVSHIVKILETGFSHQSSSSLSTLLGMDTYVERRQAAHKSQRKFSVEMLRSFHTLQSRSASWSAVFDVIEKFMKCLNTNMNVQSYGSKRVCNVNSVLLVQATSQVARTMFECAFDLFLFLSYLVGVGGQVRYNF

SEQ ID NO: 181003 - protein, 754 aa, Zea Mays
MAAPAARRIVGAEVPIPGSDKLRWIDLTIPSSSAAAPASPSDPFVCVPPRAASGCHIIPSGDSQYYLSWRIHEEHPNVLEVIELSPSKEFPSFGLRLAFQEALSPFAFLCEREGRRQGELVYMLYVLTVSGVALLCHLRSPFSYVSGSVLHQDDIAEFNLQTQAQSAKVTAVTAKPGCIVIGRQDGSICSYSLGKLAPNSPGFSNELRDDAGIGRLWTLMSRTKTVGPVQDIVATVVNERDLLFVLHLDGHLRIWDNHMKLLNYNVHSNDIEGHPSRLWVGKADDDQELISLAILHQNTVVQGCDYVAVYGFGFSAAERFMFSSEPSISTIPLLEGKLADLKIATYKLWILKEFGSMLYEILQYDIDTETAKCCSEKVCCYVLQEDAISEQLFQSSDNALDDLVWTADSMFSSLKEQAFTLISSMFLRRLLQPGVNHCSALRETLLEHKRFLSDSEFQSLTANGLRKEILSIIEQEGSSQTASATAYHWKQFSARYLHNWCWHNKPYGLFLDTTNEVFGLVRKGSFSLFRCLEGLEMLIYGYDHGVNLLDDVSDFELLNEVLRCMGNIHHLLGRSSTAAYYESLISSIISSDEIVSHIVKILETGFSHQSSSSLSTLLGMDTYVERRQAAHKSQRKFSVEMLRSFHTLQSRSASWSAVFDVIEKFMKCLNTNMNVQSYGSKRVCNVNSVLLVQATSQVARTMFECAFDLFLFLSYLVGVGGQNKTEAVPNDSRHIGTMDCSPFCRNLTNLTTNH

SEQ ID NO: 181004 - protein, 687 aa, Zea Mays
MFSSEPSISTIPLLEGKLADLKIATYKLWILKEFGSMLYEILQYDIDTETAKCCSEKVCCYVLQEDAISEQLFQSSDNALDDLVWTADSMFSSLKEQAFTLISSMFLRRLLQPGVNHCSALRETLLEHKRFLSDSEFQSLTANGLRKEILSIIEQEGSSQTASATAYHWKQFSARYLHNWCWHNKPYGLFLDTTNEVFGLVRKGSFSLFRCLEGLEMLIYGYDHGVNLLDDVSDFELLNEVLRCMGNIHHLLGRSSTAAYYESLISSIISSDEIVSHIVKILETGFSHQSSSSLSTLLGMDTYVERRQAAHKSQRKFSVEMLRSFHTLQSRSASWSAVFDVIEKFMKCLNTNMNVQSYGSKRVCNVNSVLLVQATSQVARTMFECAFDLFLFLSYLVGVGGQVSLLQNDVARIKLKLFPMIQDILGQWIVLHFVGTSPTSPPTIDDFSYQLSSLQLGKSDELSLHRKLGCSDFTLASLLDFPKSPEGDVMSPCFLGPAEIINLVRRFSSLIMHGGNFECVHTFLGCTINLSAVLIRHSQYEAAQNLLGILETYLNNGKVSHTGQDADTACSAYLHLNGFCLLMIAHDEANIILRESKVHDAIRCFFRAASGYEAPKALENFSLETGFQVSGESRSISLWRLNYYEWAMQIFEQHSMSEGAYQFALAALELVLLDGIDNGIEAEGLQR

SEQ ID NO: 181005 - protein, 953 aa, Zea Mays
MAAPAARRIVGAEVPIPGSDKLRWIDLTIPSSSAAAPASPSDPFVCVPPRAASGCHIIPSGDSQYYLSWRIHEEHPNVLEVIELSPSKEFPSFGLRLAFQEALSPFAFLCEREGRRQGELVYMLYVLTVSGVALLCHLRSPFSYVSGSVLHQDDIAEFNLQTQAQSAKVTAVTAKPGCIVIGRQDGSICSYSLGKLAPNSPGFSNELRDDAGIGRLWTLMSRTKTVGPVQDIVATVVNERDLLFVLHLDGHLRIWDNHMKLLNYNVHSNDIEGHPSRLWVGKADDDQELISLAILHQNTVVQGCDYVAVYGFGFSAAERFMFSSEPSISTIPLLEGKLADLKIATYKLWILKEFGSMLYEILQYDIDTETAKCCSEKVCCYVLQEDAISEQLFQSSDNALDDLVWTADSMFSSLKEQAFTLISSMFLRRLLQPGVNHCSALRETLLEHKRFLSDSEFQSLTANGLRKEILSIIEQEGSSQTASATAYHWKQFSARYLHNWCWHNKPYGLFLDTTNEVFGLVRKGSFSLFRCLEGLEMLIYGYDHGVNLLDDVSDFELLNEVLRCMGNIHHLLGRSSTAAYYESLISSIISSDEIVSHIVKILETGFSHQSSSSLSTLLGMDTYVERRQAAHKSQRKFSVEMLRSFHTLQSRSASWSAVFDVIEKFMKCLNTNMNVQSYGSKRVCNVNSVLLVQATSQVARTMFECAFDLFLFLSYLVGVGGQVSLLQNDVARIKLKLFPMIQDILGQWIVLHFVGTSPTSPPTIDDFSYQLSSLQLGKSDELSLHRKLGCSDFTLASLLDFPKSPEGDVMSPCFLGPAEIINLVRRFSSLIMHGGNFECVHTFLGCTINLSAVLIRHSQYEAAQNLLGILETYLNNGKVSHTGQDADTACSAYLHLNGFCLLMIAHDEANIILRESKVHDAIRCFFRAASGYEAPKALENFSLETGFQVSGGI

SEQ ID NO: 181006 - protein, 312 aa, Zea Mays
MENSAFGTNSELSRLQFCVDIEILEKEYILTEAQYMLSTLKSSFDFSESQSIESLMDILINEKLYDIAFTIVLKFWKESEIKKQLDRVFSVIAQQCCSNRSDNKSSKQVPLLPSSENDAWEINNRSIAVTQQLQGSNHWETLELYLDKYKDLHPRLPVIVAETLLYTDPEIELPLWLVQMFKANKAGNKISWGMSGKEADPAALFRLYINYGRHAEATNLLVEYLESFASSRPVDVLHRKKMSAVWFPYTAVERLWCQLGEMQRAGHSVDQCDRLKKLLHGALMSHLQQVVVDSDDVLSSVGDGQGMEDQSS

SEQ ID NO: 181007 - protein, 234 aa, Zea Mays
MYRYFVRLNREGNAGGSHQLPHVLQERLHALSAAINALQLVDPSFAWLDSICEADDKISPSKRPRNLLMENSAFGTNSELSRLQFCVDIEILEKEYILTEAQYMLSTLKSSFDFSESQSIESLMDILINEKLYDIAFTIVLKFWKESEIKKQLDRVFSVIAQQCCSNRSDNKSSKQVPLLPSSENDAWEINNRSIAVTQQLQGSNHWETLELYLLSSWKADLLTKLRNVFYVTP

SEQ ID NO: 181008 - protein, 221 aa, Zea Mays
MYRYFVRLNREGNAGGSHQLPHVLQERLHALSAAINALQLVDPSFAWLDSICEADDKISPSKRPRNLLMENSAFGTNSELSRLQFCVDIEILEKEYILTEAQYMLSTLKSSFDFSESQSIESLMDILINEKLYDIAFTIVLKFWKESEIKKQLDRVFSVIAQQCCSNRSDNKSSKQVPLLPSSENDAWEINNRSIAVTQQLQGSNHWETLELYLESCASLY

SEQ ID NO: 181009 - protein, 338 aa, Zea Mays
MYRYFVRLNREADDKISPSKRPRNLLMENSAFGTNSELSRLQFCVDIEILEKEYILTEAQYMLSTLKSSFDFSESQSIESLMDILINEKLYDIAFTIVLKFWKESEIKKQLDRVFSVIAQQCCSNRSDNKSSKQVPLLPSSENDAWEINNRSIAVTQQLQGSNHWETLELYLDKYKDLHPRLPVIVAETLLYTDPEIELPLWLVQMFKANKAGNKISWGMSGKEADPAALFRLYINYGRHAEATNLLVEYLESFASSRPVDVLHRKKMSAVWFPYTAVERLWCQLGEMQRAGHSVDQCDRLKKLLHGALMSHLQQVVVDSDDVLSSVGDGQGMEDQSS

SEQ ID NO: 181010 - protein, 161 aa, Zea Mays
MYRYFVRLNREGNAGGSHQLPHVLQERLHALSAAINALQLVDPSFAWLDSICEADDKISPSKRPRNLLMENSAFGTNSELSRLQFCVDIEILEKEYILTEAQYMLSTLKSSFDFSGNWTVYFQSLRSNAARTDQTTNQVNKCHFCLLLRMMHGRSTIGVLL

SEQ ID NO: 181011 - protein, 1037 aa, Zea Mays
MGLDGTVSGVVSRKVLPACGGLCCLCPSLRPRSRQPVKRYKKILIDIFPAEQEDGPNVRRIGRLCEYVARNPHRVPKITAYLERRCYRELRNEQYDIVKVVVLIYRRLLVSCNEQMPLLANSLLSIIQTLLDQSRQDDMCIIGCETLFDFIVTQVDGTYQFNLEEFIPRLCKLSQIVRDKEKANALRAAALQSLSAMIWFMGELSHISSEFDSVVQVVLESYEPRQVQSDNSATENPGCQLVEEVLKPEGHASPSTFIFSVIPSWDSIVSDYGGIQLLMDDAKDPYFWSRVCVHNMAKLSREATTFRRVMESLFCHFDNTNSWSSKNGLALCVLLDMQMFMEKSGTNINLMISVLVKHLEHKAILKQPEMQLSIVEVITALAEQSRAQASAATIVAISDLVRHMKKTLHLALGSNDLEVVKWNDKLRMAFDECIVQLSKKVGDAGPVLDMMSVMLENISHTPLIAIATTSAVYRTAQIIASIPNLSYKNKVFPEALFHQLLLAMVHPDHETRVGAHRIFSVVLVPSSVSPFPNLKSLDQCRKHDVQRTLSRVVSVFSSSAALFDKLRRDRNSFREYLHEGSMNRILHGIDDEIATPNDLPGSQSLRQSLRLSSVSHKHSYTSLKEGQSPLTESINEMETIVLRLSSQQATLLLSSIWRQALSPKNAPQNYEAIAHTYSLLLLFLGSKTPIFEVLAPSFQIAFSLMSHSLGGTDSLPPSRRRSLFTLATSMIVFASRAFNVAPLLPICKLMLNDGTMDPFLHLVHENKLQAVKDYTEDPSTSYGSPEDNQNALKSLSVVELTNSCSRESMILTIMNSIRDLPDLELENIRSQLLRDFSPDDVCPSSAHFLESPGKIAPPCSDDDTDYDYQEVHGNFEQAELIDLRNDNNTYLEASATTLAAIAIPVPTTNLLSIDELLETVVNDVSSQTGGQCLVSMAGDIPFQEMTSHCEAFSMGKHHKMSLLMSFKQNKQAAMVVVPDNQVSHAEAAHTSDKQSTNPFLLQSISAGEAQVAGDVQQPFLRLPPSSPYDNFLKAAGC

SEQ ID NO: 181012 - protein, 1024 aa, Zea Mays
MGLDGTVSGVVSRKVLPACGGLCCLCPSLRPRSRQPVKRYKKILIDIFPAEQEDGPNVRRIGRLCEYVARNPHRVPKITAYLERRCYRELRNEQYDIVKVVVLIYRRLLVSCNEQMPLLANSLLSIIQTLLDQSRQDDMCIIGCETLFDFIVTQVDGTYQFNLEEFIPRLCKLSQIVRDKEKANALRAAALQSLSAMIWFMGELSHISSEFDSVVQVVLESYEPRQVQSDNSATENPGCQLVEEVLKPEGHASPSTFIFSVIPSWDSIVSDYGGIQLLMDDAKDPYFWSRVCVHNMAKLSREATTFRRVMESLFCHFDNTNSWSSKNGLALCVLLDMQMFMEKSGTNINLMISVLVKHLEHKAILKQPEMQLSIVEVITALAEQSRAQASAATIVAISDLVRHMKKTLHLALGSNDLEVVKWNDKLRMAFDECIVQLSKKVGDAGPVLDMMSVMLENISHTPLIAIATTSAVYRTAQIIASIPNLSYKNKVFPEALFHQLLLAMVHPDHETRVGAHRIFSVVLVPSSVSPFPNLKSLDQCRKHDVQRTLSRVVSVFSSSAALFDKLRRDRNSFREYLHEGSMNRILHGIDDEIATPNDLPGSQSLRQSLRLSSVSHKHSYTSLKEGQSPLTESINEMETIVLRLSSQQATLLLSSIWRQALSPKNAPQNYEAIAHTYSLLLLFLGSKTPIFEVLAPSFQIAFSLMSHSLGGTDSLPPSRRRSLFTLATSMIVFASRAFNVAPLLPICKLMLNDGTMDPFLHLVHENKLQAVKDYTEDPSTSYGSPEDNQNALKSLSVVELTNSCSRESMILTIMNSIRDLPDLELENIRSQLLRDFSPDDVCPSSAHFLESPGKIAPPCSDDDTDYDYQEVHGNFEQAELIDLRNDNNTYLEASATTLAAIAIPVPTTNLLSIDELLETVVNDVSSQTGGQCLVSMAGDIPFQEMTSHCEAFSMGKHHKMSLLMSFKQNKQAAMVVVPDNQSTNPFLLQSISAGEAQVAGDVQQPFLRLPPSSPYDNFLKAAGC

SEQ ID NO: 181013 - protein, 899 aa, Zea Mays
MCIIGCETLFDFIVTQVDGTYQFNLEEFIPRLCKLSQIVRDKEKANALRAAALQSLSAMIWFMGELSHISSEFDSVVQVVLESYEPRQVQSDNSATENPGCQLVEEVLKPEGHASPSTFIFSVIPSWDSIVSDYGGIQLLMDDAKDPYFWSRVCVHNMAKLSREATTFRRVMESLFCHFDNTNSWSSKNGLALCVLLDMQMFMEKSGTNINLMISVLVKHLEHKAILKQPEMQLSIVEVITALAEQSRAQASAATIVAISDLVRHMKKTLHLALGSNDLEVVKWNDKLRMAFDECIVQLSKKVGDAGPVLDMMSVMLENISHTPLIAIATTSAVYRTAQIIASIPNLSYKNKVFPEALFHQLLLAMVHPDHETRVGAHRIFSVVLVPSSVSPFPNLKSLDQCRKHDVQRTLSRVVSVFSSSAALFDKLRRDRNSFREYLHEGSMNRILHGIDDEIATPNDLPGSQSLRQSLRLSSVSHKHSYTSLKEGQSPLTESINEMETIVLRLSSQQATLLLSSIWRQALSPKNAPQNYEAIAHTYSLLLLFLGSKTPIFEVLAPSFQIAFSLMSHSLGGTDSLPPSRRRSLFTLATSMIVFASRAFNVAPLLPICKLMLNDGTMDPFLHLVHENKLQAVKDYTEDPSTSYGSPEDNQNALKSLSVVELTNSCSRESMILTIMNSIRDLPDLELENIRSQLLRDFSPDDVCPSSAHFLESPGKIAPPCSDDDTDYDYQEVHGNFEQAELIDLRNDNNTYLEASATTLAAIAIPVPTTNLLSIDELLETVVNDVSSQTGGQCLVSMAGDIPFQEMTSHCEAFSMGKHHKMSLLMSFKQNKQAAMVVVPDNQVSHAEAAHTSDKQSTNPFLLQSISAGEAQVAGDVQQPFLRLPPSSPYDNFLKAAGC

SEQ ID NO: 181014 - protein, 494 aa, Zea Mays
MGLDGTVSGVVSRKVLPACGGLCCLCPSLRPRSRQPVKRYKKILIDIFPAEQEDGPNVRRIGRLCEYVARNPHRVPKITAYLERRCYRELRNEQYDIVKVVVLIYRRLLVSCNEQMPLLANSLLSIIQTLLDQSRQDDMCIIGCETLFDFIVTQVDGTYQFNLEEFIPRLCKLSQIVRDKEKANALRAAALQSLSAMIWFMGELSHISSEFDSVVQVVLESYEPRQVQSDNSATENPGCQLVEEVLKPEGHASPSTFIFSVIPSWDSIVSDYGGIQLLMDDAKDPYFWSRVCVHNMAKLSREATTFRRVMESLFCHFDNTNSWSSKNGLALCVLLDMQMFMEKSGTNINLMISVLVKHLEHKAILKQPEMQLSIVEVITALAEQSRAQASAATIVAISDLVRHMKKTLHLALGSNDLEVVKWNDKLRMAFDECIVQLSKKVGDAGPVLDMMSVMLENISHTPLIAIATTSAVYRTAQIIASIPNLSYKNKARKA

SEQ ID NO: 181015 - protein, 937 aa, Zea Mays
MGLDGTVSGVVSRKVLPACGGLCCLCPSLRPRSRQPVKRYKKILIDIFPAEQEDGPNVRRIGRLCEYVARNPHRVPKITAYLERRCYRELRNEQYDIVKVVVLIYRRLLVSCNEQMPLLANSLLSIIQTLLDQSRQDDMCIIGCETLFDFIVTQVDGTYQFNLEEFIPRLCKLSQIVRDKEKANALRAAALQSLSAMIWFMGELSHISSEFDSVVQVVLESYEPRQVQSDNSATENPGCQLVEEVLKPEGHASPSTFIFSVIPSWDSIVSDYGGIQLLMDDAKDPYFWSRVCVHNMAKLSREATTFRRVMESLFCHFDNTNSWSSKNGLALCVLLDMQMFMEKSGTNINLMISVLVKHLEHKAILKQPEMQLSIVEVITALAEQSRAQASAATIVAISDLVRHMKKTLHLALGSNDLEVVKWNDKLRMAFDECIVQLSKKVGDAGPVLDMMSVMLENISHTPLIAIATTSAVYRTAQIIASIPNLSYKNKVFPEALFHQLLLAMVHPDHETRVGSQSLRQSLRLSSVSHKHSYTSLKEGQSPLTESINEMETIVLRLSSQQATLLLSSIWRQALSPKNAPQNYEAIAHTYSLLLLFLGSKTPIFEVLAPSFQIAFSLMSHSLGGTDSLPPSRRRSLFTLATSMIVFASRAFNVAPLLPICKLMLNDGTMDPFLHLVHENKLQAVKDYTEDPSTSYGSPEDNQNALKSLSVVELTNSCSRESMILTIMNSIRDLPDLELENIRSQLLRDFSPDDVCPSSAHFLESPGKIAPPCSDDDTDYDYQEVHGNFEQAELIDLRNDNNTYLEASATTLAAIAIPVPTTNLLSIDELLETVVNDVSSQTGGQCLVSMAGDIPFQEMTSHCEAFSMGKHHKMSLLMSFKQNKQAAMVVVPDNQSTNPFLLQSISAGEAQVAGDVQQPFLRLPPSSPYDNFLKAAGC

SEQ ID NO: 181016 - protein, 1017 aa, Zea Mays
MGLDGTVSGVVSRKVLPACGGLCCLCPSLRPRSRQPVKRYKKILIDIFPAEQEDGPNVRRIGRLCEYVARNPHRVPKITAYLERRCYRELRNEQYDIVKVVVLIYRRLLVSCNEQMPLLANSLLSIIQTLLDQSRQDDMCIIGCETLFDFIVTQVDGTYQFNLEEFIPRLCKLSQIVRDKEKANALRAAALQSLSAMIWFMGELSHISSEFDSVVQVVLESYEPRQVQSDNSATENPGCQLVEEVLKPEGHASPSTFIFSVIPSWDSIVSDYGGIQLLMDDAKDPYFWSRVCVHNMAKLSREATTFRRVMESLFCHFDNTNSWSSKNGLALCVLLDMQMFMEKSGTNINLMISVLVKHLEHKAILKQPEMQLSIVEVITALAEQSRAQASAATIVAISDLVRHMKKTLHLALGSNDLEVVKWNDKLRMAFDECIVQLSKKVGDAGPVLDMMSVMLENISHTPLIAIATTSAVYRTAQIIASIPNLSYKNKVFPEALFHQLLLAMVHPDHETRVGAHRIFSVVLVPSSVSPFPNLKSLDQCRKHDVQRTLSRVVSVFSSSAALFDKLRRDRNSFREYLHEGSMNRILHGIDDEIATPNDLPGSQSLRQSLRLSSVSHKHSYTSLKEGQSPLTESINEMETIVLRLSSQQATLLLSSIWRQALSPKNAPQNYEAIAHTYSLLLLFLGSKTPIFEVLAPSFQIAFSLMSHSLGGTDSLPPSRRRSLFTLATSMIVFASRAFNVAPLLPICKLMLNDGTMDPFLHLVHENKLQAVKDYTEDPSTSYGSPEDNQNALKSLSVVELTNSCSRESMILTIMNSIRDLPDLELENIRSQLLRDFSPDDVCPSSAHFLESPGKIAPPCSDDDTDYDYQEAELIDLRNDNNTYLEASATTLAAIAIPVPTTNLLSIDELLETVVNDVSSQTGGQCLVSMAGDIPFQEMTSHCEAFSMGKHHKMSLLMSFKQNKQAAMVVVPDNQSTNPFLLQSISAGEAQVAGDVQQPFLRLPPSSPYDNFLKAAGC

SEQ ID NO: 181017 - protein, 388 aa, Zea Mays
METIVLRLSSQQATLLLSSIWRQALSPKNAPQNYEAIAHTYSLLLLFLGSKTPIFEVLAPSFQIAFSLMSHSLGGTDSLPPSRRRSLFTLATSMIVFASRAFNVAPLLPICKLMLNDGTMDPFLHLVHENKLQAVKDYTEDPSTSYGSPEDNQNALKSLSVVELTNSCSRESMILTIMNSIRDLPDLELENIRSQLLRDFSPDDVCPSSAHFLESPGKIAPPCSDDDTDYDYQEVHGNFEQAELIDLRNDNNTYLEASATTLAAIAIPVPTTNLLSIDELLETVVNDVSSQTGGQCLVSMAGDIPFQEMTSHCEAFSMGKHHKMSLLMSFKQNKQAAMVVVPDNQSTNPFLLQSISAGEAQVAGDVQQPFLRLPPSSPYDNFLKAAGC

SEQ ID NO: 181018 - protein, 581 aa, Zea Mays
MMSVMLENISHTPLIAIATTSAVYRTAQIIASIPNLSYKNKVFPEALFHQLLLAMVHPDHETRVGAHRIFSVVLVPSSVSPFPNLKSLDQCRKHDVQRTLSRVVSVFSSSAALFDKLRRDRNSFREYLHEGSMNRILHGIDDEIATPNDLPGSQSLRQSLRLSSVSHKHSYTSLKEGQSPLTESINEMETIVLRLSSQQATLLLSSIWRQALSPKNAPQNYEAIAHTYSLLLLFLGSKTPIFEVLAPSFQIAFSLMSHSLGGTDSLPPSRRRSLFTLATSMIVFASRAFNVAPLLPICKLMLNDGTMDPFLHLVHENKLQAVKDYTEDPSTSYGSPEDNQNALKSLSVVELTNSCSRESMILTIMNSIRDLPDLELENIRSQLLRDFSPDDVCPSSAHFLESPGKIAPPCSDDDTDYDYQEAELIDLRNDNNTYLEASATTLAAIAIPVPTTNLLSIDELLETVVNDVSSQTGGQCLVSMAGDIPFQEMTSHCEAFSMGKHHKMSLLMSFKQNKQAAMVVVPDNQVSHAEAAHTSDKQSTNPFLLQSISAGEAQVAGDVQQPFLRLPPSSPYDNFLKAAGC

SEQ ID NO: 181019 - protein, 389 aa, Zea Mays
MLSLVLRNLQETIVLRLSSQQATLLLSSIWRQALSPKNAPQNYEAIAHTYSLLLLFLGSKTPIFEVLAPSFQIAFSLMSHSLGGTDSLPPSRRRSLFTLATSMIVFASRAFNVAPLLPICKLMLNDGTMDPFLHLVHENKLQAVKDYTEDPSTSYGSPEDNQNALKSLSVVELTNSCSRESMILTIMNSIRDLPDLELENIRSQLLRDFSPDDVCPSSAHFLESPGKIAPPCSDDDTDYDYQEVHGNFEQAELIDLRNDNNTYLEASATTLAAIAIPVPTTNLLSIDELLETTGGQCLVSMAGDIPFQEMTSHCEAFSMGKHHKMSLLMSFKQNKQAAMVVVPDNQSTNPFLLQSISAGEAQVAGDVQQPFLRLPPSSPYDNFLKAAGC

SEQ ID NO: 181020 - protein, 403 aa, Zea Mays
MLSLVLRNLQETIVLRLSSQQATLLLSSIWRQALSPKNAPQNYEAIAHTYSLLLLFLGSKTPIFEVLAPSFQIAFSLMSHSLGGTDSLPPSRRRSLFTLATSMIVFASRAFNVAPLLPICKLMLNDGTMDPFLHLVHENKLQAVKDYTEDPSTSYGSPEDNQNALKSLSVVELTNSCSRESMILTIMNSIRDLPDLELENIRSQLLRDFSPDDVCPSSAHFLESPGKIAPPCSDDDTDYDYQEAELIDLRNDNNTYLEASATTLAAIAIPVPTTNLLSIDELLETVVNDVSSQTGGQCLVSMAGDIPFQEMTSHCEAFSMGKHHKMSLLMSFKQNKQAAMVVVPDNQVSHAEAAHTSDKQSTNPFLLQSISAGEAQVAGDVQQPFLRLPPSSPYDNFLKAAGC

SEQ ID NO: 181021 - protein, 269 aa, Zea Mays
MDPFLHLVHENKLQAVKDYTEDPSTSYGSPEDNQNALKSLSVVELTNSCSRESMILTIMNSIRDLPDLELENIRSQLLRDFSPDDVCPSSAHFLESPGKIAPPCSDDDTDYDYQEVHGNFEQAELIDLRNDNNTYLEASATTLAAIAIPVPTTNLLSIDELLETVVNDVSSQTGGQCLVSMAGDIPFQEMTSHCEAFSMGKHHKMSLLMSFKQNKQAAMVVVPDNQSTNPFLLQSISAGEAQVAGDVQQPFLRLPPSSPYDNFLKAAGC

SEQ ID NO: 181022 - protein, 350 aa, Zea Mays
MLAHTLSKMEFSMSSKAFIHTPQTRSDMTAIIQGILLVLFLLPLLYKSSLKVWYCWTKERKQQTQTPEEHKRIRIDSAIFYISLAVVLIFLLPSWTHLVQGLKVHPFVWIVNYMFTDSHERLVLCAYWICVIYVSVRRFYSISKQSKTERILLRKYYHLVAVLIFSPAVIFQPAFLDLAFGAAFAVFLILEMLRIWEIYPLGRVVHQFMNAFTDHRDSEILIVSHFSLLLGCALPKWMSSGLNDRPLAPFAGILSLGIGDTMASMIGYKYGVLRWSKTGKKTIEGTAAGITSVLAACSILVSLLASSGYILSQNWLSLLIAVTLSGLLEAYTAQLDNAFIPLVFYSLLCL

SEQ ID NO: 181023 - protein, 495 aa, Zea Mays
MAGFARATAPASPSPAAALLTGERLVVFLFAARVALAAPVHLAAALAVLVAAALAVELAVDGSGSAPLRRFRTRPGASSGILLGATTLPSVMLSRLIQLSRLLPADPNGPKEFAYLEMQYWAASISCLSVLALFLWHLQKSPSNGISKHLEYGSLFIVLYLMTFFLSFLLKTDEGLMVTTNMAYMLCHGVAAVILIKHILEKFPSCASFGEALLVSGGLVLYFGDMLAHTLSKMEFSMSSKAFIHTPQTRSDMTAIIQGILLVLFLLPLLYKSSLKVWYCWTKERKQQTQTPEEHKRIRIDSAIFYISLAVVLIFLLPSWTHLVQGLKVHPFVWIVNYMFTDSHERLVLCAYWICVIYVSVRRFYSISKQSKTERILLRKYYHLVAVLIFSPAVIFQPAFLDLAFGAAFAVFLILEMLRIWEIYPLGRVVHQFMNAFTDHRDSEILIVSHFSLLLGCALPKWMSSGLNDRPLAPFAGILSLGIGDTMFSFLPRHQ

SEQ ID NO: 181024 - protein, 336 aa, Zea Mays
MLAHTLSKMEFSMSSKAFIHTPQTRSDMTAIIQSSLKVWYCWTKERKQQTQTPEEHKRIRIDSAIFYISLAVVLIFLLPSWTHLVQGLKVHPFVWIVNYMFTDSHERLVLCAYWICVIYVSVRRFYSISKQSKTERILLRKYYHLVAVLIFSPAVIFQPAFLDLAFGAAFAVFLILEMLRIWEIYPLGRVVHQFMNAFTDHRDSEILIVSHFSLLLGCALPKWMSSGLNDRPLAPFAGILSLGIGDTMASMIGYKYGVLRWSKTGKKTIEGTAAGITSVLAACSILVSLLASSGYILSQNWLSLLIAVTLSGLLEAYTAQLDNAFIPLVFYSLLCL

SEQ ID NO: 181025 - protein, 89 aa, Zea Mays
MILVGEDQETLAVEPEITTLACLLETMRGATQLVQLASHFLLCVRTCLWMSSHQGKQTNRRVGREKETINYANTEETQFEDCWYTYGAR

SEQ ID NO: 181026 - protein, 118 aa, Zea Mays
MPSEVLNISSILRTSTSLALHLTGIHIEMLKMTMQIMYEIIYKAMKEVGLDGTYEPQDYLNFFCLGNREAEDTTCTSSGPFSTSNPQRSMEGTRDTEIAMAAYQPQHTLANMLSAPRG

SEQ ID NO: 181027 - protein, 87 aa, Zea Mays
METGTIFTHHQKTMILDADAGNHRRKIVAFVGGHDLCGSRYDTPKHTLFRTLQTFHKEDYYTQILRLKMLAAQESHGMTCIPRSTVQ

SEQ ID NO: 181028 - protein, 55 aa, Zea Mays
MGRSDDDSPSPPRGHKRRTCSPSPRGSYGGHGKRPTTNLMVTNLGPDCRILTLIK

SEQ ID NO: 181029 - protein, 646 aa, Zea Mays
MSPPENPSPAAPAEPSQPPPPAAAAKGKRKKDEKKDDDLSEEDLALKEQLELYVVRAQDADPGVQKLALESMRQEIRSATSSMTSVPKPLKFLRPHFGTLKSYFETMPESELKKYMADILSVLALTMSVEGERESLKYRLLGSEGDIGSWGHEYVRNLAGEIAQEFQKRQDDDLHALMVLVQQIVSFHMKHNAEPEAVDLLMEVEDLDLLVEHVDATNYKRACLYLTSSSKFLPAPDDSLALDIAYTIYMKFGDLASALRISLQLEKSVQYVKQVYTATDDLLLKKQFSYLIARHGLAMEIDDEISTDDNDKEALQEIVNNTKLSEGYLTLARDIEVMEPKSPEDIYKVHLIDGRGASSSLDSARQNLAATFVNAFVNAGFGKDKLMTAPSDSPSSGSSGNWLFKNKEHGKASAAASLGMILLWDTDSGLAQLDKYLHSNDTHVVAGALLGIGIVTCGVKSDCDPAFAILMEYIGKDDSNIRIGAILGLGIAYAGSQKEELKMHLSAVLGDSQSPLEVLVFSAIALGLVFVGSCNEEIAQSIIFALMERSEAELAEPIIRLLPVALGLLYLGKQDSVEATAEVSKTFDEKIGKYCDVTLMSLAYAGTGNVLKVQKLLGICSQHLEKVWRAEYKTSSSSCSWYTLHI

SEQ ID NO: 181030 - protein, 888 aa, Zea Mays
MSPPENPSPAAPAEPSQPPPPAAAAKGKRKKDEKKDDDLSEEDLALKEQLELYVVRAQDADPGVQKLALESMRQEIRSATSSMTSVPKPLKFLRPHFGTLKSYFETMPESELKKYMADILSVLALTMSVEGERESLKYRLLGSEGDIGSWGHEYVRNLAGEIAQEFQKRQDDDLHALMVLVQQIVSFHMKHNAEPEAVDLLMEVEDLDLLVEHVDATNYKRACLYLTSSSKFLPAPDDSLALDIAYTIYMKFGDLASALRISLQLEKSVQYVKQVYTATDDLLLKKQFSYLIARHGLAMEIDDEISTDDNDKEALQEIVNNTKLSEGYLTLARDIEVMEPKSPEDIYKVHLIDGRGASSSLDSARQNLAATFVNAFVNAGFGKDKLMTAPSDSPSSGSSGNWLFKNKEHGKASAAASLGMILLWDTDSGLAQLDKYLHSNDTHVVAGALLGIGIVTCGVKSDCDPAFAILMEYIGKDDSNIRIGAILGLGIAYAGSQKEELKMHLSAVLGDSQSPLEVLVFSAIALGLVFVGSCNEEIAQSIIFALMERSEAELAEPIIRLLPVALGLLYLGKQDSVEATAEVSKTFDEKIGKYCDVTLMSLAYAGTGNVLKKLLGICSQHLEKGETHQGPAVLGIALIAMAEELGAEMAVRSLERLLQYGEQNIRRAVPLALGILCISNPKVNVMDTLSRLSHDADADVSMAAIISLGLIGAGTNNARIAAMLRNLSSYYYKEAAHLFCVRIAQGLVHLGKGLLTLSPYHSDRFLLSPMALGGLVTVLHACLDMKSTILGKYHYILYIIVLAMQPRMLLTVDEDLKPLSVPVRVGQAVDVVGQAGRPKTITGFQTHSTPVLLAAGERAELATEKYIPLTPVLEGFVILKKNPEYHEE

SEQ ID NO: 181031 - protein, 689 aa, Zea Mays
MEVEDLDLLVEHVDATNYKRACLYLTSSSKFLPAPDDSLALDIAYTIYMKFGDLASALRISLQLEKSVQYVKQVYTATDDLLLKKQFSYLIARHGLAMEIDDEISTDDNDKEALQEIVNNTKLSEGYLTLARDIEVMEPKSPEDIYKVHLIDGRGASSSLDSARQNLAATFVNAFVNAGFGKDKLMTAPSDSPSSGSSGNWLFKNKEHGKASAAASLGMILLWDTDSGLAQLDKYLHSNDTHVVAGALLGIGIVTCGVKSDCDPAFAILMEYIGKDDSNIRIGAILGLGIAYAGSQKEELKMHLSAVLGDSQSPLEVLVFSAIALGLVFVGSCNEEIAQSIIFALMERSEAELAEPIIRLLPVALGLLYLGKQDSVEATAEVSKTFDEKIGKYCDVTLMSLAYAGTGNVLKVQKLLGICSQHLEKGETHQGPAVLGIALIAMAEELGAEMAVRSLERLLQYGEQNIRRAVPLALGILCISNPKVNVMDTLSRLSHDADADVSMAAIISLGLIGAGTNNARIAAMLRNLSSYYYKEAAHLFCVRIAQGLVHLGKGLLTLSPYHSDRFLLSPMALGGLVTVLHACLDMKSTILGKYHYILYIIVLAMQPRMLLTVDEDLKPLSVPVRVGQAVDVVGQAGRPKTITGFQTHSTPVLLAAGERAELATEKYIPLTPVLEGFVILKKNPEYHEE

SEQ ID NO: 181032 - protein, 267 aa, Zea Mays
MDEKQANTPRRLTPKKDMVTLSSGSDASPGNSLSRAHEDNHEEGSLSTAKRKNAQQTKTKKTKDAGTKTGADQAGNGDAEDDVQDKLTGNSVSQRLPLIFPDKVQRSKALIECDGDSIDLSGDIGAVGRIVVSNGPTAKQDLLLDLKGTIYKTTIVPSRTFCVVSVGQSEAKIEAIMNDFIQLEPQSNLFEAETMVEDEEGDKLYEPQANQNDLNNNEDEGQPKAKTKRKAEKTTGKAPKKAKVAGKGPKKGTRKTQPAKRGRKAKK

SEQ ID NO: 181033 - protein, 472 aa, Zea Mays
MSSSCMPTGLRLDLDMVKAAASPGAHSSPLRPVHSSPSSTLSEASNASSSATSVSLKRARAPRKRPNQAYNEAAALLASIHPSVFPVKKSPKTAPPRPPSSRQLSGLAAALDASSSDLLPPLPVLADSAFLLRDIPAPSPLPQPQSPSAAKNCSSPAPVSSAFRDFRDPAPSPASPDTVDVNELGEIDFDDDGFDAESILDVEEAAAAAEGLDGIMGSLTVESNSTAATTSDDSILSSSGIHPYLRSLMVVGLAGRFELGLGSRHGARPNLNRALKRRDDDGAWWMWPAVPVKDLTVAPPTPPASNAAVSQPQPAAAPEKNKSKKKKVVKVEKVMMGAKGKEELLPSAKCKEEEADGDGDAESAPVKAPKTGLGLKLDADEVLKAWSDRGSMFAEGSAPESPTSVAEARAKLSDMDLFPENEAGAGAGGVREASVLRYKEKRRTRLFSKKIRYQGRFVRSPSLLRQALEEES

SEQ ID NO: 181034 - protein, 250 aa, Zea Mays
MEDFYEARIDDVDGEKIGMFGVYDGHGGVRAAEYVKQHLFSNLIKHPKFITDTKAAIAETYNLTDSEFLKADSCQTRDAGSTASTAIIVGDRLLVANVGDSRAVISKGGQAIAVSRDHKPDQTDERQRIEDAGGFVMWAGTWRVGGVLAVSRAFGDKLLKQRRWSTAPLNSSSLLVMDSGMLSLMRKLLPWSSLFRTPRKQQTSFSKKRPEGEALITSPLSSSASYMELPVINQAQTKRPPMTKTPNYLL

SEQ ID NO: 181035 - protein, 149 aa, Zea Mays
MWMCQISTRKSFLVNENKWLKSACVYRFRVYLSPHMSVYCTICIPPQGEVVGCGDAVHPPPDSNTSKSNGWAGICLQDRLKQKGRLHQTGLPLMLCYLGGAAACIADAGFQLKHLSPSSVGHPKGNVNHLLHLVGSDHTIKRITLYVIN

SEQ ID NO: 181036 - protein, 283 aa, Zea Mays
MTCVRAEDAVSPAAADDVAAALVSRGGLIQKVAAGGGRRPAGSARSLQRSAHLATGDGNAPAPAVEASCSWSGDGIGKSNGGGKRDDRHRMRQYRSQLEQEVKKLQRQLEEEVDLHVALADAVTQNVAPILKSSMKLPHKAQELLINIASLEITVSNLEKKLNDLYYQLCHERNERLLAENNQGCLPSTSSDEHQSLSTCTCTWEEHISSLRDLKFGGSESMRSMRQDLFPELEDDQDMGEDPEGQQIVSLNRLLEKHRDSSLNRLLEKHRDEEVPFMLTLPL

SEQ ID NO: 181037 - protein, 583 aa, Zea Mays
MTCVRAEDAVSPAAADDVAAALVSRGGLIQKVAAGGGRRPAGSARSLQRSAHLATGDGNAPAPAVEASCSWSGDGIGKSNGGGKRDDRHRMRQYRSQLEQEVKKLQRQLEEEVDLHVALADAVTQNVAPILKSSMKLPHKAQELLINIASLEITVSNLEKKLNDLYYQLCHERNERLLAENNQGCLPSTSSDEHQSLSTCTCTWEEHISSLRDLKFGGSESMRSMRQDLFPELEDDQDMGEDPEGQQIVSLNRLLEKHRDSSLNRLLEKHRDEEMQESGSMENEGNENEQPDTLSFEQSILKITSIKGGNLWSNPNELSEEMVRCMRNIFLRLSESLKISPKTSSDCSSSSVERLSGSTLASFSDSSIMPSMLRSPSVDSNHNDETMKEVRNFDPYKVNGKETRRDIGNYRSAAEVSWMSVGKDQLEYASEALKKFRFLVEQLSKVNPSCMDRDQRLAFWINLYNALIMHAYLAYGVPRNDIKLFSLMQKACYTVGGQSFSAAEIEFVILKMKTPVHRPQLSLMLTLNKFKITEDHKKYSIDEFEPLLLFGLSCGMFSSPAVSSTPANLSPVKLCMCFSKFVT

SEQ ID NO: 181038 - protein, 500 aa, Zea Mays
MTCVRAEDAVSPAAADDVAAALVSRGGLIQKVAAGGGRRPAGSARSLQRSAHLATGDGNAPAPAVEASCSWSGDGIGKSNGGGKRDDRHRMRQYRSQLEQEVKKLQRQLEEEVDLHVALADAVTQNVAPILKSSMKLPHKAQELLINIASLEITVSNLEKKLNDLYYQLCHERNERLLAENNQGCLPSTSSDEHQSLSTCTCTWEEHISSLRDLKFGGSESMRSMRQDLFPELEDDQDMGEDPEGQQIVSLNRLLEKHRDSSLNRLLEKHRDEEMQESGSMENEGNENEQPDTLSFEQSILKITSIKGGNLWSNPNELSEEMVRCMRNIFLRLSESLKISPKTSSDCSSSSVERLSGSTLASFSDSSIMPSMLRSPSVDSNHNDETMKEVRNFDPYKVNGKETRRDIGNYRSAAEVSWMSVGKDQLEYASEALKKFRFLVEQLSKVNPSCMDRDQRLAFWINLYNALIMHAYLAYGVPRNDIKLFSLMQKLAASPSAQQK

SEQ ID NO: 181039 - protein, 381 aa, Zea Mays
MRQYRSQLEQEVKKLQRQLEEEVDLHVALADAVTQNVAPILKSSMKLPHKAQELLINIASLEITVSNLEKKLNDLYYQLCHERNERLLAENNQGCLPSTSSDEHQSLSTCTCTWEEHISSLRDLKFGGSESMRSMRQDLFPELEDDQDMGEDPEGQQIVSLNRLLEKHRDSSLNRLLEKHRDEEMQESGSMENEGNENEQPDTLSFEQSILKITSIKGGNLWSNPNELSEEMVRCMRNIFLRLSESLKISPKTSSDCSSSSVERLSGSTLASFSDSSIMPSMLRSPSVDSNHNDETMKEVRNFDPYKVNGKETRRDIGNYRSAAEVSWMSVGKDQLEYASEALKKFRFAATALAKPMSPHRYITCLQTVQTLVHIYKNFSI

SEQ ID NO: 181040 - protein, 62 aa, Zea Mays
MVPCKLCKRVPLLSRAPTRPQVHNACTERSRSRRRRRTAAPRFLRGAFGRSRCNGRYCPTEL

SEQ ID NO: 181041 - protein, 123 aa, Zea Mays
MVPCKLCKRVPLLSRAPTRPQVHNACTERSRSRRRRRTAAPRFLRGAFGRSRCNATLLWPIWVPKQQCSSTIDLSTCRSIFISCSVDQDVALTSARTGSNSFALGLPPALVDLRCRLPLCSVL

SEQ ID NO: 181042 - protein, 122 aa, Zea Mays
MKKQNELPLCKEGDMIMDQLTELTSKGCGCLLVVDEEHHLIGTFTDGDLRRTLKASGPAIFSLTVGEMCNRNPRTITAEAMAVEAMEKMEAPPSPVQFLPVVNENNVVCGIITLHGLVSAGL

SEQ ID NO: 181043 - protein, 73 aa, Zea Mays
MCWHVRHYSMFEGRKSLDHHHPQEYRICSKKNTREPLTYASLSQFREFITFPCQREIANIARERRNNDYDSLS

SEQ ID NO: 181044 - protein, 571 aa, Zea Mays
MAELRHSMAVRSSNSPAKRDSDTSAASSPFLLSPSTRGSRGGGGGDDDGKDAHRSSPLLSHHHHKRVHLLTSPFRSLLALEDPRSSAASTSYRILLVLLALLLAAVIFCAPLFWSRLNTPFLCHKEGITLHCPETKEPPSLWENPRAATMSWKPCAERCSNEPSDVPSVNETSGYIFIHAEGGLNQQRIAICNAVAIAKIMRATLILPVLKQDQIWKDQSKFEDIFDVDHFINYLKDDVRIVRDIPDWFTEKDELFTSIKRTVKNIPKYASAQFYIDNVLPRIKEKRIMSIKPFVDRLGYDNVPTEINRLRCRVNYHALKFLPDIEEMAVKLAARMRNKTGSINPYMALHLRFEKGMVGLSFCDFAGTREEKAMMAAYRQKEWPRRFKNGSHLWPLALQKRKEGRCPLEPGEIAVILRALGYTSGTQIYVASGQVYGGKNRMAPLRNMFPNLVTKEELASAEELAPFRRHVTSLAALDFLVCLRSDAFVMTHGGNFAKLIIGARRYAGHRLKSVKPDKGLMSKSLGDPDMGWASFTEDVVVTHRTRTGLPEPTFPGYDLWENPLTPCMCRA

SEQ ID NO: 181045 - protein, 66 aa, Zea Mays
MTLAVLAWPWRWSSRSRPRHPAVSLPARAAASRASARRAASSGHLLLVLSSRPSLMSAAASCAVVG

SEQ ID NO: 181046 - protein, 86 aa, Zea Mays
MFVSPRRSSTGDNQLSAPLAVPPFSWLAGVLTLKLGRLESTWRAECGGPGCARLGSLSGGQFLNPPLVPPSRAKNDTHPDTKPKSL

SEQ ID NO: 181047 - protein, 200 aa, Zea Mays
MRLPPPSTTAAAAAATVGAVLAAVALRRYLSASRHREPARVPMSAAAGATTLVVYGKSAQEQELLASAAGSVVLGEGDPSGDVAIALAYESAGFDAAAYMSALRARRFGRWMLWTPRIGSTQDLITRNFAKLPVGVVCVADVQFKGRGRSKNVWESPPGCLMFSFTSQMQDARKLPLMQYVVCLSITEAIKELCRAKNLM

SEQ ID NO: 181048 - protein, 397 aa, Zea Mays
MREILHIQGGQCGNQIGAKFWEVICDEHGIDHTGKYAGDSDLQLERINVYYNEAGGGRFVPRAVLMDLEPGTMDSVRSGPYGQIFRPDNFVFGQSGAGNNWAKGHYTEGAELIDSVLDVVRKEAENCDCLQGFQVCHSLGGGTGSGMGTLLISKIREEYPDRMMLTFSVFPSPKVSDTVVEPYNATLSVHQLVENADECMVLDNEALYDICFRTLKLATPTCQLNSDLRKLAVNLIPFPRLHFFMMWDAKNMMCAADPRHGRYLTASAMFRGKMSTKEVDEQMLNVQNKNSSYFVEWIPNNVKSSVCDIPPTGLAMASTFVGNSTSIQEMFRRVSEQFTAMFRRKAFLHWYTGEGMDEMEFTEAESNMNDLVAEYQQYQDATAEEEEEYKEGDEVAA

SEQ ID NO: 181049 - protein, 419 aa, Zea Mays
MREILHIQGGQCGNQIGAKFWEVICDEHGIDHTGKYAGDSDLQLERINVYYNEAGGGRFVPRAVLMDLEPGTMDSVRSGPYGQIFRPDNFVFGQSGAGNNWAKGHYTEGAELIDSVLDVVRKEAENCDCLQGFQVCHSLGGGTGSGMGTLLISKIREEYPDRMMLTFSVFPSPKVSDTVVEPYNATLSVHQLVENADECMVLDNEALYDICFRTLKLATPTFGDLNHLISATMSGVTCCLRFPGQLNSDLRKLAVNLIPFPRLHFFMMWDAKNMMCAADPRHGRYLTASAMFRGKMSTKEVDEQMLNVQNKNSSYFVEWIPNNVKSSVCDIPPTGLAMASTFVGNSTSIQEMFRRVSEQFTAMFRRKAFLHWYTGEGMDEMEFTEAESNMNDLVAEYQQYQDATAEEEEEYKEGDEVAA

SEQ ID NO: 181050 - protein, 445 aa, Zea Mays
MFKPVHIDKMIHFTYHTIIKASLDSPSTFPRYVYHLTPLHQIESYIQKNEYFLDVLGVITQVSALKPVRTQTRESSNVIKEIIIKDINDVTMRLTLWAERAKAFKLDDVYNPLEQKPIVTLFVGCLAKNFQGAYLNGGTTCRWYFNPDIKEAAPYYQRFGSQKVKLQIPSEQEQQLSVAKETHVEHKTLHELLALDPYAFPKQGYECTVTIIEVPTTNRWWFPACTKCSRACRPQDGGYYCSYCKSEAYTLRYKLTFMGSDATATAQMFCFDTVARHIVGRPCETVLKQATEATPIPPDLAQIVSLKFTFRVTASNQTFAQREKQPTVLQINSIVVHGRQHYLPSGIQNTIDQGPSTPNKEATLKLLEESPSIAMERLSTKVSKDVGRKLTYSTQDKDIIGSQVLDVAQGTNADKGIPTDKGKEIEPHLQSPPKRHKQGPLTIKE

SEQ ID NO: 181051 - protein, 479 aa, Zea Mays
MFKPVHIDKMIHFTYHTIIKASLDSPSTFPRYVYHLTPLHQIESYIQKNEYFLDVLGVITQVSALKPVRTQTRESSNVIKEIIIKDINDVTMRLTLWAERAKAFKLDDVYNPLEQKPIVTLFVGCLAKNFQGAYLNGGTTCRWYFNPDIKEAAPYYQRFGSQKVKLQIPSEQEQQLSVAKETHVEHKTLHELLALDPYAFPKQGYECTVTIIEVPTTNRWWFPACTKCSRACRPQDGGYYCSYCKSEAYTLRYKLTFMGSDATATAQMFCFDTVARHIVGRPCETVLKQATEATPIPPDLAQIVSLKFTFRVTASNQTFAQREKQPTVLQINSIVVHGRQHYLPSGIQNTIDQGPSTPNKEATLKLLEESPSIAMERLSTKVSKDVGRKLTYSTQDKDIIGSQVLDVAQGTNADKGIPTDKGKEIEPHLQSPPKRSQVLDVAQGTNADKGIPTDKGKEIEPHLQSPPKRHKQGPLTIKE

SEQ ID NO: 181052 - protein, 565 aa, Zea Mays
MEFTLIPNLVPQNRHAVIKGNGISAEIPGNLAEEKGSIIEENEIYEISRFTISSARQMFKPVHIDKMIHFTYHTIIKASLDSPSTFPRYVYHLTPLHQIESYIQKNEYFLDVLGVITQVSALKPVRTQTRESSNVIKEIIIKDINDVTMRLTLWAERAKAFKLDDVYNPLEQKPIVTLFVGCLAKNFQGAYLNGGTTCRWYFNPDIKEAAPYYQRFGSQKVKLQIPSEQEQQLSVAKETHVEHKTLHELLALDPYAFPKQGYECTVTIIEVPTTNRWWFPACTKCSRACRPQDGGYYCSYCKSEAYTLRYKLTFMGSDATATAQMFCFDTVARHIVGRPCETVLKQATEATPIPPDLAQIVSLKFTFRVTASNQTFAQREKQPTVLQINSIVVHGRQHYLPSGIQNTIDQGPSTPNKEATLKLLEESPSIAMERLSTKVSKDVGRKLTYSTQDKDIIGSQVLDVAQGTNADKGIPTDKGKEIEPHLQSPPKRSQVLDVAQGTNADKGIPTDKGKEIEPHLQSPPKSPDSKKLAVASGVSRSVLFLLVDVAVKAVESEITCFLYSK

SEQ ID NO: 181053 - protein, 531 aa, Zea Mays
MEFTLIPNLVPQNRHAVIKGNGISAEIPGNLAEEKGSIIEENEIYEISRFTISSARQMFKPVHIDKMIHFTYHTIIKASLDSPSTFPRYVYHLTPLHQIESYIQKNEYFLDVLGVITQVSALKPVRTQTRESSNVIKEIIIKDINDVTMRLTLWAERAKAFKLDDVYNPLEQKPIVTLFVGCLAKNFQGAYLNGGTTCRWYFNPDIKEAAPYYQRFGSQKVKLQIPSEQEQQLSVAKETHVEHKTLHELLALDPYAFPKQGYECTVTIIEVPTTNRWWFPACTKCSRACRPQDGGYYCSYCKSEAYTLRYKLTFMGSDATATAQMFCFDTVARHIVGRPCETVLKQATEATPIPPDLAQIVSLKFTFRVTASNQTFAQREKQPTVLQINSIVVHGRQHYLPSGIQNTIDQGPSTPNKEATLKLLEESPSIAMERLSTKVSKDVGRKLTYSTQDKDIIGSQVLDVAQGTNADKGIPTDKGKEIEPHLQSPPKSPDSKKLAVASGVSRSVLFLLVDVAVKAVESEITCFLYSK

SEQ ID NO: 181054 - protein, 108 aa, Zea Mays
MGDGGAEEDGRPGTGPDTFRSHQMHARRQRRRPAAAPDNETTQKAKPSDVVYKTSHDIDWGTQDSIYISLGLMKGPPDRWCRTTSRTLMARCARARRLGKELPRAAQM

SEQ ID NO: 181055 - protein, 627 aa, Zea Mays
MSNWITMLRASRHRSLLIQSKMGLQEKHSRSRKEGAALAETAPAQRKSYSFRLFSCQGDISRNVISHPKAAKKEPVVSVEKELDSSELAPAVVPLLERAVSVVSSSDSLSQCEDAVHEVARACSAWDPSLVNLLSCASFIQGLLEVTLTSKDDAVLESAMSIMGKLVLGNEVIRQLVLNADPQLEVFLRLLRSSELFLKAAVVLYMMKPKAKQMLSLDWVPLVLHVLECGDEVQSLFSVRCAPKIAAFYFLDQLLMGFDVDRNVENAKQMIALGGLDLLIGRLGAGDARESRHCIALLTTCVQADGSCRHYLADSLKKEPLVQLLAGNQRKASAASLNLMSELVCLNRTSKIVEFVKELKNSGCLNTMHVLLVYLQQAPLVQHPLAATMLLQLDLLGDPSQYSVYREEAIEAIVAALEHSSQSRKVQEQCARALLILAGRFSSSGEPVAEAWLLKRAGLDDSLSESFRRSEVFKDKSVRAEEEKLVEERQKNLALMLLKSGGRRFLTALSSCISDGTPSLSRSCLVSVAWMSSSLSPLRGCNDFQPLACSVLASKLLDSLSYDRVLEERVLASLSLLNVVRHPGLPAEERNHRVTPRSRGGDVDCEGAPLCLLQMRCKTRSSSAMKN

SEQ ID NO: 181056 - protein, 1003 aa, Zea Mays
MMLPPPPPPSSLRDLLSRERVDEDEAPHLSPRRASGRSPPRRGASSRSSRHTSSPPLATTTTTTREAEGEAAAADAVVAVLSAYAGRLLRDAEFRRALRDKCAACLAPAAGAGEDDDAAAGRPVLANLELGIESIERLAADGSAAQPQAPRDAKIRSLRNSIRLLSVVASLHSPPPPPRPGAAAGDGGGRTCGVPNSHLAACAQLYLAVVYKMERNDRVAARHLMQVFADAPGLARRELLPDLWDHVFLPHLLHLKVWFAREADDLVAGRDADDRRTRMKALQRLYSDHMDSGTAQFAVYYKEWLQSGAAAPPPVPSVPLPSTPRSFDGREKSSASVHRTSINRDLYNAVFGTALALGQEDVKDTKLDDGTGLALDLDVELDHDAAGFKTQKLAHSKMGLQEKHSRSRKEGAALAETAPAQRKSYSFRLFSCQGDISRNVISHPKAAKKEPVVSVEKELDSSELAPAVVPLLERAVSVVSSSDSLSQCEDAVHEVARACSAWDPSLVNLLSCASFIQGLLEVTLTSKDDAVLESAMSIMGKLVLGNEVIRQLVLNADPQLEVFLRLLRSSELFLKAAVVLYMMKPKAKQMLSLDWVPLVLHVLECGDEVQSLFSVRCAPKIAAFYFLDQLLMGFDVDRNVENAKQMIALGGLDLLIGRLGAGDARESRHCIALLTTCVQADGSCRHYLADSLKKEPLVQLLAGNQRKASAASLNLMSELVCLNRTSKIVEFVKELKNSGCLNTMHVLLVYLQQAPLVQHPLAATMLLQLDLLGDPSQYSVYREEAIEAIVAALEHSSQSRKVQEQCARALLILAGRFSSSGEPVAEAWLLKRAGLDDSLSESFRRSEVFKDKSVRAEEEKLVEERQKNLALMLLKSGGRRFLTALSSCISDGTPSLSRSCLVSVAWMSSSLSPLRGCNDFQPLACSVLASKLLDSLSYDRVLEERVLASLSLLNVVRHPGLPAEERNHRVTPRSRGGDVDCEGAPLCLLQMRCKTRSSSAMKN

SEQ ID NO: 181057 - protein, 606 aa, Zea Mays
MGLQEKHSRSRKEGAALAETAPAQRKSYSFRLFSCQGDISRNVISHPKAAKKEPVVSVEKELDSSELAPAVVPLLERAVSVVSSSDSLSQCEDAVHEVARACSAWDPSLVNLLSCASFIQGLLEVTLTSKDDAVLESAMSIMGKLVLGNEVIRQLVLNADPQLEVFLRLLRSSELFLKAAVVLYMMKPKAKQMLSLDWVPLVLHVLECGDEVQSLFSVRCAPKIAAFYFLDQLLMGFDVDRNVENAKQMIALGGLDLLIGRLGAGDARESRHCIALLTTCVQADGSCRHYLADSLKKEPLVQLLAGNQRKASAASLNLMSELVCLNRTSKIVEFVKELKNSGCLNTMHVLLVYLQQAPLVQHPLAATMLLQLDLLGDPSQYSVYREEAIEAIVAALEHSSQSRKVQEQCARALLILAGRFSSSGEPVAEAWLLKRAGLDDSLSESFRRSEVFKDKSVRAEEEKLVEERQKNLALMLLKSGGRRFLTALSSCISDGTPSLSRSCLVSVAWMSSSLSPLRGCNDFQPLACSVLASKLLDSLSYDRVLEERVLASLSLLNVVRHPGLPAEERNHRVTPRSRGGDVDCEGAPLCLLQMRCKTRSSSAMKN

SEQ ID NO: 181058 - protein, 120 aa, Zea Mays
MEFVPPMSLYRIIYELSPPSSSRLFSNFSGVHLGDLSDPKTLDYLQHAQACQGGQQATTSCSTTSSHRCGWTSASRMDKCSVNSVDSNNVHKAGMVMKGLPINVYASETLGCAAAMSTYG

SEQ ID NO: 181059 - protein, 84 aa, Zea Mays
MFRLSGAVVLINTDMHTASNLLPRHQVLIYYIMFSIHMLVKDRPSVVVRAVLLTHQSRVSSGLSAFVEEVASSSTRSPLFSIHM

SEQ ID NO: 181060 - protein, 142 aa, Zea Mays
MPTSRTTKIPRTAEACPSSLSPHSEVVVSSHSMPQPREGKCTGSMPTPPSITRFPCRECRPISPRRRRCAPPRSHPLHDSPVLQVSGHVADPVQPTLGGAHRGLHALIHSYTCRRWRWPSCRMTRKTTTPTTTAPVTRRVPH

SEQ ID NO: 181061 - protein, 529 aa, Zea Mays
MPSCPPRRPVMSSTTAAAFRLGQRVHAAGDPRRLGTVRYLGPVEGHGGVWVGVDWDDGAGGRHDGSLAGRRYFVAVGECSATFARPTALSGGISLPDALRLRYRVQDFTKEEQDEMYVFSTSQKRVSVEFVGTDKVQEKLNNFNELASASVSYMGVSSIGAPNELNSLVPNLKLLDLTGNLFSQWQDIFSLCQALASLEVLNLTNNTMENDVVETPMLENIRILVLNNCGVTWELVEKIKVSFSCISELHLMSNRLNMIMTLDGKFVQGFNTLRLLNLEDNHIDSWDEIVKLSYLRSLEQLHLNKNRLKHVKYPSNLSPDGPIDDAAAVPFENLQVLLLGSNDIDDFSSVDSLNLFPSLRDVRLSDNPVADPAKGGAPRFVLVARLGKVGILNGSEISPRERRESEIRYVRLVMGKIESNDQEEIRRLHPRFAELKSFHGIEDEKPTSSISGPQKMASGLISITLKCVGPSMGEKQPLTKKLPATTTVGKLKSLCESFFKLKDIKVKLFVEEENFLHGLSDVLSVQGRH

SEQ ID NO: 181062 - protein, 455 aa, Zea Mays
MPSCPPRRPVMSSTTAAAFRLGQRVHAAGDPRRLGTVRYLGPVEGHGGVWVGVDWDDGAGGRHDGSLAGRRYFVAVGECSATFARPTALSGGISLPDALRLRYRVQDFTKEEQDEMYVFSTSQKRVSVEFVGTDKVQEKLNNFNELASASVSYMGVSSIGAPNELNSLVPNLKLLDLTGNLFSQWQTLDGKFVQGFNTLRLLNLEDNHIDSWDEIVKLSYLRSLEQLHLNKNRLKHVKYPSNLSPDGPIDDAAAVPFENLQVLLLGSNDIDDFSSVDSLNLFPSLRDVRLSDNPVADPAKGGAPRFVLVARLGKVGILNGSEISPRERRESEIRYVRLVMGKIESNDQEEIRRLHPRFAELKSFHGIEDEKPTSSISGPQKMASGLISITLKCVGPSMGEKQPLTKKLPATTTVGKLKSLCESFFKLKDIKVKLFVEEENFLHGLSDVLSVQGRH

SEQ ID NO: 181063 - protein, 183 aa, Zea Mays
MYVFSTSQKRVSVEFVGTDKVQEKLNNFNELASASVSYMGVSSIGAPNELNSLVPNLKLLDLTGNLFSQWQDIFSLCQALASLEVLNLTNNTMENDVVETPMLENIRILVLNNCGVTWELVEKIKVSFSCISELHLMSNRLNMIMTLDGKFVQGFNTLRLLNLEDNHIDSWDEIVKLSYLRRI

SEQ ID NO: 181064 - protein, 224 aa, Zea Mays
MTEDERYESLRHCKWVDEVIPDAPWVVTEEFLDKHNIDFVAHDSLPYADASGAGNDVYEHVKKLGKFKETQRTDGISTSDIIMRIVKDYNEYVMRNLARGYTRKDLGVSYVKEKRLRVNMGLKNLRDRVKQHQEKVGEKWSTVAKLQEEWVENADRWVAGFLEKFEEGCHSMGTAIKERIQERLIKAQSSDFGSLLQYDSYDSDEAKENDEDEDEDELFEDVKE

SEQ ID NO: 181065 - protein, 117 aa, Zea Mays
MERLLEARISSAVGLRHSLGLPSADTNAYRLINSEGDRLSGLIVDIFADVAVIASSAAWVEKYRQEIQFLVSKVNGVSHIKWRPSTDILKEEGLDISEHKEPASTCSTVKEPMCLLR

SEQ ID NO: 181066 - protein, 243 aa, Zea Mays
MERLLEARISSAVGLRHSLGLPSADTNAYRLINSEGDRLSGLIVDIFADVAVIASSAAWVEKYRQEIQFLVSKVNGVSHIKWRPSTDILKEEGLDISEHKEPASTCSTVKVMENGIVYLVSLEGQKTGFYADQRENRYIISLLSKDQRVLDLCCYSGGFALNAAKGGADNVIGSALDLANENIVLNELNQGKVSFVKGDATTFMKGAISENELWDLVILDPPKLAPRKKVYIIASSGPGGLTC

SEQ ID NO: 181067 - protein, 265 aa, Zea Mays
MHYCRVHRKITFTGSTAVGKKLMAESANTVKKVSLELGGNAPCIVFDDADIDVAVKGSLAAKFRNSGQTCVCANRILVQEGIYEKFASAFIKAVQSLKVGNGLEESTSQGPLINEAAVQKVEKFINDATSKGANVMLGGKRHSLGMSFYEPTVVGNVSNDMLLFREEVFGPVAPLIPFKTEEEAVHMANDTNAGLAAYIFTKSIPRSWRVSESLEYGLVGVNEGIISTEVAPFGGVKQSGLGREGSKYGVDEYLELKYICMGNLG

SEQ ID NO: 181068 - protein, 403 aa, Zea Mays
MATAMMTMRRAAALGARHIPPAAAFSRHMSADASAAMEKIRAAGLLKTQGLIAGQWVDAYDGKTIEVQNPATGEVLANVSFMGSRETSDAIASAHSTFYSWSKLTASERGKALRKWYDLIISHKEELALLMTLEQGKPMKEALGEVNYGASFIEYFAEEAKRIYGDIIPPTLSDRRLLVLKQPVGVVGAITPWNFPLAMITRKVGPALACGCTVVVKPSEFTPLTSLAAADLALQAGIPAGALNVVMGNAPEIGDALLQSTQVRKITFTGSTAVGKKLMAESANTVKKVSLELGGNAPCIVFDDADIDVAVKGSLAAKFRNSGQTCVCANRILVQEGIYEKFASAFIKAVQSLKVGNGLEESTSQGPLINEAAVQKVEKFINDATSKDVLVYLQFCTQDRPVS

SEQ ID NO: 181069 - protein, 519 aa, Zea Mays
MATAMMTMRRAAALGARHIPPAAAFSRHMSADASAAMEKIRAAGLLKTQGLIAGQWVDAYDGKTIEVQNPATGEVLANVSFMGSRETSDAIASAHSTFYSWSKLTASERGKALRKWYDLIISHKEELALLMTLEQGKPMKEALGEVNYGASFIEYFAEEAKRIYGDIIPPTLSDRRLLVLKQPVGVVGAITPWNFPLAMITRKVGPALACGCTVVVKPSEFTPLTSLAAADLALQAGIPAGALNVVMGNAPEIGDALLQSTQVRKITFTGSTAVGKKLMAESANTVKKVSLELGGNAPCIVFDDADIDVAVKGSLAAKFRNSGQTCVCANRILVQEGIYEKFASAFIKAVQSLKVGNGLEESTSQGPLINEAAVQKVEKFINDATSKGANVMLGGKRHSLGMSFYEPTVVGNVSNDMLLFREEVFGPVAPLIPFKTEEEAVHMANDTNAGGTIWRSKAVWSWERRIEVRRRRILGAQVHLHGQLGLSHEIGLRLETHGRDDEPRDQEGRRLATRPEEHG

SEQ ID NO: 181070 - protein, 317 aa, Zea Mays
MTAMPHPRHRGAAKKPMWIIVLLSLVCVALMGAYVYPPRRYSACYFFASSVCTPFKDWLPAVARERTDEEIVSSVVIRDLLSMPMAMSKNPKIAFMFLTPGSLPFEKLWEKFLQGHDGRYSIYIHASREKPVHSSSLFVGREIHSEKVVWGRISMVDAEKRLLGNALEDVDNQFFVLLSDSCVPLHTFDYIYNYLMGTNVSFIDCFFDPGPHGTGRYTMEMLPEIEQRDFRKGAQWFAITRRHALLILADNLYYNKFKLYCKSVNENVHITSDDKKVVTQTPCMWNGTKRPCYLFARKFYPESLNNLLKLFSSYTSA

SEQ ID NO: 181071 - protein, 285 aa, Zea Mays
MTAMPHPRHRGAAKKPMWIIVLLSLVCVALMGAYVYPPRRYSACYFFASSVCTPFKDWLPAVARERTDEEIVSSVVIRDLLSMPMAMSKNPKIAFMFLTPGSLPFEKLWEKFLQGHDGRYSIYIHASREKPVHSSSLFVGREIHSEKVVWGRISMVDAEKRLLGNALEDVDNQFFVLLSDSCVPLHTFDYIYNYLMGTNVSFIDCFFDPGPHGTGRYTMEMLPEIEQRDFRKGAQWFAITRRHALLILADNLYYNKFKLYCKPAEGRNCIADEHYLPTLFNLTGQ

SEQ ID NO: 181072 - protein, 274 aa, Zea Mays
MTAMPHPRHRGAAKKPMWIIVLLSLVCVALMGAYVYPPRRYSACYFFASSVCTPFKDWLPAVARERTDEEIVSSVVIRDLLSMPMAMSKNPKIAFMFLTPGSLPFEKLWEKFLQGHDGRYSIYIHASREKPVHSSSLFVGREIHSEKVVWGRISMVDAEKRLLGNALEDVDNQFFVLLSDSCVPLHTFDYIYNYLMGTNVSFIDCFFDPGPHGTGRYTMEMLPEIEQRDFRKGAQWFAITRRHALLILADNLYYNKFKLYCKLCLFFRWLTLVE

SEQ ID NO: 181073 - protein, 285 aa, Zea Mays
MTAMPHPRHRGAAKKPMWIIVLLSLVCVALMGAYVYPPRRYSACYFFASSVCTPFKDWLPAVARERTDEEIVSSVVIRDLLSMPMAMSKNPKIAFMFLTPGSLPFEKLWEKFLQGHDGRYSIYIHASREKPVHSSSLFVGREIHSEKVVWGRISMVDAEKRLLGNALEDVDNQFFVLLSDSCVPLHTFDYIYNYLMGTNVSFIDCFFDPGPHGTGRYTMEMLPEIEQRDFRKGAQWFAITRRHALLILADNLYYNKFKLYCKKDATVLLMSIICQPSSIWLTLVE

SEQ ID NO: 181074 - protein, 281 aa, Zea Mays
MTAMPHPRHRGAAKKPMWIIVLLSLVCVALMGAYVYPPRRYSACYFFASSVCTPFKDWLPAVARERTDEEIVSSVVIRDLLSMPMAMSKNPKIAFMFLTPGSLPFEKLWEKFLQGHDGRYSIYIHASREKPVHSSSLFVGREIHSEKVVWGRISMVDAEKRLLGNALEDVDNQFFVLLSDSCVPLHTFDYIYNYLMGTNVSFIDCFFDPGPHGTGRYTMEMLPEIEQRDFRKGAQWFAITRRHALLILADNLYYNKFKLYCKPAEGRNCIADEHYLPTLFN

SEQ ID NO: 181075 - protein, 53 aa, Zea Mays
MCADSRSKHQRETAGAQDVEQQRHGSAVDTEQQRHGAAGDRPRIRPPGRPPRR

SEQ ID NO: 181076 - protein, 723 aa, Zea Mays
MEVELPNIHKATSSDHWSLTSSQYPSGKFPKVSVGIMIPKAGSIPRARGGDATPTPTFDRNLSQGTDGLSRPKGDNTSLRVSQEALNHDVSTEGAPKADPVTKVSVSQPDDNTCEQTGTFSFGTRREQGISVEKLETPEFLSSQRKRNTESADKAKPNSEMLRMKLWEILGGTSQNKQAAASPNPDDMETPDQPKGQTVKGPSSGNKEVFTSPFLDNIKTPDPLKRQTVNFTKCKLSLDPIESDSDSPKVDERRPVTRSLGRKKALASSKKQSRSSKKPLSTFQSTPKKKMLDNVFIFNEKCTPKTVDQGETNKATESRGSRSPDSAKKRVNRKQPYLSPTEDEGIKSSETSFAKGYKSHKWPSDIDVPDKSPVEHMGRKSNLKEDRMSKRRLSSAAPFPTAATQENTDSDKEQEQCPENFLTRAFDQASKELSKSAKKPFSTFHSTPKKKMQEERENSKQPSHSPLSPTEDEGTQGSKSSEQSFAKGYKSQKWIPDIKGTDKSPLEYVGRKTKLKEDRMNKRYLSSPTPFATSGTQETIVSDKDQEQCPENYLTRAFDQLIVVLGRFQTKIKSETSKKSSEILAATRETICQHLEGVEAQMQADVDKLVNAGRSKRKRLESTFEDQQEKLRILHEKFKEEVNKQLLNCRSSLEDFESYHAELKGVADKQKSSHKKLLANAEKTVGAQLNDAETKIAEVQKRARKRMNGLKYVLKELITETVD

SEQ ID NO: 181077 - protein, 377 aa, Zea Mays
MIPKAGSIPRARGGDATPTPTFDRNLSQGTDGLSRPKGDNTSLRVSQEALNHDVSTEGAPKADPVTKVSVSQPDDNTCEQTGTFSFGTRREQGISVEKLETPEFLSSQRKRNTESADKAKPNSEMLRMKLWEILGGTSQNKQAAASPNPDDMETPDQPKGQTVKGPSSGNKEVFTSPFLDNIKTPDPLKRQTVNFTKCKLSLDPIESDSDSPKVDERRPVTRSLGRKKALASSKKQSRSSKKPLSTFQSTPKKKMLDNVFIFNEKCTPKTVDQGETNKATESRGSRSPDSAKKRVNRKQPYLSPTEDEGIKSSETSFAKGYKSHKWPSDIDVPDKSPVEHMGRKSNLKEDRMSKRRLSSAAPFPTAGKSVYFHSLSI

SEQ ID NO: 181078 - protein, 708 aa, Zea Mays
MEVELPNIHKATSSDHWSLTSSQYPSGKFPKVSVGIMIPKAGSIPRARGGDATPTPTFDRNLSQGTDGLSRPKGTFSFGTRREQGISVEKLETPEFLSSQRKRNTESADKAKPNSEMLRMKLWEILGGTSQNKQAAASPNPDDMETPDQPKGQTVKGPSSGNKEVFTSPFLDNIKTPDPLKRQTVNFTKCKLSLDPIESDSDSPKVDERRPVTRSLGRKKALASSKKQSRSSKKPLSTFQSTPKKKMLDNVFIFNEKCTPKTVDQGETNKATESRGSRSPDSAKKRVNRKQPYLSPTEDEGIKSSETSFAKGYKSHKWPSDIDVPDKSPVEHMGRKSNLKEDRMSKRRLSSAAPFPTAATQENTDSDKEQEQCPENFLTRAFDQASKELSKSAKKPFSTFHSTPKKKMQGNVFTFNEKRAPKTVDQDKMNQTTESPGSESPGSAEERENSKQPSHSPLSPTEDEGTQGSKSSEQSFAKGYKSQKWIPDIKGTDKSPLEYVGRKTKLKEDRMNKRYLSSPTPFATSVSDKDQEQCPENYLTRAFDQLIVVLGRFQTKIKSETSKKSSEILAATRETICQHLEGVEAQMQADVDKLVNAGRSKRKRLESTFEDQQEKLRILHEKFKEEVNKQLLNCRSSLEDFESYHAELKGVADKQKSSHKKLLANAEKTVGAQLNDAETKIAEVQKRARKRMNGLKYVLKELITETVD

SEQ ID NO: 181079 - protein, 413 aa, Zea Mays
MEVELPNIHKATSSDHWSLTSSQYPSGKFPKVSVGIMIPKAGSIPRARGGDATPTPTFDRNLSQGTDGLSRPKGDNTSLRVSQEALNHDVSTEGAPKADPVTKVSVSQPDDNTCEQTGTFSFGTRREQGISVEKLETPEFLSSQRKRNTESADKAKPNSEMLRMKLWEILGGTSQNKQAAASPNPDDMETPDQPKGQTVKGPSSGNKEVFTSPFLDNIKTPDPLKRQTVNFTKCKLSLDPIESDSDSPKVDERRPVTRSLGRKKALASSKKQSRSSKKPLSTFQSTPKKKMLDNVFIFNEKCTPKTVDQGETNKATESRGSRSPDSAKKRVNRKQPYLSPTEDEGIKSSETSFAKGYKSHKWPSDIDVPDKSPVEHMGRKSNLKEDRMSKRRLSSAAPFPTAGKSVYFHSLSI

SEQ ID NO: 181080 - protein, 732 aa, Zea Mays
MEVELPNIHKATSSDHWSLTSSQYPSGKFPKVSVGIMIPKAGSIPRARGGDATPTPTFDRNLSQGTDGLSRPKGDNTSLRVSQEALNHDVSTEGAPKADPVTKVSVSQPDDNTCEQTGTFSFGTRREQGISVEKLETPEFLSSQRKRNTESADKAKPNSEMLRMKLWEILGGTSQNKQAAASPNPDDMETPDQPKGQTVKGPSSGNKEVFTSPFLDNIKTPDPLKRQTVNFTKCKLSLDPIESDSDSPKVDERRPVTRSLGRKKALASSKKQSRSSKKPLSTFQSTPKKKMLDNVFIFNEKCTPKTVDQGETNKATESRGSRSPDSAKKRVNRKQPYLSPTEDEGIKSSETSFAKGYKSHKWPSDIDVPDKSPVEHMGRKSNLKEDRMSKRRLSSAAPFPTAGKIFIFFVSATQENTDSDKEQEQCPENFLTRAFDQASKELSKSAKKPFSTFHSTPKKKMQEERENSKQPSHSPLSPTEDEGTQGSKSSEQSFAKGYKSQKWIPDIKGTDKSPLEYVGRKTKLKEDRMNKRYLSSPTPFATSGTQETIVSDKDQEQCPENYLTRAFDQLIVVLGRFQTKIKSETSKKSSEILAATRETICQHLEGVEAQMQADVDKLVNAGRSKRKRLESTFEDQQEKLRILHEKFKEEVNKQLLNCRSSLEDFESYHAELKGVADKQKSSHKKLLANAEKTVGAQLNDAETKIAEVQKRARKRMNGLKYVLKELITETVD

SEQ ID NO: 181081 - protein, 755 aa, Zea Mays
MEVELPNIHKATSSDHWSLTSSQYPSGKFPKVSVGIMIPKAGSIPRARGGDATPTPTFDRNLSQGTDGLSRPKGDNTSLRVSQEALNHDVSTEGAPKADPVTKVSVSQPDDNTCEQTGTFSFGTRREQGISVEKLETPEFLSSQRKRNTESADKAKPNSEMLRMKLWEILGGTSQNKQAAASPNPDDMETPDQPKGQTVKGPSSGNKEVFTSPFLDNIKTPDPLKRQTVNFTKCKLSLDPIESDSDSPKVDERRPVTRSLGRKKALASSKKQSRSSKKPLSTFQSTPKKKMLDNVFIFNEKCTPKTVDQGETNKATESRGSRSPDSAKKRVNRKQPYLSPTEDEGIKSSETSFAKGYKSHKWPSDIDVPDKSPVEHMGRKSNLKEDRMSKRRLSSAAPFPTAATQENTDSDKEQEQCPENFLTRAFDQASKELSKSAKKPFSTFHSTPKKKMQGNVFTFNEKRAPKTVDQDKMNQTTESPGSESPGSAEERENSKQPSHSPLSPTEDEGTQGSKSSEQSFAKGYKSQKWIPDIKGTDKSPLEYVGRKTKLKEDRMNKRYLSSPTPFATSETIVSDKDQEQCPENYLTRAFDQLIVVLGRFQTKIKSETSKKSSEILAATRETICQHLEGVEAQMQADVDKLVNAGRSKRKRLESTFEDQQEKLRILHEKFKEEVNKQLLNCRSSLEDFESYHAELKGVADKQKSSHKKLLANAEKTVGAQLNDAETKIAEVQKRARKRMNGLKYVLKELITETVD

SEQ ID NO: 181082 - protein, 609 aa, Zea Mays
MGKPRPVQVRAAGASGVEGAARMAGAGGPAARLLVAAPVAAVRGARPHLPILVQLRQHALLHPPPPRRRRRRRLPPDRRRVGLGQLSRAANADWGHGGQQPTAPGPAAALPVGPARVGRRPAAACGLLRAGLLPGPPGPPQGPALRPLPRRAPLLGRHPAADSRVRDAAGGPAADSGDGGPAGRGLPGGGRLHRPGLRARPRLRLPARHGLQQRGGRVAQGLRGVPAAQIHPLHAFVPEPAPPRAVSQLLPVHAGAGPGGRDAGRAGVGAAARGVRRGAGRRRAGDAGVRVPGARGGHDVVDARAVRAPVAQLHPVRQPLHPAPVLARRLRLHAAHVVLLQDLRRQLLLPPRPPPPDLYFLPAAKKGINQQIELAILRADRMGVKVLSLAALNKNEALNGGGTLFVNKHPDLRVRVVHGNTLTAAVILNEIPSNVREVFLTGATSKLGRAIALYLCRKKIRVLMFTVSSERFVKIQREAPPEYQQYLVQVTKYQAAQNCKTWIVGKWLSPREQRWAPSGTHFHQFVVPPIIGFRRDCTYGKLAAMRLPKDVQGLSSCEYTMERGVVHACHAGGVVHFLEGWGHHEVGAIDVDRIDVVWKAALKHGLAPV

SEQ ID NO: 181083 - protein, 241 aa, Zea Mays
MGGGSRALSLSSLCATTLAAAKPPQHPVPFAPAHRALPHRLAAAMSSSSSPTPAASVDAGAPAPSASNAIDFLTLCYRLKTTKRAGWVKRGVQAPESVADHMYRMGVMALVAADLPGVNRDRCVKMAIVHDIAEAIVGDITPSDNVPKEEKNRREKEALDHMCELLGGGSRAQEIRELWMEYEENASLEAKVVKDFDKVEMILQALEYEKEQGRDLEEFFQSTADLGKAWAAEIASRRKTK

SEQ ID NO: 181084 - protein, 299 aa, Zea Mays
MDRKPPERFRRRFISSMMHLLTVSSSSDGHTPDCFQIAFTVLISTCKKFGRDWKKIEEHVGTKTTVQIRSHAQKYFLKVQKLGLAAGLPPMKQDWTEMRQRYVQSNIGFNHAVDVFSFRIVLRKILTVEEPYANMHCDAIIDHVSFNTTMNYVEENCAPAVYTPELRYMCIAGRYIQGAPLLGNSTAASDEILAVDTPSEGGDAVIVSSSDNSTSTASAVSWRARFVGQGYKQVCGRADVWGDGVVPEMAAHLDYLSINFLRIKAGGLEYLSLTVYIVSFTRVDISLQISHYTGCCSWI

SEQ ID NO: 181085 - protein, 405 aa, Zea Mays
MKVLQVWADWFLFSDAFLNGLRATFLRSGNSGVVPFHSLCGDAPEIEKKGSSEDGNDGFKLNEDGALATGKAAATKELLGLPLAELERRCRHNGLSLCGGKEMMVARLLNLEEAEKERIYEKDVDMKYVQGEQHVVGREDSGVNAHSTSRFGEGSNGDELDVSRNSTRAGKGRSGGSASAELESFPSKKPKYDPVLPASKWSREDDISDDEDRKGGRGLGLSYSSGSDIADGLGKVDTTEASTDHTSRHHDTIVDEEHRQKLRQIEISVMQYRESLEEQGLRDLDEIERKVASHRRRLQSEYGLSTPADGANSRRSSERTSSSSERKERHRDAHDHPRKRGRSQSRSLSPPRKSQERDREHNRGRDRSHGNDVGRDRVRGKSASQGRDDHHDRSRDREKDRRKGR

SEQ ID NO: 181086 - protein, 76 aa, Zea Mays
MMGTRPCYRTEQHDFICVCRSIVCEHDNTLAQSLDPNNEGRGVLQFKTGYMQDILFSTSTVLENKLLNFHTLLVKA

SEQ ID NO: 181087 - protein, 948 aa, Zea Mays
MSSKKVPYHKHREAEEARKKREEDEAARVYAEFVESFKGDSSSGAKFIRGGVIDPNAKLKTDSEGGKSKDGGSVPKKGSRYVPSFLPPSFAKEPEKKEGERPKEKEKEKGKPRVIDRFLEEIKLEQEQREKRHQDRDHRREGRHGDSSMSSSRFDELPDEFDPTGRFPGSFDDGDPQTTNLYVGNLSPKVDENFLLRTFGRFGPIASVKIMWPRTEEERRRQRNCGFVAFMNRTDGQAAKDEMQGVIVYDYELKIGWGKSVALPSQALPAPPPGHMAIRNKEGGTATVILSGPGGPAVASIKPQTSELVLTPNVPDIVVAPPDDGHLRHVIDTMALHVLDGGCAFEQAVMERGRGNPLFDFLFNLKSKEHTYYVWRLYSFAQGDTLQRWRTEPYIMITGSGRWVPPPLSSNRSPEREKESTFAAGRSRRVEVERTLTDSQRDEFEDMLRALTLERSQIKDAMGFALDNADAAGEIVEVLTESLTLKETSIPTKVARLMLVSDILHNSSAPVKNASAFRTKFEASLPDVMESFNDLYRSITGRITAEALKERVMKVLQVWADWFLFSDAFLNGLRATFLRSGNSGVVPFHSLCGDAPEIEKKGSSEDGNDGFKLNEDGALATGKAAATKELLGLPLAELERRCRHNGLSLCGGKEMMVARLLNLEEAEKERIYEKDVDVKYVQGEQHVVGREDSGVNAHSTSRFGEGSNGDELDVSRNSMRAGKGRSGGSASAELESFPSKKPKYDPVLPASKWSREDDISDDEDRKGGRGLGLSYSSGSDIADGLGKVDTTEASTDHTSHHHDTIVDEEHRQKLRQIEISVMQYRESLEEQGLRDLDEIERKVASHRRRLQSEYGLSTPTDGANSRRSSERTSSSSERKERHGDAHDHPRKRRRSQSRSCSPPRKSQERDREHNRSRDRDRVREKSASRGRDDHHDRSRDREDRRKGR

SEQ ID NO: 181088 - protein, 663 aa, Zea Mays
MAIAPCPRAGLMNYQMNLIRLGDFQDHLMMVILKPPTYMLAIYLPSVKIMWPRTEEERRRQRNCGFVAFMNRTDGQAAKDEMQGVIVYDYELKIGWGKSVALPSQALPAPPPGHMAIRNKEGGTATVILSGPGGPAVASIKPQTSELVLTPNVPDIVVAPPDDGHLRHVIDTMALHVLDGGCAFEQAVMERGRGNPLFDFLFNLKSKEHTYYVWRLYSFAQGDTLQRWRTEPYIMITGSGRWVPPPLSSNRSPEREKESTFAAGRSRRVEVERTLTDSQRDEFEDMLRALTLERSQIKDAMGFALDNADAAGEIVEVLTESLTLKETSIPTKVARLMLVSDILHNSSAPVKNASAFRTKFEASLPDVMESFNDLYRSITGRITAEALKERVMKVLQVWADWFLFSDAFLNGLRATFLRSGNSGVVPFHSLCGDAPEIEKKGSSEDGNDGFKLNEDGALATGKAAATKELLGLPLAELERRCRHNGLSLCGGKEMMVARLLNLEEAEKERIYEKDVDVKYVQGEQHVVGREDSGVNAHSTSRFGEGSNGDELDVSRNSMRAGKGRSGGSASAELESFPSKKPKYDPVLPASKWSREDDISDDEDRKGGRGLGLSYSSGSDIADGLGKVDTTEASTDHTSHHHDTIVDEEHRCLSVFNIFLPLPC

SEQ ID NO: 181089 - protein, 780 aa, Zea Mays
MSSSRFDELPDEFDPTGRFPGSFDDGDPQTTNLYVGNLSPKIMWPRTEEERRRQRNCGFVAFMNRTDGQAAKDEMQGVIVYDYELKIGWGKSVALPSQALPAPPPGHMAIRNKEGGTATVILSGPGGPAVASIKPQTSELVLTPNVPDIVVAPPDDGHLRHVIDTMALHVLDGGCAFEQAVMERGRGNPLFDFLFNLKSKEHTYYVWRLYSFAQGDTLQRWRTEPYIMITGSGRWVPPPLSSNRSPEREKESTFAAGRSRRVEVERTLTDSQRDEFEDMLRALTLERSQIKDAMGFALDNADAAGEIVEVLTESLTLKETSIPTKVARLMLVSDILHNSSAPVKNASAFRTKFEASLPDVMESFNDLYRSITGRITAEALKERVMKVLQVWADWFLFSDAFLNGLRATFLRSGNSGVVPFHSLCGDAPEIEKKGSSEDGNDGFKLNEDGALATGKAAATKELLGLPLAELERRCRHNGLSLCGGKEMMVARLLNLEEAEKERIYEKDVDVKYVQGEQHVVGREDSGVNAHSTSRFGEGSNGDELDVSRNSMRAGKGRSGGSASAELESFPSKKPKYDPVLPASKWSREDDISDDEDRKGGRGLGLSYSSGSDIADGLGKVDTTEASTDHTSHHHDTIVDEEHRQKLRQIEISVMQYRESLEEQGLRDLDEIERKVASHRRRLQSEYGLSTPTDGANSRRSSERTSSSSERKERHGDAHDHPRKRRRSQSRSCSPPRKSQERDREHNRSRDRDRVREKSASRGRDDHHDRSRDREDRRKGR

SEQ ID NO: 181090 - protein, 614 aa, Zea Mays
MWPRTEEERRRQRNCGFVAFMNRTDGQAAKDEMQGVIVYDYELKIGWGKSVALPSQALPAPPPGHMAIRNKEGGTATVILSGPGGPAVASIKPQTSELVLTPNVPDIVVAPPDDGHLRHVIDTMALHVLDGGCAFEQAVMERGRGNPLFDFLFNLKSKEHTYYVWRLYSFAQGDTLQRWRTEPYIMITGSGRWVPPPLSSNRSPEREKESTFAAGRSRRVEVERTLTDSQRDEFEDMLRALTLERSQIKDAMGFALDNADAAGEIVEVLTESLTLKETSIPTKVARLMLVSDILHNSSAPVKNASAFRTKFEASLPDVMESFNDLYRSITGRITAEALKERVMKVLQVWADWFLFSDAFLNGLRATFLRSGNSGVVPFHSLCGDAPEIEKKGSSEDGNDGFKLNEDGALATGKAAATKELLGLPLAELERRCRHNGLSLCGGKEMMVARLLNLEEAEKERIYEKDVDVKYVQGEQHVVGREDSGVNAHSTSRFGEGSNGDELDVSRNSMRAGKGRSGGSASAELESFPSKKPKYDPVLPASKWSREDDISDDEDRKGGRGLGLSYSSGSDIADGLGKVDTTEASTDHTSHHHDTIVDEEHRCLSVFNIFLPLPC

SEQ ID NO: 181091 - protein, 858 aa, Zea Mays
MPDTAGNGQKWSRLWWSSSSQRGSNTAASEAPSTTDMLSTSIAVVVVHAQPRDFRIIRQEWTVVRIQFAFLAFLFDAIHGFNTNKTIGGTLVHGRLWRKAPPLAEPHRGLLRRRHRRLKVGTQSECFVACVSGYLSFSTCIGLMNEREANKEMVVYLVDASPKMFTPAATQETHFHTIVNCITESLKTQIIGRSYDEVAICFFNTCHGFCNTINLPTKDVEPEKPSSPSIKRAEEKEVVVVHETKCKVSVEIARNSEPFIGEQLASLLYLEPDSELTAMLIAAEAKQQEEKAKGVSADEHDEATKGWKDIGVGQLSIRSKEGTEKTYKESTPTIVIRNHEGVGICRQGKRSDAARQQGQSSCIKRGFLLQPSAAAAVTTNKAVLDSVISLAAAKKPARTNTYVDMPVMRKVSLHRFLEKRKDRELRLRNFRALVAREPPNLFSFPGGVYLGFAVGCLFWSLRYCIVQLLVLVYQGFRGYTYTGLSCQVLDLIISVLLIRMGVYLSTPKTDKLSENGENDRLKFGLSSMQGWRATMEDAHSALLDLDSETAFFGVFDGHGGRVVAKFCAKYLHGQVLKSEAYSTGDLGTAVHRAFFRMDEMMQGQRGWRELSALGDKINKFSGMIEGLIWSPRGSDSNNQQDDWASEEGPHSDFAGPTCGSTACVALIRNTQLVVANAGDSRCVISRGGKAYNLSRDHKPELAAERERIMKAGGFIHMGRVNGSLNLSRAIGDVELKQNKFLPPEKQIVTANPDINVVELCDDDDFVVVACDGIWDCMSSQQLVDFIHERINTESSLSAVCERVLDRCLAPSTIAGDGCDNMTMILVQFKKPVDRNKKAEAAGQSASNVDEAKSRVAEE

SEQ ID NO: 181092 - protein, 222 aa, Zea Mays
MEYVTCIIVYQGPHSDFAGPTCGSTACVALIRNTQLVVANAGDSRCVISRGGKAYNLSRDHKPELAAERERIMKAGGFIHMGRVNGSLNLSRAIGDVELKQNKFLPPEKQIVTANPDINVVELCDDDDFVVVACDGIWDCMSSQQLVDFIHERINTESSLSAVCERVLDRCLAPSTIAGDGCDNMTMILVQFKKPVDRNKKAEAAGQSASNVDEAKSRVAEE

SEQ ID NO: 181093 - protein, 194 aa, Zea Mays
MPCCRARTSFPIRARRGSSGSSATRPTATCPHGPPLPGSIYQISHLSSFSSNQVRFPFLSTLSLVSGGRWPHLPLPVALMAPSTALAPVAFRSAFSTPLASKPTRNRMNIEGAFCLPCSTRKRASYRPFRVYSLFGGKKDKDENGDEAPSKEFLEICKISMKLLRRPKWLSKLRLSGCKRSLQRLRLMVIVKAN

SEQ ID NO: 181094 - protein, 76 aa, Zea Mays
MDKATYIYNFLYLHQSNRNMIVSELCGELCPGDIIGSIMSSNVRIPPISIRTIKMTRSIKHLLPVRALGDIQYLLH

SEQ ID NO: 181095 - protein, 114 aa, Zea Mays
MDLLRLRRQRSHKEFLAGNVSHHSVARWRGLRASYHELPEEVDIEEKYAPVPEYPLVGFYLTGYLVEGFFGSSLQQRKGSDVFGFISYFMWRSSSLVCLCVFLMERLRLFKYCN

SEQ ID NO: 181096 - protein, 132 aa, Zea Mays
MRSDTPPAAPIHGRLCASMALRHASLCISTPDRASSPITMAVVELLLHPANDSLHRSPLAISTRQRCSHVYVVMEVNSDGVPEVRWRGRQSLCATLAWCSRICLNRGCFRWMQLILAPLMRPAPQHPTRSIL

SEQ ID NO: 181097 - protein, 169 aa, Zea Mays
MGSHSLSMSICRCLCSVLFYAIAAAYSESVICGTLFMPASTIEYSSVGANERPHATFPTPLPRPTGQRPQKKLRLPEIQQLLQSLAVENESLREEMRDLQRACKALSKENDKLETRLGQSISQNEVTLKEQKGKQQLDQQSVMQSARDSFVLPDLNLPPQDSADVSTVH

SEQ ID NO: 181098 - protein, 611 aa, Zea Mays
MGLLSNSSTLRFVPSLVVDAKVIHLDYNNIRIFLSLKDVKVMVETTLGKEELKEAVLMCTNRKAAIKKIDTKASQEFLNEHKRLCVEQRSLATLRVLTQFREGARAPNPPGPMASSEIEVVEDATPAATSGGAGRAVAEVARQEGEGEALKDDVYTGAAYGDLEKLHRLVEREGRSVTVQDALGYHALQWAALNNRVATAQYILEHGANVNAIDHTGQTALHWSAVRGHVQVAELLLKEGAKVDATDLYGYQTTHVAAQYGQTTFLCHIVAKWNADHDVPDNDGRSPLHWAAYKGFADTMRLLLFLGAYSTRQDKEGCTPLHWAAIRGNLESCTVLVQAGKKEDLMVQDNTGLTPAQLAADKNHRQVAFFLGNARSIHERGCVGNSYFVKLSKIGLAPLLWCIIIALMVVYIHSIILEDYNTKMTVIFGLFAWLGVFLASVGLVMFYRCSRKDPGYINKNIRDSQNQRDDEPLLKMGLDSPELLDGNWSRLCITCKIVRPVRSKHCSTCDRCVEQFDHHCPWVSNCIGKRNKWDFFMFLILEVSAMIITGVMAIIRSVGDPASPASFGGWLGYTAINHSWVVSFVIMDLLLFLGVITLTVIQASQPRAINR

SEQ ID NO: 181099 - protein, 390 aa, Zea Mays
MVQDNTGLTPAQLAADKNHRQVAFFLGNARSIHERGCVGNSYFVKLSKIGLAPLLWCIIIALMVVYIHSIILEDYNTKMTVIFGLFAWLGVFLASVGLVMFYRCSRKDPGYINKNIRDSQNQRDDEPLLKMGLDSPELLDGNWSRLCITCKIVRPVRSKHCSTCDRCVEQFDHHCPWVSNCIGKRNKWDFFMFLILEVSAMIITGVMAIIRSVGDPASPASFGGWLGYTAINHSWVVSFVIMDLLLFLGVITLTVIQASQISRNITTNEMANTIRYSYLRGPSGRFRNPYDHGLRENCSDFLLKGYNEDIESTVQTLQSDEEMGPIQMSSPVSQNGESIPPHVNGTDHGSTISHANSKSHRQSPSNCLGLGLGTGHNNPSSRYARSLLPL

SEQ ID NO: 181100 - protein, 734 aa, Zea Mays
MGLLSNSSTLRFVPSLVVDAKVIHLDYNNIRIFLSLKDVKVMVETTLGKEELKEAVLMCTNRKAAIKKIDTKASQEFLNEHKRLCVEQRSLATLRVLTQFREGARAPNPPGPMASSEIEVVEDATPAATSGGAGRAVAEVARQEGEGEALKDDVYTGAAYGDLEKLHRLVEREGRSVTVQDALGYHALQWAALNNRVATAQYILEHGANVNAIDHTGQTALHWSAVRGHVQVAELLLKEGAKVDATDLYGYQTTHVAAQYGQTTFLCHIVAKWNADHDVPDNDGRSPLHWAAYKGFADTMRLLLFLGAYSTRQDKEGCTPLHWAAIRGNLESCTVLVQAGKKEDLMVQDNTGLTPAQLAADKNHRQVAFFLGNARSIHERGCVGNSYFVKLSKIGLAPLLWCIIIALMVVYIHSIILDYNTKMTVIFGLFAWLGVFLASVGLVMFYRCSRKDPGYINKNIRDSQNQRDDEPLLKMGLDSPELLDGNWSRLCITCKIVRPVRSKHCSTCDRCVEQFDHHCPWVSNCIGKRNKWDFFMFLILEVSAMIITGVMAIIRSVGDPASPASFGGWLGYTAINHSWVVSFVIMDLLLFLGVITLTVIQASQISRNITTNEMANTIRYSYLRGPSGRFRNPYDHGLRENCSDFLLKGYNEDIESTVQTLQSDEEMGPIQMSSPVSQNGESIPPHVNGTDHGSTISHANSKSHRQSPSNCLGLGLGTGHNNPSSRYARSLLPL

SEQ ID NO: 181101 - protein, 203 aa, Zea Mays
MAVERKHWVWCAVVGEIGVGEVVCGNGGNDEMGDGECGNGSRCSGSEVVVCWCGYGGRWWWEVAIGRYHSRWQSAISRHAVGAVWWRRHGRCSRGGFHHGNAGGHGGHLRGEEPQLALDFGKGGDPGYINKNIRDSQNQRDDEPLLKMGLDSPELLDGNWSRLCITCKIVRPVRSKHCSTCDRCVEQFDHHCPWVSNCIGKEV

SEQ ID NO: 181102 - protein, 125 aa, Zea Mays
MKSPFIEQKKIYGIGQHQQAMWKPGWLEALDTQKFFVACSFHEHAKKNEKNICCLDCCTSICPHCVAAHRAHRLLQVRRYVYHDVVRLEDLEKLIDCSSVQVYQLCTVHACDSGVVLRFKMQEGL

SEQ ID NO: 181103 - protein, 326 aa, Zea Mays
MHIPQLQTWLSNLHAQYVLNDLTKILEVFSQQSATILSTARAYQNGQTPHARYCQQQPEKSMCSICGTSENLWICLICGHVGCGRYKGGHAIEHWKETQHCYSLELETQKVWDYAGDNYVHRLIQSKTDGKLVEYNFHGDHTAESTCSLCSGDAAMDEALLNSKFEAIVEEYNDLVTFQLEKQRNYYESLLLEVKEETEKEISAATEKAMSTKLQKLEVKFDKCMEEKKFLDEVNGNLVKNQEMWIETIRKAQAREQAALRLKDEKIEKLQEELRGLIAHFDCQSDTAQASNAISSDIPGGMILPVASESSSSGGVVGGTGNGEQN

SEQ ID NO: 181104 - protein, 347 aa, Zea Mays
MATGGKSAAPQPPPAASSSSERALESVHFSSGNPRIEETRGVVVLHPDPPAAASWSHVPLGRKPRVCVLAVPNHMTYADFCRFCGAFVPHTLEMRIVRTDGAEDQYSVLINFDTQSSTDSFYKHFNGKQFSSLEGGVCHVRFVEEVHYTELIEHAHTSVTNLAEQPTCPVCLERLDQDPGGILTTICNHSFHCSCISKWTDSSCPVCRYCQQQPEKSMCSICGTSENLWICLICGHVGCGRYKGGHAIEHWKETQHCYSLELETQKVWDYAGDNYVHRLIQSKTDGKLVEYNFHGDHTAESTCSLCSGDAAMDEALLNSKFEALLKSTMISSHFNLKSKEITMSHFY

SEQ ID NO: 181105 - protein, 338 aa, Zea Mays
MATGGKSAAPQPPPAASSSSERALESVHFSSGNPRIEETRGVVVLHPDPPAAASWSHVPLGRKPRVCVLAVPNHMTYADFCRFCGAFVPHTLEMRIVRTDGAEDQYSVLINFDTQSSTDSFYKHFNGKQFSSLEGGVCHVRFVEEVHYTELIEHAHTSVTNLAEQPTCPVCLERLDQDPGGILTTICNHSFHCSCISKWTDSSCPVCRYCQQQPEKSMCSICGTSENLWICLICGHVGCGRYKGGHAIEHWKETQHCYSLELETQKVWDYAGDNYVHRLIQSKTDGKLVEYNFHGDHTAESTCSLCSGDAAMDEALLNSKFEAVMCLSKEFVMLTVTK

SEQ ID NO: 181106 - protein, 329 aa, Zea Mays
MATGGKSAAPQPPPAASSSSERALESVHFSSGNPRIEETRGVVVLHPDPPAAASWSHVPLGRKPRVCVLAVPNHMTYADFCRFCGAFVPHTLEMRIVRTDGAEDQYSVLINFDTQSSTDSFYKHFNGKQFSSLEGGVCHVRFVEEVHYTELIEHAHTSVTNLAEQPTCPVCLERLDQDPGGILTTICNHSFHCSCISKWTDSSCPVCRYCQQQPEKSMCSICGTSENLWICLICGHVGCGRYKGGHAIEHWKETQHCYSLELETQKVWDYAGDNYVHRLIQSKTDGKLVEYNFHGDHTAESTCSLCSGDAAMDEALLNSKFEAVMCLNC

SEQ ID NO: 181107 - protein, 137 aa, Zea Mays
MILHNEIFTSGGDQNLINRILSKNKNATDFENKDDGESDDDNDEEGDDEDAENQEDDGGDEGSDDNGNEEEDDDDDDNDPAANGEGGSDDDDDGGEDEEEDDDDDDDGDGDNEEDEEEEEEEDDDDDVPQPPTKKRK

SEQ ID NO: 181108 - protein, 681 aa, Zea Mays
MSQLPPHCFLIVYSPHYEPPSFFFICYNNSSASYYIFLTRYFCSPPPLLFFLPQPGLNSPPIPSPDLISPAAAMAGNDNWINSYLDAILDAGKAAIGGDRPSLLLRERGHFSPARYFVEEVITGYDETDLYKTWLRANAMRSPQERNTRLENMTWRIWNLARKKKEFEKEEACRMSKRQPETEKTRADATADMSEDLFEGEKGEDAGDPSVAYGDSTTGSSPKTSSIDKLYIVLISLHGLVRGENMELGRDSDTGGQIKYVVELAKALSSSPGVYRVDLLTRQILAPNFDRSYGEPKELLVSTSGKNYKQEKGENSGAYIIRIPFGPKDKYLAKEHLWPFIQEFVDGALSHIVRMSKAIGEETGRGHPVWPAVIHGHYASAGIAAALLSGALNLPMAFTGHFLGKDKLEGLLKQGRQTREQINMTYKIMCRIEAEELSLDASEIVIASTRQEIEEQWNLYDGFEVILARKLRARVKRGANCYGRFMPRMVIIPPGVEFGHIIHDFDMDGEEENPCPASEDPPIWSQIMRFFTNPRKPMILAVARPYPEKNITTLVKAFGECRPLRELANLTLIMGNREAISKMHNMSAAVLTSVLTLIDEYDLYGQVAYPKHHKHSEVPDIYRLAARTKGAFVNVAYFEQFGVTLIEAAMNGLPIIATKNGAPVEINQREWTDKYSPILVA

SEQ ID NO: 181109 - protein, 517 aa, Zea Mays
MHNRWQIMRFFTNPRKPMILAVARPYPEKNITTLVKAFGECRPLRELANLTLIMGNREAISKMHNMSAAVLTSVLTLIDEYDLYGQVAYPKHHKHSEVPDIYRLAARTKGAFVNVAYFEQFGVTLIEAAMNGLPIIATKNGAPVEINQVLNNGLLVDPHDQNAIADALYKLLSDKHLWSRCRENGLTNIHQFSWPEHCKNYLSRILTLGPRSPAIGNREERSNTPISGRKNIIVISVDSVNKEGLVRIIRNAIEVIHKENMSGSTGFVLSTSLTISEIHSLLLSGGMLPTDFDAFICNSGSNIYYPSHSGETSNNSKITFALDQNHQSHIEYRWGGEGLRKYLVKWATSVVERKGRTERQIIFEDPEHSSAYCLAFRVVNPNHLPPLKELRKLMRIQSLRCNALYNHSATRLSVVPIHASRSQALRYLCIRLGIEVPNVAVLVGESGDSDYEELLGGLHRTVILKGEFNIAANRIHTVRRYPLQDVVALDSSNIIGVDGYTTDDLRSALQQMGILAR

SEQ ID NO: 181110 - protein, 879 aa, Zea Mays
MATRERHAEPAGEEHAAREHDVEDLEPCKEEEGDMSEDLFEGEKGEDAGDPSVAYGDSTTGSSPKTSSIDKLYIVLISLHGLVRGENMELGRDSDTGGQIKYVVELAKALSSSPGVYRVDLLTRQILAPNFDRSYGEPKELLVSTSGKNYKQEKGENSGAYIIRIPFGPKDKYLAKEHLWPFIQEFVDGALSHIVRMSKAIGEETGRGHPVWPAVIHGHYASAGIAAALLSGALNLPMAFTGHFLGKDKLEGLLKQGRQTREQINMTYKIMCRIEAEELSLDASEIVIASTRQEIEEQWNLYDGFEVILARKLRARVKRGANCYGRFMPRMVIIPPGVEFGHIIHDFDMDGEEENPCPASEDPPIWSQIMRFFTNPRKPMILAVARPYPEKNITTLVKAFGECRPLRELANLTLIMGNREAISKMHNMSAAVLTSVLTLIDEYDLYGQVAYPKHHKHSEVPDIYRLAARTKGAFVNVAYFEQFGVTLIEAAMNGLPIIATKNGAPVEINQVLNNGLLVDPHDQNAIADALYKLLSDKHLWSRCRENGLTNIHQFSWPEHCKNYLSRILTLGPRSPAIGNREERSNTPISGRKNIIVISVDSVNKEGLVRIIRNAIEVIHKENMSGSTGFVLSTSLTISEIHSLLLSGGMLPTDFDAFICNSGSNIYYPSHSGETSNNSKITFALDQNHQSHIEYRWGGEGLRKYLVKWATSVVERKGRTERQIIFEDPEHSSAYCLAFRVVNPNHLPPLKELRKLMRIQSLRCNALYNHSATRLSVVPIHASRSQALRYLCIRLGIEVPNVAVLVGESGDSDYEELLGGLHRTVILKGEFNIAANRIHTVRRYPLQDVVALDSSNIIGVDGYTTDDLRSALQQMGILAR

SEQ ID NO: 181111 - protein, 507 aa, Zea Mays
MSKRQPETEKTRADATADMSEDLFEGEKGEDAGDPSVAYGDSTTGSSPKTSSIDKLYIVLISLHGLVRGENMELGRDSDTGGQIKYVVELAKALSSSPGVYRVDLLTRQILAPNFDRSYGEPKELLVSTSGKNYKQEKGENSGAYIIRIPFGPKDKYLAKEHLWPFIQEFVDGALSHIVRMSKAIGEETGRGHPVWPAVIHGHYASAGIAAALLSGALNLPMAFTGHFLGKDKLEGLLKQGRQTREQINMTYKIMCRIEAEELSLDASEIVIASTRQEIEEQWNLYDGFEVILARKLRARVKRGANCYGRFMPRMVIIPPGVEFGHIIHDFDMDGEEENPCPASEDPPIWSQIMRFFTNPRKPMILAVARPYPEKNITTLVKAFGECRPLRELANLTLIMGNREAISKMHNMSAAVLTSVLTLIDEYDLYGQVAYPKHHKHSEVPDIYRLAARTKGAFVNVAYFEQFGVTLIEAAMNGLPIIATKNGAPVEINQREWTDKYSPILVA

SEQ ID NO: 181112 - protein, 339 aa, Zea Mays
MKALGRAMRWASCCKLSDGDEPGRRKKDASWRIFSLKELQSATNNFNYDNKVGEGGFGSVYWGQLWDGSQVAVKRLKSWSNKAETEFAVEVEILARHAAECNLSWERRMKIAVDSAEGIAYLHHHATPHIIHRDVKASNVLLDSNFQARVADFGFAKLVPDGATHVTTRVKGTLGYLAPEYAMLGKASESCDVFSLGVMLLELASGKKPVEKLNPTTKRTIAEWALPLARDRKFKEIADPKLNGSFVEDELKRMVLVGLACSQDKPEQRPVMSEVVELLRGESTERLSRLENGDLFKPDISFHGSSGPDSSDCVTEERSPKADATEEAVDSSETVPSAR

SEQ ID NO: 181113 - protein, 320 aa, Zea Mays
MKALGRAMRWASCCKLSDGDEPGRRKKDASWRIFSLKELQSATNNFNYDNKVAVKRLKSWSNKAETEFAVEVEILARHAAECNLSWERRMKIAVDSAEGIAYLHHHATPHIIHRDVKASNVLLDSNFQARVADFGFAKLVPDGATHVTTRVKGTLGYLAPEYAMLGKASESCDVFSLGVMLLELASGKKPVEKLNPTTKRTIAEWALPLARDRKFKEIADPKLNGSFVEDELKRMVLVGLACSQDKPEQRPVMSEVVELLRGESTERLSRLENGDLFKPDISFHGSSGPDSSDCVTEERSPKADATEEAVDSSETVPSAR

SEQ ID NO: 181114 - protein, 231 aa, Zea Mays
MKIAVDSAEGIAYLHHHATPHIIHRDVKASNVLLDSNFQARVADFGFAKLVPDGATHVTTRVKGTLGYLAPEYAMLGKASESCDVFSLGVMLLELASGKKPVEKLNPTTKRTIAEWALPLARDRKFKEIADPKLNGSFVEDELKRMVLVGLACSQDKPEQRPVMSEVVELLRGESTERLSRLENGDLFKPDISFHGSSGPDSSDCVTEERSPKADATEEAVDSSETVPSAR

SEQ ID NO: 181115 - protein, 307 aa, Zea Mays
MNNLRKRMISLLLRAPGSPYVPCPHFFPLFYPHRLLSATKCVATKPFAVEDYLVATCGLTQAQALKASKHVSHLKDPSKADAVVAFLSNLGLSSAEITDVVTRDPKVLCSDVERSLTARVAELTDLGFSRPEIVRLLIVGMNHFRHSSLRLNLEFWISVFGSLDELIRALRINAALLSTRIEEVCKPNLELLQECGINVSDISNSFMSRVLTRDPKSLQEALARLHEFRIQPGSQPFFRGLYTFAILGSGKITKSIQLFEKLGWSKDHIVSAVKRDPTILGFTEERVRRNMEFLIRVVGLEGKGVVQ

SEQ ID NO: 181116 - protein, 144 aa, Zea Mays
MDAAPLLALLLAAVSLSAAAAGDGAHPGYSDEGTCTVERRRSGRGLGPGAAAPGGAPARAHHRHHARVRAGPSGVRAGGCHGALGPPQGVHGERVRVQPVGAAVGVPHGHPRRRARPHEPRPLRRRPRRGHARPRRPQRTCVAG

SEQ ID NO: 181117 - protein, 183 aa, Zea Mays
MANGSEYNLSELRLECHMGTHVDAPGHMNQGHFAAGLDVDTLDLDVLNGPALLVDVPRDTNITAMEFLNIPRGVRRVLFRTLNTDRKLMWRKGGDMSYVGFTEDGAQWLVDNTDIKLVGIDSLSVAAFEHLISAHVVFFKTPDIIPVEGLKLDNIETGIYMLHCLPLRLVGAEGAPTRCILIK

SEQ ID NO: 181118 - protein, 615 aa, Zea Mays
MNHQWMEKNLTDKHWRSSPKKVLLLSISESVVAGSLLRHISEAKGRVITTQFASNIHRIGSIKAAADLTGRKMVFVGMSLRTYLEAAFKDGKAPLDPSTLVKVEDMDAYAPKDLLVVTTGSQGEPRAALNLASYGGSHALKLSKEDVLLYSAKVIPGNETRVMKMMNRLTDLGPKIIMGKDSGLHTSGHAYREELEEVLRIVKPQHFLPVHGELLFLKEHELLGRSTGIRHTTVIKNGEMLGVSHLRNRRVLSNGFVSLGKEDLQLMYSDGDKAFGTSTDLCVDERLRIASDGIIFVSMEIFRPQKEHGLAQSGLKGKFKITTRCLWLDNGRLLDALYKAAHAALSSCPVNCPHSHMERMVAEILRKMVRKYSGKRPDVIAVATENTTAGFSEHLDTKASGNFGPSSATSHLSRSPATSLEGSYKTHPDNPEVDAEEILPETVRTTPDDATTSSNGEALFSSDLHQPKTLEHFWESFKSPTAVKIARIVNGGDKQNFGKIGIMGQDSLIQSAPAPVKSSKRNKWKPEEIKSLIQMRGEMNEKFQSVKGRMVLWKEISDTMLNQGVSRTPAQCKSLWTSLVQKYEESKDTESMKTWPYFSAMDKILSQQGEMATKG

SEQ ID NO: 181119 - protein, 333 aa, Zea Mays
MVALASLSSLCPCGIARRRAASATSSTAFSISCCAVATPSFSGKGPQESRTPRRRLRKTEGATKSLEDSVKRKMEQFYEGADGPPLRVLPIGGLGEIGMNCMLVGNYDRYILIDAGVMFPDYDEFGVQKIIPDTTFIKKWSHKIEAVIITHGHEDHIGALPWVIPALDSTTPIFASSFTMELIKKRLKEFGIFLSSRLKVLRIKKRFQAGPFEVEPIRVTHSIPDCCGLVLRCGDGIIFHTGDWKIDESPVDGKKFDRQALEELSKEGVTLMMSDSTNVLSPGRSISESVVAGSLLRHISEAKGRVITTQFASNIHRIGSIKAAADLTGRKMN

SEQ ID NO: 181120 - protein, 270 aa, Zea Mays
MVALASLSSLCPCGIARRRAASATSSTAFSISCCAVATPSFSGKGPQESRTPRRRLRKTEGATKSLEDSVKRKMEQFYEGADGPPLRVLPIGGLGEIGMNCMLVGNYDRYILIDAGVMFPDYDEFGVQKIIPDTTFIKKWSHKIEAVIITHGHEDHIGALPWVIPALDSTTPIFASSFTMELIKKRLKEFGIFLSSRLKVLRIKKRFQAGPFEVEPIRVTHSIPDCCGLVLRCGDGIIFHTGDWKIDESPVDGKKFDRQALEELSKEDDE

SEQ ID NO: 181121 - protein, 543 aa, Zea Mays
MVFVGMSLRTYLEAAFKDGKAPLDPSTLVKVEDMDAYAPKDLLVVTTGSQGEPRAALNLASYGGSHALKLSKEDVLLYSAKVIPGNETRVMKMMNRLTDLGPKIIMGKDSGLHTSGHAYREELEEVLRIVKPQHFLPVHGELLFLKEHELLGRSTGIRHTTVIKNGEMLGVSHLRNRRVLSNGFVSLGKEDLQLMYSDGDKAFGTSTDLCVDERLRIASDGIIFVSMEIFRPQKEHGLAQSGLKGKFKITTRCLWLDNGRLLDALYKAAHAALSSCPVNCPHSHMERMVAEILRKMVRKYSGKRPDVIAVATENTTAGFSEHLDTKASGNFGPSSATSHLSRSPATSLEGSYKTHPDNPEVDAEEILPETVRTTPDDATTSSNGEALFSSDLHQPKTLEHFWESFKSPTAVKIARIVNGGDKQNFGKIGIMGQDSLIQSAPAPVKSSKRNKWKPEEIKSLIQMRGEMNEKFQSVKGRMVLWKEISDTMLNQGVSRTPAQCKSLWTSLVQKYEESKDTESMKTWPYFSAMDKILSQQGEMATKG

SEQ ID NO: 181122 - protein, 695 aa, Zea Mays
MELIKKRLKEFGIFLSSRLKVLRIKKRFQAGPFEVEPIRVTHSIPDCCGLVLRCGDGIIFHTGDWKIDESPVDGKKFDRQALEELSKEGVTLMMSDSTNVLSPGRSISESVVAGSLLRHISEAKGRVITTQFASNIHRIGSIKAAADLTGRKMVFVGMSLRTYLEAAFKDGKAPLDPSTLVKVEDMDAYAPKDLLVVTTGSQGEPRAALNLASYGGSHALKLSKEDVLLYSAKVIPGNETRVMKMMNRLTDLGPKIIMGKDSGLHTSGHAYREELEEVLRIVKPQHFLPVHGELLFLKEHELLGRSTGIRHTTVIKNGEMLGVSHLRNRRVLSNGFVSLGKEDLQLMYSDGDKAFGTSTDLCVDERLRIASDGIIFVSMEIFRPQKEHGLAQSGLKGKFKITTRCLWLDNGRLLDALYKAAHAALSSCPVNCPHSHMERMVAEILRKMVRKYSGKRPDVIAVATENTTAGFSEHLDTKASGNFGPSSATSHLSRSPATSLEGSYKTHPDNPEVDAEEILPETVRTTPDDATTSSNGEALFSSDLHQPKTLEHFWESFKSPTAVKIARIVNGGDKQNFGKIGIMGQDSLIQSAPAPVKSSKRNKWKPEEIKSLIQMRGEMNEKFQSVKGRMVLWKEISDTMLNQGVSRTPAQCKSLWTSLVQKYEESKDTESMKTWPYFSAMDKILSQQGEMATKG

SEQ ID NO: 181123 - protein, 249 aa, Zea Mays
MQALLLPARAAPPTPAMLRQRAVSASACASQVCRPLFGAASCISCGVHGSVRRHLTVAVAAAPPSPSSSPSSGPLYPTPPPTEQEVERVKLEQVMRRLEKTARYFKNLGTLGFWSQLVCTIISAGILAFSTVVTGKVTSPFTFYATAAGIAAAFISVFWSFGYIRLSERLRKTSKEPAKAPPRADVVKSLKNGIVVNILGMGAAVLGMQATVGALVAKALTTSAVPYYQAAGQSPVLALDVFLVQVKSV

SEQ ID NO: 181124 - protein, 247 aa, Zea Mays
MQALLLPARAAPPTPAMLRQRAVSASACASQVCRPLFGAASCISCGVHGSVRRHLTVAVAAAPPSPSSSPSSGPLYPTPPPTEQEVERVKLEQVMRRLEKTARYFKNLGTLGFWSQLVCTIISAGILAFSTVVTGKVTSPFTFYATAAGIAAAFISVFWSFGYIRLSERLRKTSKEPAKAPPRADVVKSLKNGIVVNILGMGAAVLGMQATVGALVAKALTTSAVPYYQAAGQSPVLALDVFLVQVV

SEQ ID NO: 181125 - protein, 124 aa, Zea Mays
MRRLEKTARYFKNLGTLGFWSQLVCTIISAGILAFSTVVTGKAPPRADVVKSLKNGIVVNILGMGAAVLGMQATVGALVAKALTTSAVPYYQAAGQSPVLALDVFLVQCHWYDLYSLGCMSGGG

SEQ ID NO: 181126 - protein, 64 aa, Zea Mays
MLGKMKLHEGRKYKKRYGTESKDGYIAMQSLNEVSNLCSMSEILKKIPQSSINDKAGLLKAPLP

SEQ ID NO: 181127 - protein, 52 aa, Zea Mays
MYNIEVSDKAGRPESSLFCLSNSTMLCDMIFAVSIIYVLLIIEELLVISMKL

SEQ ID NO: 181128 - protein, 464 aa, Zea Mays
MPPPPQRPRNRPKHPQGPGDAPKGSESHTVQSNKKQGLGTGPLVGIIAGSIVAVLCVFLLLLCCMCNAQKRTDDASSESKDFGGPLTVNIERASSREIPEQMDDTSIATVKLPPAEKMTPERVYGKNGSVRKTKVPITATPYTVASLQVATNSFCQDSLLGEGSLGRVYKADFPNGKVLAVKKIDSAALSLQEEDNFLEAVSSMSRLRHPNIVPLTGYCVEHGQRLLVYEYIVNGTLHDMLHFSVEISRKLTWNIRVRIALGTARALEYLHEVCMPSLVHRNLKSSNILLDEEHNPHLSDCGLAALTPNTERQVSTEVFGSFGYSAPEFAMSGIYTVKSDVYSFGVVMLELLTGRKPLDSSRERSEQSLVRWATPQLHDIDALARMVDPALNGMYPAKSLSRFADVIALCVQPEPEFRPPMSEVVQQLVRLMQRASIVRRQSGEELGFSYRVPEREGDLRDISF

SEQ ID NO: 181129 - protein, 580 aa, Zea Mays
MASIEYLNLSHNSISQQLGDIFGSLNSLSDLDVSFNKLTGDLPNSIGSLSNLSSLYMQNNQLTGSVNVLRGLSLTTLNIANNNFSGWIPKEFSSIPDVTLEGNSFANGPAPPPPPFMPPPPQRPRNRPKHPQGPGDAPKGSESHTVQSNKKQGLGTGPLVGIIAGSIVAVLCVFLLLLCCMCNAQKRTDDASSESKDFGGPLTVNIERASSREIPEQMDDTSIATVKLPPAEKMTPERVYGKNGSVRKTKVPITATPYTVASLQVATNSFCQDSLLGEGSLGRVYKADFPNGKVLAVKKIDSAALSLQEEDNFLEAVSSMSRLRHPNIVPLTGYCVEHGQRLLVYEYIVNGTLHDMLHFSVEISRKLTWNIRVRIALGTARALEYLHEVCMPSLVHRNLKSSNILLDEEHNPHLSDCGLAALTPNTERQVSTEVFGSFGYSAPEFAMSGIYTVKSDVYSFGVVMLELLTGRKPLDSSRERSEQSLVRWATPQLHDIDALARMVDPALNGMYPAKSLSRFADVIALCVQPEPEFRPPMSEVVQQLVRLMQRASIVRRQSGEELGFSYRVPEREGDLRDISF

SEQ ID NO: 181130 - protein, 623 aa, Zea Mays
MEALAAAFATGLVLALAAAPAGAETDPDDAAALANLYTSWNSPSQLAGWSASGGDPCGAAWQGVACSGAGVTEIDVSFNKLTGDLPNSIGSLSNLSSLYMQNNQLTGSVNVLRGLSLTTLNIANNNFSGWIPKEFSSIPDVTLEGNSFANGPAPPPPPFMPPPPQRPRNRPKHPQGPGDAPKGSESHTVQSNKKQGLGTGPLVGIIAGSIVAVLCVFLLLLCCMCNAQKRTDDASSESKDFGGPLTVNIERASSREIPEQMDDTSIATVKLPPAEKMTPERVYGKNGSVRKTKVPITATPYTVASLQVATNSFCQDSLLGEGSLGRVYKADFPNGKVLAVKKIDSAALSLQEEDNFLEAVSSMSRLRHPNIVPLTGYCVEHGQRLLVYEYIVNGTLHDMLHFSVEISRKLTWNIRVRIALGTARALEYLHEVCMPSLVHRNLKSSNILLDEEHNPHLSDCGLAALTPNTERQVSTEVFGSFGYSAPEFAMSGIYTVKSDVYSFGVVMLELLTGRKPLDSSRERSEQSLVRWATPQLHDIDALARMVDPALNGMYPAKSLSRFADVIALCVQPEPEFRPPMSEVVQQLVRLMQRASIVRRQSGEELGFSYRVPEREGDLRDISF

SEQ ID NO: 181131 - protein, 53 aa, Zea Mays
MHLGRAREMRLASGRVLLGFAYEELDQFLNGAMAPSRAAPCRGWLSRHRICLR

SEQ ID NO: 181132 - protein, 71 aa, Zea Mays
MHLGRAREMRLASGRVLLGFAYEELDQFLNGAMAPSRAAPCRGWLSRHRICLRSRTCIDKTRSMKDAMMSS

SEQ ID NO: 181133 - protein, 54 aa, Zea Mays
MELNLIYRLHCIVGFIINCDILFYWNGIYLYLVNANEILTNLLKATLSLNHSIW

SEQ ID NO: 181134 - protein, 133 aa, Zea Mays
MPRGRRRLTLAPISSPLPEGGQTEDGRAQGGQTEDGRDAAATEEASSEDEVLRSAMYAGFSSEEASVFLQEKKNSQVSQVIYSIAHWLRTWAILQKAELRPMVVEATQYLVQVAMDYFSRAHGWRSSLRIDYH

SEQ ID NO: 181135 - protein, 985 aa, Zea Mays
MPRGRRRLTLAPISSPLPEGGQTEDGRAQGGQTEDGRDAAATEEASSEDEVLRSAMYAGFSSEEASVFLQEKKNSQVSQVRFDAQFREDFWIDLGFPKGSRWWENSDSPIHGAPVNPNAVVRSDASLGVHESSESLQASLNALDLESRIGTHTDQNKRSFVNSSSIQDSGAHLKPSRRGVHIRPWRGPLPRPRRKEAISLAAFWPSSAQAFHGSCSPVSTSKVGWTMPQPPKLDVRSEFPPLIAAVSVDSRSGPAVIPAEIEAVGILNSVSLETNRAALVNRAKGYGLTRKLLRRPIPRTCRHFSSRLGLIPMSDNNRPSYAAMAARQPTREGQRPPMPQARGGGLAAPRGGRGSLPRSSRGRAILGGRDRGHARGSGRGWFNPGRGRGFGQVQAAAPQQRYVPVDLQEASQGTQAEAPEPIKAKKPRTPFCFRCKCLGHLQENCSAILDCCICNKKNNHVPAKCPILKMPRPTASMLGCAKNELTFFRIPEFDLMVEAPAPAPTALISVSGGKLDALAIQLELAKLSRVEWNWEALPHGDDSFLVVFPSEDELLRMADIEYKLKSGISISISQWERTGDASPAYYLDEIWVHVTGVPHDWRHFLAFWAVGSMIGTTIEVDMLTYRKKGIIRLLVGILDREQLPLTTDIVFHKVGYDITFTPELPDFEPAMPSLVLDASEKEDGDNKEDGAPRVSEFDPSRKKQKNVLGSFGPNSSSDRQDSAPMHVDCSEVHRPMYTTGSGVCVVAPTEKSVIKSSLPPGFKTGKPNGSISLMKPLSPSKERTTDHAKQVSVHVVPGSALVAGTGAAIPAGDLASDNWAPVVPQAGPSLTSMVNGTTMPLQFGSLNMANQTLAACSRPAVERNLVATQQMKTTQGVVQDQSLRGESEPENYAPAPVISYDIDMTEKAMRRAAARNLDADLGSKTVASSQEMLHSPLTPVQQETGMSQHINSMSFVTMTDRDCAINLDNLGLTMKRSSSGTNLSN

SEQ ID NO: 181136 - protein, 239 aa, Zea Mays
MPFLNVILALCVQEPVQQVNEGDSLDDGNDDMDEQARSSQHLSSSTAEISLPPSEDSDRMSGQVENDDGLGLVQSDTPVGAADGDSTQITSTLTTFSAYCHKDPNIHTTNEAQLYELVEPNVHPQALASSSQALKVPYSHQGYPSENPEADNVVQVYRMPDSNVHSQVLPSTSELPSGGWGESYLSSQDQACSYMTNILKTTNLYIRFCIFLEDNQFLLNGNPFHLSNLNMRLNSLTPC

SEQ ID NO: 181137 - protein, 225 aa, Zea Mays
MPFLNVILALCVQEPVQQVNEGDSLDDGNDDMDEQARSSQHLSSSTAEISLPPSEDSDRMSGQVENDDGLGLVQSDTPVGAADGDSTQITSTLTTFSAYCHKDPNIHTTNEAQLYELVEPNVHPQALASSSQALKVPYSHQGYPSENPEADNVVQVYRMPDSNVHSQVLPSTSELPSGGWGESYLSSQDQACSYMTNILKTTNLYIRFCIFLEDNQFLLNGNPFH

SEQ ID NO: 181138 - protein, 81 aa, Zea Mays
MSVEHSKEKDSSLVTPPHTESLHQPAAPFNSSQFRPSDLSIFHSNRPCSLHKSCSLYIVLPTWYRNHRLKIFRARVIAIQS

SEQ ID NO: 181139 - protein, 54 aa, Zea Mays
MSTRTRVSQDQNEFTRPESTVPHHPATCQVGTRYSHHLSTPSACEMLWYWSDRG

SEQ ID NO: 181140 - protein, 282 aa, Zea Mays
MERFITDLVKKSVQDVTGSEFELFMGFLRSLSIFGDSAPRESFQELIEIIQAQADLNSQFNVSDIDHIERWISCMYMALPIFMRGASASKFLNYFVKQIVPAFEKIPEEKKLDLLKTIASSSPYATAQDSRQLLPSVVQLLNKYMPGKKVDDINHNYVECLLYTYHHLAHKTPNTTNSLCGYKIVTGQPSDRLGEDFTEHYKDFTERLTGTEETVRAASKRLTQGMADFSKAISSAKTEEEKTKIKGDQQTSTRTMRSYNNILAMAQGKARPAPRRIRLMNA

SEQ ID NO: 181141 - protein, 481 aa, Zea Mays
MAADADAAEVERLYELGERLSSAKDKSELAADYEAIIAAVKGQSVKAKQLAAQLIPRFFRSFPALATRAMSAMFDLVDMEELAIRIQAIRGFPLLGKDTEFVSKIADVLGQLLTSEENVERDAVHKALMSLIREDVKNSLQPLFKHVEQGSEIREKIICFLRDKVFPLKAELLKPQAEMERFITDLVKKSVQDVTGSEFELFMGFLRSLSIFGDSAPRESFQELIEIIQAQADLNSQFNVSDIDHIERWISCMYMALPIFMRGASASKFLNYFVKQIVPAFEKIPEEKKLDLLKTIASSSPYATAQDSRQLLPSVVQLLNKYMPGKKVDDINHNYVECLLYTYHHLAHKTPNTTNSLCGYKIVTGQPSDRLGEDFTEHYKDFTERLTGTEETVRAASKRLTQGMADFSKAISSAKTEEEKTKIKGDQQTSTRTMRSYNNILAMAQPLHSKSPLFIGDKKIALSWMEHPKKPTATTAGLQII

SEQ ID NO: 181142 - protein, 278 aa, Zea Mays
MHRGASASKFLNYFVKQIVPAFEKIPEEKKLDLLKTIASSSPYATAQDSRQLLPSVVQLLNKYMPGKKVDDINHNYVECLLYTYHHLAHKTPNTTNSLCGYKIVTGQPSDRLGEDFTEHYKDFTERLTGTEETVRAASKRLTQGMADFSKAISSAKTEEEKTKIKGDQQTSTRTMRSYNNILAMAQPLHSKSPLFIGDKKIALSWMEHPKKPTATTAGGKRSQPATTNGNGPANKKGRGGMHNQLVNRAFEGLSRGGRGTGRGRGRGGRGRRGWGGYR

SEQ ID NO: 181143 - protein, 505 aa, Zea Mays
MAADADAAEVERLYELGERLSSAKDKSELAADYEAIIAAVKGQSVKAKQLAIRIQAIRGFPLLGKDTEFVSKIADVLGQLLTSEENVERDAVHKALMSLIREDVKNSLQPLFKHVEQGSEIREKIICFLRDKVFPLKAELLKPQAEMERFITDLVKKSVQDVTGSEFELFMGFLRSLSIFGDSAPRESFQELIEIIQAQADLNSQFNVSDIDHIERWISCMYMALPIFMRGASASKFLNYFVKQIVPAFEKIPEEKKLDLLKTIASSSPYATAQDSRQLLPSVVQLLNKYMPGKKVDDINHNYVECLLYTYHHLAHKTPNTTNSLCGYKIVTGQPSDRLGEDFTEHYKDFTERLTGTEETVRAASKRLTQGMADFSKAISSAKTEEEKTKIKGDQQTSTRTMRSYNNILAMAQPLHSKSPLFIGDKKIALSWMEHPKKPTATTAGGKRSQPATTNGNGPANKKGRGGMHNQLVNRAFEGLSRGGRGTGRGRGRGGRGRRGWGGYR

SEQ ID NO: 181144 - protein, 392 aa, Zea Mays
MAADADAAEVERLYELGERLSSAKDKSELAADYEAIIAAVKGQSVKAKQLAAQLIPRFFRSFPALATRAMSAMFDLVDMEELAIRIQAIRGFPLLGKDTEFVSKIADVLGQLLTSEENVERDAVHKALMSLIREDVKNSLQPLFKHVEQGSEIREKIICFLRDKVFPLKAELLKPQAEMERFITDLVKKSVQDVTGSEFELFMGFLRSLSIFGDSAPRESFQELIEIIQAQADLNSQFNVSDIDHIERWISCMYMALPIFMRGASASKFLNYFVKQIVPAFEKIPEEKKLDLLKTIASSSPYATAQDSRQLLPSVVQLLNKYMPGKKVDDINHNYVECLLYTYHHLAHKTPNTTNSLCGYKIVTGQPSDRLGEDFTEHYKDFTERNNKTRQF

SEQ ID NO: 181145 - protein, 359 aa, Zea Mays
MERFITDLVKKSVQDVTGSEFELFMGFLRSLSIFGDSAPRESFQELIEIIQAQADLNSQFNVSDIDHIERWISCMYMALPIFMRGASASKFLNYFVKQIVPAFEKIPEEKKLDLLKTIASSSPYATAQDSRQLLPSVVQLLNKYMPGKKVDDINHNYVECLLYTYHHLAHKTPNTTNSLCGYKIVTGQPSDRLGEDFTEHYKDFTERLTGTEETVRAASKRLTQGMADFSKAISSAKTEEEKTKIKGDQQTSTRTMRSYNNILAMAQPLHSKSPLFIGDKKIALSWMEHPKKPTATTAGGKRSQPATTNGNGPANKKGRGGMHNQLVNRAFEGLSRGGRGTGRGRGRGGRGRRGWGGYR

SEQ ID NO: 181146 - protein, 215 aa, Zea Mays
MPGKKVDDINHNYVECLLYTYHHLAHKTPNTTNSLCGYKIVTGQPSDRLGEDFTEHYKDFTERLTGTEETVRAASKRLTQGMADFSKAISSAKTEEEKTKIKGDQQTSTRTMRSYNNILAMAQPLHSKSPLFIGDKKIALSWMEHPKKPTATTAGGKRSQPATTNGNGPANKKGRGGMHNQLVNRAFEGLSRGGRGTGRGRGRGGRGRRGWGGYR

SEQ ID NO: 181147 - protein, 159 aa, Zea Mays
MPGKKVDDINHNYVECLLYTYHHLAHKTPNTTNSLCGYKIVTGQPSDRLGEDFTEHYKDFTERLTGTEETVRAASKRLTQGMADFSKAISSAKTEEEKTKIKGDQQTSTRTMRSYNNILAMAQPLHSKSPLFIGDKKIALSWMEHPKKPTATTAGLQII

SEQ ID NO: 181148 - protein, 134 aa, Zea Mays
MADFSKAISSAKTEEEKTKIKGDQQTSTRTMRSYNNILAMAQPLHSKSPLFIGDKKIALSWMEHPKKPTATTAGGKRSQPATTNGNGPANKKGRGGMHNQLVNRAFEGLSRGGRGTGRGRGRGGRGRRGWGGYR

SEQ ID NO: 181149 - protein, 958 aa, Zea Mays
MWSAPIKRTAFDGTEYSLLLLDSEGIDAYDQTGTYSIQIFSLAVLLSSMFIYNQMGGIDEAALDRLSLVTEMTKHIRVRANGGRSTASELAQFSPIFIWLLRDFYLDLVENGRKITPRDYLEIALRPLEGRGKDISSKNEIRESIRALFPDRECFTLVRPLNNENELQRLDQIPLEKLRPEFQAGLDELTRFIFERTRPKQVAGTIMTGPVLAGITQSFLDAINNGAVPTISSSWQSVEEAECRRAYDSAAEVYMSSFSHIKLAEEDALRDEYEAALRKALDAYNTTAVGTGTSRAHYEKVLNNFCRKAFQDYKKNAFLEADKQCSNAKHNMEKKIRAACTAPGVKVSAVIQVLETALAEYETSCTGPAKWRMLAAFLRQCLEGPILDLCLKLINEVESEKTSFTLRCRSNEDQLELLKKQLEANESHKSEYLKRYKAAINEKQKASVDLSSNLANLRTKCSTLEERCVSISKELDHVRHECTDWRVKYEQSVSQHKAEQDRFVAQLASLESRHSSAEGKLGAAREHAASAQDEAAEWKKKYEMAAVQAKTALERLASVQEQINKIAQERESSIRAEFASHLEGKEEEIRKLVAKIREAESEESVLTERLLVVESKTQGHNKETTGLRDEIKELTSKLEYLRDRAVSYEKQARMLEQEKNHLQEKFLSECKKYDEAEQRYKSAERDAKKAVELADAARTEAIAYQKEKDKAQQLSIEKVAVIERVQRQVDRLEQEKVNLLGEVQRMHNSESDAWSKVTLLESRVAEREKEMDDLLSRSNEQRSSTVRVLESLLATERAARAEANKRAEALSLQLQSAQGKLDILHQELTSIRLVETALDSKLRTTTYGKRLRDNEVRLYSIQDMDIDPPERSRKRTKSNTSPLKPVQTEDGGSVHMREDSVTVSTDVKDDNPDGYKKFTIAKLKEELTKHGFGTQLLELKNPNKKDILALYKKHVLCE

SEQ ID NO: 181150 - protein, 627 aa, Zea Mays
MEKKIRAACTAPGVKVSAVIQVLETALAEYETSCTGPAKWRMLAAFLRQCLEGPILDLCLKLINEVESEKTSFTLRCRSNEDQLELLKKQLEANESHKSEYLKRYKAAINEKQKASVDLSSNLANLRTKCSTLEERCVSISKELDHVRHECTDWRVKYEQSVSQHKAEQDRFVAQLASLESRHSSAEGKLGAAREHAASAQDEAAEWKKKYEMAAVQAKTALERLASVQEQINKIAQERESSIRAEFASHLEGKEEEIRKLVAKIREAESEESVLTERLLVVESKTQGHNKETTGLRDEIKELTSKLEYLRDRAVSYEKQARMLEQEKNHLQEKFLSECKKYDEAEQRYKSAERDAKKAVELADAARTEAIAYQKEKDKAQQLSIEKVAVIERVQRQVDRLEQEKVNLLGEVQRMHNSESDAWSKVTLLESRVAEREKEMDDLLSRSNEQRSSTVRVLESLLATERAARAEANKRAEALSLQLQSAQGKLDILHQELTSIRLVETALDSKLRTTTYGKRLRDNEVRLYSIQDMDIDPPERSRKRTKSNTSPLKPVQTEDGGSVHMREDSVTVSTDVKDDNPDGYKKFTIAKLKEELTKHGFGTQLLELKNPNKKDILALYKKHVLCE

SEQ ID NO: 181151 - protein, 312 aa, Zea Mays
MLAELLSNGCSRVSPSPVSLPVSISARELLYRAQQPPFCATRPRPTHTQSVAGTPSALMSFFFVNIHQPAPILATNHTRPDPRLPGTSRPSLCPTPRSTWPHARLLVVQSIQASTSTYAPLLLTWTEAAKLSNSIAPLRSGRALLGFSGARAVHRPSPLTGILHSSPYHADALPYLAVRRGRQWPSSMPHLLRSHVARSNCASLPLFCPWKSAPPGRTSPAMSCTPSRSVVAAHTSFVGHHGHALQLRFFPSVGRHSQHSASGLRAPKPTSFISLKLRPFVLDVKPEPNVIAVSQLSSQNLVMARRVSVKCL

SEQ ID NO: 181152 - protein, 673 aa, Zea Mays
MLQGNIVPPRDQGVYGTRCKTDDIDCFSYHIVFKGGDIAKENGSGGENIYSGKFTDETCVLLHDDRGLLTTADTGFKPSGSQFCITFKPNSHLDRKHTVFGKLVVGSDVLKRIEQVDVQSPDSTPVIPVTIVNCGELIERKDIGSMSIEIDKKRAAKSKLTRDITSDEESNEGQHKRRRNKSSKRRRKKRRYSYSESDSSSESETESSDYESDSDTYSSDSSDVSSSSDDRRRRRKRHSKKNKRKHSRRKRDHRRERRRRKRGRKSKQKSKRIVKGDSEAESTGDSSSEDARSKRHRRGRKFKASSQVSEENLAGVAALKDATSPQQKSGIQRSPAQDVSSLQNGEVHTNGVNDSKIERNAAVMPVLTGNRSKSRSQSMSVNHSMSKSMSISPRRSPMKRSSTSPKRSLSRSPVDNNHSRSPIRTPKRSVSRSPARRQIMSRSPARSPPRNSSRSLHISRSPVKAHRRSISRSSARSMQQRSPSRSLERTHVRKSISPSPPLEKGRSITRTSVVSPLRSVSRSPARISRSPHRPSRRSPMRSPRWNIRRSLSRSPARIPRRSVSRSPVRGGRPRRNISRSPSPHRRVVTPPNNGRSPSRSGSPDGSPKRIRRGRGFTQRYSYARQYRSPSADRSHRYGGRNDRDRYMGYRGSRHRSPPRRYRSPPRGRVSSPR

SEQ ID NO: 181153 - protein, 411 aa, Zea Mays
MSVNHSMSKSMSISPRRSPMKRSSTSPKRSLSRSPVDNNHSRSPIRTPKRSVSRSPARRQIMSRSPARSPPRNSSRSLHISRSPVKAHRRSISRSSARSMQQRSPSRSLERTHVRKSISPSPPLEKGRSITRTSVVSPLRSVSRSPARISRSPHRPSRRSPMRSPRWNIRRSLSRSPARIPRRSVSRSPVRGGRPRRNISRSPSPHRRVVTPPNNGRSPSRSGSPDGSPKRIRRGRGFTQRYSYARQYRSPSADRSHRYGGRNDRDRYMGYRGSRHRSPPRRYRSPPRGRVSSPRYRRRSRSASRSPVYRERGRGGGYSKSPIRSSSPPARKPRSHGDRARSVSRSHLSGSVSRSPPVHHPSPPDSPSVKHASDEKSQSASPALSLSGSPNRGGKKGLVSYGDGSPDSAGK

SEQ ID NO: 181154 - protein, 80 aa, Zea Mays
MIIQQLHDHRVVLVSQDSFYCGLTAEESAHAQDYNFDHPNAFDTEQLMECMRNLLFCHSQIWLSVIMPSRVYDWWDRLCL

SEQ ID NO: 181155 - protein, 58 aa, Zea Mays
MCSRSTGCGEQQEERETERRFRTHPYGELAMLSFSTYHGKKYTMTYNIELQIFLKKIE

SEQ ID NO: 181156 - protein, 160 aa, Zea Mays
MESDDEIRRVPELGLELPGASTSGREAGPGAAGADRALAQSSTAQASARRRVRSHADKEHKRLKRLGGGDMHAIARHGPGCKWVRLLRNRVSAQQARERKKAYLTDLEVKVRDLEKKNSEMEERLSTLQNENQMLRQILKNTAVNRRGSGSTASGEGHGQ

SEQ ID NO: 181157 - protein, 235 aa, Zea Mays
MRRVVFYSARSNRWHRAPDMLRRRQFFDVCVMGNRLYVAGGEGGGGGLRSAEVFDPAKNRWSFVAEMAAPMAPFVSAVHGGRWFVKGIGAQQQVLSQAYSPESDSWSIVLDGMVTGWRSASACLNGRLYAAECMDGCRLRAYDEAVDAWSTCADSKQHRGSSQAAAIVALHGRLFVVRNDMSVSAVQVAAEAGKQRWQTLAGKAHTKSFVTGLLSNLAGRSRAKNNILHCQVLEV

SEQ ID NO: 181158 - protein, 1560 aa, Zea Mays
MAPLPPRELLSVIEAALLGSTAPSPAQRVELLHAVRDAAPAFRTLLSYPVPKASDRTQVESKEVRLPGMPPITLDDTDVRTALKLSDELNLNEIECVRLLVDANREWVLYGREPLEIYRLAAGLWYMERRDLITALYILLRSVALDQGLDADLMSEIEDQIQPLFNDGLRQRIITLVKELNREEPAGIGSPSSERYVLDFRGALVERRAIVSRERLSLSHCLALSALIKLTSPKEVKDVFSILKDCAAEANQNSSVELQITYGLLFFLVATFISDALSTSLEKASLSSSDSSFRREFHELVMRTGNNMTIEGFVGVVRLAWSVHLMLTQDRSNSRETSDIWSCLEIICRQNSFEFLREQVLKTAAYQNDDEDIVYMYTGYTHKLMMCFISHPTSRDKIKEIKEKAMTALSPYEPPRGQREDLGRNGEQADQPTKEPFVSLLELVREIYQKVPELGNGNEELWTFVIYAGEDHTNTQTLVAFLGLLSTLASTEVGAAKVYELLQGKTYRSVGWSTLFDCLSIYEEKFKKSIQSSANILPDFPEGDAQALVAYLAVLQKVVENGNLTERRKWFPDIEPLFKLLSYENVPPYLKGALRNSITAFIKVSPILKDAIWNYLEQYDLPVVTAPLGHHTATQVYDMRFELNEVEARRESYPSTISFLKLINALIVEERNISDKGRRFMGIFKFVYEDVFGPFPQRAYADPLEKWELALACLEHFRMVLSMYDIKDDDIYASVNTLAPSSLERQLPLLELLKDFMSGKVAFRNIMNIILVGVDSIINERTTQTYGIILERTVLLSLEIFILVMERDLALADVFRPLYQPLDVILAQSHRQIVALLEFVRYDYLPQIQQCSIKIMGILSSRIVGLVQLLLKADVGKMVIEDYAACLEFRFDDFQVIEDTKDDVGVLTLQLLVDNICRPAPNITHLLLGFDVNGSIEQTVLKPKSQYSCLKIILDNLEKATKPDINSLLHEFSFQLLYELCLDPLTCGPVMDLLSTKKYQFFSKHVGTIGVTPLPKRNSNQSLRISMLHERAWLLKMLALALHISDISSSVYREACMAILYHTFGQCAENFQSTSLIHSHDALTSISDVPAKRNKVLDLLEVLQFRCPDTSTKYPQLLSSLGIESKIEEILRNSATFENGGVYYYSERGDRLIDLDAFREKLLQISQELNSQLTEPEKAGLKESVHHLLKWAWRYNKNLEEQAAQLHMLTGWSQIVEVAVSRRMSLFEDCSQLLFELLDASLNATTSPDCSVKMAYVLTNVSLTCMAKLRDERFICPAGTDSDAVTCLDIISSKQLPNAACNSLLFKLVMATLRNESSEILRRRQYALLLSYFQYCSSILDSDVPPSVLRFLLLEEQDGDDEDITLQKVLKEHNELAHANFSIIRKEAQAIVDLVTKDAFHGSEAGKALSFYVLDALISIDHEKYFLNQLQSRGILRSCLSDVANYLSKGQCLNPQAQRREQSLRSPSLTYKVLVLGFTLVFGPSTVARPFKNPPSHQDPSQPPETRQNPSQPPETLLLSSVLSGFCRRLCSSLQVLQPAGEEQDCTRDSGLRKAASVSF

SEQ ID NO: 181159 - protein, 1623 aa, Zea Mays
MAPLPPRELLSVIEAALLGSTAPSPAQRVELLHAVRDAAPAFRTLLSYPVPKASDRTQVESKEVRLPGMPPITLDDTDVRTALKLSDELNLNEIECVRLLVDANREWVLYGREPLEIYRLAAGLWYMERRDLITALYILLRSVALDQGLDADLMSEIEDQIQPLFNDGLRQRIITLVKELNREEPAGIGSPSSERYVLDFRGALVERRAIVSRERLSLSHCLALSALIKLTSPKEVKDVFSILKDCAAEANQNSSVELQITYGLLFFLVATFISDALSTSLEKASLSSSDSSFRREFHELVMRTGNNMTIEGFVGVVRLAWSVHLMLTQDRSNSRETSDIWSCLEIICRQNSFEFLREQVLKTAAYQNDDEDIVYMYTGYTHKLMMCFISHPTSRDKIKEIKEKAMTALSPYEPPRGQREDLGRNGEQADQPTKEPFVSLLELVREIYQKVPELGNGNEELWTFVIYAGEDHTNTQTLVAFLGLLSTLASTEVGAAKVYELLQGKTYRSVGWSTLFDCLSIYEEKFKKSIQSSANILPDFPEGDAQALVAYLAVLQKVVENGNLTERRKWFPDIEPLFKLLSYENVPPYLKGALRNSITAFIKVSPILKDAIWNYLEQYDLPVVTAPLGHHTATQVYDMRFELNEVEARRESYPSTISFLKLINALIVEERNISDKGRRFMGIFKFVYEDVFGPFPQRAYADPLEKWELALACLEHFRMVLSMYDIKDDDIYASVNTLAPSSLERQLPLLELLKDFMSGKVAFRNIMNIILVGVDSIINERTTQTYGIILERTVLLSLEIFILVMERDLALADVFRPLYQPLDVILAQSHRQIVALLEFVRYDYLPQIQQCSIKIMGILSSRIVGLVQLLLKADVGKMVIEDYAACLEFRFDDFQLLVDNICRPAPNITHLLLGFDVNGSIEQTVLKPKSQYSCLKIILDNLEKATKPDINSLLHEFSFQLLYELCLDPLTCGPVMDLLSTKKYQFFSKHVGTIGVTPLPKRNSNQSLRISMLHERAWLLKMLALALHISDISSSVYREACMAILYHTFGQCAENFQSTSLIHSHDALTSISDVPAKRNKVLDLLEVLQFRCPDTSTKYPQLLSSLGIESKIEEILRNSATFENGGVYYYSERGDRLIDLDAFREKLLQISQELNSQLTEPEKAGLKESVHHLLKWAWRYNKNLEEQAAQLHMLTGWSQIVEVAVSRRMSLFEDCSQLLFELLDASLNATTSPDCSVKMAYVLTNVSLTCMAKLRDERFICPAGTDSDAVTCLDIISSKQLPNAACNSLLFKLVMATLRNESSEILRRRQYALLLSYFQYCSSILDSDVPPSVLRFLLLEEQDGDDEDITLQKVLKEHNELAHANFSIIRKEAQAIVDLVTKDAFHGSEAGKALSFYVLDALISIDHEKYFLNQLQSRGILRSCLSDVANYLSKGQCLNPQAQRREQSLRSPSLTYKVLVLGFTLVFGPSTVARPFKNPPSHQDPSQPPETRQNPSQPPETLLLSSVLSGFCRRLCSSLQVLQPAERQRADQPRGRGSSPRKGEGVEPHQGAGEGDFTREGEVAGSRYGAAAVGELRAAVTWTSREALTASFSGTWTANRRVWGVENFTIRSKASAGRCLVFL

SEQ ID NO: 181160 - protein, 453 aa, Zea Mays
MREACMAILYHTFGQCAENFQSTSLIHSHDALTSISDVPAKRNKVLDLLEVLQFRCPDTSTKYPQLLSSLGIESKIEEILRNSATFENGGVYYYSERGDRLIDLDAFREKLLQISQELNSQLTEPEKAGLKESVHHLLKWAWRYNKNLEEQAAQLHMLTGWSQIVEVAVSRRMSLFEDCSQLLFELLDASLNATTSPDCSVKMAYVLTNVSLTCMAKLRDERFICPAGTDSDAVTCLDIISSKQLPNAACNSLLFKLVMATLRNESSEILRRRQYALLLSYFQYCSSILDSDVPPSVLRFLLLEEQDGDDEDITLQKVLKEHNELAHANFSIIRKEAQAIVDLVTKDAFHGSEAGKALSFYVLDALISIDHEKYFLNQLQSRGILRSCLSDVANYLSKVKNKIVREIVDFAKQHQSVFNSILRENMTGTNLLTLEQLSMAVSILSKVCYSLHI

SEQ ID NO: 181161 - protein, 1252 aa, Zea Mays
MRFELNEVEARRESYPSTISFLKLINALIVEERNISDKGRRFMGIFKFVYEDVFGPFPQRAYADPLEKWELALACLEHFRMVLSMYDIKDDDIYASVNTLAPSSLERQLPLLELLKDFMSGKVAFRNIMNIILVGVDSIINERTTQTYGIILERTVLLSLEIFILVMERDLALADVFRPLYQPLDVILAQSHRQIVALLEFVRYDYLPQIQQCSIKIMGILSSRIVGLVQLLLKADVGKMVIEDYAACLEFRFDDFQLLVDNICRPAPNITHLLLGFDVNGSIEQTVLKPKSQYSCLKIILDNLEKATKPDINSLLHEFSFQLLYELCLDPLTCGPVMDLLSTKKYQFFSKHVGTIGVTPLPKRNSNQSLRISMLHERAWLLKMLALALHISDISSSVYREACMAILYHTFGQCAENFQSTSLIHSHDALTSISDVPAKRNKVLDLLEVLQFRCPDTSTKYPQLLSSLGIESKIEEILRNSATFENGGVYYYSERGDRLIDLDAFREKLLQISQELNSQLTEPEKAGLKESVHHLLKWAWRYNKNLEEQAAQLHMLTGWSQIVEVAVSRRMSLFEDCSQLLFELLDASLNATTSPDCSVKMAYVLTNVSLTCMAKLRDERFICPAGTDSDAVTCLDIISSKQLPNAACNSLLFKLVMATLRNESSEILRRRQYALLLSYFQYCSSILDSDVPPSVLRFLLLEEQDGDDEDITLQKVLKEHNELAHANFSIIRKEAQAIVDLVTKDAFHGSEAGKALSFYVLDALISIDHEKYFLNQLQSRGILRSCLSDVANYLSKGQCLNPQAQRREQSLRSPSLTYKVLVLGFTLVFGPSTVARPFKNPPSHQDPSQPPETRQNPSQPPETLLLSSVLSGFCRRLCSSLQVLQPAERQRADQPRGRGSSPRKGEGVEPHQGAGEGDFTREGEVAGSRYGAAAVGELRAAVTWTSREALTASFSGITSPLLPCLVKNKIVREIVDFAKQHQSVFNSILRENMTGTNLLTLEQLSMAVSILSKVWAYEENEECSYIQDLFSLMHSLFSVDFGILNFMQSPNMIENQKSELIAFGLCFSLVSYLYVLATRKNMRFQVSYGRNSDQQHPTLQMVSDLLNSATLALERVGEEKYMLLNKIRDLNELSRKEVDEIIKVCMKQDCISPNDNIRKRRYIAMIDLCCMAGNRDQLITLLLQITECAVTILLIHFQDDASAKGLSSFSDELLPVLERLEHLKEDKVGRSLKLFHRSITTLKEMTIRTITI

SEQ ID NO: 181162 - protein, 563 aa, Zea Mays
MEQGENQSADSFVVSSSDNNELEDLPVKERCFEQREALPGEPRCVVCGRYGEYICDQTDDDICSVECKTILLSRIVAKTKPAVKAAKRVNLPLGDESFCIKDINFPNILTLADSRISSLRSKLDICVKGDAVPDPIMCFSACGLPEKLVHNLETAGYCMPTPVQMQVIPASMSNRSLLVSADTGSGKTASFLIPIIAHCSRLRSQECTGNQGPLAIVLAPTRELCLQVEEQAKVLGKGLPFKTALIVGGDPLPQQIYRIENGVELIVGTPGRLIDLLMKHNVDLTYVSVFVLDEVDCLLERGFRDQAMQIFQSLSHPQVMMFSATIHSEVEKMSNSLANNVISISCGNPNRPNKLVKQVVIWVESKKKKQKIFEIMKSKQHFKPPAVVFVSSRVGADLLSEAITVATGLEVVSIHGEKTMIERRENLRRFLTGEVSVVVSTGVLGRGMDLLKVRQVILFDLPNSIDEYIHQVGRASRMGEEGMAVVFVNEEDRRIFKELVQVLKTAGAPIPREIANSRYTAGVYVGSERKRKLSSRFGRINVFLERLLAIVLSAKRRFSGITN

SEQ ID NO: 181163 - protein, 548 aa, Zea Mays
MEQGENQSADSFVVSSSDNNELEDLPVKERCFEQREALPGEPRCVVCGRYGEYICDQTDDDICSVECKTILLSRIVAKTKPAVKAAKRVNLPLGDESFCIKDINFPNILTLADSRISSLRSKLDICVKGDAVPDPIMCFSACGLPEKLVHNLETAGYCMPTPVQMQVIPASMSNRSLLVSADTGSGKTASFLIPIIAHCSRLRSQECTGNQGPLAIVLAPTRELCLQVEEQAKVLGKGLPFKTALIVGGDPLPQQIYRIENGVELIVGTPGRLIDLLMKHNVDLTYVSVFVLDEVDCLLERGFRDQAMQIFQSLSHPQVMMFSATIHSEVEKMSNSLANNVISISCGNPNRPNKLVKQVVIWVESKKKKQKIFEIMKSKQHFKPPAVVFVSSRVGADLLSEAITVATGLEVVSIHGEKTMIERRENLRRFLTGEVSVVVSTGVLGRGMDLLKVRQVILFDLPNSIDEYIHQVGRASRMGEEGMAVVFVNEEDRRIFKELVQVLKTAGAPIPREIANSRYTAGVYVGSERKRKLSSRCLGELTCFWKGY

SEQ ID NO: 181164 - protein, 541 aa, Zea Mays
MEQGENQSADSFVVSSSDNNELEDLPVKERCFEQREALPGEPRCVVCGRYGEYICDQTDDDICSVECKTILLSRIVAKTKPAVKAAKRVNLPLGDESFCIKDINFPNILTLADSRISSLRSKLDICVKGDAVPDPIMCFSACGLPEKLVHNLETAGYCMPTPVQMQVIPASMSNRSLLVSADTGSGKTASFLIPIIAHCSRLRSQECTGNQGPLAIVLAPTRELCLQVEEQAKVLGKGLPFKTALIVGGDPLPQQIYRIENGVELIVGTPGRLIDLLMKHNVDLTYVSVFVLDEVDCLLERGFRDQAMQIFQSLSHPQVMMFSATIHSEVEKMSNSLANNVISISCGNPNRPNKLVKQVVIWVESKKKKQKIFEIMKSKQHFKPPAVVFVSSRVGADLLSEAITVATGLEVVSIHGEKTMIERRENLRRFLTGEVSVVVSTGVLGRGMDLLKVRQVILFDLPNSIDEYIHQVGRASRMGEEGMAVVFVNEEDRRIFKELVQVLKTAGAPIPREIANSRYTAGVYVGSERKRKLSSRSVWEN

SEQ ID NO: 181165 - protein, 536 aa, Zea Mays
MEQGENQSADSFVVSSSDNNELEDLPVKERCFEQREALPGEPRCVVCGRYGEYICDQTDDDICSVECKTILLSRIVAKTKPAVKAAKRVNLPLGDESFCIKDINFPNILTLADSRISSLRSKLDICVKGDAVPDPIMCFSACGLPEKLVHNLETAGYCMPTPVQMQVIPASMSNRSLLVSADTGSGKTASFLIPIIAHCSRLRSQECTGNQGPLAIVLAPTRELCLQVEEQAKVLGKGLPFKTALIVGGDPLPQQIYRIENGVELIVGTPGRLIDLLMKHNVDLTYVSVFVLDEVDCLLERGFRDQAMQIFQSLSHPQVMMFSATIHSEVEKMSNSLANNVISISCGNPNRPNKLVKQVVIWVESKKKKQKIFEIMKSKQHFKPPAVVFVSSRVGADLLSEAITVATGLEVVSIHGEKTMIERRENLRRFLTGEVSVVVSTGVLGRGMDLLKVRQVILFDLPNSIDEYIHQVGRASRMGEEGMAVVFVNEEDRRIFKELVQVLKTAGAPIPREIANSRYTAGVYVGSERKRKLSSR

SEQ ID NO: 181166 - protein, 96 aa, Zea Mays
MHHSSLPIVHHSSQIPVFPQISQQHRREASHCGQPISEHEEETMVEKEVVSQAENPPAENNFYFDIYRVDPEPPATQGKPRCIIPFLAALKRYHLI

SEQ ID NO: 181167 - protein, 51 aa, Zea Mays
MMQFTHDSLSQFILHILLYGGQLIIKRQAMHRRRCHTLTIGQLIMVTHLLT

SEQ ID NO: 181168 - protein, 365 aa, Zea Mays
MRESLKNAKRDFTKTEDDLKSLQSVGQIIGEVLRPLDNERFIVKASSGPRYVVGCRSKVDKEKLTSGTRVVLDMTTLTIMRTLPREVDPVVYNMLHEDPGNVSYSAVGGLSDQIRELRESIELPLMNPELFLRVGIKPPKGVLLYGPPGTGKTLLARAIASNIDANFLKIVSSAIIDKYIGESARLIREMFGYARDHQPCIIFMDEIDAIGGRRFSEGTSADREIQRTLMELLNQLDGFDELGKVKMIMATNRPDVLDPALLRPGRLDRKIEIPLPNEQSRMEVLKIHAAGIAKHGEIDYEAVVKLAEGFNGADLRNVCTEAGMAAIRAERDYVVHEDFMKAVRKLNDAKKLESSAHYSADFGKE

SEQ ID NO: 181169 - protein, 272 aa, Zea Mays
MLHEDPGNVSYSAVGGLSDQIRELRESIELPLMNPELFLRVGIKPPKGVLLYGPPGTGKTLLARAIASNIDANFLKIVSSAIIDKYIGESARLIREMFGYARDHQPCIIFMDEIDAIGGRRFSEGTSADREIQRTLMELLNQLDGFDELGKVKMIMATNRPDVLDPALLRPGRLDRKIEIPLPNEQSRMEVLKIHAAGIAKHGEIDYEAVVKLAEGFNGADLRNVCTEAGMAAIRAERDYVVHEDFMKAVRKLNDAKKLESSAHYSADFGKE

SEQ ID NO: 181170 - protein, 139 aa, Zea Mays
MSLPSEKVVDLADRIAALPPEEIKQIAPALLFRLNQEPPQAISGQGFSFGAQGGAGVGAGKAEEKKAEKTVFDVKLEKFDAAAKIKIIKEIRTFTDLGLKEAKELVEKAPVILKQSLTKDEAEAIIGKIKAAGGVAVME

SEQ ID NO: 181171 - protein, 1134 aa, Zea Mays
MMFTEGLDESAISWIKQGMDSPASAPAPAPPRSPLSERPPLGQVAAAPRSPALHARPCGAGAGVGFFSPKGLPQVRVNGTHHSGLLGRHSVLLSVADSDEWEDESVASWGMPEDCYGGGNFSETGDEACSSDSRLMRRAMDRCGGGWDEEVTSQLSRKGGGGGIVRGQSKEFLRVEVRGAGAFDAGKCSGSGAQHPVDSISQGRYFEEQVLGTPSAPPIAGVEEDVMFHAVERAEMDGGLERNGVSSVADILAQDVHELHTSSIVHEDGVENNLLAQIPSFTIKLCLNAWARNCMEAPDFLRDECMVLRSAFGIQNFLLHPKHNSQVDGKQMYDKDGNCTIKGRKLVKQIEIEVKKIRVVPQRPKLRATSSFRNLYMQAGSEYVRQISKILKSQVTMLTSTSSTSLPEEMFTCTLELQSSCKGHKRDSISPQYLKPGTGESQLFYLESQGDVILVEVQDNNRVVIGRAKIQVSSLTDTQQDEIIRWWPLYLDDQDCVGKVQLGMNLSMSSNNYGSEKMLQGGPAVDTIIYDMVLEAAMRAQNFNSKMLHINGPWIWLLDEFSDYYGISDAYRKLRYLSYIMNVAIPTKDCLELIYELIVPVTKAREDRTLTRQERSILIDCEDRIKSLLAALFENYKSLDEYSPTGLSDLFGPITDSAAPALAPAVQIFSVLHDILSKEAQDILRNYLQIAAAKRCRRHMIETDEFLSSNNDSLLTDPMTISAAYLKMKTLCINMSREIQADIKIHNQNILPSSIDLPNIAASLYSTELCKRLKGFLSSSPPSRPVQHVAELITATSEFERDLESWQVRPVHGGVISRQLFHDYIMVWIEDTRLQLLDNCKAEKISCPAVSTVSPFVEQMYEQIKESINEYGVVINRWPQYLMSLESAVADVEREIMKALEKQYMDILMPLRDGIPEKIEKQVQRLTRRQSIAPYVVPNQLGAFMNTVKRMLDVLHCRVEDILKSWAAYLTISCGNTVFGEQMNSITVMLKKKYKKYLQAIVDKLVSNTQANRNTRLKRILEETREADGESDIRDRMQAVRLQLSDSIHNLHEVFSSRIFVAICRGFWDRLGQIVLRFLESRKENRIWYRGSDYALGILDDVFASEMQKLLGSALQDKDLDPPQSVIDARSILC

SEQ ID NO: 181172 - protein, 1150 aa, Zea Mays
MMFTEGLDESAISWIKQGMDSPASAPAPAPPRSPLSERPPLGQVAAAPRSPALHARPCGAGAGVGFFSPKGLPQVRVNGTHHSGLLGRHSVLLSVADSDEWEDESVASWGMPEDCYGGGNFSETGDEACSSDSRLMRRAMDRCGGGWDEEVTSQLSRKGGGGGIVRGQSKEFLRVEVRGAGAFDAGKCSGSGAQHPVDSISQGRYFEEQVLGTPSAPPIAGVEEDVMFHAVERAEMDGGLERNGVSSVADILAQDVHELHTSSIVHEDGVENNLLAQIPSFTINVQNAWQSFVAYDACFRLCLNAWARNCMEAPDFLRDECMVLRSAFGIQNFLLHPKHNSQVDGKQMYDKDGNCTIKGRKLVKQIEIEVKKIRVVPQRPKLRATSSFRNLYMQAGSEYVRQISKILKSQVTMLTSTSSTSLPEEMFTCTLELQSSCKGHKRDSISPQYLKPGTGESQLFYLESQGDVILVEVQDNNRVVIGRAKIQVSSLTDTQQDEIIRWWPLYLDDQDCVGKVQLGMNLSMSSNNYGSEKMLQGGPAVDTIIYDMVLEAAMRAQNFNSKMLHINGPWIWLLDEFSDYYGISDAYRKLRYLSYIMNVAIPTKDCLELIYELIVPVTKAREDRTLTRQERSILIDCEDRIKSLLAALFENYKSLDEYSPTGLSDLFGPITDSAAPALAPAVQIFSVLHDILSKEAQDILRNYLQIAAAKRCRRHMIETDEFLSSNNDSLLTDPMTISAAYLKMKTLCINMSREIQADIKIHNQNILPSSIDLPNIAASLYSTELCKRLKGFLSSSPPSRPVQHVAELITATSEFERDLESWQVRPVHGGVISRQLFHDYIMVWIEDTRLQLLDNCKAEKISCPAVSTVSPFVEQMYEQIKESINEYGVVINRWPQYLMSLESAVADVEREIMKALEKQYMDILMPLRDGIPEKIEKQVQRLTRRQSIAPYVVPNQLGAFMNTVKRMLDVLHCRVEDILKSWAAYLTISCGNTVFGEQMNSITVMLKKKYKKYLQAIVDKLVSNTQANRNTRLKRILEETREADGESDIRDRMQAVRLQLSDSIHNLHEVFSSRIFVAICRGFWDRLGQIVLRFLESRKENRIWYRGSDYALGILDDVFASEMQKLLGSALQDKDLDPPQSVIDARSILC

SEQ ID NO: 181173 - protein, 994 aa, Zea Mays
MMFTEGLDESAISWIKQGMDSPASAPAPAPPRSPLSERPPLGQVAAAPRSPALHARPCGAGAGVGFFSPKGLPQVRVNGTHHSGLLGRHSVLLSVADSDEWEDESVASWGMPEDCYGGGNFSETGDEACSSDSRLMRRAMDRCGGGWDEEVTSQLSRKGGGGGIVRGQSKEFLRVEVRGAGAFDAGKCSGSGAQHPVDSISQGRYFEEQVLGTPSAPPIAGVEEDVMFHAVERAEMDGGLERNGVSSVADILAQDVHELHTSSIVHEDGVENNLLAQIPSFTIKIQNFLLHPKHNSQVDGKQMYDKDGNCTIKGRKLVKQIEIEEMFTCTLELQSSCKGHKRDSISPQYLKPGTGESQLFYLESQGDVILVEVQDNNRVVIGRAKIQVSSLTDTQQDEIIRWWPLYLDDQDCVGKVQLGMNLSMSSNNYGSEKMLQGGPAVDTIIYDMVLEAAMRAQNFNSKMLHINGPWIWLLDEFSDYYGISDAYRKLRYLSYIMNVAIPTKDCLELIYELIVPVTKAREDRTLTRQERSILIDCEDRIKSLLAALFENYKSLDEYSPTGLSDLFGPITDSAAPALAPAVQIFSVLHDILSKEAQDILRNYLQIAAAKRCRRHMIETDEFLSSNNDSLLTDPMTISAAYLKMKTLCINMSREIQADIKIHNQNILPRPVHGGVISRQLFHDYIMVWIEDTRLQLLDNCKAEKISCPAVSTVSPFVEQMYEQIKESINEYGVVINRWPQYLMSLESAVADVEREIMKALEKQYMDILMPLRDGIPEKIEKQVQRLTRRQSIAPYVVPNQLGAFMNTVKRMLDVLHCRVEDILKSWAAYLTISCGNTVFGEQMNSITVMLKKKYKKYLQAIVDKLVSNTQANRNTRLKRILEETREADGESDIRDRMQAVRLQLSDSIHNLHEVFSSRIFVAICRGFWDRLGQIVLRFLESRKENRIWYRGSDYALGILDDVFASEMQKLLGSALQDKDLDPPQSVIDARSILC

SEQ ID NO: 181174 - protein, 639 aa, Zea Mays
MKSSGGGLYILMIKIVSEKFSLMLQGGPAVDTIIYDMVLEAAMRAQNFNSKMLHINGPWIWLLDEFSDYYGISDAYRKLRYLSYIMNVAIPTKDCLELIYELIVPVTKAREDRTLTRQERSILIDCEDRIKSLLAALFENYKSLDEYSPTGLSDLFGPITDSAAPALAPAVQIFSVLHDILSKEAQDILRNYLQIAAAKRCRRHMIETDEFLSSNNDSLLTDPMTISAAYLKMKTLCINMSREIQADIKIHNQNILPSSIDLPNIAASLYSTELCKRLKGFLSSSPPSRPVQHVAELITATSEFERDLESWQVRPVHGGVISRQLFHDYIMVWIEDTRLQLLDNCKAEKISCPAVSTVSPFVEQMYEQIKESINEYGVVINRWPQYLMSLESAVADVEREIMKALEKQYMDILMPLRDGIPEKIEKQVQRLTRRQSIAPYVVPNQLGAFMNTVKRMLDVLHCRVEDILKSWAAYLTISCGNTVFGEQMNSITVMLKKKYKKYLQAIVDKLVSNTQANRNTRLKRILEETREADGESDIRDRMQAVRLQLSDSIHNLHEVFSSRIFVAICRGFWDRLGQIVLRFLESRKENRIWYRGSDYALGILDDVFASEMQKLLGSALQDKDLDPPQSVIDARSILC

SEQ ID NO: 181175 - protein, 1050 aa, Zea Mays
MMFTEGLDESAISWIKQGMDSPASAPAPAPPRSPLSERPPLGQVAAAPRSPALHARPCGAGAGVGFFSPKGLPQVRVNGTHHSGLLGRHSVLLSVADSDEWEDESVASWGMPEDCYGGGNFSETGDEACSSDSRLMRRAMDRCGGGWDEEVTSQLSRKGGGGGIVRGQSKEFLRVEVRGAGAFDAGKCSGSGAQHPVDSISQGRYFEEQVLGTPSAPPIAGVEEDVMFHAVERAEMDGGLERNGVSSVADILAQDVHELHTSSIVHEDGVENNLLAQIPSFTIKIQNFLLHPKHNSQVDGKQMYDKDGNCTIKGRKLVKQIEIEEMFTCTLELQSSCKGHKRDSISPQYLKPGTGESQLFYLESQGDVILVEVQDNNRVVIGRAKIQVSSLTDTQQDEIIRWWPLYLDDQDCVGKVQLGMNLSMSSNNYGSEKMLQGGPAVDTIIYDMVLEAAMRAQNFNSKMLHINGPWIWLLDEFSDYYGISDAYRKLRYLSYIMNVAIPTKDCLELIYELIVPVTKAREDRTLTRQERSILIDCEDRIKSLLAALFENYKSLDEYSPTGLSDLFGPITDSAAPALAPAVQIFSVLHDILSKEAQDILRNYLQIAAAKRCRRHMIETDEFLSSNNDSLLTDPMTISAAYLKMKTLCINMSREIQADIKIHNQNILPSSIDLPNIAASLYSTELCKRLKGFLSSSPPSRPVQHVAELITATSEFERDLESWQVRPVHGGVISRQLFHDYIMVWIEDTRLQLLDNCKAEKISCPAVSTVSPFVEQMYEQIKESINEYGVVINRWPQYLMSLESAVADVEREIMKALEKQYMDILMPLRDGIPEKIEKQVQRLTRRQSIAPYVVPNQLGAFMNTVKRMLDVLHCRVEDILKSWAAYLTISCGNTVFGEQMNSITVMLKKKYKKYLQAIVDKLVSNTQANRNTRLKRILEETREADGESDIRDRMQAVRLQLSDSIHNLHEVFSSRIFVAICRGFWDRLGQIVLRFLESRKENRIWYRGSDYALGILDDVFASEMQKLLGSALQDKDLDPPQSVIDARSILC

SEQ ID NO: 181176 - protein, 1093 aa, Zea Mays
MMFTEGLDESAISWIKQGMDSPASAPAPAPPRSPLSERPPLGQVAAAPRSPALHARPCGAGAGVGFFSPKGLPQVRVNGTHHSGLLGRHSVLLSVADSDEWEDESVASWGMPEDCYGGGNFSETGDEACSSDSRLMRRAMDRCGGGWDEEVTSQLSRKGGGGGIVRGQSKEFLRVEVRGAGAFDAGKCSGSGAQHPVDSISQGRYFEEQVLGTPSAPPIAGVEEDVMFHAVERAEMDGGLERNGVSSVADILAQDVHELHTSSIVHEDGVENNLLAQIPSFTIKLCLNAWARNCMEAPDFLRDECMVLRSAFGIQNFLLHPKHNSQVDGKQMYDKDGNCTIKGRKLVKQIEIEVKKIRVVPQRPKLRATSSFRNLYMQAGSEYVRQISKILKSQVTMLTSTSSTSLPEEMFTCTLELQSSCKGHKRDSISPQYLKPGTGESQLLWWPLYLDDQDCVGKVQLGMNLSMSSNNYGSEKMLQGGPAVDTIIYDMVLEAAMRAQNFNSKMLHINGPWIWLLDEFSDYYGISDAYRKLRYLSYIMNVAIPTKDCLELIYELIVPVTKAREDRTLTRQERSILIDCEDRIKSLLAALFENYKSLDEYSPTGLSDLFGPITDSAAPALAPAVQIFSVLHDILSKEAQDILRNYLQIAAAKRCRRHMIETDEFLSSNNDSLLTDPMTISAAYLKMKTLCINMSREIQADIKIHNQNILPSSIDLPNIAASLYSTELCKRLKGFLSSSPPSRPVQHVAELITATSEFERDLESWQVRPVHGGVISRQLFHDYIMVWIEDTRLQLLDNCKAEKISCPAVSTVSPFVEQMYEQIKESINEYGVVINRWPQYLMSLESAVADVEREIMKALEKQYMDILMPLRDGIPEKIEKQVQRLTRRQSIAPYVVPNQLGAFMNTVKRMLDVLHCRVEDILKSWAAYLTISCGNTVFGEQMNSITVMLKKKYKKYLQAIVDKLVSNTQANRNTRLKRILEETREADGESDIRDRMQAVRLQLSDSIHNLHEVFSSRIFVAICRGFWDRLGQIVLRFLESRKENRIWYRGSDYALGILDDVFASEMQKLLGSALQDKDLDPPQSVIDARSILC

SEQ ID NO: 181177 - protein, 93 aa, Zea Mays
MRVVWDAFGQVIREVLCWVLVLVIGDGGICYGSYILAQGSRNVHRPTAFPEGGGIGFGTSDDLYGNGGICYGSYNLAQGSRYGHRPTTFSVFS

SEQ ID NO: 181178 - protein, 109 aa, Zea Mays
MITLLSNMLQPPSHSTSTQEQPTSSPAQVFDGPITRSRAKKLQQEVHALLYEFQLNTNENFMLPKSCMLILLRFTKEEGQNISRTSQQEELCPSQSSAIEPSRRNSHIF

SEQ ID NO: 181179 - protein, 144 aa, Zea Mays
MARVAAKVGRAVALAMMSVMLENRGLRVETMKEVENDLRVLHRMANIMEGVGGGLHALAVGVNTRITLLHGVELMVEEDCLRFLVSAEDVLNGDPNISGRLIVIFHCEVESGVIDRAEDPSFDAAVRLIPVCVGGIGGEHPIDV

SEQ ID NO: 181180 - protein, 163 aa, Zea Mays
MSCLRRASRLTRGLSSSSAAEAETLPPPRPSAGRRVVVTGLGAVTPLARGVGATWDRLVAGRCAVRSLAAEDLRFPEEAAGRTLEQLPSRVVAAVPRGKGEDEFAEDTWTKDKSVSGFISYALCAADEALRDANWLPSEDDKKERTVPCVFCRSSFSYSYLYF

SEQ ID NO: 181181 - protein, 277 aa, Zea Mays
MSCLRRASRLTRGLSSSSAAEAETLPPPRPSAGRRVVVTGLGAVTPLARGVGATWDRLVAGRCAVRSLAAEDLRFPEEAAGRTLEQLPSRVVAAVPRGKGEDEFAEDTWTKDKSVSGFISYALCAADEALRDANWLPSEDDKKERTGVSIGGGIGSISDILDASQMIIENRLRRLSPYFIPKILINMASGHVSMRYGFQGPNHAAVTACATGAHSIGDATRMIQFGDADVMVAGGTESNIDALSIAGFSRHLIMQRNAVQKYMLKFEATECLVMHTT

SEQ ID NO: 181182 - protein, 204 aa, Zea Mays
MSCLRRASRLTRGLSSSSAAEAETLPPPRPSAGRRVVVTGLGAVTPLARGVGATWDRLVAGRCAVRSLAAEDLRFPEEAAGRTLEQLPSRVVAAVPRGKGEDEFAEDTWTKDKSVSGFISYALCAADEALRDANWLPSEDDKKERTGVSIGGGIGSISDILDASQMIIENRLRRLSPYFIPKILINMASGHVSMRYGFQDDPIW

SEQ ID NO: 181183 - protein, 154 aa, Zea Mays
MSGDAHHITQPQSGGRGAILAMKRALDQSGLHVNEIGYVNAHATSTPLGDAVEANAIKSVFGDHAASGDLAISSTKGAIGHLLGAAGSVEAIFTVLAIHHGLAPPTLNLERPDPLFEGAFTPLAAPKKMSIRAAISNSFGFGGTNTSLLFSCPP

SEQ ID NO: 181184 - protein, 160 aa, Zea Mays
MPLPVHGPACNSSGHLIGWHTFNSLPFSGKTATVVGEATPVLPRDLEWAGFVLNSRMLWKEADSKPDWVKDLDAVGENFEERWLKASKRSAAKKLSKLSRSHNESLLWIKKIPDIIAIDDEIYSNDDDPERWDMQIFRSIDSNSVKGFPKDPREATSKHM

SEQ ID NO: 181185 - protein, 213 aa, Zea Mays
MPLPVHGPACNSSGHLIGWHTFNSLPFSGKTATVVGEATPVLPRDLEWAGFVLNSRMLWKEADSKPDWVKDLDAVGENFEERWLKASKRSAAKKLSKLSRSHNESLLWIKKIPDIIAIDDEIYSNDDDPERWDMQIFRSIDSNSVKGFPKDPREATSKNLVFGKNVLIDMSVHTAYVNVIRGAQHFIYIENQYFLGSSFNWDSHRDVGPSSEE

SEQ ID NO: 181186 - protein, 433 aa, Zea Mays
MIETPTNQTPSATTTTPRESGGGGGAMAEPGQQLLRSFVEVAAGSHFPIQNLPFGVFRRRGSPPQAPLPPVAIGDFALDLATVADAGLFDGPALSGSPCFHQETLNMFLGMGRPAWREARATLQKILSADEPVLRDNEALRNKCLIPMSDIEMVLPITVGGYTDFFCSVHHARNCGFIFRGPQTPVNPNWFYLPIGYNGRASSIVVSGTDVIRPRGQGHPTGNSAPYFGPSQKLDFELEMAAIVGPGNELGKPIDINDAEEHIFGLTLMNDWSARDIQAWETIPLGPFLGKSFSTTISPWIVTLDALKPFMCEAPKQVLIKPKDQNVALIVTKTNFKHLYWTVTQQLTHHTINGCNMRPGDIFATGTLSGPEPDSLGCLLELTWNGQKEIPVGNLTRKFLEDGDEVILTGCCKGEGYNIGFGTCTGKVLPALP

SEQ ID NO: 181187 - protein, 305 aa, Zea Mays
MIETPTNQTPSATTTTPRESGGGGGAMAEPGQQLLRSFVEVAAGSHFPIQNLPFGVFRRRGSPPQAPLPPVAIGDFALDLATVADAGLFDGPALSGSPCFHQETLNMFLGMGRPAWREARATLQKILSADEPVLRDNEALRNKCLIPMSDIEMVLPITVGGYTDFFCSVHHARNCGFIFRGPQTPVNPNWFYLPIGYNGRASSIVVSGTDVIRPRGQGHPTGNSAPYFGPSQKLDFELEMAAIVGPGNELGKPIDINDAEEHIFGLTLMNDWSEIFRLGRLYLLDLSLGKASVPPYHHGLLLLML

SEQ ID NO: 181188 - protein, 425 aa, Zea Mays
MIETPTNQTPSATTTTPRESGGGGGAMAEPGQQLLRSFVEVAAGSHFPIQNLPFGVFRRRGSPPQAPLPPVAIGDFALDLATVADAGLFDGPALSGSPCFHQETLNMFLGMGRPAWREARATLQKILSADEPVLRDNEALRNKCLIPMSDIEMVLPITVGGYTDFFCSVHHARNCGFIFRGPQTPVNPNWFYLPIGYNGRASSIVVSGTDVIRPRGQGHPTGNSAPYFGPSQKLDFELEMAAIVGPGNELGKPIDINDAEEHIFGLTLMNDWSARDIQAWETIPLGPFLGKSFSTTISPWIVTLDALKPFMCEAPKQEPEPLPYLAEKNHINYDIPLELTHHTINGCNMRPGDIFATGTLSGPEPDSLGCLLELTWNGQKEIPVGNLTRKFLEDGDEVILTGCCKGEGYNIGFGTCTGKVLPALP

SEQ ID NO: 181189 - protein, 419 aa, Zea Mays
MIETPTNQTPSATTTTPRESGGGGGAMAEPGQQLLRSFVEVAAGSHFPIQNLPFGVFRRRGSPPQAPLPPVAIGDFALDLATVADAGLFDGPALSGSPCFHQETLNMFLGMGRPAWREARATLQKILSADEPVLRDNEALRNKCLIPMSDIEMVLPITVGGYNGRASSIVVSGTDVIRPRGQGHPTGNSAPYFGPSQKLDFELEMAAIVGPGNELGKPIDINDAEEHIFGLTLMNDWSARDIQAWETIPLGPFLGKSFSTTISPWIVTLDALKPFMCEAPKQEPEPLPYLAEKNHINYDIPLEVLIKPKDQNVALIVTKTNFKHLYWTVTQQLTHHTINGCNMRPGDIFATGTLSGPEPDSLGCLLELTWNGQKEIPVGNLTRKFLEDGDEVILTGCCKGEGYNIGFGTCTGKVLPALP

SEQ ID NO: 181190 - protein, 155 aa, Zea Mays
MELATTPAVLPTCARPSTRACHRLALALACLLVVTAARSLFVHRVSRVLAFALSRRTHHPLLDCQANPLIRVLLAVNSRLTSSFSLVHISTDSVSSRVCVIELVVDFISRRRILDLDEKVRQVRLASARGSTKCLNWTTVIVLAVIESIRFWYVN

SEQ ID NO: 181191 - protein, 434 aa, Zea Mays
MLPSKFMEDAFRDRHGKIINIRHLDQVIKSVNRWYQERGLTGLVSYAEILSGGILRLQVSEAEVNNISIRFLDRKTGEPTVGKTQTETILRQLTTKKGQAYNRAQVKRDVETILTMGIMEDVTIIPQPVGDSNKVDLVMNLVERPSGGFSAGGGISSGITNGPLSGLIGSFAYSHRNVFGRNKKLNLSLERGQIDSIFRLNFTDPWIDGDNKRTSRTVMVQNSRTPGTLVHGGDHPDHAPITIGRVIAGLEYSRPFRPKWSGTLGLIFQHAGARDDKGNPVIRDFYNSQLTASGHDYDDTLLAKFESIYTDSGDHSSTMFVFNIEQGLPVLPEWLSFNRLTARLRQGYEIGPARLLLSASGGHMEGNFPPHEAFAIGGTNSVRGYEEGAVGSGRSYAVGSGEVSCRMVNFFLLSTLLAFCCCQMDSTWKYDRHN

SEQ ID NO: 181192 - protein, 366 aa, Zea Mays
MGIMEDVTIIPQPVGDSNKVDLVMNLVERPSGGFSAGGGISSGITNGPLSGLIGSFAYSHRNVFGRNKKLNLSLERGQIDSIFRLNFTDPWIDGDNKRTSRTVMVQNSRTPGTLVHGGDHPDHAPITIGRVIAGLEYSRPFRPKWSGTLGLIFQHAGARDDKGNPVIRDFYNSQLTASGHDYDDTLLAKFESIYTDSGDHSSTMFVFNIEQGLPVLPEWLSFNRLTARLRQGYEIGPARLLLSASGGHMEGNFPPHEAFAIGGTNSVRGYEEGAVGSGRSYAVGSGEVSCRMFGPLEGVVFGDYGSDLGSGPKVPGDPAGARGKPGSGFGYGVGVRVDSPLGPLRLEYAFNDRQASRFHFGVGYRN

SEQ ID NO: 181193 - protein, 241 aa, Zea Mays
MVSYAEILSGGILRLQVSEAEVNNISIRFLDRKTGEPTVGKTQTETILRQLTTKKGQAYNRAQVKRDVETILTMGIMEDVTIIPQPVGDSNKVDLVMNLVERPSGGFSAGGGISSGITNGPLSGLIGSFAYSHRNVFGRNKKLNLSLERGQIDSIFRLNFTDPWIDGDNKRTSRTVMVQNSRTPGTLVHGGDPAGARGKPGSGFGYGVGVRVDSPLGPLRLEYAFNDRQASRFHFGVGYRN

SEQ ID NO: 181194 - protein, 216 aa, Zea Mays
MVQNSRTPGTLVHGGDHPDHAPITIGRVIAGLEYSRPFRPKWSGTLGLIFQHAGARDDKGNPVIRDFYNSQLTASGHDYDDTLLAKFESIYTDSGDHSSTMFVFNIEQGLPVLPEWLSFNRLTARLRQGYEIGPARLLLSASGGHMEGNFPPHEAFAIGGTNSVRGYEEGAVGSGRSYAVGSGEVSCRMVNFFLLSTLLAFCCCQMDSTWKYDRHN

SEQ ID NO: 181195 - protein, 156 aa, Zea Mays
MEHKEAGCQQPEGPILCINNCGFFGSAATMNMCSKCHKEMITKQEQAQLAASSIDSIVNGGDGGKGPKTIVVQPMLVAETSEAAAVIPKAKEGPDRCAACRKRVGLTGFSCRCGNMYCSVHRYSDKHDCQFDYRTAARDAIAKANPVVRAEKLDKI

SEQ ID NO: 181196 - protein, 269 aa, Zea Mays
MNIASMHMHGRAEAAWFDMEHARWQEEHGKVMRHLRAALEAEYAATATTPAAAAADAQLRQLVDAAAAHHGALAELKAVAASADAFHLVSGAWVSAAERCFLWIGGFRPSELIKIAARHAEPLTEQQAMSVCGVQQWARDAEAALDHELQAMHSSVSEAISSDAAALLYPYSDVPGFMATMSLAISKLASLEAFVRQADALRLQTLHRLPQILTARQSARCFLAIADYSHRLRALSELWHTRQGHERAASTQAARPSQTPPYQSRDGLL

SEQ ID NO: 181197 - protein, 513 aa, Zea Mays
MADEALDQPPDAAPSPSLAPATPPAPATSSPAALLRPRREAFEHGLLPIPKLIFPEGMLAQTLAQLKEKLAASVPDGRVRAAALAEALQIPQEQAALALGTLAAVLPAEDPVLGDGAMDGAAADIRDVLLFLYIQSYKRLVPRSAHKDSPAVADVWPSTSAFDGYLSALSPIQLVRSNSRRFMPSQADEEIHQLSFLQKHMANILTLLADSVEGEGDDSLVLTMETFEHLGFLVQFSEGTSLSQAATFFANSDPDMPAVPVPAAQVLDWMSQNIAFSLEYSSERSVAKESNQQTMSDLDVTMAEANTSHSRNSTPSANPAYYRNVTFVEGFSKTSVVKHASDVKGNSIKVLNCHDSVIYILAPLKYATVYGCSDATVVLGAVGKVVKVEHCERVHIIAAAKRICIANCRECIFYLGVNHQPLVLGDNHKLQIPSWFGDEGQEPINCNPFPLPEIYEAFQSKKRSALEDIQKMIRELQLDENRKRELAAALHAQFKDWLYASGNIRQLYCLQGD

SEQ ID NO: 181198 - protein, 546 aa, Zea Mays
MADEALDQPPDAAPSPSLAPATPPAPATSSPAALLRPRREAFEHGLLPIPKLIFPEGMLAQTLAQLKEKLAASVPDGRVRAAALAEALQIPQEQAALALGTLAAVLPAEDPVLGDGAMDGAAADIRDVLLFLYIQSYKRLVPRSAHKDSPAVADVWPSTSAFDGYLSALSPIQLVRSNSRRFMPSQADEEIHQLSFLQKHMANILTLLADSVEGEGDDSLVLTMETFEHLGFLVQFSEGTSLSQAATFFANSDPDMPAVPVPAAQVLDWMSQNIAFSLEYSSERSVAKESNQQTMSDLDVTMAEANTSHSRNSTPSANPAYYRNVTFVEGFSKTSVVKHASDVKGNSIKVVKVEHCERVHIIAAAKRICIANCRECIFYLGVNHQPLVLGDNHKLQVAPFNTCYPQLQDHMMQVGVDPSVNKWDQPFVLGVVDPHDSLSHPAGVADVKAESATCLDPDLFTSFLIPSWFGDEGQEPINCNPFPLPEIYEAFQSKKRSALEDIQKMIRELQLDENRKRELAAALHAQFKDWLYASGNIRQLYCLQGD

SEQ ID NO: 181199 - protein, 358 aa, Zea Mays
METFEHLGFLVQFSEGTSLSQAATFFANSDPDMPAVPVPAAQVLDWMSQNIAFSLEYSSERSVAKESNQQTMSDLDVTMAEANTSHSRNSTPSANPAYYRNVTFVEGFSKTSVVKHASDVKGNSIKVLNCHDSVIYILAPLKYATVYGCSDATVVLGAVGKVVKVEHCERVHIIAAAKRICIANCRECIFYLGVNHQPLVLGDNHKLQVAPFNTCYPQLQDHMMQVGVDPSVNKWDQPFVLGVVDPHDSLSHPAGVADVKAESATCLDPDLFTSFLIPSWFGDEGQEPINCNPFPLPEIYEAFQSKKRSALEDIQKMIRELQLDENRKRELAAALHAQFKDWLYASGNIRQLYCLQGD

SEQ ID NO: 181200 - protein, 414 aa, Zea Mays
METFEHLGFLVQFSEGTSLSQAATFFANSDPDMPAVPVPAAQVLDWMSQNIAFSLEYSSERSVAKESNQQTMSDLDVTMAEANTSHSRNSTPSANPAYYRNVTFVEGFSKTSVVKHASDVKGNSIKVLNCHDSVIYILAPLKYATVYGCSDATVVLGAVGKVVKVEHCERVHIIAAAKRICIANCRECIFYLGVAPFNTCYPQLQDHMMQVGVDPSVNKWDQPFVLGVVDPHDSLSHPAGVADVKAESATCLDPDLFTSFLIPSWFGDEGQEPINCNPFPLPEIYEAFQSKKRSALEDIQKMIRELQLDENRKRELAAALHAQFKDWLYGNLRAISASSTVYKVINGAIYKTDYPLPTPQKHSTIVEADLFLPWKGLPPCSPAVFTQEEAGDLGKKRDYKKPYYGFPHQAHLHQ

SEQ ID NO: 181201 - protein, 290 aa, Zea Mays
MAFYRGLTAVSRLRSRMAQEATTLGGVRWLQMQSASDLDLKSQLQELIPEQQDRLKKLKSEHGKTQLGNITVDMVLGGMRGMTGMLWETSLLDPEEGIRFRGLSIPECQKVLPTAVKGGEPLPEGLLWLLLTGKVPTKEQVDALSKELLARSTVPAHVYKTIDALPVDAHPMTQFTTGVMALQVESEFQKAYDNGLPKSKFWEPTYEDCLNLIARLPPVASYVYRRIFKSGKSIEADNSLDYAANFSHMLGFDDPKMLELMRLYVTIHTDHEGGNVSAHTGHLVIFVLLL

SEQ ID NO: 181202 - protein, 135 aa, Zea Mays
MASRKRTLPRVVPSSPHLLLSPFRICAAIAGVAGAGRPRNPATGGRRVDAGAHKVSLLEQLHARRLAVLKALTSCSTSSSEMMEKLNEIVFDILEKSIIRGNLQYASLSALRRHPLDLGNQAFLHRAVEGLNTGT

SEQ ID NO: 181203 - protein, 100 aa, Zea Mays
MASRKRTLPRVVPSSPHLLLSPFRICAAIAGVAGAGRPRNPATGGRRVDAGAHKVSLLEQLHARRLAVLKALTSCSTSSSEMMEKLNEIVFDILEKVGHP

SEQ ID NO: 181204 - protein, 74 aa, Zea Mays
MMEKLNEIVFDILEKSIIRGNLQYASLSALRRHPLDLGNQAFLHRAVEGNMTPEAALDHVRSIRPRVLLAPSQC

SEQ ID NO: 181205 - protein, 84 aa, Zea Mays
MSEDKVRTKDSCWSVGMIYDPRELRGVSIVGPGIGRGVTSGIRADPRGFTGVCGLGGSGIWRMVHVSPEWSHGMAYDDTRHRRG

SEQ ID NO: 181206 - protein, 77 aa, Zea Mays
MGQGKLEPGYSIHEKTIAHSEWRDGESGTYPPGKGPPKRGGVLSGGADLFMQWRIRGNGRHMQESRETYVVWLEILS

SEQ ID NO: 181207 - protein, 88 aa, Zea Mays
MNVCELTLAVSHPPTGQEQVPQDEVHEVLGAFFFAEGPPSKNTFGRVICKQTQHEGISRSYNSGSFGMTTCLKTKGSTDLKIKRPFSP

SEQ ID NO: 181208 - protein, 72 aa, Zea Mays
MGFAPIPAVTKPPKSLGPPTVVLVQRTLDNPTGAPDHLTSSVSELLTFPKSVSPVTQTLQYIGDTEMRKQLQ

SEQ ID NO: 181209 - protein, 78 aa, Zea Mays
MENTPSSCIGVLIRIEQRLHLLTLSILPQLCPFLLPTPGLSFANVGSLSHGPNQVSAETKGMRSLNTNTPLSKLNQAG

SEQ ID NO: 181210 - protein, 386 aa, Zea Mays
MNAQPHAYVYITATFTLPPSASKPNQASAALLRIQLLPDPQNRTQVETLTSAFSMSAATTAPTPAVATPMAPPPSYPASSTISASVAASVEEEDDLYGRLKSLQRHMEFVEIQEEYVKDEQKNLKRELLRAQEEVKRIQSVPLVIGQFMEMVDGNNGIVGSTTGSNYYVRILSTINRELLKPSASVALHRHSNALVDVLPPEADSSISLLGSSEKPNVTYNGPRMVRDVFRLAKENAPAIIFIDEVDAIATARFDAQTGADREVQRILMELLNQMDGFDQTVNVKVIMATNRADTLDPALLRPGRLDRKIEFPLPDRRQKRLVFQVCTAKMNLSDEVDLEDYVSRPDKISAADIAAICQEAGMHAVRKNRYVILPKDFEKGYRTNC

SEQ ID NO: 181211 - protein, 254 aa, Zea Mays
MLLIALNVFLIMDIGGCDIQKQEIREAVELPLTHHELYKQIGIDPPRGVLLYGPPGTGKTMLAKAVAHHTTAAFIRVVGSEFVQKYLGEGPRMVRDVFRLAKENAPAIIFIDEVDAIATARFDAQTGADREVQRILMELLNQMDGFDQTVNVKVIMATNRADTLDPALLRPGRLDRKIEFPLPDRRQKRLVFQVCTAKMNLSDEVDLEDYVSRPDKISAADIAAICQEAGMHAVRKNRYVILPKDFEKGYRTNC

SEQ ID NO: 181212 - protein, 194 aa, Zea Mays
MLAKAVAHHTTAAFIRVVGSEFVQKYLGEGPRMVRDVFRLAKENAPAIIFIDEVDAIATARFDAQTGADREVQRILMELLNQMDGFDQTVNVKVIMATNRADTLDPALLRPGRLDRKIEFPLPDRRQKRLVFQVCTAKMNLSDEVDLEDYVSRPDKISAADIAAICQEAGMHAVRKNRYVILPKDFEKGYRTNC

SEQ ID NO: 181213 - protein, 162 aa, Zea Mays
MVRDVFRLAKENAPAIIFIDEVDAIATARFDAQTGADREVQRILMELLNQMDGFDQTVNVKVIMATNRADTLDPALLRPGRLDRKIEFPLPDRRQKRLVFQVCTAKMNLSDEVDLEDYVSRPDKISAADIAAICQEAGMHAVRKNRYVILPKDFEKGYRTNC

SEQ ID NO: 181214 - protein, 90 aa, Zea Mays
MAPAAAEAGPGDDGLRKLEYLSLVSKVCSELETHIGVGDKVLAEFITELGRDSTTVPEFDAKLKEKGADFPDYFVHTNLMLSPLGKTSQR

SEQ ID NO: 181215 - protein, 279 aa, Zea Mays
MAPAAAEAGPGDDGLRKLEYLSLVSKVCSELETHIGVGDKVLAEFITELGRDSTTVPEFDAKLKEKGADFPDYFVRNIFYRPREKQAQADQKRAKFFQPEGDHLTLLAVYEAWKAKNFSGPWCFENFVQSRSLRRAQDVRKQLLTIMDRYKLDVVSAGKNFTKIRKAITAGFFFHAARKDPQEGYRTLVENQPVYIHPSSALFQRQPDWVIYHELVMTTKEYMREVTVIDPKWLVELAPRFYKGADPTKMSKRKRQERIEPLYDRYHEPNSWRLSKRRA

SEQ ID NO: 181216 - protein, 58 aa, Zea Mays
MEKYVTFLWSLELKGGHLCFVGGPSVSPAPSAIHLGLLEAGPRTVAVLFRRSGSTVIL

SEQ ID NO: 181217 - protein, 57 aa, Zea Mays
MSYITSSKKDVKHFIEFSKKVPSSKPYRIILDDVRDKLYNTHERACQLLSSGYADIL

SEQ ID NO: 181218 - protein, 60 aa, Zea Mays
MVLLVLWAMAYTKTWLPSNGGNLSGYNCYPCSFLAKLHTMTYPCLTFDSRTYVSNARLKI

SEQ ID NO: 181219 - protein, 253 aa, Zea Mays
MDTYMHTSSSYMRTNAPRRPTFVGIWKKRAVEQYSPIPYVATLLNCMMWVLYGLPLVHPHSMLVVTINGTGMLIQLTYVALFILCSAGAVRRRVVLLFAAEVAFVVALAALVLTLAHTHERRSMLVGIVSVFFGTGMYAAPLSVMKLVIQTKSVEYMPLFLSLASLANSICWTAYALIRFDLYITIPNGLGVLFALGQLGLYAMFYKNTKQIMEARRRKADQQSTMMEVVTDASATPPPPPNNNNGGGGGNGY

SEQ ID NO: 181220 - protein, 271 aa, Zea Mays
MVSADTIRTAIGVIGNGTALVLFLSPVSYMRTNAPRRPTFVGIWKKRAVEQYSPIPYVATLLNCMMWVLYGLPLVHPHSMLVVTINGTGMLIQLTYVALFILCSAGAVRRRVVLLFAAEVAFVVALAALVLTLAHTHERRSMLVGIVSVFFGTGMYAAPLSVMKLVIQTKSVEYMPLFLSLASLANSICWTAYALIRFDLYITIPNGLGVLFALGQLGLYAMFYKNTKQIMEARRRKADQQSTMMEVVTDASATPPPPPNNNNGGGGGNGY

SEQ ID NO: 181221 - protein, 207 aa, Zea Mays
MMWVLYGLPLVHPHSMLVVTINGTGMLIQLTYVALFILCSAGAVRRRVVLLFAAEVAFVVALAALVLTLAHTHERRSMLVGIVSVFFGTGMYAAPLSVMKLVIQTKSVEYMPLFLSLASLANSICWTAYALIRFDLYITIPNGLGVLFALGQLGLYAMFYKNTKQIMEARRRKADQQSTMMEVVTDASATPPPPPNNNNGGGGGNGY

SEQ ID NO: 181222 - protein, 124 aa, Zea Mays
MVVGILCVLFGTGMYAAPLSVMKMVIQTKSVEYMPLFLSLASLVNGICWTAYALIRFDLYITIPNGLGVLFALAQLLLYAIYYKNTQKIVEARKRKAGQVAMTEVVVDGSRASNNNNNGGSGTY

SEQ ID NO: 181223 - protein, 64 aa, Zea Mays
MDIPNGLGVLFALAQLLLYAIYYKNTQKIVEARKRKAGQVAMTEVVVDGSRASNNNNNGGSGTY

SEQ ID NO: 181224 - protein, 491 aa, Zea Mays
MQTQTLILRAGPSARRSTPPPASTVHLAASGRCLLRAPSSLRRRRTRSLRASASLEQVKEVASSPAPSGKSSQATRRDVRNIAIVAHVDHGKTTLVDSMLRQAKVFRDNQVVQERIMDSNDLERERGITILSKNTSITYKGTKINIIDTPGHSDFGGEVERVLNMVEGVLLVVDSVEGPMPQTRFVLKKALEFGHAVVVVVNKIDRPTARPEFVVNSTFELFIELNATDEQCDFQTVYASGIKGKASLSPDNLADDLGPLFEAILRCIPEPRVEKDGALQMLVSNTEYDEHKGRIAIGRLHAGELQRGMEVKVCTPDDACRVGKVSELFVYQNFSRAPVESVSAGDICAVCGIDDIMIGETIADKVTGTPLPTIKVEEPTVRMSFSINTSPFVGREGKYVTSRNLRDRLYRELERNLAMKVEDGETADTFLVSGRGTLHLTILIENMRREGYEFMIGPPKVINKTVDGKLLEPYELLLKSQRSPWDQLLSF

SEQ ID NO: 181225 - protein, 650 aa, Zea Mays
MQTQTLILRAGPSARRSTPPPASTVHLAASGRCLLRAPSSLRRRRTRSLRASASLEQVKEVASSPAPSGKSSQATRRDVRNIAIVAHVDHGKTTLVDSMLRQAKVFRDNQVVQERIMDSNDLERERGITILSKNTSITYKGTKINIIDTPGHSDFGGEVERVLNMVEGVLLVVDSVEGPMPQTRFVLKKALEFGHAVVVVVNKIDRPTARPEFVVNSTFELFIELNATDEQCDFQTVYASGIKGKASLSPDNLADDLGPLFEAILRCIPEPRVEKDGALQMLVSNTEYDEHKGRIAIGRLHAGELQRGMEVKNFSRAPVESVSAGDICAVCGIDDIMIGETIADKVTGTPLPTIKVEEPTVRMSFSINTSPFVGREGKYVTSRNLRDRLYRELERNLAMKVEDGETADTFLVSGRGTLHLTILIENMRREGYEFMIGPPKVINKTVDGKLLEPYEIAAVEVPEESMGSVVELLGKRRGQMVDMEANGTEGTTLLKYKIPTRGLIGLRNAILTASRGRAILNTIFDSYGPWAGDLSSRDQGSLVAFEDGSTTSYALLNAQERGMLFVQPGQDVYKGQIVGIHQRPGDLAINVCKKKAATNVRSNKETTVVLDEPLSYSLDDCIEFIQEDEIVEVTPASIRMCKNPKVSKKK

SEQ ID NO: 181226 - protein, 88 aa, Zea Mays
MLFVQPGQDVYKGQIVGIHQRPGDLAINVCKKKAATNVRSNKETTVVLDEPLSYSLDDCIEFIQEDEIVEVTPASIRMCKNPKVSKKK

SEQ ID NO: 181227 - protein, 132 aa, Zea Mays
MARSEQRKGRPDDELQEGELRDAAPGSSTGLRPGAGAGAERHEKDLGGRAAEEQAAGATEEEEGGACIREQARQENLSWEEAPARRTSRRSREDRKVRGSWSRGVRRETELGERESCAQRTQRDRKKKTARA

SEQ ID NO: 181228 - protein, 259 aa, Zea Mays
MGSSSNTNTSGGASDKEEKKKEDKIKGKDSSGPSFKENERVLAYHGPLLYEAKVQRIENHEDEWRYFVHYLGWNKNWDEWVANDRLLELTEENVRKQQELDKNQVVDKTMKSGRSTQHKPKVSNADAKADKDDTKSLISVKGKKRKSQLGTEFPLPLKKQLVDDWEFVTQMGKLVKLPRSPTVDDILKKYLEHRAKKDGKINDSYAEILKGLRCYFDKALPAMLLYKKERDQYAEEVKGDVSPSTVYGAEHLLRLFGEP

SEQ ID NO: 181229 - protein, 197 aa, Zea Mays
MGSSSNTNTSGGASDKEEKKKEDKIKGKDSSGPSFKENERVLAYHGPLLYEAKVQRIENHEDEWRYFVHYLGWNKNWDEWVANDRLLELTEENVRKQQELDKNQVVDKTMKSGRSTQHKPKVSNADAKADKDDTKSLISVKGKKRKSQLGTEDKEKRSSHSLLVLQFPLPLKKQLVDDWEFVTQMGPSGKLISSFRK

SEQ ID NO: 181230 - protein, 283 aa, Zea Mays
MGSSSNTNTSGGASDKEEKKKEDKIKGKDSSGPSFKENERVLAYHGPLLYEAKVQRIENHEDEWRYFVHYLGWNKNWDEWVANDRLLELTEENVRKQQELDKNQVVDKTMKSGRSTQHKPKVSNADAKADKDDTKSLISVKGKKRKSQLGTEIQDKEKRSSHSLLVLQFPLPLKKQLVDDWEFVTQMGKLVKLPRSPTVDDILKKYLEHRAKKDGKINDSYAEILKGLRCYFDKALPAMLLYKKERDQYAEEVKGDVSPSTVYGAEHLLRLFAWLYGYCVIVT

SEQ ID NO: 181231 - protein, 195 aa, Zea Mays
MGSSSNTNTSGGASDKEEKKKEDKIKGKDSSGPSFKENERVLAYHGPLLYEAKVQRIENHEDEWRYFVHYLGWNKNWDEWVANDRLLELTEENVRKQQELDKNQVVDKTMKSGRSTQHKPKVSNADAKADKDDTKSLMKGKKRKSQLGTEIQDKEKRSSHSLLVLQFPLPLKKQLVDDWEFVTQMACEATTITYC

SEQ ID NO: 181232 - protein, 328 aa, Zea Mays
MGSSSNTNTSGGASDKEEKKKEDKIKGKDSSGPSFKENERVLAYHGPLLYEAKVQRIENHEDEWRYFVHYLGWNKNWDEWVANDRLLELTEENVRKQQELDKNQVVDKTMKSGRSTQHKPKVSNADAKADKDDTKSLISVKGKKRKSQLGTEIQDKEKRSSHSLLVLQFPLPLKKQLVDDWEFVTQMGKLVKLPRSPTVDDILKKYLEHRAKKDGKINDSYAEILKGLRCYFDKALPAMLLYKKERDQYAEEVKGDVSPSTVYGAEHLLRLFVKLPELLASVNMEEDALNKLQLKLLDVLKFLQKNQITFFTSAYDGSCKGADEDKTK

SEQ ID NO: 181233 - protein, 273 aa, Zea Mays
MGSSSNTNTSGGASDKEEKKKEDKIKGKDSSGPSFKENERVLAYHGPLLYEAKVQRIENHEDEWRYFVHYLGWNKNWDEWVANDRLLELTEENVRKQQELDKNQVVDKTMKSGRSTQHKPKVSNADAKADKDDTKSLMKGKKRKSQLGTEIQDKEKRSSHSLLVLQFPLPLKKQLVDDWEFVTQMGKLVKLPRSPTVDDILKKYLEHRAKKDGKINDSYAEILKGLRCYFDKALPAMLLYKKERDQYAEEVKGDVSPSTVYGAEHLLRLFGEP

SEQ ID NO: 181234 - protein, 179 aa, Zea Mays
MGSSSNTNTSGGASDKEEKKKEDKIKGKDSSGPSFKENERVLAYHGPLLYEAKVQRIENHEDEWRYFVHYLGWNKNWDEWVANDRLLELTEENVRKQQELDKNQVVDKTMKSGRSTQHKPKVSNADAKADKDDTKSLMKGKKRKSQLGTEFPLPLKKQLVDDWEFVTQMACEATTITYC

SEQ ID NO: 181235 - protein, 326 aa, Zea Mays
MGSSSNTNTSGGASDKEEKKKEDKIKGKDSSGPSFKENERVLAYHGPLLYEAKVQRIENHEDEWRYFVHYLGWNKNWDEWVANDRLLELTEENVRKQQELDKNQVVDKTMKSGRSTQHKPKVSNADAKADKDDTKSLMKGKKRKSQLGTEIQDKEKRSSHSLLVLQFPLPLKKQLVDDWEFVTQMGKLVKLPRSPTVDDILKKYLEHRAKKDGKINDSYAEILKGLRCYFDKALPAMLLYKKERDQYAEEVKGDVSPSTVYGAEHLLRLFVKLPELLASVNMEEDALNKLQLKLLDVLKRIRSPSLPLRTMVLVKVQMRIKPNDCM

SEQ ID NO: 181236 - protein, 195 aa, Zea Mays
MGSSSNTNTSGGASDKEEKKKEDKIKGKDSSGPSFKENERVLAYHGPLLYEAKVQRIENHEDEWRYFVHYLGWNKNWDEWVANDRLLELTEENVRKQQELDKNQVVDKTMKSGRSTQHKPKVSNADAKADKDDTKSLISVKGKKRKSQLGTEDKEKRSSHSLLVLQFPLPLKKQLVDDWEFVTQMACEATTITYC

SEQ ID NO: 181237 - protein, 193 aa, Zea Mays
MGSSSNTNTSGGASDKEEKKKEDKIKGKDSSGPSFKENERVLAYHGPLLYEAKVQRIENHEDEWRYFVHYLGWNKNWDEWVANDRLLELTEENVRKQQELDKNQVVDKTMKSGRSTQHKPKVSNADAKADKDDTKSLMKGKKRKSQLGTEDKEKRSSHSLLVLQFPLPLKKQLVDDWEFVTQMACEATTITYC

SEQ ID NO: 181238 - protein, 739 aa, Zea Mays
MLEEGVGSFADIDDLAGTFSKLTRIVNGPKQPVVVSHSGSISRQSSNAEWVQESELPYWPTQPVLDTDHGLDKKNWWSQPPHSVNFIDYRLQRTSSSPQQDAQHNPVEPILEAKPSPLHRTSTYPQQEPQYSNTEPIPVPKSSFISCPPSGAASHSSPSQPHHVNMPSPPTAFQLHMSSAQNDLLLPQFHHGGTPPGPPFGRQNHVLNNGSMHGKGPRFMPGLMPHQLQCPNGLMPPQMQPPHQHGMLPIQQSPPQFSQLHARMIGPHHSPPQSMQMFGPQHPSSQVMSRFDANFAMPDLSDPRARSMLQHERLGQRYPHQGYELNNIRIDNGWSRFRSKYMCTEEIENIARMQQAATHINDPYIDDYYHQACLAKKSAGAQLKHHFCPTLIRDPSSRARSKDEPHAYLQVDALGRLPFSSIRRPRPLLDVEQASAPSDNAEKSVSKPLDQEPMLAARITIEDGLCLLLDVDDIDRLLQFSQQQDGGLQLRNRRQGLLEQLAESLQLVDLLAPNKNSPVSPYDDLVFLRIVTLSKGQKLLSHYLELLTSGSELARIACMAVFRHLRSIFGNMPSDISAVETMNRLAKAVSAHIVQMDLSDLSACLAAVVCSSLQPPLRPLGSPAGDWASVIIKYVLDRATVLLTDHHVASNYSMRNRSLWQASFDAFFGLLTQYCMSKFDRVVHTAQLQPAAATVITREMPVELLRASLPHTNEAQRKQLLSFAQRTVPVGTHSSHGSW

SEQ ID NO: 181239 - protein, 574 aa, Zea Mays
MPSPPTAFQLHMSSAQNDLLLPQFHHGGTPPGPPFGRQNHVLNNGSMHGKGPRFMPGLMPHQLQCPNGLMPPQMQPPHQHGMLPIQQSPPQFSQLHARMIGPHHSPPQSMQMFGPQHPSSQVMSRFDANFAMPDLSDPRARSMLQHERLGQRYPHQGYELNNIRIDNGWSRFRSKYMCTEEIENIARMQQAATHINDPYIDDYYHQACLAKKSAGAQLKHHFCPTLIRDPSSRARSKDEPHAYLQVDALGRLPFSSIRRPRPLLDVEQASAPSDNAEKSVSKPLDQEPMLAARITIEDGLCLLLDVDDIDRLLQFSQQQDGGLQLRNRRQGLLEQLAESLQLVDLLAPNKNSPVSPYDDLVFLRIVTLSKGQKLLSHYLELLTSGSELARIACMAVFRHLRSIFGNMPSDISAVETMNRLAKAVSAHIVQMDLSDLSACLAAVVCSSLQPPLRPLGSPAGDWASVIIKYVLDRATVLLTDHHVASNYSMRNRSLWQASFDAFFGLLTQYCMSKFDRVVHTAQLQPAAATVITREMPVELLRASLPHTNEAQRKQLLSFAQRTVPVGTHSSHGSW

SEQ ID NO: 181240 - protein, 731 aa, Zea Mays
MRSVDAAGAESSDHHNLKKPRLEPRTKMPLADAVAAGDSGGGVDAAAAGADFFGMTVEEIVQHPLPGYGAPAVLSFSPDDRRVAYLYSPDGTLHRKVFTFDTARRCQELLFGPPDGGGLEEGNLSAEERLRRERARERGLGVTRYEWRSRHSGESSRAGIVVPLPSGVHGLAEYIAQEEMERKVGFWWSPDSKHLAFTEVDSTEIPLYRIMHQGKSSVGPDAQEDHAYPFAGAANVKVRLGVVHSHGGEVTWMDLLCGDPNGPHSDEEYLARVNWMHNSALAVQVLNRSHTKLKLLKFDISTGEREVLLEEQHDVWITLHDCFTPLDKGVNNKHPGGFIWASEKTGFRHLYVHGNDGACLGPLTQGDWMVEHIAGINESNGLIYFTGTLDGPLETNLYHTNLFPDWSLPLQTPKRLTRGTGRHSVILDHQLLKFIDVYDTAKSPPVILLCSLLDGSVIIPLFEQPLTIPPLKKFQQLSPEIVEITAKDGTNLYGALYLPDERKYGPPPYKTLVNVYGGPSVQLVSDSWMCTVDMRAQYLRSKGILVWKMDNRGSARRGLHFEGQLKYNIGRVDAEDQLEGAEWLIKKGLAKPGHIGIYGWSYGGFLSAMCLARFPDTFCCAVSGAPVTAWDGYDTFYTEKYLGLPAEHPDAYEYGSIMYHAKNLKGKLLLIHGMIDENVHFRHTARLINSLMAEGKPYEILLFPDERHMPRRLGDRIYMEERIFGFFERSL

SEQ ID NO: 181241 - protein, 183 aa, Zea Mays
MDNRGSARRGLHFEGQLKYNIGRVDAEDQLEGAEWLIKKGLAKPGHIGIYGWSYGGFLSAMCLARFPDTFCCAVSGAPVTAWDGYDTFYTEKYLGLPAEHPDAYEYGSIMYHAKNLKGKLLLIHGMIDENVHFRHTARLINSLMAEGKPYEILLFPDERHMPRRLGDRIYMEERIFGFFERSL

SEQ ID NO: 181242 - protein, 363 aa, Zea Mays
MENRHQVAAPARGEVWAEMKKQVRLAAPLAAGFLLQKVIQTISIMFVGRLGELPLASASLATSFASVTGFSLLTGMASSLDTLCGQAFGAARHQLLGVHKQRAMLVVGAASVPVALVWAYTGDILVWFRQDREIAAGAGSYIRCLIPALFLFGQLQCHVRFLQPQNVVVPVMLSSGATVALHVAVCWLLVRRLGLGADGAALANAVSNLANLSALALYIRLSPSCKDTWAGFSREAFRGILVFLKLAVPSAAMVCMEWWSFELLVLLSGLLPNPKLETAVMSICFNTYVFAFMFPMGLGAAARLHTRLQRAWCRTATRGPPGDSGGHAPGLLPGRLGRPCHGAGAQPARLRLRQRQASRLVHL

SEQ ID NO: 181243 - protein, 459 aa, Zea Mays
MEAALLAAAGTGRKDGGSEESGVVCEVKKQLYLAGPLVVGFLLQNTVQMVSVMFVGHLGELALASASLATSFAGVTGFSLLAGMACSLDTLCGQAFGARQHHLLGVHKQRAMLVLALVSVPVALVWAYTGDILAWCGQDPEIAAGAGSYIRCLIPAMVVYGALQCHVRFLQTQNLVVPVMLSSGATALCHPAVCWLLVRGLGLGCNGAALANAVSYLANLSFLAVYVRVAPACKATWTGFSAEAFRGVPDFLRLAVPSAVMVCMEWWSFELLVLLSGLLPNPKLETAVLSICTRVSNELGAGRPHAARLAARVVVLLALIVGTSEALVIVLVRDLWGYAYSSEEEVARYTARMMPVLAVSVMLDGQQCVLSGVVRGCGRQKAGAFINLAAYYLAGIPAALAFAFVRRLAGMGLWFGILCGLVVQMLSLLSVTLCTDWNKEALKAKNRVFSVALPADMET

SEQ ID NO: 181244 - protein, 508 aa, Zea Mays
MEAALLAAAGTGRKDGGSEESGVVCEVKKQLYLAGPLVVGFLLQNTVQMVSVMFVGHLGELALASASLATSFAGVTGFSLLAGMACSLDTLCGQAFGARQHHLLGVHKQRAMLVLALVSVPVALVWAYTGDILAWCGQDPEIAAGAGSYIRCLIPAMVVYGALQCHVRFLQTQNLVVPVMLSSGATALCHPAVCWLLVRGLGLGCNGAALANAVSYLANLSFLAVYVRVAPACKATWTGFSAEAFRGVPDFLRLAVPSAVMVCMEWWSFELLVLLSGLLPNPKLETAVLSICLNTSSLAFMAPLGLGAAISTRVSNELGAGRPHAARLAARVVVLLALIVGTSEALVIVLVRDLWGYAYSSEEEVARYTARMMPVLAVSVMLDGQQCVLSGVVRGCGRQKAGAFINLAAYYLAGIPAALAFAFVRRLAGMGLWFGILCGLVVQMLSLLSVTLCTDWNKEVSTSFKGTEGEEQSLQCGSSCRHGNMRFCLGLPDTCSCCCEFLQQAQPD

SEQ ID NO: 181245 - protein, 185 aa, Zea Mays
MAKPLNGSGRSMPRSNEGMRLIFSAVVGVMLGYLFGISFPTVNITKLHFPSSIISYIEDRNSGITTQTLLNHAWASANNHKKNSSESNTDEIPEIYVPTNPKGAERLPPGIVVSETDLYPRRLWGDPSEDLTSEPRYLVTFTVGIGQKANIDAAVRKTNSPLCCSIMMVGLQSGMNLSGLKEQSM

SEQ ID NO: 181246 - protein, 159 aa, Zea Mays
MPRSNEGMRLIFSAVVGVMLGYLFGISFPTVNITKLHFPSSIISYIEDRNSGITTQTLLNHAWASANNHKKNSSESNTDEIPEIYVPTNPKGAERLPPGIVVSETDLYPRRLWGDPSEDLTSEPRYLVTFTVGIGQKANIDAAVRKSGMNLSGLKEQSM

SEQ ID NO: 181247 - protein, 135 aa, Zea Mays
MNLPTSIRRTRPAAAENLGSRHRLYHATTKLAFGLPFCVTSDAHHSYLWPRYDGTTIWGGEFPVGSREVVWNLALPQACGYALQISQCGHEDPKNHPGNWNLKCEASCALDHFHLPNNILYCHLFMHRFNFDGIQ

SEQ ID NO: 181248 - protein, 177 aa, Zea Mays
MGKKHAAGGGWFAAVRKVFRPSGSGGSSATTTTSSSSSKDKDKDAVQHGKQATAAAAAEEPEVLLLEHFPASETSAEASNEGGDAEAELAAVAATTKGRRRRDDEVGDEDGEMEEELADDMERARALAAAAEAAVAAAEAAARVVRLAALRRLSREERAAVRIQAYYRGYLVWVHEP

SEQ ID NO: 181249 - protein, 143 aa, Zea Mays
MLKFLSKVVVEYCPLDPRKAAAVELLAQCNGRKAKDSNPACSVELRRLPSPAPSTDLKSQPTLPPPRVLVTYFTGAEEAIVFAEGATAQGIRDQIVARGRLIDTEKMFRDGGEKWPVVIPEEELGMSFPGIKQCKFCSNKSLG

SEQ ID NO: 181250 - protein, 392 aa, Zea Mays
MDRGVVHKSSAALVREMGEAGHSHGWWSMNNLLRPPFEQQHHASLFMPSTTTSSSTAAAAPSSSSSSSPPLQSFSSLLLSNHYPLPTTTSTSPWQHDTSITSSHGQPDSWSQLIHKESQQMAFPTTICSESGGGGSSYVVYGAAAASHGSSTSDVEIQLPWGSSSVLQQQQKASSPRSSSRTTATTTSPGSNMLEFSNNSSSSPRECISTVSGSAFKKARTQEPSPAQSTVKVRKEKLGDRITALHQLVSPFGKTDTASVLLEAIGYIRFLHSQIEALSSPYVGGSNGGGGGSKQNQQLHEAQRESRHSIFPEDPGQLLHDSSAIKKRAGLQPADGEQDEESCDEEKKKDLRSRGLCLVPVSCTLDVGVDVVAGPADYWAAAAPAFGMGFGA

SEQ ID NO: 181251 - protein, 392 aa, Zea Mays
MDRGVVHKSSAALVREMGEAGHSHGWWSMNNLLRPPFEQQHHASLFMPSTTTSSSTAAAAPSSSSSSSPPLQSFSSLLLSNHYPLPTTTSTSPWQHDTSITSSHGQPDSWSQLIHKESQQMAFPTTICSESGGGGSSYVVYGAAAASHGSSTSDVEIQLPWGSSSVLQQQQKASSPRSSSRTTATTTSPGSNMLEFSNNSSSSPRECISTVSGSAFKKARTQEPSPAQSTVKVRKEKLGDRITALHQLVSPFGKTDTASVLLEAIGYIRFLHSQIEALSSPYVGGSNGGGGGSKQNQQLHEASRESRHSIFPEDPGQLLHDSSAIKKRAGLQPADGEQDEESCDEEKKKDLRSRGLCLVPVSCTLDVGVDVVAGPADYWAAAAPAFGMGFGA

SEQ ID NO: 181252 - protein, 373 aa, Zea Mays
MDRGVVHKSSAALVREMGEAGHSHGWWSMNNLLRPPFEQQHHASLFMPSTTTSSSTAAAAPSSSSSSSPPLQSFSSLLLSNHYPLPTTTSTSPWQHDTSITSSHGQPDSWSQLIHSKESQQMAFPTTICSESGGGGSSYVVYGAAAASHGSSTSDVEIQLPWGSSSVLQQQQKASSPRSSSRTTATTTSPGSNMLEFSNNSSSSPRECISTVSGSAFKKARTQEPSPAQSTVKVRKEKLGDRITALHQLVSPFGKALSSPYVGGSNGGGGGSKQNQQLHEASAQRESRHSIFPEDPGQLLHDSSAIKKRAGLQPADGEQDEESCDEEKKKDLRSRGLCLVPVSCTLDVGVDVVAGPADYWAAAAPAFGMGFGA

SEQ ID NO: 181253 - protein, 60 aa, Zea Mays
MHVWAAPACIASGAAILVEAGECSRRLAPLDAIYAYGIWCTHRQCMHGHILYSYRDAESI

SEQ ID NO: 181254 - protein, 181 aa, Zea Mays
MNLAVAAALPSVTPRTGVVLPRSSRRHCPRGVVPRAASSSVSSFTSPSAAAAPIYTPTPQDRSLRTPHSGYHFDGTARPFFEGWYFKVSIPECRQSFCFMYSVENPLFRDGMSDLDKLLYRPRFTGVGAQILGADDKYICQFSEKSNNFWGRWIEWDGERFEFENAPSYSEKNWGGGFPRK

SEQ ID NO: 181255 - protein, 221 aa, Zea Mays
MASGLSTGWIEWDGERFEFENAPSYSEKNWGGGFPRKWYWIQCNVFPGASGEVSLTAAGGLRKIGLGDTYESPSLIGIHYEGQFFEFVPWTGTVSWDIGLWGLWKMSGENKTHLVEIEATTAESGTALRAPTIEAGLVPACKDTCYGDLRLQLWEKKYDGSKGEMILDATSNMAALEVGGGPWFNGWKGTTVVNEVVNNIVGTPVDVESLLPIPFLKPPGL

SEQ ID NO: 181256 - protein, 349 aa, Zea Mays
MNLAVAAALPSVTPRTGVVLPRSSRRHCPRGVVPRAASSSVSSFTSPSAAAAPIYTPTPQDRSLRTPHSGYHFDGTARPFFEGWYFKVSIPECRQSFCFMYSVENPLFRDGMSDLDKLLYRPRFTGVGAQILGADDKYICQFSEKSNNFWGSRHELMLGNTFISNKESTPPQGEVPPQDFSRRVLEGFQVTPIWHQGFIRDDGRSNYVPNVQTARWEYSTRPVYGWGDVKSKQLSTAGWIEWDGERFEFENAPSYSEKNWGGGFPRKWYWIQCNVFPGASGEVSLTAAGGLRKIGLGDTYESPSLVQFVILRFPNLTWSILLLHTYVLWACIHETELVRETGDIAQGRS

SEQ ID NO: 181257 - protein, 290 aa, Zea Mays
MNLAVAAALPSVTPRTGVVLPRSSRRHCPRGVVPRAASSSVSSFTSPSAAAAPIYTPTPQDRSLRTPHSGYHFDGTARPFFEGWYFKVSIPECRQSFCFMYSVENPLFRDGMSDLDKLLYRPRFTGVGAQILGADDKYICQFSEKSNNFWGSRHELMLGNTFISNKESTPPQGEVPPQDFSRRVLEGFQVTPIWHQGFIRDDGRSNYVPNVQTARWEYSTRPVYGWGDVKSKQLSTAGWLAAFPFFEPHWQICMASGLSTGWIEWDGERFEFENAPSYSEKNWGGGFPRK

SEQ ID NO: 181258 - protein, 343 aa, Zea Mays
MNLAVAAALPSVTPRTGVVLPRSSRRHCPRGVVPRAASSSVSSFTSPSAAAAPIYTPTPQDRSLRTPHSGYHFDGTARPFFEGWYFKVSIPECRQSFCFMYSVENPLFRDGMSDLDKLLYRPRFTGVGAQILGADDKYICQFSEKSNNFWGSRHELMLGNTFISNKESTPPQGEVPPQDFSRRVLEGFQVTPIWHQGFIRDDGRSNYVPNVQTARWEYSTRPVYGWGDVKSKQLSTAGWLAAFPFFEPHWQICMASGLSTGWIEWDGERFEFENAPSYSEKNWGGGFPRKWYWIQCNVFPGASGEVSLTAAGGLRKIGLGDTYESPSLTELVRETGDIAQGRS

SEQ ID NO: 181259 - protein, 216 aa, Zea Mays
MLGNTFISNKESTPPQGEVPPQDFSRRVLEGFQVTPIWHQGFIRDDGRSNYVPNVQTARWEYSTRPVYGWGDVKSKQLSTAGWLAAFPFFEPHWQICMASGLSTGWIEWDGERFEFENAPSYSEKNWGGGFPRKWYWIQCNVFPGASGEVSLTAAGGLRKIGLGDTYESPSLVQFVILRFPNLTWSILLLHTYVLWACIHETELVRETGDIAQGRS

SEQ ID NO: 181260 - protein, 365 aa, Zea Mays
MNLAVAAALPSVTPRTGVVLPRSSRRHCPRGVVPRAASSSVSSFTSPSAAAAPIYTPTPQDRSLRTPHSGYHFDGTARPFFEGWYFKVSIPECRQSFCFMYSVENPLFRDGMSDLDKLLYRPRFTGVGAQILGADDKYICQFSEKSNNFWGRWIEWDGERFEFENAPSYSEKNWGGGFPRKWYWIQCNVFPGASGEVSLTAAGGLRKIGLGDTYESPSLIGIHYEGQFFEFVPWTGTVSWDIGLWGLWKMSGENKTHLVEIEATTAESGTALRAPTIEAGLVPACKDTCYGDLRLQLWEKKYDGSKGEMILDATSNMAALEVGGGPWFNGWKGTTVVNEVVNNIVGTPVDVESLLPIPFLKPPGL

SEQ ID NO: 181261 - protein, 116 aa, Zea Mays
MSGENKTHLVEIEATTAESGTALRAPTIEAGLVPACKDTCYGDLRLQLWEKKYDGSKGEMILDATSNMAALEVGGGPWFNGWKGTTVVNEVVNNIVGTPVDVESLLPIPFLKPPGL

SEQ ID NO: 181262 - protein, 185 aa, Zea Mays
MPSHLALLSCLLVLLLSFDKFLFHYLKRRWFSGGSGATVPRPPAKSRRNMAAAKWSETAMLVIDMQDFVDPAMRSPMLVAGGEAVVPAVAGAVAVARERGIFVVWVVREHDPSGRDVELFRRHHYSGGKGPTVKGLKGAELADGLVIKEGEYKLVKTRFSAFFATHLDSVLKTAGIKNLVIVGKH

SEQ ID NO: 181263 - protein, 418 aa, Zea Mays
MEQGRNQQHPQQLSSPPVLAAASEIKAPAVPSQQPKPAAPVMSVPRQWPIAFNPLKSSTEEKSVTPKKKKHCNCRNSKCLKMYCECFQELQYCDGCNCSNCGNIVGNENARNEAIEAIRQRNPSAFQPKIGNDSNTLNVRKDNSGAVPLVAKHHKGCHCKKSGCLKKYCECYQANVFCSKNCRCMHCKNSEGNKDTETSIQRDHASDRNHIEQAANIAFNGSVGSSGYICSLSRKRSHEDTQCVRINSEGSMPETQYQQGNHADVSMLPPCSTGFDGHNAANTKPYNPNYRAVDEIKVPSHHPRAITSISDVSKFLEELNFFPLTLRSIHTSKPPSLPLCPTKLDRNTVILKFCLSCVPNVSPPSNQNTTTCPHRWEVHILRKISSQHRQNVSPRDVLHFCFLQAHHINLGGVHQFFY

SEQ ID NO: 181264 - protein, 489 aa, Zea Mays
MSVPRQWPIAFNPLKSSTEEKSVTPKKKKHCNCRNSKCLKMYCECFQELQYCDGCNCSNCGNIVGNENARNEAIEAIRQRNPSAFQPKIGNDSNTLNVRKDNSGAVPLVAKHHKGCHCKKSGCLKKYCECYQANVFCSKNCRCMHCKNSEGNKDTETSIQRDHASDRNHIEQAANIAFNGSVGSSGYICSLSRKRSHEDTQCVRINSEGSMPETQYQQGNHADVSMLPPCSTGFDGHNAANTKPYNPNYRSPLANTIHLSEVNDLVKQLVMVCRMAAATIADDETDLIAEEKGSQSNNGLSNGNCKQQDFKEASSMVILSEGCSDQPNIDETGSHRSKTLDFSRPASPTTQALMCDEQDATFGNEPASPTTQALMCEEQNTTFGNDYRSSFPLVSCDQDISEINAAQENLVLTGLREYLRVIITRGKINEHKSSLEAAMELDAQQHHGAPPALSATEDEEKSPPSSTIETPRTNQQPTPNGGSKDSIGS

SEQ ID NO: 181265 - protein, 450 aa, Zea Mays
MAAGTMMRVTMEVGTDGVALITMCNPPVNALHPAIFAGLWENYGEAMARDDVKAIVLKGARGKFCGGFDINTFSQIHRTGDMSLLPDSVKFASYMMEEGKKPSVAAIQGLALGGGLELTMACHARISTPEAQLGLPELTLGIIPGSGGTQRLPRLVGLPKAIQMMLQSKFIMGDEGKEQGLIDALCSPDELIKMSRHCALEIANGGRPWVKPLSRTDKLGSPSEAHAALSMARQQVKKIARNMPQYQACLDVIEEGVLFGGHSGVLKEYKVFKELVPSPTARALVHIFLAQRLSTKVPGVTDVHLKPRQIRKVGIIGGGLMGSGIATALLVSNISVVLKEVNPQVLQRGQKTIAANLEDLVKRGSLAKDRINKVMSLLKGTLDYSDFKDVDMAIEAVIEDIPLKQSTFSDIEKFCPPHCILATNTSTISLNVIGKRTNSQDRIVGAHFFR

SEQ ID NO: 181266 - protein, 80 aa, Zea Mays
MLSRFIPRNQTDNTVLRTRHLRSPSRPRRLLDPAGRRAAQRGFFLHPQCRSLAHVHCLELQSMALQLGDLEVKSSRICQY

SEQ ID NO: 181267 - protein, 80 aa, Zea Mays
MCLWVKIQLQLIVLGTCSAIDPCGVKYCGNRLLRPLELSHLVFSKVHRKLGTQWLKLQALRRNFFLVIIRKTSPRMMGSS

SEQ ID NO: 181268 - protein, 82 aa, Zea Mays
MLSRFIPRNQTDNTVLRTRHLRSPSRPRRLLDPAGRRAAQRGFFLHPQCRSLAHVHCLELQSMALQLGDLEVARRRLLALLP

SEQ ID NO: 181269 - protein, 172 aa, Zea Mays
MCTLLYQIRPTNETWLFFASTMPQLGTCSLPGAAIYGTSTRRFGGLEFQQHKVNHISFGRKASVKATLKTVRCNATQTQSVQKKSSSATIQRDKKGNVQGPKLDDGSGGFPPFRFGKGGGGGGGGGGGSNYFGGFLLFSCVLLLDYLKEFEKYLLAQRHRAGDDGGNGLLQA

SEQ ID NO: 181270 - protein, 615 aa, Zea Mays
MAYLSSLHHAPYPRLLLHHRYLFFSASSPPPVVTTRRLVPTLACHGRDLLDVMPYRDSRPSGTEGSRAGPGGAPRVTNSSTVRGNATAQEAHMPMWRERTPGTPRTWKKGDRVMLQEHAEGESQEKSWRRGLTRSLESKGPMVRKSWTRDGNGMRAKESGKVGNSRDEGTGRRNACKKMKKPPDGEYAGKLRVELDMCSKRGDVMGAITLYDSAVEEGIKLGQHHYNVLLYLCSSASLGFVQPAKSGNMGSGIASIGPAQKLDPSPSRSLGGSEGDNAYASESHVQDQGKNKADLIPGGLKAQTVSIPVEDELGDYARARGFEIFDKMCSEKERVQMSEAALTAKARMALSMGDSDMAFEIVKQMKGLGLKPKLRSYGPALTAFCNSGNVEKAFEVEAHMLESGITPEEAELETLLRASVVGRRGDKKWLEKHGPFEAVVDAANVGLFSHKHLSLSKVNSVADAIRLRFTSKKWPLIVLHNKHLIGERMKKLNDHKLVQKWKQENSIYATPTGSNDDWYWLYAAIRCKCLIITNDEMRDHTFQILERNFFPKWKERHQVHFTLEDRCVTFQMPPPYSVVIQESDKGHWHIPVSEEGLLEKDRTWLCVTRQNSQAQ

SEQ ID NO: 181271 - protein, 713 aa, Zea Mays
MAYLSSLHHAPYPRLLLHHRYLFFSASSPPPVVTTRRLVPTLACHGRDLLDVMPYRDSRPSGTEGSRAGPGGAPRVTNSSTVRGNATAQEAHMPMWRERTPGTPRTWKKGDRVMLQEHAEGESQEKSWRRGLTRSLESKGPMVRKSWTRDGNGMRAKESGKVGNSRDEGTGRRNACKKMKKPPDGEYAGKLRVELDMCSKRGDVMGAITLYDSAVEEGIKLGQHHYNVLLYLCSSASLGFVQPAKSGNMGSGIASIGPAQKLDPSPSRSLGGSEGDNAYASESHVQDQGKNKADLIPGGLKAQTVSIPVEDELGDYARARGFEIFDKMCSEKERVQMSEAALTAKARMALSMGDSDMAFEIVKQMKGLGLKPKLRSYGPALTAFCNSGNVEKAFEVEAHMLESGITPEEAELETLLRASVVGRRGDKVYYLLHKFRTAVRQVSHSTAELFEAWFRSPTASKVGKRKWDAGAIAKAIENNGGGWHGFGWLGRGKWTVAHSNINENGVCLACGEKLAIIDLDPKETEDFATFVAKLAIKRERKSNFENFQKWLEKHGPFEAVVDAANVGLFSHKHLSLSKVNSVADAIRLRFTSKKWPLIVLHNKHLIGERMKKLNDHKLVQKWKQENSIYATPTGSNDDWYWLYAAIRCKCLIITNDEMRDHTFQILERNFFPKWKERHQESDKGHWHIPVSEEGLLEKDRTWLCVTRQNSQAQ

SEQ ID NO: 181272 - protein, 652 aa, Zea Mays
MAYLSSLHHAPYPRLLLHHRYLFFSASSPPPVVTTRRLVPTLACHGRDLLDVMPYRDSRPSGTEGSRAGPGGAPRVTNSSTVRGNATAQEAHMPMWRERTPGTPRTWKKGDRVMLQEHAEGESQEKSWRRGLTRSLESKGPMVRKSWTRDGNGMRAKESGKVGNSRDEGTGRRNACKKMKKPPDGEYAGKLRVELDMCSKRGDVMGAITLYDSAVEEGIKLGQHHYNVLLYLCSSASLGFVQPAKSGNMGSGIASIGPAQKLDPSPSRSLGGSEGDNAYASESHVQDQGKNKADLIPGGLKAQTVSIPVEDELGDYARARGFEIFDKMCSEKERVQMSEAALTAKARMALSMGDSDMAFEIVKQMKGLGLKPKLRSYGPALTAFCNSGNVEKAFEVEAHMLESGITPEEAELETLLRASVVGRRGDKVYYLLHKFRTAVRQVSHSTAELFEAWFRSPTASKVGKRKWDAGAIAKAIENNGGGWHGFGWLGRGKWTVAHSNINENGVCLACGEKLAIIDLDPKETEDFATFVAKLAIKRERKSNFENFQKWLEKHGPFEAVVDAANVGLFSHKHLSLSKVNSVADAIRLRFTSKKWPLIVLHNKHLIGERMKKLNDHKLVQKWKQENSIYATPTGSNDDCSGTGCTLLSDANA

SEQ ID NO: 181273 - protein, 592 aa, Zea Mays
MAYLSSLHHAPYPRLLLHHRYLFFSASSPPPVVTTRRLVPTLACHGRDLLDVMPYRDSRPSGTEGSRAGPGGAPRVTNSSTVRGNATAQEAHMPMWRERTPGTPRTWKKGDRVMLQEHAEGESQEKSWRRGLTRSLESKGPMVRKSWTRDGNGMRAKESGKVGNSRDEGTGRRNACKKMKKPPDGEYAGKLRVELDMCSKRGDVMGAITLYDSAVEEGIKLGQHHYNVLLYLCSSASLGFVQPAKSGNMGSGIASIGPAQKLDPSPSRSLGGSEGDNAYASESHVQDQGKNKADLIPGGLKAQTVSIPVEDELGDYARARGFEIFDKMCSEKERVQMSEAALTAKARMALSMGDSDMAFEIVKQMKGLGLKPKLRSYGPALTAFCNSGNVEKAFEVEAHMLESGITPEEAELETLLRASVVGRRGDKKWLEKHGPFEAVVDAANVGLFSHKHLSLSKVNSVADAIRLRFTSKKWPLIVLHNKHLIGERMKKLNDHKLVQKWKQENSIYATPTGSNDDWYWLYAAIRCKCLIITNDEMRDHTFQILERNFFPKWKERHQESDKGHWHIPVSEEGLLEKDRTWLCVTRQNSQAQ

SEQ ID NO: 181274 - protein, 622 aa, Zea Mays
MAYLSSLHHAPYPRLLLHHRYLFFSASSPPPVVTTRRLVPTLACHGRDLLDVMPYRDSRPSGTEGSRAGPGGAPRVTNSSTVRGNATAQEAHMPMWRERTPGTPRTWKKGDRVMLQEHAEGESQEKSWRRGLTRSLESKGPMVRKSWTRDGNGMRAKESGKVGNSRDEGTGRRNACKKMKKPPDGEYAGKLRVELDMCSKRGDVMGAITLYDSAVEEGIKLGQHHYNVLLYLCSSASLGFVQPAKSGNMGSGIASIGPAQKLDPSPSRSLGGSEGDNAYASESHVQDQGKNKADLIPGGLKAQTVSIPVEDELGDYARARGFEIFDKMCSEKERVQMSEAALTAKARMALSMGDSDMAFEIVKQMKGLGLKPKLRSYGPALTAFCNSGNVEKAFEVEAHMLESGITPEEAELETLLRASVVGRRGDKVYYLLHKFRTAVRQVSHSTAELFEAWFRSPTASKVGKRKWDAGAIAKAIENNGGGWHGFGWLGRGKWTVAHSNINENGVCLACGEKLAIIDLDPKETEDFATFVAKLAIKRERKSNFENFQVNSVADAIRLRFTSKKWPLIVLHNKHLIGERMKKLNDHKLVQKWKQENSIYATPTGSNDDCSGTGCTLLSDANA

SEQ ID NO: 181275 - protein, 590 aa, Zea Mays
MPYRDSRPSGTEGSRAGPGGAPRVTNSSTVRGNATAQEAHMPMWRERTPGTPRTWKKGDRVMLQEHAEGESQEKSWRRGLTRSLESKGPMVRKSWTRDGNGMRAKESGKVGNSRDEGTGRRNACKKMKKPPDGEYAGKLRVELDMCSKRGDVMGAITLYDSAVEEGIKLGQHHYNVLLYLCSSASLGFVQPAKSGNMGSGIASIGPAQKLDPSPSRSLGGSEGDNAYASESHVQDQGKNKADLIPGGLKAQTVSIPVEDELGDYARARGFEIFDKMCSEKERVQMSEAALTAKARMALSMGDSDMAFEIVKQMKGLGLKPKLRSYGPALTAFCNSGNVEKAFEVEAHMLESGITPEEAELETLLRASVVGRRGDKVYYLLHKFRTAVRQVSHSTAELFEAWFRSPTASKVGKRKWDAGAIAKAIENNGGGWHGFGWLGRGKWTVAHSNINENGVCLACGEKLAIIDLDPKETEDFATFVAKLAIKRERKSNFENFQKWLEKHGPFEAVVDAANVGLFSHKHLSLSKVNSVADAIRLRFTSKKWPLIVLHNKHLIGERMKKLNDHKLVQKWKQENSIYATPTGSNDDCIVF

SEQ ID NO: 181276 - protein, 332 aa, Zea Mays
MEQSSDGLPISQRRANSSTKHSSKSDEVAEDMLQSNIPHETVRLCQGVESEEIEGPPHKKIVQNFTESSSSKNKKHRWSSEEDEALKQMVKKYGTKNWRTIACAIPGRNANSCLSRWKYLLDPAINKEPWSQQEELRLIRAQQVYGNKWCKMVKHFPGRTNDALKEHWRSPMKRKLDSYLASGLLEHVPDLQDDVSFPQTQNNQSDIPKDCKAASDRNRFSSRLSTDPKLKQELTELDENEMRMAKSQQCAGTRKKLAFLSTPVELKSVVPHETTKHCQDMEPEKTEGPLCKRNSHCIKDGSSLKIPESTKGKWKMKFSLKWLPNMGKTGKL

SEQ ID NO: 181277 - protein, 622 aa, Zea Mays
MEQSSDGLPISQRRANSSTKHSSKSDEVAEDMLQSNIPHETVRLCQGVESEEIEGPPHKKIVQNFTESSSSKNKKHRWSSEEDEALKQMVKKYGTKNWRTIACAIPGRNANSCLSRWKYLLDPAINKEPWSQQEELRLIRAQQVYGNKWCKMVKHFPGRTNDALKEHWRSPMKRKLDSYLASGLLEHVPDLQDDVSFPQTQNNQSDIPKDCKAASDRNRFSSRLSTDPKLKQELTELDENEMRMAKSQQCAGTRKKLAFLSTPVELKSVVPHETTKHCQDMEPEKTEGPLCKRNSHCIKDGSSLKIPESTKGKWLAEENEILIKMVTKHGKNWQTVAFAIPGREAKQCQIRWTRSLDPAIKKQDWSEQEDLKLIRAHQIYGSQWLKMVKHFPGRTNHALKEHWRNRIKGKLNFYLASGLLEQVPDLEEGGISVPESSQSEIPKDSQGSADRSGPPPVLRAQPKSKPELPENAGTSGEGTSDSIRLKGPNAHPTEVSEKVLAKSKQRARARRRLDFLSTPVELKLCTAAASCQRPPQKMDQPGPVAENISPSDACQDISQNVPPERADAITPLAASNHHSPATPVDPFSLEMHEANASDLLDMSYCDGLIIDSPRDPHDGSLM

SEQ ID NO: 181278 - protein, 331 aa, Zea Mays
MEQSSDGLPISQRRANSSTKHSSKSDEVAEDMLQSNIPHETVRLCQGVESEEIEGPPHKKIVQNFTESSSSKNKKHRWSSEEDEALKQMVKKYGTKNWRTIACAIPGRNANSCLSRWKYLLDPAINKEPWSQQEELRLIRAQQVYGNKWCKMVKHFPGRTNDALKEHWRSPMKRKLDSYLASGLLEHVPDLQDDVSFPQTQNNQSDIPKDCKAASDRNRFSSRLSTDPKLKQELTELDENEMRMAKSQQCAGTRKKLAFLSTPVELKSVVPHETTKHCQDMEPEKTEGPLCKRNSHCIKDGSSLKIPESTKGKWMKFSLKWLPNMGKTGKL

SEQ ID NO: 181279 - protein, 534 aa, Zea Mays
MVKKYGTKNWRTIACAIPGRNANSCLSRWKYLLDPAINKEPWSQQEELRLIRAQQVYGNKWCKMVKHFPGRTNDALKEHWRSPMKRKLDSYLASGLLEHVPDLQDDVSFPQTQNNQSDIPKDCKAASDRNRFSSRLSTDPKLKQELTELDENEMRMAKSQQCAGTRKKLAFLSTPVELKSVVPHETTKHCQDMEPEKTEGPLCKRNSHCIKDGSSLKIPESTKGKWLAEENEILIKMVTKHGKNWQTVAFAIPGREAKQCQIRWTRSLDPAIKKQDWSEQEDLKLIRAHQIYGSQWLKMVKHFPGRTNHALKEHWRNRIKGKLNFYLASGLLEQVPDLEEGGISVPESSQSEIPKDSQGSADRSGPPPVLRAQPKSKPELPENAGTSGEGTSDSIRLKGPNAHPTEVSEKVLAKSKQRARARRRLDFLSTPVELKLCTAAASCQRPPQKMDQPGPVAENISPSDACQDISQNVPPERADAITPLAASNHHSPATPVDPFSLEMHEANASDLLDMSYCDGLIIDSPRDPHDGSLM

SEQ ID NO: 181280 - protein, 626 aa, Zea Mays
MEQSSDGLPISQRRANSSTKHSSKSDEVAEDMLQSNIPHETVRLCQGVESEEIEGPPHKKIVQNFTESSSSKNKKHRWSSEEDEALKQMVKKYGTKNWRTIACAIPGRNANSCLSRWKYLLDPAINKEPWSQQEELRLIRAQQVYGNKWCKMVKHFPGRTNDALKEHWRSPMKRKLDSYLASGLLEHVPDLQDDVSFPQTQNNQSDIPKDCKAASDRNRFSSRLSTDPKLKQELTELDENAKISEMRMAKSQQCAGTRKKLAFLSTPVELKSVVPHETTKHCQDMEPEKTEGPLCKRNSHCIKDGSSLKIPESTKGKWLAEENEILIKMVTKHGKNWQTVAFAIPGREAKQCQIRWTRSLDPAIKKQDWSEQEDLKLIRAHQIYGSQWLKMVKHFPGRTNHALKEHWRNRIKGKLNFYLASGLLEQVPDLEEGGISVPESSQSEIPKDSQGSADRSGPPPVLRAQPKSKPELPENAGTSGEGTSDSIRLKGPNAHPTEVSEKVLAKSKQRARARRRLDFLSTPVELKLCTAAASCQRPPQKMDQPGPVAENISPSDACQDISQNVPPERADAITPLAASNHHSPATPVDPFSLEMHEANASDLLDMSYCDGLIIDSPRDPHDGSLM

SEQ ID NO: 181281 - protein, 382 aa, Zea Mays
MEQSSDGLPISQRRANSSTKHSSKSDEVAEDMLQSNIPHETVRLCQGVESEEIEGPPHKKIVQNFTESSSSKNKKHRWSSEEDEALKQMVKKYGTKNWRTIACAIPGRNANSCLSRWKYLLDPAINKEPWSQQEELRLIRAQQVYGNKWCKMVKHFPGRTNDALKEHWRSPMKRKLDSYLASGLLEHVPDLQDDVSFPQTQNNQSDIPKDCKAASDRNRFSSRLSTDPKLKQELTELDENGNTSARKSSDLFYAKAPDTHSAKISEMRMAKSQQCAGTRKKLAFLSTPVELKSVVPHETTKHCQDMEPEKTEGPLCKRNSHCIKDGSSLKIPESTKGKWLAEENEILIKMVTKHGKNWQTVAFAIPGREAKQCQIRLHSNVH

SEQ ID NO: 181282 - protein, 598 aa, Zea Mays
MEQSSDGLPISQRRANSSTKHSSKSDEVAEDMEDEALKQMVKKYGTKNWRTIACAIPGRNANSCLSRWKYLLDPAINKEPWSQQEELRLIRAQQVYGNKWCKMVKHFPGRTNDALKEHWRSPMKRKLDSYLASGLLEHVPDLQDDVSFPQTQNNQSDIPKDCKAASDRNRFSSRLSTDPKLKQELTELDENGNTSARKSSDLFYAKAPDTHSAKISEMRMAKSQQCAGTRKKLAFLSTPVELKSVVPHETTKHCQDMEPEKTEGPLCKRNSHCIKDGSSLKIPESTKGKWLAEENEILIKMVTKHGKNWQTVAFAIPGREAKQCQIRWTRSLDPAIKKQDWSEQEDLKLIRAHQIYGSQWLKMVKHFPGRTNHALKEHWRNRIKGKLNFYLASGLLEQVPDLEEGGISVPESSQSEIPKDSQGSADRSGPPPVLRAQPKSKPELPENAGTSGEGTSDSIRLKGPNAHPTEVSEKVLAKSKQRARARRRLDFLSTPVELKLCTAAASCQRPPQKMDQPGPVAENISPSDACQDISQNVPPERADAITPLAASNHHSPATPVDPFSLEMHEANASDLLDMSYCDGLIIDSPRDPHDGSLM

SEQ ID NO: 181283 - protein, 298 aa, Zea Mays
MVTKHGKNWQTVAFAIPGREAKQCQIRWTRSLDPAIKKQDWSEQEDLKLIRAHQIYGSQWLKMVKHFPGRTNHALKEHWRNRIKGKLNFYLASGLLEQVPDLEEGGISVPESSQSEIPKDSQGSADRSGPPPVLRAQPKSKPELPENAGTSGEGTSDSIRLKGPNAHPTEVSEKVLAKSKQRARARRRLDFLSTPVELKLCTAAASCQRPPQKMDQPGPVAENISPSDACQDISQNVPPERADAITPLAASNHHSPATPVDPFSLEMHEANASDLLDMSYCDGLIIDSPRDPHDGSLM

SEQ ID NO: 181284 - protein, 306 aa, Zea Mays
MEDEILIKMVTKHGKNWQTVAFAIPGREAKQCQIRWTRSLDPAIKKQDWSEQEDLKLIRAHQIYGSQWLKMVKHFPGRTNHALKEHWRNRIKGKLNFYLASGLLEQVPDLEEGGISVPESSQSEIPKDSQGSADRSGPPPVLRAQPKSKPELPENAGTSGEGTSDSIRLKGPNAHPTEVSEKVLAKSKQRARARRRLDFLSTPVELKLCTAAASCQRPPQKMDQPGPVAENISPSDACQDISQNVPPERADAITPLAASNHHSPATPVDPFSLEMHEANASDLLDMSYCDGLIIDSPRDPHDGSLM

SEQ ID NO: 181285 - protein, 369 aa, Zea Mays
MKPPNIAKIWNQKRQLYDYTWANSKPYFFHTLLEGPLCKRNSHCIKDGSSLKIPESTKGKWLAEENEILIKMVTKHGKNWQTVAFAIPGREAKQCQIRWTRSLDPAIKKQDWSEQEDLKLIRAHQIYGSQWLKMVKHFPGRTNHALKEHWRNRIKGKLNFYLASGLLEQVPDLEEGGISVPESSQSEIPKDSQGSADRSGPPPVLRAQPKSKPELPENAGTSGEGTSDSIRLKGPNAHPTEVSEKVLAKSKQRARARRRLDFLSTPVELKLCTAAASCQRPPQKMDQPGPVAENISPSDACQDISQNVPPERADAITPLAASNHHSPATPVDPFSLEMHEANASDLLDMSYCDGLIIDSPRDPHDGSLM

SEQ ID NO: 181286 - protein, 285 aa, Zea Mays
MPFLHFVLMGLPYRWTRSLDPAIKKQDWSEQEDLKLIRAHQIYGSQWLKMVKHFPGRTNHALKEHWRNRIKGKLNFYLASGLLEQVPDLEEGGISVPESSQSEIPKDSQGSADRSGPPPVLRAQPKSKPELPENAGTSGEGTSDSIRLKGPNAHPTEVSEKVLAKSKQRARARRRLDFLSTPVELKLCTAAASCQRPPQKMDQPGPVAENISPSDACQDISQNVPPERADAITPLAASNHHSPATPVDPFSLEMHEANASDLLDMSYCDGLIIDSPRDPHDGSLM

SEQ ID NO: 181287 - protein, 538 aa, Zea Mays
MVKKYGTKNWRTIACAIPGRNANSCLSRWKYLLDPAINKEPWSQQEELRLIRAQQVYGNKWCKMVKHFPGRTNDALKEHWRSPMKRKLDSYLASGLLEHVPDLQDDVSFPQTQNNQSDIPKDCKAASDRNRFSSRLSTDPKLKQELTELDENAKISEMRMAKSQQCAGTRKKLAFLSTPVELKSVVPHETTKHCQDMEPEKTEGPLCKRNSHCIKDGSSLKIPESTKGKWLAEENEILIKMVTKHGKNWQTVAFAIPGREAKQCQIRWTRSLDPAIKKQDWSEQEDLKLIRAHQIYGSQWLKMVKHFPGRTNHALKEHWRNRIKGKLNFYLASGLLEQVPDLEEGGISVPESSQSEIPKDSQGSADRSGPPPVLRAQPKSKPELPENAGTSGEGTSDSIRLKGPNAHPTEVSEKVLAKSKQRARARRRLDFLSTPVELKLCTAAASCQRPPQKMDQPGPVAENISPSDACQDISQNVPPERADAITPLAASNHHSPATPVDPFSLEMHEANASDLLDMSYCDGLIIDSPRDPHDGSLM

SEQ ID NO: 181288 - protein, 357 aa, Zea Mays
MEQSSDGLPISQRRANSSTKHSSKSDEVAEDMLQSNIPHETVRLCQGVESEEIEGPPHKKIVQNFTESSSSKNKKHRWSSEEDEALKQMVKKYGTKNWRTIACAIPGRNANSCLSRWKYLLDPAINKEPWSQQEELRLIRAQQVYGNKWCKMVKHFPGRTNDALKEHWRSPMKRKLDSYLASGLLEHVPDLQDDVSFPQTQNNQSDIPKDCKAASDRNRFSSRLSTDPKLKQELTELDENGNTSARKSSDLFYAKAPDTHSAKISEMRMAKSQQCAGTRKKLAFLSTPVELKSVVPHETTKHCQDMEPEKTEGPLCKRNSHCIKDGSSLKIPESTKGKWKMKFSLKWLPNMGKTGKL

SEQ ID NO: 181289 - protein, 357 aa, Zea Mays
MKPPNIAKIWNQKRQFFLYQAEGPLCKRNSHCIKDGSSLKIPESTKGKWLAEENEILIKMVTKHGKNWQTVAFAIPGREAKQCQIRWTRSLDPAIKKQDWSEQEDLKLIRAHQIYGSQWLKMVKHFPGRTNHALKEHWRNRIKGKLNFYLASGLLEQVPDLEEGGISVPESSQSEIPKDSQGSADRSGPPPVLRAQPKSKPELPENAGTSGEGTSDSIRLKGPNAHPTEVSEKVLAKSKQRARARRRLDFLSTPVELKLCTAAASCQRPPQKMDQPGPVAENISPSDACQDISQNVPPERADAITPLAASNHHSPATPVDPFSLEMHEANASDLLDMSYCDGLIIDSPRDPHDGSLM

SEQ ID NO: 181290 - protein, 301 aa, Zea Mays
MPCTMFSGLHYQEGPPHKKIVQNFTESSSSKNKKHRWSSEEDEALKQMVKKYGTKNWRTIACAIPGRNANSCLSRWKYLLDPAINKEPWSQQEELRLIRAQQVYGNKWCKMVKHFPGRTNDALKEHWRSPMKRKLDSYLASGLLEHVPDLQDDVSFPQTQNNQSDIPKDCKAASDRNRFSSRLSTDPKLKQELTELDENAKISEMRMAKSQQCAGTRKKLAFLSTPVELKSVVPHETTKHCQDMEPEKTEGPLCKRNSHCIKDGSSLKIPESTKGKWLAEESCLDKKKLYNVNLGLFHHDY

SEQ ID NO: 181291 - protein, 168 aa, Zea Mays
MTLAAGLGYALIALGPAFSLFSGVVVRKPFLVLTLLSSTLFWLISLIVLSGIWRGFLPIKSGAWWAYVILILTSVALQEGTRLVFWMLYKKMEEMLDAFADRISKPRLRLTDKMLISLAGGLGHGVAHAVFFCLSLLTPAFGRATFYTESPYCTWILGHPYILNDYCF

SEQ ID NO: 181292 - protein, 491 aa, Zea Mays
MQHMRSSCLTEIQNARGIMDVLSEMLDALDPGNREGLRQDVIADLVDQCRSYKQRVVQLVNSTSNEELLNQGLSLNDDMQRVLAKHDAIDAGLAVRVEKPKSLQSQIGSSSTRKPDTMEETIQRPSASTTATSQSPFGILALPAPPSSSSKAPAIPASSIDLLSGDDYVKPEPANSLALVPVTEYSAADKNVLAFADMFEQNTANNSNHNLPYSFLSSTSNSTISTSQTYHAPVRPVLPQHSAAYPNGARSNAIVPYDQQAQSNSTGSRNGQTAYGGNHQKQALNYGTGDQNGDIPPAPWGTKRSTNPFDDDQLGGMAVQPKGMQPQPVQPSQHGNKFMSAPPMPRGQPGRMQLQQVPGAQLGALQPTQATLNMQYRGMHPSMQMNHGMGMYSQPTFGGYYGMNQTQLYGVHMSGYGYGQQSGGYYIPNAAYAYTSANELAQRMNDLSVQNGDPNGAAANKQSRPEDALFGDLLSIAKMKQNKPAAGKVGG

SEQ ID NO: 181293 - protein, 197 aa, Zea Mays
MGSQRQRHRAVTGLPAAGARMLALLCASSWVLVLTTAQNYSAIFNFGDSITDTGNLCTSGRPSQITFTQPPYGETYFGTPTCRCSDGRVVVDFLSTQFGLPFLPPSKSSSADFRQGANMAITGATAMDAPFFRSLGLSDKIWNNGPISFQLQWFQQIATSVCGQTRCSLRLAGQAARATWATPCSCSASSAATTTTP

SEQ ID NO: 181294 - protein, 72 aa, Zea Mays
MVDFQSTGDVGNSASITEMGNLVPEPSYVEAEEARLWSVATMNCLEFDAWTTVVEEMDKNAEVMHATRLLVF

SEQ ID NO: 181295 - protein, 84 aa, Zea Mays
MICLVCCGTPPFLAPSIRKHFWLGFGDWKESLASQRNVASFTYNWNDLRGKILKELTANVCLLYIYVVLKPCVTNVGICHQERA

SEQ ID NO: 181296 - protein, 90 aa, Zea Mays
MYYVVILCPTMHLYCYNMFILDACDTNPSFIHTKTSSSGTVGRHGARPFFLETIEVHRSKLRHDDAGRQRKKKMLSKLLRANDNNIPVIF

SEQ ID NO: 181297 - protein, 53 aa, Zea Mays
MGNLVPEPSYVEEEARLWSVATMNCLEFDAWTTVVEEMDKNAEVMHATRLLVF

SEQ ID NO: 181298 - protein, 87 aa, Zea Mays
MLQRQLDVDILVTGHSHQFKAYKHEGGVVINPGSATGAYSSITYDVNPSFVLMDIEGLRVVVYVYELIDGEVKVDKIDFKKAATMQA

SEQ ID NO: 181299 - protein, 212 aa, Zea Mays
MIQLLFVVLVAEASLTAALLFKTPLRKLAVLVIDRLKRGRHAPVVVKTVAGVILALLASTLYSMTQIAGSTSDSDSGGGPTPTDQVLFSRHLLEACLMVIDRLHQYIRDLRRFKKDLEAVRKHNKMLEEAKHGNSEEAKKYQEEIATLNKEMKKLKLQVQEKTEEVHVSEDKALAIQKQSEGLLTEYDRLLEDNQHLRTQLLSIDRRLSNSS

SEQ ID NO: 181300 - protein, 58 aa, Zea Mays
MFIWNNRACEGWNEFNLRKRIKYGRLVKQRRLYLYVSLVDIVIFCISNINIGWSVTFN

SEQ ID NO: 181301 - protein, 170 aa, Zea Mays
MVAAAPGILPWPHLPLPSSSHPSDASDAAAAATDANTSAYDIQIFEPTSIEERRRLLIQRRRLRLAASHASRLTVASRVSSKLISATASCSSGVASDLPPPLLMARRCLPPLPQPRPCRPWRIPNPTTSSVGPRRRGCAMNFRQHIPIKWLFARLTSCRHQIYRVLAINI

SEQ ID NO: 181302 - protein, 808 aa, Zea Mays
MEGEEDSSGSVVQRPPPPQQQIRVVRCPKCDKLLPELPNYSVYVCGGCGATLQAKKSSGSDTSSDKSDTEHVKYLEVLESLPDKKGAASEASCAVREADTNKIEARSEERFAPNRMVAAAHSQSGFSFDDNHATCAPNCTMKLEPALRDDSREVKEAKYRRIRLEEKGEAKQPARASDRSPRPVVSNIPSNAYPLEGPSECHKKPGFIYASGEKGHLSDKNLDVPSTRAGGLEKDRTELLRMLDELRDQVQRSYEIADKSSVNASTNRMVDPASSYNPHERLSRLRYGSPQLQRNGSQCSPSLNGQAPVVPPAYPSVSVQQDLHGYGQSVAHMGAPIYPAAPYPWRNFDNYFHGQAPYLMNNPVEGPVVFGAQNYNPRGINGLMRHNHLRDTLSKKPAQTCEPIANGAPFTICYNCYEVLHLPKNSLMLGKDEYKLRCGSCSHAIVVRLDGNRLDVSAPTPVSHLSPGSKNYSNNGQGSNGQNADERLLPSYSFSAGSHFSQEKDLPSNSSEADKMQCISSSASISEDDNSRASSNSQKNSGSRDLPPDAEVVIRVPSLPLRDHFGYSPSEMVVDGSGKGSRSTRSEHEKGVLTESFKPNKVKDVPVASVLDPSDDEFDDPEYNQDPGDGAQCVDHPRATKSGDSFFSSLIKKSFKINGGMGNGRAKVFINGYPISDRAVRKAEKIAGPIYPGEYWYDYRAGFWGVIGQPCLGMIPPYIAEFNYPMPKNCAGGNTGVFINSRELHQKDLDLLVGRGLPDSPDRSYRVEISGKVSDEVSGEELYCLGKLAPTVEKMKRGFGMRVPRTIQ

SEQ ID NO: 181303 - protein, 693 aa, Zea Mays
MVAAAHSQSGFSFDDNHATCAPNCTMKLEPALRDDSREVKEAKYRRIRLEEKGEAKQPARASDRSPRPVVSNIPSNAYPLEGPSECHKKPGFIYASGEKGHLSDKNLDVPSTRAGGLEKDRTELLRMLDELRDQVQRSYEIADKSSVNASTNRMVDPASSYNPHERLSRLRYGSPQLQRNGSQCSPSLNGQAPVVPPAYPSVSVQQDLHGYGQSVAHMGAPIYPAAPYPWRNFDNYFHGQAPYLMNNPVEGPVVFGAQNYNPRGINGLMRHNHLRDTLSKKPAQTCEPIANGAPFTICYNCYEVLHLPKNSLMLGKDEYKLRCGSCSHAIVVRLDGNRLDVSAPTPVSHLSPGSKNYSNNGQGSNGQNADERLLPSYSFSAGSHFSQEKDLPSNSSEADKMQCISSSASISEDDNSRASSNSQKNSGSRDLPPDAEVVIRVPSLPLRDHFGYSPSEMVVDGSGKGSRSTRSEHEKGVLTESFKPNKVKDVPVASVLDPSDDEFDDPEYNQDPGDGAQCVDHPRATKSGDSFFSSLIKKSFKINGGMGNGRAKVFINGYPISDRAVRKAEKIAGPIYPGEYWYDYRAGFWGVIGQPCLGMIPPYIAEFNYPMPKNCAGGNTGVFINSRELHQKDLDLLVGRGLPDSPDRSYRVEISGKVSDEVSGEELYCLGKLAPTVEKMKRGFGMRVPRTIQ

SEQ ID NO: 181304 - protein, 478 aa, Zea Mays
MATAAVESKRGSARGRKALVAVLDNEANISAGKAAQAADLSSCSAQKKAKRAPSRSSKAKAAAASAAVVVDDIAELQGMLERLRLEKEKAEEMVRERDEVIRKKEEEIETRDKEQERLQAELRKAQRAKEFKPTVSFPLVKSLLEKEQEADDKGKKKKGKGGHERKKPCPAYVLWLKDQWTEVKKENPEADFKEVSNTLGAKWKALGAEEKQPYEDRYRQEKEAYLQVVGQEKREAEAMKLLEEQQMQWTAKELLDQYLKFRQEAEEGDCKKGRKKKSKKDKDPSKPKQPMSAYFVYSQERRATLVAEKKNVPEIGKITGEEWKNMTEGQRAPYEEVARKQKEEYHKQMEVYKQKKAEEAASLEKEEQEHKKIMKHEALQLLKKKEKADNIIKKTKEKRQKKKQENADPNRPKSKEERKQLIEERPGINNSTLNALITVKWKELSGEERQAWNAKAAPAMAAYKKEMEEYTKAQSSSA

SEQ ID NO: 181305 - protein, 467 aa, Zea Mays
MATAAVESKRGSARGRKALVAVLDNEANISAGKAAQAADLSSCSAQKKAKRAPSRSSKAKAAAASAAVVVDDIAELQGMLERLRLEKEKAEEMVRERDEVIRKKEEEIETRDKEQERLQAELRKAQRAKEFKPTVSFPLVKSLLEKEQEADDKGKKKKGKGGHERKKPCPAYVLWLKDQWTEVKKENPEADFKEVSNTLGAKWKALGAEEKQPYEDRYRQEKEAYLQVVGQEKREAEAMKLLEEQQMQWTAKELLDQYLKFRQEAEEGDCKKGRKKKSKKDKDPSKPKQPMSAYFVYSQERRATLVAEKKNVPEIGKITGEEWKNMTEGQRAPYEEVARKQKEEYHKQMEVYKQKKAEEAASLEKEEQEHKKIMKHEALQLLKKKEKADNIIKRPASSFLLFSKEERKQLIEERPGINNSTLNALITVKWKELSGEERQAWNAKAAPAMAAYKKEMEEYTKAQSSSA

SEQ ID NO: 181306 - protein, 637 aa, Zea Mays
MGRRGSYQLTEIHRTAMGLMLVLSNCSVPFLCHLLFPFLQSTDGSATSAAGKSSNLSLDALAKAKKALQLKKELSEKLKKLPMLNNKLGTSVTATQVSKEEAKTSVSAVDAQLFSKGEAKPTDVSVLPTSTISGTPAVGGAIGIPGLTNIPNLESVKRAQELAAKMGFRQDPQFGPLINLFPGTSTEVTVPQRPAKAPVLRLDAQGREIDEQGNVISMTKPTNLSTLKVNINKQKKEAFQIIKPDLDSLAKSSVHFDERMGINQKKLLRLKRPGFQFVEEGKLTRQAELQKIKSQFGEAQAKELKVKQAQLAKAKTEVDMNPNLIEVALGVRAPKQKQKEEIPEIEPWDAKILLSATYEDVSVEKLNLDKITIYVEHPEPYDPPAEPAPPPPQPLKLTKKEQKKLRTQRRLAKEKDRQEMIRQGLLEPPKPKVKMSNLMKVLGSEAVQDPTRMEMEIRTAAAEREQAHVDRNIARKLTPSERREKKERKLFDDPTNTVETIVCVYKIRDLSHPQTRFKVDVNAQENKLTGAAVITDSISVVVVEGGKKSIKRYNKLMLNRIDWAAAVGGDEDAEAEAEADKPVNSCELVWQGSVAKPTFHRFTVHNCRSESAAKKIFVDASVPHYWDLAVNSSEGSP

SEQ ID NO: 181307 - protein, 76 aa, Zea Mays
MSTVPTICTAGTPSSTSPICASSPTTIPRRTAAKMYTPALMYSHRLRNAVPDPAPAPRLYARHSRAVASFTMVAVA

SEQ ID NO: 181308 - protein, 477 aa, Zea Mays
MAVILSSAAPTILTRPTRPRRQPRSGLRGGLARLSAALGLAHAGAGAGAALAAPLSYEEMLRLSSDSGGDVGGFALPELGLDGLVDFVNDNPLVVAAGVAAIAVPLLLAQLLGGGGSSKPYSVLSAKAAYQRLLEEPDAQLVDIRPLKDAREAGTPDLKEAKKKAAAVPYNGEDKNGFLKKLTLKFKDPENTTLIILDKFDGNSELVAELVTANGYKAAFAVKDGAEGSRGWKSSNLPWKAPPKGFSFDLGELFGDGSDGLPVTIGLAAATGLGVLAYTEIETLLQFLGSAAVVQLVVTKLLYAEDRQKTLKQIDEFFNKKVAPKELIDEIKEIGQALLPLPGDAKSQPALATATQVAATQTAAPAEDATAEATTESDPATPTPLSPYTNYPDLKPPSTPTPPSVESEVETKASSTVTEGPAVVNSAPIADAATGSSPATTRPRPQSPYPNISSHHPRLHRQHLNLARVQETGSRGY

SEQ ID NO: 181309 - protein, 381 aa, Zea Mays
MHYRSHGHNNKKCDFPQPPGIVKARFGSTRNCNHIPRRKSRLTPMLSRSLTIDPESLDVETLGVEKATQGSRAHPGQNQEHEFFTPSGMMGISSYAATGMDSSLQSSGGSSVMSSTRDLTMRRNNVSSNPAVRGPRRRGPTRCARHQVVFTAEELSRAPTEIIGRSCHGTSYKATHDNGYMLTVKWLKEGFAKSKKEFSREIKKLGSVRHPNLVPLRGYYWAPKEQERIMISDYADATSLSTYLSDYMHNALIQNSTPSALVTDYSLHRQMTSIGMAEQVLNAGALGYSPPEFSSTSKPCPSLKCDVHAFGVILLELMTGKIAGEIICMNDGVVDLTDWVRMLDLEERVSECYDRHIMGVENSEGAPQALDGRHMHMLTTR

SEQ ID NO: 181310 - protein, 453 aa, Zea Mays
MHYRSHGHNNKKCDFPQPPGIVKARFGSTRNCNHIPRRKSRLTPMLSRSLTIDPESLDVETLGVEKATQGSRAHPGQNQEHEFFTPSGMMGISSYAATGMDSSLQSSGGSSVMSSTRDLTMRRNNVSSNPAVRGPRRRGPTRCARHQVVFTAEELSRAPTEIIGRSCHGTSYKATHDNGYMLTVKWLKEGFAKSKKEFSREIKKLGSVRHPNLVPLRGYYWAPKEQERIMISDYADATSLSTYLSDYMHNALIQNSTPSALVTDYSLHRQMTSIGMAEQVLNAGALGYSPPEFSSTSKPCPSLKCDVHAFGVILLELMTGKIAGEIICMNDGVVDLTDWVRMLDLEERVSECYDRHIMGVENSEGSRDRRNGKELDGEGTGFMVDYQPLRNYDRTRGLETEQSTISYCNGMDGGGSTGHTRPVSLTPTEGKARPCPRISKQQHAMLCALARGV

SEQ ID NO: 181311 - protein, 71 aa, Zea Mays
MGEREKLLRGRNQMRERDQGEGARMGRAGGASGARAELGRARLGPHRGLKSRGTHNHRSEDRSASKIPKRN

SEQ ID NO: 181312 - protein, 80 aa, Zea Mays
MKLWIYFSKKRKLKPNHSGEQSPRPRYRYLFSFAIHSLEPLNQMLKQAAKESPMGMHGGRVIPSGRWVVSCVLSQQGHFL

SEQ ID NO: 181313 - protein, 306 aa, Zea Mays
MASQQQTRKQQATKGHQEADRGQAMNLEEIGKYRAEAQQRSADAIRAAEDRFHKANNQQARGAGARGTVTVAQAPVATVVPYQESVKQVETESHGRGSHGSEPQQWLADAAADARERCNKALGTSPAAAHEGKASAAHATAGAAPHQQTKNEQEGGQVHGHLTRQDEMGKHGSEAQKNSTAEAARAAVEKHDGGRETGAAAGQGVKDTAAKHDKYGETGATAGRKSVKDTASRAAGATADYASAKGADAKDTGASGAQAAEEKTQEATGKAADYTKQAAAKVKDLTAGAAGTTMEYAKQAAVKART

SEQ ID NO: 181314 - protein, 475 aa, Zea Mays
MASQQQTRKQQATKGHQEADRGQAMNLEEIGKYRAEAQQRSADAIRAAEDRFHKANNQQARGAGARGTVTVAQAPVATVVPYQESVKQVETESHGRGSHGSEPQQWLADAAADARERCNKALGTSPAAAHEGKASAAHATAGAAPHQQTKNEQEGGQVHGHLTRQDEMGKHGSEAQKNSTAEAARAAVEKHDGGRETGAAAGQGVKDTAAKHDKYGETGATAGRKSVKDTASRAAGATADYASAKGADAKDTGASGAQAAEEKTQEATGKAADYTKQAAAKVKDLTAGAAGTTMEYAKQAKEPASQTADNKARDITGQHKDTTGDMARKAADTAVQAKDKVRDTAVSMVQKAGDTAVRAKDTAWDAAGGMAQRSRDTGAQAGDKAEDVTWRAEQEAGELKERASGTVKTGGGASTTKAKGGGDENTTVVGDVLEAVGATVVGLAKHTKGIVAGEEELVPVGGEKGKSPEEKTKLA

SEQ ID NO: 181315 - protein, 260 aa, Zea Mays
MASQQQTRKQQATKGHQEADRGQAMNLEEIGKYRAEAQQRSADAIRAAEDRFHKANNQQARGAGARGTVTVAQAPVATVVPYQESVKQVETESHGRGSHGSEPQQWLADAAADARERCNKALGTSPAAAHEGKASAAHATAGAAPHQQTKNEQEGGQVHGHLTRQDEMGKHGSEAQKNSTAEAARAAVEKHDGGRGVERESVRDRQDRRWRFDDEGEGWRRREHDGSGRRPGGGGRDGGWAREAHQGDRGRRGGARPSRR

SEQ ID NO: 181316 - protein, 582 aa, Zea Mays
MASQQQTRKQQATKGHQEADRGQAMNLEEIGKYRAEAQQRSADAIRAAEDRFHKANNQQARGAGARGTVTVAQAPVATVVPYQESVKQVETESHGRGSHGSEPQQWLADAAADARERCNKALGTSPAAAHEGKASAAHATAGAAPHQQTKNEQEGGQVHGHLTRQDEMGKHGSEAQKNSTAEAARAAVEKHDGGRETGAAAGQGVKDTAAKHDKYGETGATAGRKSVKDTASRAAGATADYASAKGADAKDTGASGAQAAEEKTQEATGKAADYTKQAAAKVKDLTAGAAGTTMEYAKQAAVKGKDVTLSTGETAAEYAKAAAEKAKEAAVATGKTTAGYTQQAAVKAKDATVSTGAQVAQKATEVTADTARKVAEYAKEKAEQGKERAARAADEVEEPGSGATAQAKEPASQTADNKARDITGQHKDTTGDMARKAADTAVQAKDKVRDTAVSMVQKAGDTAVRAKDTAWDAAGGMAQRSRDTGAQAGDKAEDVTWRAEQEAGELKERASGTVKTGGGASTTKAKGGGDENTTVVGDVLEAVGATVVGLAKHTKGIVAGEEELVPVGGEKGKSPEEKTKLA

SEQ ID NO: 181317 - protein, 74 aa, Zea Mays
MCAHKREKYRSGISPNHFSTLKLFLLHLVIQIHISGKLFAWRQHLAFWVVGIVVGAAQDVDMHSVEYGTIPVYH

SEQ ID NO: 181318 - protein, 334 aa, Zea Mays
MVMPQPTPQQLQQLQQQLQMKGLKLPPHLLGGNMPAFPAAAPLKDHPKSVKFALPEDSFDDDGGSEFDDDFDDDDFDDDEDYDDEGFDDDVYDEPKMMKPMAVPPPSGGGDKKGGGGKKGGGGNEIPVQIKGNNHGGGQPHNAKGGPPGGGNPLAQGKKGGGGGGAVGGPMGGMLPQQAMMRPNMLGGAGAGFPGTAQMGGGPMGMPMGHPHMGIMQQGGGGGGGVPGLGFYQGNANGGGGGGMHSGAEMLQAAAASGNPMAQQQYMALLQHQQQQHQQQMMLQHGNGGGAGYPAMGYGYGRPPMMHYPMPPHSHPEPYNIFSDENPNSTCSLM

SEQ ID NO: 181319 - protein, 51 aa, Zea Mays
MSYPSKGWRPIFIALEAALPHLLTHTTQHDCPLDAKETTEDSQKRLLSSRC

SEQ ID NO: 181320 - protein, 587 aa, Zea Mays
MSTAKHIFLWMIERELQYLSTWFIFDVCSTAPFQSISLLFTHKGNDLAFKILNMLRLWRLHRVSSLFARLEKDIRFNYFWTRCSKLISVTLFAVHCAGCFNYMIADRYPDPEKTWIGYGDLHAENPREMLFDICYMLFNLGLTAYLIGNMTNLVVHGTSRTRNFRDSIQSASEFAARNQLPEKIKQQMLSHFCLQFKTEGLNQQAMLNCLPKGIRSSIAYNLFFTIIRQAYLFHGVSNDFIAELVMEVQAEYFPPKEDIMLQNEGAADIYVIVSGSVNLITTVNGNEQVFGKVEERDMFGEVGALCDIPQPFTCRTSTLSQLLRIRKIRLTEIMQEHREDSNIILNNLFQKLKLQENLPELNQLDRRFMHKYELFHATREAWLLPQPYLQYTEHKFEDISKKAPAFGGDHGSTKLAAETIQLRVPQQGNSHDHGNFGATDRMASGDDKRNDLHINCETKKGTKEFCIQIKSKDCEAASYWQTSPETVKLGSSHSTLDAITTRENQDTSNIKSSNKRVTIHADPHNATGSLVQNGKLINLPCSLEEIFEIGSQKFPGFHPTKLVSRDYAEIDDVSVIRDGDHLFLLQM

SEQ ID NO: 181321 - protein, 62 aa, Zea Mays
MEEFQAAVRGGDSRGSAEAEGGAEQCDVLEVSNNTEIAAGEARKPDLTAKKAKLGESMASAR

SEQ ID NO: 181322 - protein, 56 aa, Zea Mays
MEEFQAAVRGGDSRGSAEAEGMVPILGNHKEVQSSAMYSKSRTTQRLLQEKLGSLI

SEQ ID NO: 181323 - protein, 427 aa, Zea Mays
MGNRIGGRRKSGVEERFTRPQGLYDHKDIDQKKLRKLILEAKLAPCYPGADDAAPGGGDLEECPICFLYYPSLNRSKCCSKGICTECFLQMKPTHTARPTQCPFCKTPNYAVEYRGVKTKEERSIEQFEEQKVIEAQLRMRQKELQDEEAKMRRKQGRCSSSRTVTPTTEVEYRDICSTSFSVPSYQCTEQGNECCSSEPSCSSQANRRPFHSRHNRDDNVDMNLENMMVMEAIWRSIQEQGHLVNPVCGSYFPVIEPPSRERQAFLPAAPLEMPHPGGYSCVAALAEHQPPSMDFSYMAGSSTYPVFDMIRRPCNMSSGSLCSVENSSLDTWSGMAPNCSRGVVREEGECSTDHWSEGAEAGTSYAGSDIMVDAGAMQPLPFAENFTMAPSHFRPESIEEQMMFSMAVSLAEGHHGRTQAQGLAWL

SEQ ID NO: 181324 - protein, 289 aa, Zea Mays
MRQKELQDEEAKMRRKQGRCSSSRTVTPTTEVEYRDICSTSFSVPSYQCTEQGNECCSSEPSCSSQANRRPFHSRHNRDDNVDMNLENMMVMEAIWRSIQQEQGHLVNPVCGSYFPVIEPPSRERQAFLPAAPLEMPHPGGYSCVAALAEHQPPSMDFSYMAGSSTYPVFDMIRRPCNMSSGSLCSVENSSLDTWSGMAPNCSRGVVREEGECSTDHWSEGAEAGTSYAGSDIMVDAGAMQPLPFAENFTMAPSHFRPESIEEQMMFSMAVSLAEGHHGRTQAQGLAWL

SEQ ID NO: 181325 - protein, 944 aa, Zea Mays
MLQPREADVPALFLVFIVLPVVAYFLLGRWHDSASKKARASVLAQRAAEEAYREETMACPDIIPPGPSLRTMPYFKPAPSLRQEYHECATCHAPAKTRCSRCKSVRYCSGKCQIVHWRQGHKETCQKWLGGDIHLRDMNFDTLSEPSFPTTDGYNLDTDPFPADRSNMNRSNQGIHMSENGAVGVSFEKNNYNAADEIHSSEILSGNKVSNNYFGSDAMSGNGDATYPAKSNAQQPSSCAPDVRKQSKASITVYQPDMSVYLTSDMVSSCEGSYVSAGEPLQRSLSSGRTIGKVTVVNKRPSYPSSKVVSAQKSQDKVSTSYQNDAHEKNPCNKNDQRSTPTCESSQSTSSNLLKSGTSKVEVLKKPSKFLKTSLVALINDNKRNKVLFPYEDIVKFFQYEARGVSPRGLFNCGNSCYANAVLQCLMCTKPLMIYLLLRLHSKDCCSKNWCLMCELEQYASTLRESGGPLSPSRILSNLRNIGCRLGGGTQEDAHEFLRHLVMSMQAACLDGLGGEKHVEPSLQETTLIQQMFGGRLKSKVKCLRCYHESERYENIMDLTLEIHGWVESLQDALTQFTAPEDLDGDNMYKCGRCSAYVKARKQLSVHEVPNILTVVLKRFQSGKYGKINKCVTFPDMLDMVPFVTGSGDNPPLYFLYAVVVHVDTENASFSGHYISYVKDMQGTWLRIDDSEVQVVSVNQVMSEGAYMLFYLRSFPRPPRIYIEKGLPVTSAKRHTSKSSKGSKHDRKQTELLFPANDQAYGVYDFRPDGEGYAQDQHAELRSRAFHHADDAFADSVSADFSEATSSEWSLFTSSDESSFTTESTRDSFSVVDYGDNAGLDPISSIFGPSYAPEHGAPGSFVSRTRFSPSSPQTRYFSESTGFVSDSSMPAHPHGIVHRGRYPDSRACASSAEPLASAAHQRSGYGRYPLSRDGFVQTSGFCQM

SEQ ID NO: 181326 - protein, 535 aa, Zea Mays
MLQPREADVPALFLVFIVLPVVAYFLLGRWHDSASKKARASVLAQRAAEEAYREETMACPDIIPPGPSLRTMPYFKPAPSLRQEYHECATCHAPAKTRCSRCKSVRYCSGKCQIVHWRQGHKETCQKWLGSGSSSFGGSSTEATEQMPFLANLNSPLPGGDIHLRDMNFDTLSEPSFPTTDGYNLDTDPFPADRSNMNRSNQGIHMSENGAVGVSFEKNNYNAADEIHSSEILSGNKVSNNYFGSDAMSGNGDATYPAKSNAQQPSSCAPDVRKQSKASITVYQPDMSVYLTSDMVSSCEGSYVSAGEPLQRSLSSGRTIGKVTVVNKRPSYPSSKVVSAQKSQDKVSTSYQNDAHEKNPCNKNDQRSTPTCESSQSTSSNLLKSGTSKVEVLKKPSKFLKTSLVALINDNKRNKVLFPYEDIVKFFQYEARGVSPRGLFNCGNSCYANAVLQCLMCTKPLMIYLLLRLHSKDCCSKNWCLMCELEQYASTLRESGGPLSPSRILSNLRNIGCRLGGGTQEDAHEFLSLLGWAGW

SEQ ID NO: 181327 - protein, 411 aa, Zea Mays
MLQPREADVPALFLVFIVLPVVAYFLLGRWHDSASKKARASVLAQRAAEEAYREETMACPDIIPPGPSLRTMPYFKPAPSLRQEYHECATCHAPAKTRCSRCKSVRYCSGKCQIVHWRQGHKETCQKWLGSGSSSFGGSSTEATEQMPFLANLNSPLPDRSNMNRSNQGIHMSENGAVGVSFEKNNYNAADEIHSSEILSGNKVSNNYFGSDAMSGNGDATYPAKSNAQQPSSCAPDVRKQSKASITVYQPDMSVYLTSDMVSSCEGSYVSAGEPLQRSLSSGRTIGKVTVVNKRPSYPSSKVVSAQKSQDKVSTSYQNDAHEKNPCNKNDQRSTPTCESSQSTSSNLLKSGTSKVEVLKKPSKFLKTSLVALINDNKRNKVLFPYEDIVKFFQYEARGVSPRGLFNCGNR

SEQ ID NO: 181328 - protein, 540 aa, Zea Mays
MLQPREADVPALFLVFIVLPVVAYFLLGRWHDSASKKARASVLAQRAAEEAYREETMACPDIIPPGPSLRTMPYFKPAPSLRQEYHECATCHAPAKTRCSRCKSVRYCSGKCQIVHWRQGHKETCQKWLGSGSSSFGGSSTEATEQMPFLANLNSPLPGGDIHLRDMNFDTLSEPSFPTTDGYNLDTDPFPADRSNMNRSNQGIHMSENGAVGVSFEKNNYNAADEIHSSEILSGNKVSNNYFGSDAMSGNGDATYPAKSNAQQPSSCAPDVRKQSKASITVYQPDMSVYLTSDMVSSCEGSYVSAGEPLQRSLSSGRTIGKVTVVNKRPSYPSSKVVSAQKSQDKVSTSYQNDAHEKNPCNKNDQRSTPTCESSQSTSSNLLKSGTSKVEVLKKPSKFLKTSLVALINDNKRNKVLFPYEDIVKFFQYEARGVSPRGLFNCGNSCYANAVLQCLMCTKPLMIYLLLRLHSKDCCSKNWCLMCELEQYASTLRESGGPLSPSRILSNLRNIGCRLGGGTQEDAHEFLRFSCCSIFRHFRS

SEQ ID NO: 181329 - protein, 57 aa, Zea Mays
MGDITTKIPEGVALLSPHSSSSVARRRIANHQPLAICRTQLRFPGLPSRKPSQANQG

SEQ ID NO: 181330 - protein, 1009 aa, Zea Mays
MPSWKPLAGGKLKKPLTDKQRAAAEQRLSHLRAHLILRSLDSPAGGARSLPPPQEAALDALGLLIFFRLDLQSGAPRPDLIAPLVAYYDRVCKRSFVRGVRVGVSRHHIIRALCLPSKPASAAPAPADVDPAAVVAAVMQLLQDYVLLPFQGDDRCILPQQVAAAEQMVREGAAHRVDWGELIWGLVEKEMLELPKREDWVCYYGPHLQRLIYAQKPHLLELVEEGPVQEPSANVDLKRKSMVELEQGDGDREAGNNVKSKSLNDSESGKAGARNDGLDELELADAVTRNKVMGEFGLGDVDARKNSIVKLEVVDEDARCKCLNEIQAVDAINNNIVELDAANEDARSKSLNECEAVDVDLDAMDININDRETINGDTRSKSLNESEAVDLDPDAMENNIDEMETVNEDARTKSLDEFEAVDVAPDAMDNNIDEMGVVNEDARSKGLNESEAVDAINNNIVELDAVNEDARCKSLNDESELVEEEFKSPSFDDMNTVDEHVNGTDTDGLCLGFVEVEAVPAVHEAMPDNNEETTEEAPAGGADVAGSDNVAVPTDVDCEEHYVEAVVVTQEVVAVAEELGDEEAKRDEEKDVMGLSLGFNSTNGYGAMDVEKETNVESLDEDESDSGNEEAEESEDGAFDVNDGEDMNWRIGDVNGGEGMTHSLQRCNTFGGMEFENLNKGEDEMRDELRFDDFPARASLERMTSSNLLQAMNSIPSSYNVSENVHDLPSGDFLAMGADAHKSGVDLGPGSSYLFGNNGKRNIDDIDGYNGNMQVQEGFPRSNQQKRMRHSNSSNISPGSGFFNASFSVPIQNLMVEASRLYEQNEQKLQSLQFEKQHWSDMLQQKEAIIQSLNSARFEQHNKYQAELRRFEHDLNVMAQLVTTYKKALKQTRASFDEYRKKFPCNVPLYGDVACGGGLVLSVRELEKRRCEEQQQNIAMVNGMIERFQYKWLSKFEEWGLSVNSLWSRMEGLYKEIELLKENRRARFATPATEESTLATEGSTPATEE

SEQ ID NO: 181331 - protein, 68 aa, Zea Mays
MFRFRGVSCFSLLHQKLHSYEDELIPLLDVLANKVNAIRRLRELLTTNLPTGTFPVKEVIAATMIRRK

SEQ ID NO: 181332 - protein, 62 aa, Zea Mays
MRSWTLRSWCMSAGSDGLASWCFFHKKTTDMGYVSSVCLSIFCRNQKRCSTCGLILFSSVLL

SEQ ID NO: 181333 - protein, 385 aa, Zea Mays
MCKTLAALTTPHAGSMIEGNDPVTGHIISTTIGGKNGEPKKTISYMAERVVGTGSFGIVFQAKCLETGETVAIKKVLQDKRYKNRELQIMRSMDHCNAVSLKHCFFSTTSRDELFLNLVMEFVPESLHRVLKHYSNMNQRMPLIYVKLYTYQIFRGLAYIHTVPGVCHRDVKPQNLLVDPLTHQVKICDFGSAKMLVKGEANISYICSRYYRAPELIFGATEYTTSIDIWSAGCVLAELLLGQPLFPGESAVDQLVEIIKVLGTPTREEIRCMNPNYTEFRFPQIKAHPWHKIFHKRMPPEAIDLASRLLQYSPNLRCTALEACAHPFFDELREPHARLPNGRPFPPLFNFKQELANASPELINRLIPDHARRHLGLTLLPTAGP

SEQ ID NO: 181334 - protein, 392 aa, Zea Mays
MAAMPGGAHAAGAADQMQHAGSMIEGNDPVTGHIISTTIGGKNGEPKKTISYMAERVVGTGSFGIVFQAKCLETGETVAIKKVLQDKRYKNRELQIMRSMDHCNAVSLKHCFFSTTSRDELFLNLVMEFVPESLHRVLKHYSNMNQRMPLIYVKLYTYQIFRGLAYIHTVPGVCHRDVKPQNLLVDPLTHQVKICDFGSAKMLVKGEANISYICSRYYRAPELIFGATEYTTSIDIWSAGCVLAELLLGQPLFPGESAVDQLVEIIKVLGTPTREEIRCMNPNYTEFRFPQIKAHPWHKIFHKRMPPEAIDLASRLLQYSPNLRCTALEACAHPFFDELREPHARLPNGRPFPPLFNFKQELANASPELINRLIPDHARRHLGLTLLPTAGP

SEQ ID NO: 181335 - protein, 224 aa, Zea Mays
MIEGNDPVTGHIISTTIGGKNGEPKKTISYMAERVVGTGSFGIVFQAKCLETGETVAIKKVLQDKRYKNRELQIMRSMDHCNAVSLKHCFFSTTSRDELFLNLVMEFVPESLHRVLKHYSNMNQRMPLIYVKLYTYQIFRGLAYIHTVPGVCHRDVKPQNLLVDPLTHQVKICDFGSAKMLSSYLGQPSTQHQLIFGQLDVFLLSCFLASLSSLAKVLWINLLR

SEQ ID NO: 181336 - protein, 313 aa, Zea Mays
MIEGNDPVTGHIISTTIGGKNGEPKKTISYMAERVVGTGSFGIVFQAKCLETGETVAIKKVLQDKRYKNRELQIMRSMDHCNAVSLKHCFFSTTSRDELFLNLVMEFVPESLHRVLKHYSNMNQRMPLIYVKLYTYQIFRGLAYIHTVPGVCHRDVKPQNLLVDPLTHQVKICDFGSAKMLVKGEANISYICSRYYRAPELIFGATEYTTSIDIWSAGCVLAELLLGQPLFPGESAVDQLVEIIKVLGTPTREEIRCMNPNYTEFRFPQIKAHPWHKIFHKRMPPEAIDLASRLLQYSPNLRCTAVSIFCLFD

SEQ ID NO: 181337 - protein, 338 aa, Zea Mays
MPLAGVVDLRLHGHLHEQVLGKRVRHALPFCQEADSRLGLPLVPAAHEAAHGEGGNDGRHGNQPHRPGDHDAEAPAAAAADRPEEALAHGGAVQEPPLGVHHLGVDHVVRAEAVLAHHGPEPAAAEVAADADRGADPRGEPERPAALARHGVVELPERGARAGPRHAAPGVHADVAERGDVDHGEGPGARHGSVGEALVVVAAAAGPDREAVAPAAGDAGPRLGDGRRGQQQRRARRPRGREAEVLDRGVQKGRVRSGRRGVDEPGRVGGGRREARDAADEAPVEGAAAALLLRGTSLGEEQQEEEREVPGSWSHSRLRLAHHLLHLHGKGYRGEWHC

SEQ ID NO: 181338 - protein, 105 aa, Zea Mays
MPPSPSLLDLMSLPPDLSPSAEEAADSSSSEGSSCGLVQVVPRDLSDELLGKFEDTSEFGFEYSQSGLWSPLVLRPEVLATAVRDRRRRSRRSWRRKVRMVFCCC

SEQ ID NO: 181339 - protein, 102 aa, Zea Mays
MPPSPSLLDLMSLPPDLSPSAEEAADSSSSEGSSCGLVQVVPRDLSDELLGKFEDTSEFGFEYSQSGLWSPLVLRPEVLATAVRDRRRRSRRSWRRKVFCCC

SEQ ID NO: 181340 - protein, 126 aa, Zea Mays
MAPPSIDGTRRHNFLHPIHASLMEGIHADAGMYGIHVEVVEGKQNPSLTTGPFHPRRPLTIDGALQHTICSCYILIQRENTVELILQTKNCFLSSDNPPRGQNKTEKSLPLIYQSMYMLVFKTEKS

SEQ ID NO: 181341 - protein, 79 aa, Zea Mays
MYNCNNESVQLHYVTTSSLYSTGIRCDNQKISNHIQFLVNFFSSYFWSMVNMLDVFPEYKIDLIPISLLGLFSQFDSFS

SEQ ID NO: 181342 - protein, 222 aa, Zea Mays
MAGGGDHSQTNGGHVDQRALEEGRKEEFADQGCAAMVVSVPFIQKIIAEIFGTYFLMFAGCGAVTINASKNGQITFPGVAIVWGLAVMVMVYAVGHISGAHFNPAVTLAFATSGRFPWRQLPAYVLAQMLGATLASGTLRLMFGGRHEHFPGTLPTGSEVQSLVIEIITTFYLMFVISGVATDNRAIGELAGLAVGATILLNVLIAGGGKKNENKETNTSFC

SEQ ID NO: 181343 - protein, 151 aa, Zea Mays
MFNSTLTEDESSHIPVVGAIMMTDYSVKGRFQEWWIEEKVKLISLMFIRCSIEGFNQRLSSFLQILSRVDYAAPYSSLSIHVASATCPSIPIFLCAPLVLSSEAPLSCSTLEVSNLSTSLTSSKTPESLDKATNPVWCLPGARQKGLNKNH

SEQ ID NO: 181344 - protein, 221 aa, Zea Mays
MKSAYRSVMFYIGQKELEMQYKMNRIVGQCRQKCELMQAKFTEKLEEVHTAYQKMAKRCQLLEQENENLNRDKHELQEKFAEKSRQKRKLDEMYDQLRNEYESVKRSALQPANNYLARPQPDLFAGMPNVMDGGDHLRQGQRDEGWGPPPRQRHCTSGPFDLSTGSPAHAVAPPADIRPRQQTRSVFGATLNNPSSTLRNLIISPVKRPQTSRNRQHIFTL

SEQ ID NO: 181345 - protein, 437 aa, Zea Mays
MTFSTSHMIVGTQLNMNLVFKWLRSTTSKSVIYLVPVARRRIGIQNTTQPNGLAVPDATMCPVDSTSHVIELMQTGHNNRSMSATALNERSSRSHSVVTIHVQGQDLKTGNTLRGALHLVDLAGSERVDRSAVTGDRLKEAQHINKSLAALGDVIFSLSQKNAHVPYRNSKLTQVLQTSLGGHAKTLMFVQVNPDVSSYTETLSTLKFAERVSGVELGAARTNKEGKDVKELMDQLSLLKDTIAKKDDEIDQLQLANSSNSLLKSTKHGDSLLKHSASSPGMTSLGKVASFGSGAASDLDNCSDTSDRHSEAGSMLSTDEARQLSQNSADPGGDSDGRLSDISDGGIPAGAETDSSANNVVDQEQDKTSATGKERLAKAVSRVQKLTVPKVGQASSLRPKPRDPSAPKSSVTPGVRKGTTTQATPPAKASGTSKRVP

SEQ ID NO: 181346 - protein, 356 aa, Zea Mays
MSATALNERSSRSHSVVTIHVQGQDLKTGNTLRGALHLVDLAGSERVDRSAVTGDRLKEAQHINKSLAALGDVIFSLSQKNAHVPYRNSKLTQVLQTSLGGHAKTLMFVQVNPDVSSYTETLSTLKFAERVSGVELGAARTNKEGKDVKELMDQLSLLKDTIAKKDDEIDQLQLANSSNSLLKSTKHGDSLLKHSASSPGMTSLGKVASFGSGAASDLDNCSDTSDRHSEAGSMLSTDEARQLSQNSADPGGDSDGRLSDISDGGIPAGAETDSSANNVVDQEQDKTSATGKERLAKAVSRVQKLTVPKVGQASSLRPKPRDPSAPKSSVTPGVRKGTTTQATPPAKASGTSKRVP

SEQ ID NO: 181347 - protein, 223 aa, Zea Mays
MHVHYSFFFILWSCSAQSPFVCSWCKAKGSPAAATENALASTNNASQRRSPNTPVIGWPPVRAFRRNLATSSRASLEHQNGKKEDKPEQTTKRAPFVKINMDGIPIGRKIDLSALGSYDELSLSVDKLFRGLLAAQQDPLAAGAKECSQEEVAISGLLDGTGEYTLVYEDYEGDRVLVGDVPWGMFVSSVKRLRVLKTSDLSSSLTAPPGQKRTVTECPVFTS

SEQ ID NO: 181348 - protein, 64 aa, Zea Mays
MYVVPLWSSQPLDQSRSTKAKQQAITGTNQPAWEIMGLQHGNRWCVQLPPATPHQLYLCLCWLD

SEQ ID NO: 181349 - protein, 155 aa, Zea Mays
MAEPYNLAPHGVPSCHKEICNKPASSSTLHLDAEGPLYELSSLLDELPIRKGLSNYYQGKAQSFTSISDATSVQDLAKKVSYSKRMRASKSYSVGLDMNQRTIIVSRPCNKMIAKRPSNGSFARVMPGTSNTSNLNISTKSYAHQNKRVATHIDL

SEQ ID NO: 181350 - protein, 251 aa, Zea Mays
MAVRPAVRVAARLSSSRWWRAPQQAGKPSLVRLRGVDWVAAAAVAAPAGARASAGDGGWGRWPVAQAVGSGARGPDLDPVDRIYLNNWQLVRWWPVAVAVAAVGWGLCRAAEVACFCPGASLGIVLGFSWAKALATATPLGAASPVEGVVLPSTVLHGRKPRSFRTGDGGVLDVTPFLKASLLLAGVGQRIKVLEVSLVKNRSCLEWGVSCLATTTRRILPPLGPMFVVVVVFHLALCCLSWEVGAARHLC

SEQ ID NO: 181351 - protein, 191 aa, Zea Mays
MCPQTPSLSPEYSHKAGLQAVITSMPLQVRPVIQRRPRGARYNGPDHTWALGLNEAAPCEDVAAGLRQSVESCEGCPCPLCLRRTSGCSEGLERRVASLPSPQHLRPTRRGSLPGGRIRGRTDLRRLTDLRRAAYWVDGSPVPGGWIFTSAAACFFTGAAACFFDDAEAGGGRDAAAYRADGSADERISGA

SEQ ID NO: 181352 - protein, 168 aa, Zea Mays
MADDHYSSKRKYDDPSPPPRRTGFSSGPPPASPPAGGAPSYNSVAPPPDEIQLAKQRAQEIAARIFNAAEAKRPRVDNGDDDVGGFGGGSSLGGSGGGGGGRIGGAGLGFSSSAGGGHGASIPPLSSQSSAPQYSYGGHQGTSKKIEIPNGREQRFKLRETMKLNLVH

SEQ ID NO: 181353 - protein, 328 aa, Zea Mays
MADDHYSSKRKYDDPSPPPRRTGFSSGPPPASPPAGGAPSYNSVAPPPDEIQLAKQRAQEIAARIFNAAEAKRPRVDNGDDDVGGFGGGSSLGGSGGGHGASIPPLSSQSSAPQYSYGGHQGTSKKIEIPNGRVGVIIGKAGETIRYIQLQSGAKIQVTRDHEAEPGALTRQVELSGNPEQISKAEQLIKEVIAEADAGSSGAVSGGRKYNAPQPGAETFQMKIANNKVGLIIGKGGETIKSMQAKSGARIQVIPLHLPAGDTSTERTVHIDGTQEQIEHAKQLVAEVTSEVCFLSLVVSDICDCFALLCFNLSFRLLLVRSVYYIVL

SEQ ID NO: 181354 - protein, 164 aa, Zea Mays
MAGYPEDNQHALNGYDDEEVDEEGHPGRRGGRDGASGYGDAGGEDVRGAGGDSSGKIFVGGVAWETTEESFSKHFEKYGAITDSVIMKDKHTKMPRGFGFVTFSDPSVIDKVLEDEHVIDGRTVEVKRTVPREEMNTKDGPKTRKIFIGGLPASLTEVIFFVWF

SEQ ID NO: 181355 - protein, 366 aa, Zea Mays
MAGYPEDNQHALNGYDDEEVDEEGHPGRRGGRDGASGYGDAGGEDVRGAGGDSSGKIFVGGVAWETTEESFSKHFEKYGAITDSVIMKDKHTKMPRGFGFVTFSDPSVIDKVLEDEHVIDGRTVEVKRTVPREEMNTKDGPKTRKIFIGGLPASLTEDELKDHFSLYGKVLEHQIMLDHSTGRSRGFGFVTFESEDSVERVISEGRMRDLGGKQVEIKKAEPKKHGSDNIGNGRSSQGGGGYRSTYRGGGGAGSGSSGSGGGGYGFGDAYRSAAASYGYDGGAGAGYGYGRGYGYGGNAGFASGFGGGYGGSMYGGAYGAYGAYGGGAYGGGGYGTGGYGSYGGAGGTGGGSTGARGSSRYHPYGK

SEQ ID NO: 181356 - protein, 298 aa, Zea Mays
MKDKHTKMPRGFGFVTFSDPSVIDKVLEDEHVIDGRTVEVKRTVPREEMNTKDGPKTRKIFIGGLPASLTEDELKDHFSLYGKVLEHQIMLDHSTGRSRGFGFVTFESEDSVERVISEGRMRDLGGKQVEIKKAEPKKHGSDNIGNGRSSQGGGGYRSTYRGGGGAGSGSSGSGGGGYGFGDAYRSAAASYGYDGGAGAGYGYGRGYGYGGNAGFASGFGGGYGGSMYGGAYGAYGAYGGGAYGGGAYGGGAYGGSAYGGAPGGGYGTGGYGSYGGAGGTGGGSTGARGSSRYHPYGK

SEQ ID NO: 181357 - protein, 228 aa, Zea Mays
MSTVFMTQLPRTLRLMEGEQDQGLFPASTFHVAKDPPILFPFMITSPVHVDQLQGQSSYGDQHLGQHVLSESTQQFTDRTMISGSEVFPRRPSPFGQTIQSIDGDMIQPSAYDPYDIVENQRTEGLSGGGWTVSSSSSSPPAKMKIMRKATSEYPEGGAARKPRRRAQAHQDESQLLTMQQQAMGVVVRVCSDCNTTKTPLWRSGPRGPKVNYQVIGKRPDLRVRLRF

SEQ ID NO: 181358 - protein, 268 aa, Zea Mays
MPREISRSPPPFRRRGSPPLRYASRRNRRDRSRSPYASRRKTRSPSPLWDRSNSPSPRRHRSPLSPRRHRRQRSRSTTSSLENNPSSPSHASEKINSSVKQRLEEEKKRYPCPLLSSRRQKEAEFKLLEEELARRVEEAIRKNVEERLKSEEVKRDIEHRIEEGIRKLFDEVDAQLQKEKAVALYEARQKAEQERREREELDRMLEENRRKVEEAQRKEALEQQQKELERYLELERIQRQREEALRRKKMEEEEERANKLRLLGKNRG

SEQ ID NO: 181359 - protein, 162 aa, Zea Mays
MCCTAALLYNPRRQKEAEFKLLEEELARRVEEAIRKNVEERLKSEEVKRDIEHRIEEGIRKLFDEVDAQLQKEKAVALYEARQKAEQERREREELDRMLEENRRKVEEAQRKEALEQQQKELERYLELERIQRQREEALRRKKMEEEEERANKLRLLGKNRG

SEQ ID NO: 181360 - protein, 616 aa, Zea Mays
MDMVAIPDFAAGAMENYGLVTYRETALLFDEMHSAAANKQRVAVVVAHELAHQWFGNLVTMEWWTHLWLNEGFATWVSYLAADQFFPEWNVWTQFLEESTVGFKLDALAGSHPIEVDINHVDEIDEIFDAISYRKGASVIRMLQNYLGAEVFQNSLAAYIKRFAYSNAKTEDLWAALEEGSGEPVRTLMHSWTKQQGYPVINVKLKDGKFQLEQTQFLSSGSTGVGQWVVPITLCCCSYSRQAKFLFHGKQEDFDLSASGFTDCQKKDGFWIKLNVNQTSFYRVSYDEELAARLRYAIETNKLGAADRYGVLDDAYALCMAGKQKLVSLLHLISVYKDETEYTVLAHIITTSLHIAEMMVIAAPEELVHLKKFLIDFLEPFALKLGWDAKSDEGHLNALLRGTLLTALAELGHEATINEAVRRFNVFLEDRETPLLPPDVRKAAYVALMQTVSKSNKTGYESLLRIYRETDLSQEKVRVLGSLASSPDHDVVREVLNFILSPEVRNQDAIFLLRGVSSGAHEVAWQWLKFQENWDYILGAYSGTLLTYFVNITVSPLATDEHGDEAEEFFKSRTKANIARTVRQSIERVRINAQWVKNIKAEADLGNVLKKLAYKH

SEQ ID NO: 181361 - protein, 446 aa, Zea Mays
MDMVAIPDFAAGAMENYGLVTYRETALLFDEMHSAAANKQRVAVVVAHELAHQWFGNLVTMEWWTHLWLNEGFATWVSYLAADQFFPEWNVWTQFLEESTVGFKLDALAGSHPIEVDINHVDEIDEIFDAISYRKGASVIRMLQNYLGAEVFQNSLAAYIKRFAYSNAKTEDLWAALEEGSGEPVRTLMHSWTKQQGYPVINVKLKDGKFQLEQTQFLSSGSTGVGQWVVPITLCCCSYSRQAKFLFHGKQEDFDLSASGFTDCQKKDGFWIKLNVNQTSFYRVSYDEELAARLRYAIETNKLGAADRYGVLDDAYALCMAGKQKLVSLLHLISVYKDETEYTVLAHIITTSLHIAEMMVIAAPEELVHLKKFLIDFLEPFALKLGWDAKSDEGHLNALLRGTLLTALAELGHEATINEAVRRFNVFLEDRETPLLPPDVRKHMLL

SEQ ID NO: 181362 - protein, 523 aa, Zea Mays
MWKISPQMVLGYFAVPYPLPKMDMVAIPDFAAGAMENYGLVTYRETALLFDEMHSAAANKQRVAVVVAHELAHQWFGNLVTMEWWTHLWLNEGFATWVSYLAADQFFPEWNVWTQFLEESTVGFKLDALAGSHPIEVDINHVDEIDEIFDAISYRKGASVIRMLQNYLGAEVFQNSLAAYIKRFAYSNAKTEDLWAALEEGSGEPVRTLMHSWTKQQGYPVINVKLKDGKFQLEQTQFLSSGSTGVGQWVVPITLCCCSYSRQAKFLFHGKQEDFDLSASGFTDCQKKDGFWIKLNVNQTSFYRVSYDEELAARLRYAIETNKLGAADRYGVLDDAYALCMAGKQKLVSLLHLISVYKDETEYTVLAHIITTSLHIAEMMVIAAPEELVHLKKFLIDFLEPFALKLGWDAKSDEGHLNALLRGTLLTALAELGHEATINEAVRRFNVFLEDRETPLLPPDVRKAAYVALMQTVSKSNKTGYESLLRIYRETDLSQEKVRVLGKSMFFFLLPFNDELVFFLGPH

SEQ ID NO: 181363 - protein, 737 aa, Zea Mays
MAAEQTAEQFRGQARLPHFASPRRYDLRLTPDLPACVFTGSVAVSIGVAAPTRFLVLNAAELDVATGGVSFAPQGSDQVLQPLEVTNVPEDEILIIRFNEVLSIGEGTLTIAFKGTLNDKMHGFYRSVYELNGEKKNMAVTQFEPADARRCFPCWDEPAFKAVFKITLEVPSETIALSNMPVIEEKVLGYFAVPYPLPKMDMVAIPDFAAGAMENYGLVTYRETALLFDEMHSAAANKQRVAVVVAHELAHQWFGNLVTMEWWTHLWLNEGFATWVSYLAADQFFPEWNVWTQFLEESTVGFKLDALAGSHPIEVDINHVDEIDEIFDAISYRKGASVIRMLQNYLGAEVFQNSLAAYIKRFAYSNAKTEDLWAALEEGSGEPVRTLMHSWTKQQGYPVINVKLKDGKFQLEQTQFLSSGSTGVGQWVVPITLCCCSYSRQAKFLFHGKQEDFDLSASGFTDCQKKDGFWIKLNVNQTSFYRVSYDEELAARLRYAIETNKLGAADRYGVLDDAYALCMAGKQKLVSLLHLISVYKDETEYTVLAHIITTSLHIAEMMVIAAPEELVHLKKFLIDFLEPFALKLGWDAKSDEGHLNALLRGTLLTALAELGHEATINEAVRRFNVFLEDRETPLLPPDVRKAAYVALMQTVSKSNKTGYESLLRIYRETDLSQEKVRVLGSLASSPDHDVVREVLNFILSPEVRNQDAIFLLRGVSSGAHEVAWQWLKVFTVVLIFL

SEQ ID NO: 181364 - protein, 810 aa, Zea Mays
MAAEQTAEQFRGQARLPHFASPRRYDLRLTPDLPACVFTGSVAVSIGVAAPTRFLVLNAAELDVATGGVSFAPQGSDQVLQPLEVTNVPEDEILIIRFNEVLSIGEGTLTIAFKGTLNDKMHGFYRSVYELNGEKKNMAVTQFEPADARRCFPCWDEPAFKAVFKITLEVPSETIALSNMPVIEEKVLGYFAVPYPLPKMDMVAIPDFAAGAMENYGLVTYRETALLFDEMHSAAANKQRVAVVVAHELAHQWFGNLVTMEWWTHLWLNEGFATWVSYLAADQFFPEWNVWTQFLEESTVGFKLDALAGSHPIEVDINHVDEIDEIFDAISYRKGASVIRMLQNYLGAEVFQNSLAAYIKRFAYSNAKTEDLWAALEEGSGEPVRTLMHSWTKQQGYPVINVKLKDGKFQLEQTQFLSSGSTGVGQWVVPITLCCCSYSRQAKFLFHGKQEDFDLSASGFTDCQKKDGFWIKLNVNQTSFYRVSYDEELAARLRYAIETNKLGAADRYGVLDDAYALCMAGKQKLVSLLHLISVYKDETEYTVLAHIITTSLHIAEMMVIAAPEELVHLKKFLIDFLEPFALKLGWDAKSDEGHLNALLRGTLLTALAELGHEATINEAVRRFNVFLEDRETPLLPPDVRKAAYVALMQTVSKSNKTGYESLLRIYRETDLSQEKVRSLASSPDHDVVREVLNFILSPEVRNQDAIFLLRGVSSGAHEVAWQWLKENWDYILGAYSGTLLTYFVNITVSPLATDEHGDEAEEFFKSRTKANIARTVRQSIERVRINAQWVKNIKAEADLGNVLKKLAYKH

SEQ ID NO: 181365 - protein, 613 aa, Zea Mays
MDMVAIPDFAAGAMENYGLVTYRETALLFDEMHSAAANKQRVAVVVAHELAHQWFGNLVTMEWWTHLWLNEGFATWVSYLAADQFFPEWNVWTQFLEESTVGFKLDALAGSHPIEVDINHVDEIDEIFDAISYRKGASVIRMLQNYLGAEVFQNSLAAYIKRFAYSNAKTEDLWAALEEGSGEPVRTLMHSWTKQQGYPVINVKLKDGKFQLEQTQFLSSGSTGVGQWVVPITLCCCSYSRQAKFLFHGKQEDFDLSASGFTDCQKKDGFWIKLNVNQTSFYRVSYDEELAARLRYAIETNKLGAADRYGVLDDAYALCMAGKQKLVSLLHLISVYKDETEYTVLAHIITTSLHIAEMMVIAAPEELVHLKKFLIDFLEPFALKLGWDAKSDEGHLNALLRGTLLTALAELGHEATINEAVRRFNVFLEDRETPLLPPDVRKAAYVALMQTVSKSNKTGYESLLRIYRETDLSQEKVRSLASSPDHDVVREVLNFILSPEVRNQDAIFLLRGVSSGAHEVAWQWLKFQENWDYILGAYSGTLLTYFVNITVSPLATDEHGDEAEEFFKSRTKANIARTVRQSIERVRINAQWVKNIKAEADLGNVLKKLAYKH

SEQ ID NO: 181366 - protein, 635 aa, Zea Mays
MWKISPQMVLGYFAVPYPLPKMDMVAIPDFAAGAMENYGLVTYRETALLFDEMHSAAANKQRVAVVVAHELAHQWFGNLVTMEWWTHLWLNEGFATWVSYLAADQFFPEWNVWTQFLEESTVGFKLDALAGSHPIEVDINHVDEIDEIFDAISYRKGASVIRMLQNYLGAEVFQNSLAAYIKRFAYSNAKTEDLWAALEEGSGEPVRTLMHSWTKQQGYPVINVKLKDGKFQLEQTQFLSSGSTGVGQWVVPITLCCCSYSRQAKFLFHGKQEDFDLSASGFTDCQKKDGFWIKLNVNQTSFYRVSYDEELAARLRYAIETNKLGAADRYGVLDDAYALCMAGKQKLVSLLHLISVYKDETEYTVLAHIITTSLHIAEMMVIAAPEELVHLKKFLIDFLEPFALKLGWDAKSDEGHLNALLRGTLLTALAELGHEATINEAVRRFNVFLEDRETPLLPPDVRKAAYVALMQTVSKSNKTGYESLLRIYRETDLSQEKVRVLGSLASSPDHDVVREVLNFILSPEVRNQDAIFLLRGVSSGAHEVAWQWLKENWDYILGAYSGTLLTYFVNITVSPLATDEHGDEAEEFFKSRTKANIARTVRQSIERVRINAQWVKNIKAEADLGNVLKKLAYKH

SEQ ID NO: 181367 - protein, 56 aa, Zea Mays
MVLLHSYTCCTKGCDMYIHSKSANKSSLLCCNQILFCVANKTCQDFWLFLDYKYAW

SEQ ID NO: 181368 - protein, 209 aa, Zea Mays
MMKSLALDILTLSGLCSGEEEASLSGPRLGPLLPSSSIARHLNDSVRRCFLIHARRGGGGGYLVGREAGEGHDVRRLGRRLSQGSGTMGAPERGGAHGGEGVRARMALPDGAEGAGAHRRRGRGREAGAWRCRRGAQQPRPRRRRKARAWTCARGSTDAGRGSCDCVYGRLPKEGVLGAMMAVRLEHDVPEIARGGGRAEPQCTCGRLQ

SEQ ID NO: 181369 - protein, 201 aa, Zea Mays
MPSHGDLDRQIAQLRDCKYLPEAEVKALCEQAKAILMEEWNVQPVRCPVTVCGDIHGQFYDLIELFRIGGDAPDTNYLFMGDYVDRGYYSVETVSLLVALKVRYRDRITILRGNHESRQITQVYGFYDECLRKYGNANVWKYFTDLFDFLPLTALIENQVFCLHGGLSPSLDTLDNIRSLDRVQEIAKLAQRDSTKARFLK

SEQ ID NO: 181370 - protein, 293 aa, Zea Mays
MKKLPSQGWRLACPAEARRAVSPCAPSSQNQKKFSKLLETSLRLLLQPKPRSRNPRRALLRMDHHWRFPAVAGADFCPGPGFIYRPQSEQNLIDGRMTSAHYSLENSNVTVINACDLFKQPLRGSRPDHIVVILRGLPGSGKSYLAKALRDLEVDNGANAPRIHSMDDYFMIEVEKKVEDTEGPKSSSASKGRRQLTKKVIEYCYEPEMEETYRSSMLKAFSKTLDEGNFTFVIGMELFRAAYINHYCPIPICNIFFSWLFLQYCGGAFKIYGLTKHFTMLYFFFLSHHQCYI

SEQ ID NO: 181371 - protein, 519 aa, Zea Mays
MKKLPSQGWRLACPAEARRAVSPCAPSSQNQKKFSKLLETSLRLLLQPKPRSRNPRRALLRMDHHWRFPAVAGADFCPVCSVRHFPFCPPPPLPPHPFPYDLQPPPPPPPPNPFPYDFHPPPPPPLMWAPPPPGPHDPRSYDLPGWEGPHKRMRLGEAPPFDPYDFVPPPPPGRASVEGDRLLGLIRDHGRNPLPGCLPDGGFGYGGGRLYPRQGCDFADFDQKLPPPMLNDNGFGQGFVPDEGPHRKYFDGANHHFHQFHPEPLPGAPLHPPLPRYPDPHGSHAWHVEAGAVPRPAEPPFPSNHDYRAAPPRLTANSSLFPVLSGSPTTENFPSTAGTLPPAHPMPNKNRHDGHINDEGPGFIYRPQSEQNLIDGRMTSAHYSLENSNVTVINACDLFKQPLRGSRPDHIVVILRGLPGSGKSYLAKALRDLEVDNGANAPRIHSMDDYFMIEVEKKVEDTEGPKSSSASKGRRQLTKKVIEYCYEPEMEETYRSSMLKAFSKTLDEGNFTFVIEIRL

SEQ ID NO: 181372 - protein, 104 aa, Zea Mays
MSSSLISSLFLREEAKLAHIALSPCLLALALSSQAWSSPKLRLPALSLTAALSSTCNSPLSPPLPMAAPPGSLPAQTLSRGWCRPFLQPAVVSPHCSWSQSSPP

SEQ ID NO: 181373 - protein, 894 aa, Zea Mays
MPLRLDIKRKLAQRSERVKSVDLHPTEPWILSSLYSGSVCVWNYQTQTMVKSFEVTDLPVRSAKFIARKQWVVAGADDMFIRVYNYNTMDKVKVFEAHTDYIRCVAVHPTQPFVLSSSDDMLIKLWDWDKGWVCTQIFEGHSHYVMQVTFNPKDTNTFASASLDRTIKIWSLGSPDPNFTLDGHSKGVNCVDYFTGGDRPYLITGSDDQTAKVWDYQTKSCVQTLEGHAHNVSAVCFHPELPIIITGSEDGTVRMWHSTTYRLENTLNYGLERVWALGYMKGSRRVVIGYDEGTIMIKIGREVPVASMDSSGKIIWAKHNEIQTVNIKSVGADNEIADGDRLPLAVKELGSCDLYPQSLRHNPNGRFVVVCGDGEYIIYTALAWRNRSFGSALEFVWSTDGEYAIRESTSRIKIYSKNFQERKSIRPSFSVERIFGGVLLAMCTNDFICFYDWVECRLIRRIDVNVKNLYWADSGDLVTIASDTSFYILKYNRDVVSSHLDGGGSAAEEGVEDAFELLHEINERVRTGLWVGDCFIYNNSSWRLNYCVGGEVTTLFHLDRPMYLLGYLANQSRVYLIDKQFNVVGYTLLLSLIEYKTLVMRGDFDRANDVLSSIPKEQYDSVARFLESRGMLEEALEIATDTNYRFDLAVQLGRLEIAKVIATEVQSESKWKQLGELAMSNGKLEMAEECLLHAMDLSGLLLLYSSLGDAEGINKLASVAKEQGKNNVSFLCFFMLGKLEECLQLLIESNRIPEAALMARSYLPSKVPEIVALWKKDLQKVNPKAAESLADPNEYPNLFEDWQIALNVEAAVAPKRVIYPPAEEYMIHAERSNENLVEAFKNMHVQEEMVPDDNEEYVHEVIEDGGVEESQEDAVEVDAEDDGVEESQDEAVEC

SEQ ID NO: 181374 - protein, 70 aa, Zea Mays
MHIITMWSLKSPCSNLGSTQVWGDEEDGVDLDNELNYTVYTRQCPRACVAAVGIRGDVDISSYSRHEPHH

SEQ ID NO: 181375 - protein, 165 aa, Zea Mays
MRGESKNAIRNVHENKNGRYMNGRTQDDHYQDLKGLDPTPDSWKNGCQQSEGYGIQDSICDDGHTETAKTKKKMDESLEPSGENNNCEQVEISSKDGKKVPMKLEVSSGVQTTSSIMEQEVHSGFVGVEWHMRVAFACSVCGQRTTRAINPHAYTNETVFVQVRL

SEQ ID NO: 181376 - protein, 195 aa, Zea Mays
MRGESKNAIRNVHENKNGRYMNGRTQDDHYQDLKGLDPTPDSWKNGCQQSEGYGIQDSICDDGHTETAKTKKKMDESLEPSGENNNCEQVEISSKDGKKVPMKLEVSSGVQTTSSIMEQEVHSGFVGVEESVTSRHPQLHYESKLYMLLQGGIGIPHLKWFGVEGQYNVMVIDLLGPTMETYLTAAAESSHLKQY

SEQ ID NO: 181377 - protein, 233 aa, Zea Mays
MRGESKNAIRNVHENKNGRYMNGRTQDDHYQDLKGLDPTPDSWKNGCQQSEGYGIQDSICDDGHTETAKTKKKMDESLEPSGENNNCEQVEISSKDGKKVPMKLEVSSGVQTTSSIMEQEVHSGFVGVEWHMRVAFACSVCGQRTTRAINPHAYTNETVFVQGVQKHEEGGIGIPHLKWFGVEGQYNVMLCMNRVCKFHFPSKNLVSFLVVELILQTDKCFLSSGNSTQWTES

SEQ ID NO: 181378 - protein, 228 aa, Zea Mays
MRGESKNAIRNVHENKNGRYMNGRTQDDHYQDLKGLDPTPDSWKNGCQQSEGYGIQDSICDDGHTETAKTKKKMDESLEPSGENNNCEQVEISSKDGKKVPMKLEVSSGVQTTSSIMEQEVHSGFVGVEWHMRVAFACSVCGQRTTRAINPHAYTNETVFVQESVTSRHPQLHYESKLYMLLQGGIGIPHLKWFGVEGQYNVMVIDLLGPTMETYLTAAAESSHLKQY

SEQ ID NO: 181379 - protein, 276 aa, Zea Mays
MRAADGAVVNTFVGLEGQFVSCYEAALGKPVWTLGPLCLRERDADAMSSRGADGGQQHSAVAAWLDSKETGSVVFVSFGSLARKLPKQLFEVGHGLEDSGRPFLWVVKLAEASPPEVREWLGALEARAAGRGLVVRGWAPQLAILSHRAVGGFVTHCGWNSLLESVAHGVPVVTWPHFADQFLNERLAVDVLGVGVPIGVTAPVMVFDDESVVVARGDVARAVSALMGEGKEAGERRRRAREYGEKAHGAMEKGGSSYENLTQLIESFGQVEARKG

SEQ ID NO: 181380 - protein, 264 aa, Zea Mays
MALLQHQQLQQQRRQLEEEDDVRRGGGVPGSAGPRGRYMNGRTQDDHYQDLKGLDPTPDSWKNGCQQSEGYGIQDSICDDGHTETAKTKKKMDESLEPSGENNNCEQVEISSKDGKKVPMKLEVSSGVQTTSSIMEQEVHSGFVGVEWHMRVAFACSVCGQRTTRAINPHAYTNETVFVQGVQKHEEGGIGIPHLKWFGVEGQYNVMLCMNRVCKFHFPSKNLVSFLVVELILQTDKCFLSSEDGQDEFEKRTKKTKKKRKRVL

SEQ ID NO: 181381 - protein, 232 aa, Zea Mays
MALLQHQQLQQQRRQLEEEDDVRRGGGVPGSAGPRGRYMNGRTQDDHYQDLKGLDPTPDSWKNGCQQSEGYGIQDSICDDGHTETAKTKKKMDESLEPSGENNNCEQVEISSKDGKKVPMKLEVSSGVQTTSSIMEQEVHSGFVGVEWHMRVAFACSVCGQRTTRAINPHAYTNETVFVQGVQKHEEGGIGIPHLKWFGVEGQYNVMVIDLLGPTMETYLTAAAESSHLKQY

SEQ ID NO: 181382 - protein, 336 aa, Zea Mays
MALLQHQQLQQQRRQLEEEDDVRRGGGVPGSAGPRGRYMNGRTQDDHYQDLKGLDPTPDSWKNGCQQSEGYGIQDSICDDGHTETAKTKKKMDESLEPSGENNNCEQVEISSKDGKKVPMKLEVSSGVQTTSSIMEQEVHSGFVGVEWHMRVAFACSVCGQRTTRAINPHAYTNETVFVQGVQKHEEGGIGIPHLKWFGVEGQYNVMLCMNRVCKFHFPSKNLVSFLVVELILQTDKCFLSSEDGQDEFEKRTKKTKKKRKRYLHLFLLGINVNSVVEEQRCQDASRLLQNKWIIVRWSWDWNLLCIYRVKPSCLLTGKSLTFLGTWTTDGPCHSP

SEQ ID NO: 181383 - protein, 171 aa, Zea Mays
MRVAFACSVCGQRTTRAINPHAYTNETVFVQGVQKHEEGGIGIPHLKWFGVEGQYNVMLCMNRVCKFHFPSKNLVSFLVVELILQTDKCFLSSEDGQDEFEKRTKKTKKKRKRYLHLFLLGINVNSVVEEQRCQDASRLLQNKWVKPSCLLTGKSLTFLGTWTTDGPCHSP

SEQ ID NO: 181384 - protein, 401 aa, Zea Mays
MATHAGENGSGHENGGGHAEWRFARAAKEGALAVAGDKMSIRAVRFKISASLDARDPRPVLPLAHGDPSVFPAFRTAAEAEDAVAAALRTGKFNCYPAGVGLPEARRALAEHLSSDLPYKLSSDDIFVTAGGTQAIEVVVSVLAQPGTNILLPRPGYPNYEARAGLHNLEVRRFNLIPERGWEIDIDGLESIADKNTTAMVIINPNNPCGSVYTREHLAKVAEVARKLGILVIADEVYGNLVFGDTPFVPMGVFGHIAPVLTIGSLSKRWIVPGWRLGWVAVCDPNKVLQETKIIASITNFLNVSTDPATFVQGALPHILKNTKEDFFKRIIGLLAETSEICFSGIKDIKCITCPHKPEGSMFVMVKLNLYLLESIHDDIDFCCKLAKEESVILCPAIVCF

SEQ ID NO: 181385 - protein, 371 aa, Zea Mays
MATHAGENGSGHENGGGHAEWRFARAAKEGALAVAGDKMSIRAVRFKISASLDARDPRPVLPLAHGDPSVFPAFRTAAEAEDAVAAALRTGKFNCYPAGVGLPEARRALAEHLSSDLPYKLSSDDIFVTAGGTQAIEVVVSVLAQPGTNILLPRPGYPNYEARAGLHNLEVRRFNLIPERGWEIDIDGLESIADKNTTAMVIINPNNPCGSVYTREHLAKVAEVARKLGILVIADEVYGNLVFGDTPFVPMGVFGHIAPVLTIGSLSKRWIVPGWRLGWVAVCDPNKVLQETKIIASITNFLNVSTDPATFVQGALPHILKNTKEDFFKRIIGLLAETSEICFSGIKDIKCITCPHKPEGETKFVSFGEHP

SEQ ID NO: 181386 - protein, 431 aa, Zea Mays
MATHAGENGSGHENGGGHAEWRFARAAKEGALAVAGDKMSIRAVRFKISASLDARDPRPVLPLAHGDPSVFPAFRTAAEAEDAVAAALRTGKFNCYPAGVGLPEARRALAEHLSSDLPYKLSSDDIFVTAGGTQAIEVVVSVLAQPGYPNYEARAGLHNLEVRRFNLIPERGWEIDIDGLESIADKNTTAMVIINPNNPCGSVYTREHLAKVAEVARKLGILVIADEVYGNLVFGDTPFVPMGVFGHIAPVLTIGSLSKRWIVPGWRLGWVAVCDPNKVLQETKIIASITNFLNVSTDPATFVQGALPHILKNTKEDFFKRIIGLLAETSEICFSGIKDIKCITCPHKPEGSMFVMVKLNLYLLESIHDDIDFCCKLAKEESVILCPGSVLGMENWIRITFAIDSSSLLDGLERLKSFCQRHKKKNLLNGH

SEQ ID NO: 181387 - protein, 186 aa, Zea Mays
MDSDLWISRLTAAKRQFALQRAQRQHAAPASHHDHDVASLCAHLEDEHPFESKIVKHQRVRRVTGNGNHNLSYAGRDLQLQETYLKVLLGNSSRSSSTNASSTVTDSLLPSLVLNLSSPEVEDASKFSAPAVVENNWFKRSLPSKTWKLRTVDSTLSHEERERRRRRAAVRSAFVQHLLVTTIFED

SEQ ID NO: 181388 - protein, 331 aa, Zea Mays
MAAAPPAAEAALLLLLALLALAAVALRRGDALSLDLYDVTCPEVEAAVTAAVRQAMANDRTVAAGLLRMHFHDCFVRQGCDGSVLLDSTATVTAEKDGPPNASLHAFYVIDNAKRAVEALCPGVVSCADILALAARDAVALSGGPWWVVPVGRRDGRVSLANETTAALPGPTASFDQLKQAFHGRGLSTKDLVALSGAHTLGFAHCSSFQNRILRAQQGVAAADDPSLSPSFAAALRRACPANNTVRAAGSALDATSAAFDNTYYRMLQAGRGLLSSDEALLTHPKTRAFVALYAASQEAFFRAFTKSMLRMAGLNGGQEVRANCRRVNPS

SEQ ID NO: 181389 - protein, 553 aa, Zea Mays
MPPFRMPSHFLALPLLLLLLLQAPSPEAAESTPGTRTRKIGSSGASSVFSLFNLKDKSKFWTESIIRKEFDDLEGSASRDSSKNGLLNFTRAGNIANYLSLAEVDSIYLPIPVNFIFIGFDGNGRHEFKLGPEELERWFTKIDHIFEHTRIPPVGEVLTPFYKTTVKKLQHYDLPLVSHVNHNFSVHAIHMGEDVLSVFEHAIKVLSCKDDLVDSRENEEIFLQVDSAQMEHIFSTLVDHLQIQEAYNIFVLNPKPIGKRINYGYRKGFSESEINLLRENKTLQARILQSKSDNKLFLDIEKGVNRRPLYESHPLSSFSWTRTDSMDMGDWSKKCKEALSKFELLKEGKSKEDIVYEKAVQILHGTKDEVHDIVQSALKSSDLKGLHAQCLTDIWIGRERFAFVDLSAGPFAWGPSVGGDGVRTELSLPNVAKTVGAVAEVTEEEAEEKLQDTIRERFSSFGEDYHAVDILLAEIDVYELFAFKHCVGRRIQLALCKELDERMHDLKKELEGYNTGDFDETNKKKALDALKRMESWNLFRDTSVYSDDRVNLL

SEQ ID NO: 181390 - protein, 952 aa, Zea Mays
MPPFRMPSHFLALPLLLLLLLQAPSPEAAESTPGTRTRKIGSSGASSVFSLFNLKDKSKFWTESIIRKEFDDLEGSASRDSSKNGLLNFTRAGNIANYLSLAEVDSIYLPIPVNFIFIGFDGNGRHEFKLGPEELERWFTKIDHIFEHTRIPPVGEVLTPFYKTTVKKLQHYDLPLVSHVNHNFSVHAIHMGEDVLSVFEHAIKVLSCKDDLVDSRENEEIFLQVDSAQMEHIFSTLVDHLQIQEAYNIFVLNPKPIGKRINYGYRKGFSESEINLLRENKTLQARILQSKSDNKLFLDIEKGVNRRPLYESHPLSSFSWTRTDSMDMGDWSKKCKEALSKFELLKEGKSKEDIVYEKAVQILHGTKDEVHDIVQSALKSSDLKGLHAQCLTDIWIGRERFAFVDLSAGPFAWGPSVGGDGVRTELSLPNVAKTVGAVAVTEEEAEEKLQDTIRERFSSFGEDYHAVDILLAEIDVYELFAFKHCVGRRIQLALCKELDERMHDLKKELEGYNTGDFDETNKKKALDALKRMESWNLFRDTSVEHHSYTVAHDSFLAQLGSMLWGSMRHVIAPSASHRVYHYYEKLSFQLYFVTREKVRSIKQLPVNVKSIRESLNSVLLHHQNSMFSQNMLSLSEDPSLMMAFSMARRAAAVPLLLVNGTYKSTVSTYLDSAILQHQLQKLNEHNSLKGRHSNHRSTLEVPIFWFIHNEPILLDKHYQAKALSNMVVVVQSDDDSWESHLQCNGRPILWDLRKPVKAAIAATAEYVSGLLPPHLVYSHAHETAIEDWTWSVGCNPSAVTSEGSQLSEFQQDVIARNYIITSVEESIQVINSAIQQLVIERTTEKGFKIFKAHESKMVEKYNAVVSLWRRVSAMSKGLRYGDAVKLMSMLEDASNGFSSAVNSTISSLHPVQCTRERKVDVQLDLTTLPAFLAVFLLLWFLLRPRRPKPKIN

SEQ ID NO: 181391 - protein, 845 aa, Zea Mays
MPPFRMPSHFLALPLLLLLLLQAPSPEAAESTPGTRTRKIGSSGASSVFSLFNLKDKSKFWTESIIRKEFDDLEGSASRDSSKNGLLNFTRAGNIANYLSLAEVDSIYLPIPVNFIFIGFDGNGRHEFKLGPEELERWFTKIDHIFEHTRIPPVGEVLTPFYKTTVKKLQHYDLPLVSHVNHNFSVHAIHMGEDVLSVFEHAIKVLSCKDDLVDSRENEEIFLQVDSAQMEHIFSTLVDHLQIQEAYNIFVLNPKPIGKRINYGYRKGFSESEINLLRENKTLQARILQSKSDNKLFLDIEKGVNRRPLYESHPLSSFSWTRTDSMDMGDWSKKCKEALSKFELLKEGKSKEDIVYEKAVQILHGTKDEVHDIVQSALKSSDLKGLHAQCLTDIWIGRERFAFVDLSAGPFAWGPSVGGDGVRTELSLPNVAKTVGAVAEVTEEEAEEKLQDTIRERFSSFGEDYHAVDILLAEIDVYELFAFKHCVGRRIQLALCKELDERMHDLKKELEGYNTGDFDETNKKKALDALKRMESWNLFRDTSVEHHSYTVAHDSFLAQLGSMLWGSMRHVIAPSASHRVYHYYEKLSFQLYFVTREKVRSIKQLPVNVKSIRESLNSVLLHHQNSMFSQNMLSLSEDPSLMMAFSMARRAAAVPLLLVNGTYKSTVSTYLDSAILQHQLQKLNEHNSLKGRHSNHRSTLEVPIFWFIHNEPILLDKHYQAKALSNMVVVVQSDDDSWESHLQCNGRPILWDLRKPVKAAIAATAEYVSGLLPPHLVYSHAHETAIEDWTWSVGCNPSAVTSEGSQLSEFQQDVIARNYIITSVEESIQVINSAIQQLVIERTIS

SEQ ID NO: 181392 - protein, 593 aa, Zea Mays
MILHGTKDEVHDIVQSALKSSDLKGLHAQCLTDIWIGRERFAFVDLSAGPFAWGPSVGGDGVRTELSLPNVAKTVGAVAEVTEEEAEEKLQDTIRERFSSFGEDYHAVDILLAEIDVYELFAFKHCVGRRIQLALCKELDERMHDLKKELEGYNTGDFDETNKKKALDALKRMESWNLFRDTSVEHHSYTVAHDSFLAQLGSMLWGSMRHVIAPSASHRVYHYYEKLSFQLYFVTREKVRSIKQLPVNVKSIRESLNSVLLHHQNSMFSQNMLSLSEDPSLMMAFSMARRAAAVPLLLVNGTYKSTVSTYLDSAILQHQLQKLNEHNSLKGRHSNHRSTLEVPIFWFIHNEPILLDKHYQAKALSNMVVVVQSDDDSWESHLQCNGRPILWDLRKPVKAAIAATAEYVSGLLPPHLVYSHAHETAIEDWTWSVGCNPSAVTSEGSQLSEFQQDVIARNYIITSVEESIQVINSAIQQLVIERTTEKGFKIFKAHESKMVEKYNAVVSLWRRVSAMSKGLRYGDAVKLMSMLEDASNGFSSAVNSTISSLHPVQCTRERKVDVQLDLTTLPAFLAVFLLLWFLLRPRRPKPKIN

SEQ ID NO: 181393 - protein, 628 aa, Zea Mays
MDMGDWSKKCKEALSKFELLKEGKSKEDIVYEKAVQILHGTKDEVHDIVQSALKSSDLKGLHAQCLTDIWIGRERFAFVDLSAGPFAWGPSVGGDGVRTELSLPNVAKTVGAVAEVTEEEAEEKLQDTIRERFSSFGEDYHAVDILLAEIDVYELFAFKHCVGRRIQLALCKELDERMHDLKKELEGYNTGDFDETNKKKALDALKRMESWNLFRDTSVEHHSYTVAHDSFLAQLGSMLWGSMRHVIAPSASHRVYHYYEKLSFQLYFVTREKVRSIKQLPVNVKSIRESLNSVLLHHQNSMFSQNMLSLSEDPSLMMAFSMARRAAAVPLLLVNGTYKSTVSTYLDSAILQHQLQKLNEHNSLKGRHSNHRSTLEVPIFWFIHNEPILLDKHYQAKALSNMVVVVQSDDDSWESHLQCNGRPILWDLRKPVKAAIAATAEYVSGLLPPHLVYSHAHETAIEDWTWSVGCNPSAVTSEGSQLSEFQQDVIARNYIITSVEESIQVINSAIQQLVIERTTEKGFKIFKAHESKMVEKYNAVVSLWRRVSAMSKGLRYGDAVKLMSMLEDASNGFSSAVNSTISSLHPVQCTRERKVDVQLDLTTLPAFLAVFLLLWFLLRPRRPKPKIN

SEQ ID NO: 181394 - protein, 89 aa, Zea Mays
MALEHGPGIPKVQNTGWQGTRFQKIAILTHPQVVAELECHENFNSFSPVLVPGLANSSSFRVRPCSFVSDWWVGTIPGRIASLIYINFD

SEQ ID NO: 181395 - protein, 53 aa, Zea Mays
MVGLECCRIPSLAQLLFRPIIYPGMDLKFNATPAPGEQTTFKWDIDHGCKMLS

SEQ ID NO: 181396 - protein, 57 aa, Zea Mays
MQTVEMVLVEDLHGTYVGVGCAASSRPSSIGPSRILWLKNSMLILEEEIIATPVWFG

SEQ ID NO: 181397 - protein, 50 aa, Zea Mays
MAFAAGGTSRFVNRAECICLIHKINDAPTPSSVFYLLEHISNLACITCGW

SEQ ID NO: 181398 - protein, 104 aa, Zea Mays
MVGLECCRIPSLAQLLFRYVGSSHMILQSLSSIFQQIEEGESYPSDDCSFFVLRTFSVQVFVLFVPRFLLSFFELSLLVFLLFWSFLILPVSLFSDRLYIQVWT

SEQ ID NO: 181399 - protein, 85 aa, Zea Mays
MADDANRAAFMELQSRMIDTTAKIKQLQTQMRSKEGEKKRAYLTLEELRQLPDDTNTYKTVGLFWSRSQFCSMSRSKSLMTVRVR

SEQ ID NO: 181400 - protein, 535 aa, Zea Mays
MRAGAYTVHQSLTAEAAAALQLSLGLARRRGHAQVTPLHVAYTLLGGSEPPPSSSSPRLFTTIAASAPAYGLLVRACARSRRQTHPAQQCRALELCFNVALNRLPTGTANAGGLGSSPSPATSFAASLLQQQPASPTLSNALVAALKRAQANQRRGCVELQSQPSPPPPPPGQQPHSTTSPSHQQQQPVLTIKVELDQLIVSILDDPSVSRVMREAGFSSAAVKASLEEESAAMLAALGNHQVHHHGASSTPPPPPPSSHHPPTAAGLVLPPRHFFLLDPYGGGGFPAHAGACSGAPWAAPFPSVHSRHPPEPDDVNSEPPCEAEAEDVRAIVEVMTRRRGRLRRANPVVVADSAPAAEACVAELVRRVERGGDVPDELRGARVLRLHLSRARVRLMTRADADAWAAGLRRSVAGSNSTGAGGGLVIYVGDMRWAVDDGTDDDDHARGLQGPSSSGSYSPAAHLAAELARLLADLRLRAASRAWLLAAASYATFMRCQRSSLDVTWGLQPVSVPAGAGGGGGLGLELGPRAATAR

SEQ ID NO: 181401 - protein, 293 aa, Zea Mays
MAKPKPSSAGAKPTAAAPPVTVHSALVTYTSMLALLSLCPPFVILLWYTMVHADGSVVRTYEHLRDHGVLEGLKAIWPMPTLVAWKIIFGFGLFEAVLQLLLPGKRFEGPISPAGNVPVYKANGLQAYAVTLITYLGLWWFGIFNPAIVYDHLGEIYSALVFGSFVFCIFLYIKGHVFPSSSDSGSSGNVIIDFYWGMELYPRIGKYFDIKVFTNCRFGMMSWAVLAVTYCIKQYEMNGRVADSMLVNTALMLIYITKFFWWESGYWCTMDIAHDRASTLNSSSWNVVHIHKL

SEQ ID NO: 181402 - protein, 374 aa, Zea Mays
MAKPKPSSAGAKPTAAAPPVTVHSALVTYTSMLALLSLCPPFVILLWYTMVHADGSVVRTYEHLRDHGVLEGLKAIWPMPTLVAWKIIFGFGLFEAVLQLLLPGKRFEGPISPAGNVPVYKANGLQAYAVTLITYLGLWWFGIFNPAIVYDHLGEIYSALVFGSFVFCIFLYIKGHVFPSSSDSGSSGNVIIDFYWGMELYPRIGKYFDIKVFTNCRFGMMSWAVLAVTYCIKQLALSILLAGMLCIYINYDCDRQRQEFRRTNGKCSVWGKAPSKIVASYQTTKGETKTSLLLTSGWWGLSRHFHYVPEILSAFFWTVPALFNHFLPYFYVIFLTILLFDRAKRDDDRCSSKYGKYWKIYCNKVPYRVIPGIY

SEQ ID NO: 181403 - protein, 328 aa, Zea Mays
MAPSQLLGSTDLWRPVAAARGGGWATAAVLLLLLASHLAVLLVRLRRRLRGGGRNAHPEAAVAPAPASTPPGSASASGIEGLVTEGDLRQLVGSLGLGAHEPEREGWEHVISKSSDDVSYKAWCDKPTAGPPKYLSITTYERCSAEQLRDFYMDNEYRMEWDNTVKKHEQLQYDENSGVEVGRTIKKFPLLTPREYILAWRVWEANDKSFYCFIKECEHPLAARQRKFVRVQLLRSGWCIRKIPGRDACQITVLHHEDNGMNIEMAKLAFSKGIWSYICKMNNALRRYPQHGSPSVSILTMQKLMKKVMVLVYLNLLSVVFSFLNLLI

SEQ ID NO: 181404 - protein, 245 aa, Zea Mays
MDNEYRMEWDNTVKKHEQLQYDENSGVEVGRTIKKFPLLTPREYILAWRVWEANDKSFYCFIKECEHPLAARQRKFVRVQLLRSGWCIRKIPGRDACQITVLHHEDNGMNIEMAKLAFSKGIWSYICKMNNALRRYPQHGSPSVSILTMQKLMKKFPQDLETADASLSASQNTAASVVPSTPTSRTSPCKLEGRKSRQMIASGILLVGSIVCLSRGRSNLGAQLAMAFFLKKAFKQERQSSSSST

SEQ ID NO: 181405 - protein, 1072 aa, Zea Mays
MDLPSLAVVLRAALSHVPEERKAAEESLNQFQFTPQHLVRLLQIIVDGSCDMAVRQVASIHFKNFIAKNWSPNDPDESPKVLESDKAMVRENVLGFIVQVPPLLRAQLGESIKTIIHSDYPEQWPSLLHWVSHNIDLQNQIFGALYVLRVLARKYEFKSEDERIPLYHIVEETFPRLLSIFSKLVQIVNPPIEVADLIKLICKIFWSSIYLEIPKQLFDPNVFNAWMVLFINLLERPVPVEGQPMDPEIRKSWAWWKVKKWTIHILNRLYTRFGDLKLQKPESKAFAQMFQKTYAGKILACHMQLLNAIRSGDYLPDRVINLVLQYLTNSVTKNSMYQMMQPQIDILLFEIIFPLMCFNDNDQKLWEEDPHEYVRKGYDIIEDLYSPRTAAMDFVSELIRKRGKNNLQKFIHFIVDIFRRYDEAPADLKPYRQKDGALLAIGTLCDKLKQTDPYKTELESSMGCWAVCPYQLFRPEQFSSGYALYVSGMRDPDLPVRVDSVFALRCFVEACKDLNEIRPILPQLLDEFFKLMNEVENEDLVFTLETIVDKFGEEMAPYALGLCQNLAAAFWRCMASSEADDEADDSGALAAVGCLRAISTILESISSLPHLFLQIEPTLLPIMRRMLTSDGQDVYEEVLEIVSYMTFFSPTISLDMWSLWPLMMEALNDWAIDFFENILVPLDNYISRGTDIFLASKDPDYQQSLWDALQSIMMDENMEDSDIEPAPKLIEVVFQNCKGNVDQWVEHYLRITIARLRRAQKPYLKCLLVQVIANALYYNPALTLESLNKLGVAADIFNHWFAMLQQVKKSGARVNFKREHDKKVCCLGLTSLIALPADKIPAEALDRIFKATLELLVAYKDQVAEAKKENEEAADDMDGFDADEEDDDEVDSDKEMGVDDEDGDEISSLQLQKLAAEIAGLQGMPGRWCLKMVHCPCSMKGSSKNNAVDMKQAMEAGTDLQRNLAWRRLLSRSPASHLLNEARGFQPADEDDDSDDDFSDDEELHSPIDEVDPFIFFVETVQALQASDPARFQNLMQTLDFRYQALASGIGQHAEQRKIEIEREKSEKANAQ

SEQ ID NO: 181406 - protein, 94 aa, Zea Mays
MQRKLHTTHTWGALVMKQALDLDHVRTTQQPRIRSSELGATLTFGQFRFSFRFFQTAPHSTCMHPIATFSVSLLISTYFVYIYMAYVLIICTYR

SEQ ID NO: 181407 - protein, 508 aa, Zea Mays
MEVADEVVRVLGAGFDLTSDFRLRFAKASEGRRLVELGEDTRDVPLPGGGGATLRGVPRDVGVDKGDRIRFRSDVLEFNQMSELLNQKSSVQGKVPSGYFNALFELSGAWLTDAKDTKHLAFDGYFISLYNMHLKASPLVLRDEVKKAVPSKWDPVALSWFIKTYGTHIIVEMGIGGQDVICVKQSHSSTVSTADLKLHLEDLGDFLFSDGKNHSPIHRKTKDGKSTVPDVFVRIVQHSNNLHLSSYSETSTKDGLTVTCSKRGGEAYLPNHSKWLQTVPKKPDAIMFKFVPITSLLTGIPGSGYLSHAINLYLRYKPDLQDLQYFLEFQVPLQWAPMFNELVLGPQRRKGSYPSMQFRFLGPKLHVSTSQEVQPVGHPCPAPLQCSKHDRRLRGVFNVRMARVPGQRPRVHRGNPVEELLVRLHLRHQVQPGVAQESPRRSVYRHWRPARLEGGLGQEGPPSAPPLHPHPQLHHPEDRVEERSGGVSEGELPDDDQHDTELPFHAAC

SEQ ID NO: 181408 - protein, 440 aa, Zea Mays
MGHTSLLKWELEVRMSYVLNKVILQQFQLLILSCTWRILAISYFLMGRTTPQYIVPDVFVRIVQHSNNLHLSSYSETSTKDGLTVTCSKRGGEAYLPNHSKWLQTVPKKPDAIMFKFVPITSLLTGIPGSGYLSHAINLYLRYKPDLQDLQYFLEFQVPLQWAPMFNELVLGPQRRKGSYPSMQFRFLGPKLHVSTSQVSSSQKPVVGLRLYLEGRKCNRLAIHVQHLSSVPSMIADSVASSMSEWRESQDNDPGYIEAIQWKNYSCVCTSAIKYNPEWHKRAPGGVFIVTGAQLVSKGAWAKKVLHLRLLYTHIPNCTIQRTEWRNAPAASQKGSFLTTISTTLSSPFTQRADTHQAKHEPAVQLNSGVYPDGPPVPLRSRKLLKFVDISEVVKGPHDVPGHWLVIAAKLVKEGGKIGIHVKFALLGYEGQSQGNSFMS

SEQ ID NO: 181409 - protein, 209 aa, Zea Mays
MLRCAYTQRRWAHRRGGFVTGSTGWSKPPPPGLGRAAGVGTKKSEWWTVDGEMHEIGESVPHRERFAIPRDNLPNRRRKQMREQFMRRTRLVLKDSEHETWCKNYMELYQELRENWERLYWDEGYSKKIAESHANYDSAEEDDIDFSPYSRRRQSNVEPNKDLGFGVNKRGETWERVTQIRDKFEYDRERRMRERGKFIFVCTRCFFFR

SEQ ID NO: 181410 - protein, 61 aa, Zea Mays
MVGGWTWWTEDPEPFCIPAHGRNSTAPTTNSFPYLVVINYGDALAQDKQCSIDHEADAPAT

SEQ ID NO: 181411 - protein, 96 aa, Zea Mays
MRASRCIHGDEDDIASKSAPPASIDGARYGFEPPVLQSSHQVDSSQWWSDSSRQWSDPADRLMAKRTTPCPGVLPALHRHCSFRADPSFRSIRPRR

SEQ ID NO: 181412 - protein, 105 aa, Zea Mays
MLNLSYDWFRGEVLATIGRLAHLQVLDLSYNAFSEATGELIEPSMVGGWTWWTEDPEPFCIPAHGRNSTAPTTNSFPYLVVINYGDALAQDKQCSIDHEADAPAT

SEQ ID NO: 181413 - protein, 174 aa, Zea Mays
MCCVAKRQQIVWEAAYAEAMSSQHGSNYDWRTAPIDPQAVYATSGKPHGRYSIFDNVIDSSQVTVQRGGLSRSAARSSRHSTQDTAEVEQLREELRQHQERQRVQEEYLRQHAAQQEYYATQFQQQQALIQVYETPPATLPAQQQDDGLDFVNTLFTSGGSEHHSSIFPNVDRQ

SEQ ID NO: 181414 - protein, 207 aa, Zea Mays
MMLLGVPYAVFGLRIISRQSLYDKVPIVEPSRITSMEEASSGVVPSDVQIYLRGHRGPDPANPDVLCSQKATDRLAAYAEAMSSQHGSNYDWRTAPIDPQAVYATSGKPHGRYSIFDNVIDSSQVTVQRGGLSRSAARSSRHSTQDTAEVEQLREELRQHQERQRVQEEYLRQHAAQQEYYATQFQQQQALIQVSSKRSFILSYVLI

SEQ ID NO: 181415 - protein, 704 aa, Zea Mays
MAEEKGRSKTDPFFTLTISAANRNTQSRARSWRGLQILPLQDSTAEFAPTTGPAAMAAAADLEPQLGISPATPDIVRKLARPSGTTTAVGYCCTALYTSTAAGPGKVDGDGLASVPLHAHEHSQSAALDNLVQVDCDPVGTQESSTLPALVGESSGKVAQQEQQHKEGVDSARDAGAASPAPTSTPENMEPTPRRRGKKSTKGVQRLKVAKDKVMKLKVTTPSTVKKKKMTEDDIQHIGAHRSNSARRKLDLDLHSSESKTCFSRAELMINLKCIGKSYGLISELTTHKRSKRGKKRKMMVGNKESGQLALLPYNWTTTVAVSRPLTHVKKLRAKVLGLTDETMRVCAVLANWNGSDNESFEGFDIGNGPEWDTTRQMFEQFVDIFINAMFDLIGPRKYSQWGGSLIDSVVGTFLTQNSADNLSSQAFMNIAAKFPKSERHCQDNATQLIDGVDRKMKSKEAFDNFDLVHSHFDEYIKSEEEVDFDKKVKSQYGEDYNRIIGNFAASMKQKNISTWDSDLMNLVKDKYGNPVCDENNLRKILASLRQPVTASNWKELQEEAYKKGYNNKSQTETSDVVDWESVLNAPFSEVAKCIAIRGQHNILAVRILAFLDHVKKAQDGSFDLDWLRFVSREKAKKFLLSIHGIGVKSADCICLLSLRHRAFPVDVNVARIVTRLGWVKLQPLNGADFHLIDLYPILDDVQR

SEQ ID NO: 181416 - protein, 456 aa, Zea Mays
MASGRRRDKDASLNEYGEQRLATIAENKRRLEALNIPTLSNMNQHGRTKKRTKRIHNTSDVATEGHNLRARPQKNCVENGNEQINEDLGCESIGDFLCDNEDSRNIAEKKRKGRGITRLDEIFARKPSMPKIKVELNKYVVCSDWRLVDPQKKYEVWEDMKKIYDIDDAAFSWFMDSAGRKWKDFKSTLKHQFFDENISDADLKERHKGRVNDDDWKFLIEYWRSSESETRSEIAKECRSKVGNHHTSGSKSFACSAHELANKLRRSPRRDEVYIKTHTRKNGVPSRHAEPIINKLKAIVEAHPELKQRTIQEGDAFAAACGEKEPRGRVRALGLGPTPQDVGTPGLKCYTPTRLQMEGLARKKAECEKVALQQRITELEQQMQEERVARELQDVELISHNGSNSRQTGSRRYEEHDVEAQHDAQFVEDEDCAENHINHHCDDGWKGCNIICHYWT

SEQ ID NO: 181417 - protein, 237 aa, Zea Mays
MPPPPPIYKPAARHSSRMLTSTSTICFSPAPLGKLAVQDPPLARPRRRTQLADGAPHIHFLLAAQILCIPPLAADDMLERQQGGLSIPPEREGGSSQCPARTNLRDRRCPDCVPTGEQDFDDPRPDEVAGVGDAQGGGGHRALTPSPFFLSGRWCRQANGFVRERANRVLFLRSAAPKSLLPGAPVPIKYQHCLSTGYTLVWWTFTKSKLQHRCCSGLDRGDGTMIKRKENTTEGTY

SEQ ID NO: 181418 - protein, 207 aa, Zea Mays
MITILHAPKERKIDSMKEIWHLATQPGFIVYSCVAVACVLFLIFRVVERSGHRLMLVYIAICSLMGSLTVISVKAVAIALKLSFGGSNQFIYVQTWFFIVVVTICCLVQLNYLNKALDSFNTAVVSPVYYVMFTILTIVANMIMYKDWASQTATQIATQLCGFVTIVAGTFLLHKTRDMGNPPPPPPDQMCLQEAGECAPRSMTSSS

SEQ ID NO: 181419 - protein, 99 aa, Zea Mays
MFSNNAIALDSFNTAVVSPVYYVMFTILTIVANMIMYKDWASQTATQIATQLCGFVTIVAGTFLLHKTRDMGNPPPPPPDQMCLQEAGECAPRSMTSSS

SEQ ID NO: 181420 - protein, 227 aa, Zea Mays
MAWGGLFLCMGRPTQEQQKSCLAAAGGFNYDTALQGATRPKSVSTLTSDEAGGEIGDKDLTERGFFVNRSRVLVGSGSDAFVHAKSALLSWRHLALGWANVEPDTPVKIAYVTDVDSDTSKGCSRSKMFAFGSGTLQGHLLAGEERFSVQVDEEERVWYEVLSFSKPAHVLATLCYPYMHCTENAVCIPPLNSIPTWPGLAALGPGWDDICSGIPSGVCPSHILISS

SEQ ID NO: 181421 - protein, 265 aa, Zea Mays
MAWGGLFLCMGRPTQEQQKSCLAAAGGFNYDTALQGATRPKSVSTLTSDEAGGEIGDKDLTERGFFVNRSRVLVGSGSDAFVHAKSALLSWRHLALGWANVEPDTPVKVGTRFCICYKELIPWVTLPLQIAYVTDVDSDTSKGCSRSKMFAFGSGTLQGHLLVGRRGAVLGTGGRGGEGVVRGAFFLEAGARPGDAVLPVCAAEAEAFRAAVGTGARQACVHLLFQAEAVVELCGDALHRECCMYSPFEFYSDMAWFGGAGAWVG

SEQ ID NO: 181422 - protein, 82 aa, Zea Mays
MLRLAYHRLCFNFWFVWTFAVGRKYDVFLHFHKWLNWFDWQFVLAFIFGGNFSLYSSKLDVCCSLYLCDRCSWYVLRPRNRS

SEQ ID NO: 181423 - protein, 390 aa, Zea Mays
MAGLSLRCGDCGAQLRSVEEAQAHAESTNHANFVESTEAVLNLVCSNCGKPCRSHTEVDLHTKRTGHTEFADKTAEAAKPIDLEAPLKPASDDATDVDASASATEETQETVVPEVNKEVLTDLEGMGFSTARATRALHFSGNSTIECAINWLSEHQEDADIDEMPLVPANSKTEVNKPSLTPEEMKIKAQELRERARKKKEEEERRMEREREKERVRIGKELLEAKRIEEQNERKRMIELRRLEKEEEKRAREKIRQKLEEDKAERRRKLGLPPEDPAAAKPSAPPPVEEKKDDDAKVKRAFQTLLTYIGNVAKNPDEEKFRKIRLTNATFQERVGNLHGGIEFLELCGFEKLEGDEFLFLAREKVDSAILNTAGAELNSAITNPFFGVL

SEQ ID NO: 181424 - protein, 331 aa, Zea Mays
MAGLSLRCGDCGAQLRSVEEAQAHAESTNHANFVESTEAVLNLVCSNCGKPCRSHTEVDLHTKRTGHTEFADKTAEAAKPIDLEAPLKPASDDATDVDASASATEETQETVVPEVNKEVLTDLEGMGFSTARATRALHFSGNSTIECAINWLSEHQEDADIDEMPLVPANSKTEVNKPSLTPEEMKIKAQELRERARKKKEEEERRMEREREKERVRIGKELLEAKRIEEQNERKRMIELRRLEKEEEKRAREKIRQKLEEDKAERRRKLGLPPEDPAAAKPSAPPPVEEKKSALPVRPATKAERMRDCLRNLKQQNKVEVIDCTGEMQAV

SEQ ID NO: 181425 - protein, 210 aa, Zea Mays
MEREREKERVRIGKELLEAKRIEEQNERKRMIELRRLEKEEEKRAREKIRQKLEEDKAERRRKLGLPPEDPAAAKPSAPPPVEEKKSALPVRPATKAERMRDCLRNLKQQNKDDDAKVKRAFQTLLTYIGNVAKNPDEEKFRKIRLTNATFQERVGNLHGGIEFLELCGFEKLEGDEFLFLAREKVDSAILNTAGAELNSAITNPFFGVL

SEQ ID NO: 181426 - protein, 291 aa, Zea Mays
MGFSTARATRALHFSGNSTIECAINWLSEHQEDADIDEMPLVPANSKTEVNKPSLTPEEMKIKAQELRERARKKKEEEERRMEREREKERVRIGKELLEAKRIEEQNERKRMIELRRLEKEEEKRAREKIRQKLEEDKAERRRKLGLPPEDPAAAKPSAPPPVEEKKSALPVRPATKAERMRDCLRNLKQQNKDDDAKVKRAFQTLLTYIGNVAKNPDEEKFRKIRLTNATFQERVGNLHGGIEFLELCGFEKLEGDEFLFLAREKVDSAILNTAGAELNSAITNPFFGVL

SEQ ID NO: 181427 - protein, 180 aa, Zea Mays
MGFSTARATRALHFSGNSTIECAINWLSEHQEDADIDEMPLVPANSKTEVNKPSLTPEEMKIKAQELRERARKKKEEEERRMEREREKERVRIGKELLEAKRIEEQNERKRMIELRRLEKEEEKRAREKIRQKLEEDKAERRRKLGLPPEDPAAAKPSAPPPVEEKKVHYLSGQPQRQRG

SEQ ID NO: 181428 - protein, 232 aa, Zea Mays
MKIKAQELRERARKKKEEEERRMEREREKERVRIGKELLEAKRIEEQNERKRMIELRRLEKEEEKRAREKIRQKLEEDKAERRRKLGLPPEDPAAAKPSAPPPVEEKKSALPVRPATKAERMRDCLRNLKQQNKDDDAKVKRAFQTLLTYIGNVAKNPDEEKFRKIRLTNATFQERVGNLHGGIEFLELCGFEKLEGDEFLFLAREKVDSAILNTAGAELNSAITNPFFGVL

SEQ ID NO: 181429 - protein, 83 aa, Zea Mays
MAAADTERSAAFHCVPYSAVVLLPLLLSATSISLPSPRSPPHRRSSPSPHASRTRLTLSAPAIGTLSSPSSRPSPPGTPLGWA

SEQ ID NO: 181430 - protein, 371 aa, Zea Mays
MDRKPAGKNSFRQQEKQKKNERLDWNDLVLAGPFVLHSHSQTAPSLYTAVSSRARGVRVPPLGGAGQKSLLDGWLRKPDASQVRRLIFTWVPMVRFHSANHLPAFSQYSLLEPMEVQLATEQPGDPFLPLRWESTGDQWWYATPIDWAAANGHYDLVRELLRLDPNLLVKLTSLRRIRRLESVWDDDARLDAAARNRAAVARRLLLDCEPDNDKQPPSRGGGGDAANRLLRAGYGGWLLYTAAAAGDERFARELLAAQPLLVFGEGEYGVTDILYAGARSGRPEVFRLLFDAVLSAAPACPVGGDDGEFRREMMNRAVHAAARGGSLAVLRDLLRGCSDAAAYRDAQGSTILHAAAAKGQVEMTKGTRRCI

SEQ ID NO: 181431 - protein, 666 aa, Zea Mays
MDRKPAGKNSFRQQEKQKKNERLDWNDLVLAGPFVLHSHSQTAPSLYTAVSSRARGVRVPPLGGAGQKSLLDGWLRKPDASQVRRLIFTWVPMVRFHSANHLPAFSQYSLLEPMEVQLATEQPGDPFLPLRWESTGDQWWYATPIDWAAANGHYDLVRELLRLDPNLLVKLTSLRRIRRLESVWDDDARLDAAARNRAAVARRLLLDCEPDNDKQPPSRGGGGDAANRLLRAGYGGWLLYTAAAAGDERFARELLAAQPLLVFGEGEYGVTDILYAGARSGRPEVFRLLFDAVLSAAPACPVGGDDGEFRREMMNRAVHAAARGGSLAVLRDLLRGCSDAAAYRDAQGSTILHAAAAKGQVEVVKDLIASFDIANCVDDQGNTALHIAAFRGHVQVVEALITASPSLISATNEAGDTFLHMALTGFGTPEFQRLDRQTELIRQLASGAIVDISSSTIINAQNDDGKTALHLAVVCNLHSDVVKLLMSVPCIDLNICDKDGMTPLDLLRKQPRTTASEILIKQLILAGGFTSSRDHETRSAIASQLKMHSIVGSPGTSFKIPDGEIFFLHAAGVDVSGGIGEGGAAVPFSSVIARADVLHGPKLKRLNSFQDAAKHIKVLFRWPRRGWNKSGSGGRKGLDDDDASSVDSAKTWSHEETPTPLRQSHG

SEQ ID NO: 181432 - protein, 337 aa, Zea Mays
MALTGFGTPEFQRLDRQTELIRQLASGAIVDISSSTIINAQNDDGKTALHLAVVCNLHSDVVKLLMSVPCIDLNICDKDGMTPLDLLRKQPRTTASEILIKQLILAGGFTSSRDHETRSAIASQLKMHSIVGSPGTSFKIPDGEIFFLHAAGVDVSGGIGEGGAAVPFSSVIARADVLHGPKLKRLNSFQDAAKHIKVLFRWPRRGWNKSGSGGRKGLDDDDASSVDSAKTWSHEETPTPLRQRYSRIGSLFNKRTYAAGRASPSEAVKKGGVVQPAGSTLLSTSLSSSSASLVDRFESVHQDNDQSPYVSRLIRHTPKKSGSLNSRLMNQSLRLRA

SEQ ID NO: 181433 - protein, 421 aa, Zea Mays
MEMEQLCSLLRDLDALKQHPDDLTSTIDRMRERLVAMMNPAAGAASRSKIKDMSAEVVDNNPYSRLMALQRMGVVENYERIRDYSVAIVGIGGVGSVAAEMLTRCGIGRLLLYDYDTVELANMNRLFFRPEQVGMTKTDAAVQTLSGINPDVVLESYSLNITTVKGFETFLASLKAQSSHERSTGVNLVLSCVDNYEARMVVNQACNELGQTWMESGVSEDAVSGHIQLLVPGETACFACAPPLVVASGVDERTLKREGVCAASLPTTMGVVAGLLVQNALKYLLNFGQVSRYLGYNSLKDYFPAMEMRPNPQCSNPACVLRQKEYMESKPARDAAAKTKMEAEASTENECPVHLDNEWNISVVDDETETSSIRNTPEGLVRELPDADSYAGPAAPVSSSAIDDDDDLEELQRQLDALNAS

SEQ ID NO: 181434 - protein, 68 aa, Zea Mays
MHTWRSFFFKILKLVAYARWLTLLGSALTLVRHCQCHFAPPKMRRFLVSRSSASEPQGGAQPTQPNPP

SEQ ID NO: 181435 - protein, 287 aa, Zea Mays
MGEEKKNEAPSLPPPPPEEVVMRVFMHCEGCARKVKKILKGFDGVEDVIADTKAHKVVVKGKKAAADPMKVVERVQKKTGRKVELLSPMPPPKEEKKEEEKKEEPEPPKTEKKEEATVLAVVLKVHMHCEACTQVIKKRILKMKGVQSVEADLKASQVTVKGVFEEAKLSDYVYRRTGKHAAIVKSEPVAAENVDDGNAKDDKKAAEGGEEKKDDGKEEKKDEDKKEADNQKDDGNAGDEGKDKDPGAVANMYMHYPRSNHLSEYGYAYQYPPQLFSDENPNACSLM

SEQ ID NO: 181436 - protein, 1685 aa, Zea Mays
MSGRRGPAATGGGRGGGGGGGGNWRRSGSAKAKEQRLRLGAEELLESRLGFAPYTDGERRLGWLLTFSPSSWEDEDTGKIYSCVDLYFVSQDGSTFKVKYKFRPYFYAATKDKMELEVEAYIRRRYEGEISDIEIIEKEDLDLKNHLSGLKRKYLKLQFDTVQQLMRVRNDLLHVVEKNEEKIDAVEAFESIHGVKRVERPQDYINYIIDLREYDVPYHVRFAIDNDVRSGQWYNVNVSGSDVLLQRREDLLQRAEVHVCAFDIETTKLPLKFPDAEYDNVMMISYMIDGQGYLIINRECVGEDIDDLEYTPKPEFEGYFRVKNVQTELDLLKAWFSHMQEVKPGIYVTYNGDFFDWPFLEKRAAHHGIKMNEEIGFQCDNNQGECRAKFSCHLDCFAWVKRDSYLPQGSQGLKAVTKAKLGYDPLEVNPEDMVRFAMEQPQTMASYSVSDAVATYYLYMTYVHPFIFSLATIIPMSPDEVLRKGSGTLCEMLLMVQAFKASVICPNKHQADLEKFYNNRLLESETYIGGHVECLETGVFRSDLPTKFQLEPLAYEQLIGNLDRDLHYVIAVEGKLDIDSVTNYDEVKDAIEQKLVALRDHPIREERPLIYHLDVAAMYPNIILTNRLQPPSIVTDVDCTACDFNRPGKNCLRKLEWVWRGETYMAKKNDYYHIKRQIESELIQSGGIASSKPFLDLSKPEHLLKLKDRLKKYCQKAHKRVVDKPITEVREAGICMRENSFYVDTVRSFRDRRYEYKGLNKTWKGKLAEAKASGNSMKIQEAQDMVVLYDSLQLAHKAGKKLTISYPCVMLNADVARNNTNDQYQTLKDPVNKTYTTHSECSIEFEVDGPYKAMILPASKEEGILIKKRYAVFNEDGTLAELKGFEIKRRGELKLIKVFQAEVFDKFLHGSTLEECYSAVASVANRWLDLLDNQGIDIADSELLDFISESSTMSKSLVDYGEQKSCAVTTAKRLAEFLGDSMVKDKGLHCQYIVAREPQGTPVSERAVPVAIFETDPEIAKHYLRKWFRFSSDANIRSIVDWSYYKQRLSSAIQKIITIPAAMQKISNPVPRVLHPDWLHKKVREKDDRFRQRKLRDIFSPLAKEEGLHNLNRTGDMEDLLISNKDLRKNPSHGLDIDKENNPNGASVGSGLNISKKQQNCMTGLNVPCTSQIQNAASYETVDKGTDYQGWLDAKKRKWKYVREQKKRRRLGAAATFDDPNALLSARHANQLPVNSRNRSTFFQKQELALFRSHWQIIQLASSTVPGHFFAWVVAEGIMFKIPINVPRTFYLNSKAPVTEEFPGRRVKKILPHGRPCFNLIEVVTTEEQFRAEGKKLAAHLAEPDVEGIYETKIPPELNAVLQIGCVCKVDKSAKRRSIQDGWDLAELQMKTTAECSYLEQTFSFFYLYHSLSEGRAVYVFYFPTSFRIHAVIVNPFRNKEISPSFLEKQFGDACQALGSVPENLSFHVDYQTSIDAGSKYAQRMLLEYRQQHSGPVVGIIECPKLQAIKVAIRALDDLPCVTIPSNARDNNYQALGWQATAGRTSMQRCAASTQWFNERISLAKYAHVPLGNFELDWLLFTADVFFSRALRDQQQVLWISDDGIPDLGGTYEGETCFADEVIQPALTYPGAYRRVSVELKIHHLAVNALLKSSQVDEMEGGSIGAKATYSKMHFRCSVVWKCIC

SEQ ID NO: 181437 - protein, 2201 aa, Zea Mays
MSGRRGPAATGGGRGGGGGGGGNWRRSGSAKAKEQRLRLGAEELLESRLGFAPYTDGERRLGWLLTFSPSSWEDEDTGKIYSCVDLYFVSQDGSTFKVKYKFRPYFYAATKDKMELEVEAYIRRRYEGEISDIEIIEKEDLDLKNHLSGLKRKYLKLQFDTVQQLMRVRNDLLHVVEKNEEKIDAVEAFESIHGVKRVERPQDYINYIIDLREYDVPYHVRFAIDNDVRSGQWYNVNVSGSDVLLQRREDLLQRAEVHVCAFDIETTKLPLKFPDAEYDNVMMISYMIDGQGYLIINRECVGEDIDDLEYTPKPEFEGYFRLDLLKAWFSHMQEVKPGIYVTYNGDFFDWPFLEKRAAHHGIKMNEEIGFQCDNNQGECRAKFSCHLDCFAWVKRDSYLPQGSQGLKAVTKAKLGYDPLEVNPEDMVRFAMEQPQTMASYSVSDAVATYYLYMTYVHPFIFSLATIIPMSPDEVLRKGSGTLCEMLLMVQAFKASVICPNKHQADLEKFYNNRLLESETYIGGHVECLETGVFRSDLPTKFQLEPLAYEQLIGNLDRDLHYVIAVEGKLDIDSVTNYDEVKDAIEQKLVALRDHPIREERPLIYHLDVAAMYPNIILTNRLQPPSIVTDVDCTACDFNRPGKNCLRKLEWVWRGETYMAKKNDYYHIKRQIESELIQSGGIASSKPFLDLSKPEHLLKLKDRLKKYCQKAHKRVVDKPITEVREAGICMRENSFYVDTVRSFRDRRYEYKGLNKTWKGKLAEAKASGNSMKIQEAQDMVVLYDSLQLAHKCILNSFYGYVMRKGARWYSMEMAGVVTYTGAKIIQNARLLVEKIGRPLELDTDGIWCVLPGSFPENFTFKTKAGKKLTISYPCVMLNADVARNNTNDQYQTLKDPVNKTYTTHSECSIEFEVDGPYKAMILPASKEEGILIKKRYAVFNEDGTLAELKGFEIKRRGELKLIKVFQAEVFDKFLHGSTLEECYSAVASVANRWLDLLDNQGIDIADSELLDFISESSTMSKSLVDYGEQKSCAVTTAKRLAEFLGDSMVKDKGLHCQYIVAREPQGTPVSERAVPVAIFETDPEIAKHYLRKWFRFSSDANIRSIVDWSYYKQRLSSAIQKIITIPAAMQKISNPVPRVLHPDWLHKKVREKDDRFRQRKLRDIFSPLAKEEGLHNLNRTGDMEDLLISNKDLRKNPSHGLDIDKENNPNGASVGSGLNISKKQQNCMTGLNVPCTSQIQNAASYETVDKGTDYQGWLDAKKRKWKYVREQKKRRRLGAAATFDDPNALLSARHANQLPVNSRNRSTFFQKQELALFRSHWQIIQLASSTVPGHFFAWVVAEGIMFKIPINVPRTFYLNSKAPVTEEFPGRRVKKILPHGRPCFNLIEVVTTEEQFRAEGKKLAAHLAEPDVEGIYETKIPPELNAVLQIGCVCKVDKSAKRRSIQDGWDLAELQMKTTAECSYLEQTFSFFYLYHSLSEGRAVYVFYFPTSFRIHAVIVNPFRNKEISPSFLEKQFGDACQALGSVPENLSFHVDYQTSIDAGSKYAQRMLLEYRQQHSGPVVGIIECPKLQAIKVAIRALDDLPCVTIPSNARDNNYQALGWQATAGRTSMQRCAASTQWFNERISLAKYAHVPLGNFELDWLLFTADVFFSRALRDQQQVLWISDDGIPDLGGTYEGETCFADEVIQPALTYPGAYRRVSVELKIHHLAVNALLKSSQVDEMEGGSIGSFGNDVPPGSNATETDFDDASLCIPAFQVLKQLIQRCISDAVSSGNVFADAILQHLYRWLCSPRSKLHDPALHRLLHNVMKKVFALLLAELRKLGANVIFANFSKIIIDTGKVDLSSAHAYCDSLLRTLQTRDLFEWIELEPLHFWHSLLFMDQYNYGGIQAKTQNVDSSDGDNDIDIVSSWNMAEDLPKDTQDHFVLIVSEFLYIPWKFMKEQVAAQATIRDDTSCTPSVTIMAAENLEGQVIEHLRDKISNYFADKLLRTVSDILHHFKGKSKHESDEPAKSDPHTHKGDAALEFIKHICAVLALDQNVQHDILRMRKNLLKLVRVKEFAPEAQFQDPCASFTLPNVICSYCNDCRDLDLCRDSALQGQEWRCAVPQCGQPYHREQMENALLQVVRQRERLYHLQDLVCVRCRQVKAAHLSEQCSCGGSFRCKEEPSYFLSKMRVFLKVAVSQKFPLLQDCVQWILEAR

SEQ ID NO: 181438 - protein, 2208 aa, Zea Mays
MSGRRGPAATGGGRGGGGGGGGNWRRSGSAKAKEQRLRLGAEELLESRLGFAPYTDGERRLGWLLTFSPSSWEDEDTGKIYSCVDLYFVSQDGSTFKVKYKFRPYFYAATKDKMELEVEAYIRRRYEGEISDIEIIEKEDLDLKNHLSGLKRKYLKLQFDTVQQLMRVRNDLLHVVEKNEEKIDAVEAFESIHGVKRVERPQDYINYIIDLREYDVPYHVRFAIDNDVRSGQWYNVNVSGSDVLLQRREDLLQRAEVHVCAFDIETTKLPLKFPDAEYDNVMMISYMIDGQGYLIINRECVGEDIDDLEYTPKPEFEGYFRVKNVQTELDLLKAWFSHMQEVKPGIYVTYNGDFFDWPFLEKRAAHHGIKMNEEIGFQCDNNQGECRAKFSCHLDCFAWVKRDSYLPQGSQGLKAVTKAKLGYDPLEVNPEDMVRFAMEQPQTMASYSVSDAVATYYLYMTYVHPFIFSLATIIPMSPDEVLRKGSGTLCEMLLMVQAFKASVICPNKHQADLEKFYNNRLLESETYIGGHVECLETGVFRSDLPTKFQLEPLAYEQLIGNLDRDLHYVIAVEGKLDIDSVTNYDEVKDAIEQKLVALRDHPIREERPLIYHLDVAAMYPNIILTNRLQPPSIVTDVDCTACDFNRPGKNCLRKLEWVWRGETYMAKKNDYYHIKRQIESELIQSGGIASSKPFLDLSKPEHLLKLKDRLKKYCQKAHKRVVDKPITEVREAGICMRENSFYVDTVRSFRDRRYEYKGLNKTWKGKLAEAKASGNSMKIQEAQDMVVLYDSLQLAHKCILNSFYGYVMRKGARWYSMEMAGVVTYTGAKIIQNARLLVEKIGRPLELDTDGIWCVLPGSFPENFTFKTKAGKKLTISYPCVMLNADVARNNTNDQYQTLKDPVNKTYTTHSECSIEFEVDGPYKAMILPASKEEGILIKKRYAVFNEDGTLAELKGFEIKRRGELKLIKVFQAEVFDKFLHGSTLEECYSAVASVANRWLDLLDNQGIDIADSELLDFISESSTMSKSLVDYGEQKSCAVTTAKRLAEFLGDSMVKDKGLHCQYIVAREPQGTPVSERAVPVAIFETDPEIAKHYLRKWFRFSSDANIRSIVDWSYYKQRLSSAIQKIITIPAAMQKISNPVPRVLHPDWLHKKVREKDDRFRQRKLRDIFSPLAKEEGLHNLNRTGDMEDLLISNKDLRKNPSHGLDIDKENNPNGASVGSGLNISKKQQNCMTGLNVPCTSQIQNAASYETVDKGTDYQGWLDAKKRKWKYVREQKKRRRLGAAATFDDPNALLSARHANQLPVNSRNRSTFFQKQELALFRSHWQIIQLASSTVPGHFFAWVVAEGIMFKIPINVPRTFYLNSKAPVTEEFPGRRVKKILPHGRPCFNLIEVVTTEEQFRAEGKKLAAHLAEPDVEGIYETKIPPELNAVLQIGCVCKVDKSAKRRSIQDGWDLAELQMKTTAECSYLEQTFSFFYLYHSLSEGRAVYVFYFPTSFRIHAVIVNPFRNKEISPSFLEKQFGDACQALGSVPENLSFHVDYQTSIDAGSKYAQRMLLEYRQQHSGPVVGIIECPKLQAIKVAIRALDDLPCVTIPSNARDNNYQALGWQATAGRTSMQRCAASTQWFNERISLAKYAHVPLGNFELDWLLFTADVFFSRALRDQQQVLWISDDGIPDLGGTYEGETCFADEVIQPALTYPGAYRRVSVELKIHHLAVNALLKSSQVDEMEGGSIGSFGNDVPPGSNATETDFDDASLCIPAFQVLKQLIQRCISDAVSSGNVFADAILQHLYRWLCSPRSKLHDPALHRLLHNVMKKVFALLLAELRKLGANVIFANFSKIIIDTGKVDLSSAHAYCDSLLRTLQTRDLFEWIELEPLHFWHSLLFMDQYNYGGIQAKTQNVDSSDGDNDIDIVSSWNMAEDLPKDTQDHFVLIVSEFLYIPWKFMKEQVAAQATIRDDTSCTPSVTIMAAENLEGQVIEHLRDKISNYFADKLLRTVSDILHHFKGKSKHESDEPAKSDPHTHKGDAALEFIKHICAVLALDQNVQHDILRMRKNLLKLVRVKEFAPEAQFQDPCASFTLPNVICSYCNDCRDLDLCRDSALQGQEWRCAVPQCGQPYHREQMENALLQVVRQRERLYHLQDLVCVRCRQVKAAHLSEQCSCGGSFRCKEEPSYFLSKMRVFLKVAVSQKFPLLQDCVQWILEAR

SEQ ID NO: 181439 - protein, 972 aa, Zea Mays
MSGRRGPAATGGGRGGGGGGGGNWRRSGSAKAKEQRLRLGAEELLESRLGFAPYTDGERRLGWLLTFSPSSWEDEDTGKIYSCVDLYFVSQDGSTFKVKYKFRPYFYAATKDKMELEVEAYIRRRYEGEISDIEIIEKEDLDLKNHLSGLKRKYLKLQFDTVQQLMRVRNDLLHVVEKNEEKIDAVEAFESIHGVKRVERPQDYINYIIDLREYDVPYHVRFAIDNDVRSGQWYNVNVSGSDVLLQRREDLLQRAEVHVCAFDIETTKLPLKFPDAEYDNVMMISYMIDGQGYLIINRECVGEDIDDLEYTPKPEFEGYFRVKNVQTELDLLKAWFSHMQEVKPGIYVTYNGDFFDWPFLEKRAAHHGIKMNEEIGFQCDNNQGECRAKFSCHLDCFAWVKRDSYLPQGSQGLKAVTKAKLGYDPLEVNPEDMVRFAMEQPQTMASYSVSDAVATYYLYMTYVHPFIFSLATIIPMSPDEVLRKGSGTLCEMLLMVQAFKASVICPNKHQADLEKFYNNRLLESETYIGGHVECLETGVFRSDLPTKFQLEPLAYEQLIGNLDRDLHYVIAVEGKLDIDSVTNYDEVKDAIEQKLVALRDHPIREERPLIYHLDVAAMYPNIILTNRLQPPSIVTDVDCTACDFNRPGKNCLRKLEWVWRGETYMAKKNDYYHIKRQIESELIQSGGIASSKPFLDLSKPEHLLKLKDRLKKYCQKAHKRVVDKPITEVREAGICMRENSFYVDTVRSFRDRRYEYKGLNKTWKGKLAEAKASGNSMKIQEAQDMVVLYDSLQLAHKCILNSFYGYVMRKGARWYSMEMAGVVTYTGAKIIQNARLLVEKIGRPLELDTDGIWCVLPGSFPENFTFKTKAGKKLTISYPCVMLNADVARNNTNDQYQTLKDPVNKTYTTHSECSIEFEVDGPYKAMILPASKEEGILIKKRYAVFNEDGTLAELKGFEIKRRGELKLIKVFQ

SEQ ID NO: 181440 - protein, 1811 aa, Zea Mays
MTFFLYLTSSGVTFCYVSYCVGEDIDDLEYTPKPEFEGYFRVKNVQTEEIGFQCDNNQGECRAKFSCHLDCFAWVKRDSYLPQGSQGLKAVTKAKLGYDPLEVNPEDMVRFAMEQPQTMASYSVSDAVATYYLYMTYVHPFIFSLATIIPMSPDEVLRKGSGTLCEMLLMVQAFKASVICPNKHQADLEKFYNNRLLESETYIGGHVECLETGVFRSDLPTKFQLEPLAYEQLIGNLDRDLHYVIAVEGKLDIDSVTNYDEVKDAIEQKLVALRDHPIREERPLIYHLDVAAMYPNIILTNRLQPPSIVTDVDCTACDFNRPGKNCLRKLEWVWRGETYMAKKNDYYHIKRQIESELIQSGGIASSKPFLDLSKPEHLLKLKDRLKKYCQKAHKRVVDKPITEVREAGICMRENSFYVDTVRSFRDRRYEYKGLNKTWKGKLAEAKASGNSMKIQEAQDMVVLYDSLQLAHKAGKKLTISYPCVMLNADVARNNTNDQYQTLKDPVNKTYTTHSECSIEFEVDGPYKAMILPASKEEGILIKKRYAVFNEDGTLAELKGFEIKRRGELKLIKVFQAEVFDKFLHGSTLEECYSAVASVANRWLDLLDNQGIDIADSELLDFISESSTMSKSLVDYGEQKSCAVTTAKRLAEFLGDSMVKDKGLHCQYIVAREPQGTPVSERAVPVAIFETDPEIAKHYLRKWFRFSSDANIRSIVDWSYYKQRLSSAIQKIITIPAAMQKISNPVPRVLHPDWLHKKVREKDDRFRQRKLRDIFSPLAKEEGLHNLNRTGDMEDLLISNKDLRKNPSHGLDIDKENNPNGASVGSGLNISKKQQNCMTGLNVPCTSQIQNAASYETVDKGTDYQGWLDAKKRKWKYVREQKKRRRLGAAATFDDPNALLSARHANQLPVNSRNRSTFFQKQELALFRSHWQIIQLASSTVPGHFFAWVVAEGIMFKIPINVPRTFYLNSKAPVTEEFPGRRVKKILPHGRPCFNLIEVVTTEEQFRAEGKKLAAHLAEPDVEGIYETKIPPELNAVLQIGCVCKVDKSAKRRSIQDGWDLAELQMKTTAECSYLEQTFSFFYLYHSLSEGRAVYVFYFPTSFRIHAVIVNPFRNKEISPSFLEKQFGDACQALGSVPENLSFHVDYQTSIDAGSKYAQRMLLEYRQQHSGPVVGIIECPKLQAIKVAIRALDDLPCVTIPSNARDNNYQALGWQATAGRTSMQRCAASTQWFNERISLAKYAHVPLGNFELDWLLFTADVFFSRALRDQQQVLWISDDGIPDLGGTYEGETCFADEVIQPALTYPGAYRRVSVELKIHHLAVNALLKSSQVDEMEGGSIGSFGNDVPPGSNATETDFDDASLCIPAFQVLKQLIQRCISDAVSSGNVFADAILQHLYRWLCSPRSKLHDPALHRLLHNVMKKVFALLLAELRKLGANVIFANFSKIIIDTGKVDLSSAHAYCDSLLRTLQTRDLFEWIELEPLHFWHSLLFMDQYNYGGIQAKTQNVDSSDGDNDIDIVSSWNMAEDLPKDTQDHFVLIVSEFLYIPWKFMKEQVAAQATIRDDTSCTPSVTIMAAENLEGQVIEHLRDKISNYFADKLLRTVSDILHHFKGKSKHESDEPAKSDPHTHKGDAALEFIKHICAVLALDQNVQHDILRMRKNLLKLVRVKEFAPEAQFQDPCASFTLPNVICSYCNDCRDLDLCRDSALQGQEWRCAVPQCGQPYHREQMENALLQVVRQRERLYHLQDLVCVRCRQVKAAHLSEQCSCGGSFRCKEEPSYFLSKMRVFLKVAVSQKFPLLQDCVQWILEAR

SEQ ID NO: 181441 - protein, 59 aa, Zea Mays
MMTPKKKRKKRVFKLKLNHNRRYDQTILDHRRRPGVQAASNACKQRLGQDVLLLASFLH

SEQ ID NO: 181442 - protein, 85 aa, Zea Mays
MATTKDPATTGGEPAIGIPYHPAAEAQGHYYYAPPPNPYAAGMPPPNAIYAGAPKGVPLQQTMFRDTPAPFHCQACGEAAVSSVR

SEQ ID NO: 181443 - protein, 321 aa, Zea Mays
MQEGVKQTKGNVITPRVKPEINTHSAPILAGNLPDPSERSWQTKPSSAKLSYKLPMPVDDKDPRSAGAQRPHHSQQLESKPRVSANPWHSSPLTKDFRPGGHVKTPPSAEGASAFSQPVSDFKKMKRQFYSGPMASGPGLSMPSSLNDRRSSAAQAQHLVMPGNLQGLFWQPSSASPKVPPKMLGRHPTKSPRISELHELPRPPPASVESLRPSGLVGYSGPLVSKRQTQIPAATARVSPTASRTPSPLPPPPATLTRSYSIPSNSQRIPIVTADRLLEARNSRDGSDIYSPPLTPLSLTDLSQQQGTKTTAGGTRMKGAL

SEQ ID NO: 181444 - protein, 532 aa, Zea Mays
MKSPLRRFRGFGHHHTKEERRGHHQPPPAKLDELVCAAQEVEDMRDCYDGLIAAAAATTNSVYEFSEALEELGGCFLAKTALNGDDDDDSGSRVLMKLGKAQFELQKLVDTYRSNIIYTITTPSESLLKELQTVEEMKQQCDMKRETYEAMRASYTQKGRSRHSKTETYSAEQLQSALAEYQEDAALFIFRLKSLRQGQFHSLLTQASRHHAAQLSFFRRGLNCLEALEPHVKAIAEKQHIDYQFSGLEDDASDNDDYSSYQDDCSDDGELSFDYEINDKDQYFVASSGSMDLDKRDVTNSPQPVKESMQEGVKQTKGNVITPRVKPEINTHSAPILAGNLPDPSERSWQTKPSSAKLSYKLPMPVDDKDPRSAGAQRPHHSQQLESKPRVSANPWHSSPLTKDFRPGGHVKTPPPASVESLRPSGLVGYSGPLVSKRQTQIPAATARVSPTASRTPSPLPPPPATLTRSYSIPSNSQRIPIVTADRLLEARNSRDGSDIYSPPLTPLSLTDLSQQQGTKTTAGGTRMKGAL

SEQ ID NO: 181445 - protein, 465 aa, Zea Mays
MKSPLRRFRGFGHHHTKEERRGHHQPPPAKLDELVCAAQEVEDMRDCYDGLIAAAAATTNSVYEFSEALEELGGCFLAKTALNGDDDDDSGSRVLMKLGKAQFELQKLVDTYRSNIIYTITTPSESLLKELQTVEEMKQQCDMKRETYEAMRASYTQKGRSRHSKTETYSAEQLQSALAEYQEDAALFIFRLKSLRQGQFHSLLTQASRHHAAQLSFFRRGLNCLEALEPHVKAIAEKQHIDYQFSGLEDDASDNDDYSSYQDDCSDDGELSFDYEINDKDQYFVASSGSMDLDKRDVTNSPQPVKESMQEGVKQTKGNVITPRVKPEINTHSAPILAGNLPDPSERSWQTKPSSAKLSYKLPMPVDDKDPRSAGAQRPHHSQQLESKPRVSANPWHSSPLTKDFSQRGVPQAFWFGRLLWSSGIQASDSDPCSHSPCVADSVTNPLAASTAACYPDSQLLHTIK

SEQ ID NO: 181446 - protein, 493 aa, Zea Mays
MKQQCDMKRETYEAMRASYTQKGRSRHSKTETYSAEQLQSALAEYQEDAALFIFRLKSLRQGQFHSLLTQASRHHAAQLSFFRRGLNCLEALEPHVKAIAEKQHIDYQFSGLEDDASDNDDYSSYQDDCSDDGELSFDYEINDKDQYFVASSGSMDLDKRDVTNSPQPVKESMQEGVKQTKGNVITPRVKPEINTHSAPILAGNLPDPSERSWQTKPSSAKLSYKLPMPVDDKDPRSAGAQRPHHSQQLESKPRVSANPWHSSPLTKDFRPGGHVKTPPSAEGASAFSQPVSDFKKMKRQFYSGPMASGPGLSMPSSLNDRRSSAAQAQHLVMPGNLQGLFWQPSSASPKVPPKMLGRHPTKSPRISELHELPRPPPASVESLRPSGLVGYSGPLVSKRQTQIPAATARVSPTASRTPSPLPPPPATLTRSYSIPSNSQRIPIVTADRLLEARNSRDGSDIYSPPLTPLSLTDLSQQQGTKTTAGGTRMKGAL

SEQ ID NO: 181447 - protein, 144 aa, Zea Mays
MANGEDIQPLVCDNGTRMVKAGFAGDDAPRAVFPSIVGRPRHTGVMVGMGQKDAYVGDEAQSKRGILTLKYPIEHGIVSNWDDMEKIWHHTFYNELRVALEEHPVLLTKAPLNPKANREKMTQIMFETFNVPAMEKMTQRSTLS

SEQ ID NO: 181448 - protein, 220 aa, Zea Mays
MSSDAVAEARKGRLKQRYDNEFRLVAGCVPYRVNKKDDDEVAGSPCSSSLGDDTGTAEVEVLMISTPNRADMVFPKGGWEDDEDVYQAASRETMEEAGVKGVIHRAALGHWVFKSKSSQSRAGPTGACKGYIFAMEVTEELDTWPEQDTHDRRWVAPAEAYQLCRYDWMREALTALLERLPVLEPVVAAAAAAATAELTTDQAGMYMMLQATSDGAVALC

SEQ ID NO: 181449 - protein, 106 aa, Zea Mays
MTSEQTCLCCFVCLKLEISTFKCSFRFFWDDSLFIIAGYNAHGLVHLFFFCTQVCHFGDFSTIPVDPVAFARERDMPSDSDRTLNEDKCFISCSMPQEHQKIFELG

SEQ ID NO: 181450 - protein, 364 aa, Zea Mays
MHFQTWRIGILFFAAGNCLNFMSFAYAAQSLLAALGSIQFVSNIAFAYFVLNKTISVKVMVATTFIVFGNIFLVSFGNHQSPVYTPEQLIAKYSNLVFVLYCMSLVFVVAFNHYLYRSGETIISNSSKDAGTYWRTMLPFSYAVVSGAIGSCSVLFAKSLSNMLRLTMSSRYEFHSWFTYSIVLLFLCTAGFWMARLNEGLSLFDAILIVPMFQIAWTFFSICTGFVYFQEYQVFDTLRIIMFVLGMTFVFVGISLLAPDDSKDGSSTADDSIIDIDRNGKMPMEETDTDDSISFVTSVKVNAKRVLSKAKSACSMSLGLGESTISASSVLAMPMVSSRTTGFRGIGNDRPKYVPLRTTDWSNL

SEQ ID NO: 181451 - protein, 274 aa, Zea Mays
MGDWIIGALINIVGSVAINFGTNLLKLGHDQREKLSSINNSEGNEKFVPKSVMHFQTWRIGILFFAAGNCLNFMSFAYAAQSLLAALGSIQFVSNIAFAYFVLNKTISVKVMVATTFIVFGNIFLVSFGNHQSPVYTPEQLIAKYSNLVFVLYCMSLVFVVAFNHYLYRSNMLRLTMSSRYEFHSWFTYSIVLLFLCTAGFWMARLNEGLSLFDAILIVPMFQIAWTFFSICTGFVYFQEYQVFDTLRIIMFVLGMTFVFVGISLLAPDDSKGW

SEQ ID NO: 181452 - protein, 409 aa, Zea Mays
MGDWIIGALINIVGSVAINFGTNLLKLGHDQREKLSSINNSEGNEKFVPKSVMHFQTWRIGILFFAAGNCLNFMSFAYAAQSLLAALGSIQFVSNIAFAYFVLNKTISVKVMVATTFIVFGNIFLVSFGNHQSPVYTPEQLIAKYSNLVFVLYCMSLVFVVAFNHYLYRSGETIISNSSKDAGTYWRTMLPFSYAVVSGAIGSCSVLFAKSLSNMLRLTMSSRYEFHSWFTYSIVLLFLCTAGFWMARLNEGLSLFDAILIVPMFQIAWTFFSICTGFVYFQEYQVFDTLRIIMFVLGMTFVFVGISLLAPDDSKADTKDGSSTADDSIIDIDRNGKMPMEETDTDDSISFVTSVKSACSMSLGLGESTISASSVLAMPMVSSRTTGFRGIGNDRPKYVPLRTTDWSNL

SEQ ID NO: 181453 - protein, 309 aa, Zea Mays
MVATTFIVFGNIFLVSFGNHQSPVYTPEQLIAKYSNLVFVLYCMSLVFVVAFNHYLYRSGETIISNSSKDAGTYWRTMLPFSYAVVSGAIGSCSVLFAKSLSNMLRLTMSSRYEFHSWFTYSIVLLFLCTAGFWMARLNEGLSLFDAILIVPMFQIAWTFFSICTGFVYFQEYQVFDTLRIIMFVLGMTFVFVGISLLAPDDSKADTKDGSSTADDSIIDIDRNGKMPMEETDTDDSISFVTSVKVNAKRVLSKAKSACSMSLGLGESTISASSVLAMPMVSSRTTGFRGIGNDRPKYVPLRTTDWSNL

SEQ ID NO: 181454 - protein, 262 aa, Zea Mays
MVATTFIVFGNIFLVSFGNHQSPVYTPEQLIAKYSNLVFVLYCMSLVFVVAFNHYLYRSNMLRLTMSSRYEFHSWFTYSIVLLFLCTAGFWMARLNEGLSLFDAILIVPMFQIAWTFFSICTGFVYFQEYQVFDTLRIIMFVLGMTFVFVGISLLAPDDSKDGSSTADDSIIDIDRNGKMPMEETDTDDSISFVTSVKVNAKRVLSKAKSACSMSLGLGESTISASSVLAMPMVSSRTTGFRGIGNDRPKYVPLRTTDWSNL

SEQ ID NO: 181455 - protein, 206 aa, Zea Mays
MVATTFIVFGNIFLVSFGNHQSPVYTPEQLIAKYSNLVFVLYCMSLVFVVAFNHYLYRSGETIISNSSKDAGTYWRTMLPFSYAVVSGAIGSCSVLFAKSLSNMLRLTMSSRYEFHSWFTYSIVLLFLCTAGFWMARLNEGLSLFDAILIVPMFQIAWTFFSICTGFVYFQEYQVFDTLRIIMFVLGMTFVFVGISLLAPDDSKGW

SEQ ID NO: 181456 - protein, 471 aa, Zea Mays
MGTANGQQPAEGAPSDKLRHVESMSELPSGAGKISGINAVVLGESLAAEENDLIVPSPEFSASALVSSPKQYREMYERSIKDPAGFWSEIAETFYWKEKWNPAEVCSENLDVTKGPVQINWFKGGKTNICYNAVDRNIESGNGDKVAMYWEGNEPGQDGKLTYSELLEKVCQLANYLKSLGVGKGDAVIIYLPMLLELPIAMLACARIGAVHSVVFAGFSADSLAQRIVDCKPKLVITCNAVKRGVKPIFLKDIVDAALVESEKNGVSVGLCLTYENQSAMKRENTKWQAERDVWWQDVVTKFPTKCDVEWVDAEDPLFLLYTSGSTGKPKGVLHTSGGYMVYTATTFKYAFDYKPTDIYWCTADCGWITGHSYVTYGPLLNGATVLVFEGTPNYPDSGRCWDIVDKYNVTIFYTAPTLVRSLMRDGTEYVTRYSRKSLRVLGSVDGSTILLGIPGALYQTPGGKLKLAVS

SEQ ID NO: 181457 - protein, 114 aa, Zea Mays
MVVFRPLEKTQMLAILDIILKEVKGRLLALGIGLEVSDAMKDLICQEGYDKSYGARPLRRAVTHIIEDVISEAILFGEFKPGDTILMDIDAEGKPCMGHLDQQIVQVSDPTRAI

SEQ ID NO: 181458 - protein, 869 aa, Zea Mays
MEVCCCSTSSSVLTAGGRGAAARRLAAPAARWGAAGFGRAVVLAHPLPRPASAAAAAPTRRARRGGVGVVRAVFERFTERAVKAVVLSQREARGLGEPAVAPRHLLLGLVAEDRSSGGFLSSGINIERAREECRGIAASARDADSATAASRPGSSGLDTDVPFAAPTKQVFDVAVVLSKNMGSSFVSPEHLAIALFSLDDPTTNNLLRSLGADPSHLASVAVDRLQAELAKDGRDPAEPSSFKVPKKAPAAAGRSAFSQSLTKKKDKGALDQFCLDLTTQASGGFIDPIIGREEEIERVVQIVCRRTKNNPILLGEAGVGKTAIAEGLALRIANGDVPIYLVAKRILSLDVGLLIAGAKERGELESRVTNIIREVREAGDVILFIDEVHNLIGSGTVGKSKGSGLDIGNLLKPALARGELQCIAATTLDEHRMHFEKDKALARRFQPVLVDEPSQEDAVKILLGLREKYETYHKCKFTLEAINAAVYLSARYIPDRQLPDKAIDLIDEAGSRARMESFNRKKEGQSSILLKSPDEYWQEIRAAQAMHEVVLSNKEKYSPNENAEESGSANVEALHRDNIESTSTSSLSADEPVVVGTEEIARVASLWSGIPVQQLTADDKKLLVGLDDELRKRVIGQDDAVVAISRAVKRSRVGLNDPDRPIATLLFCGPTGVGKTELTKALAASYFGSGRRVSFKNTLIVMTSNVGSTSISKGRQSIGFLKEDTESGSYFAMKSLVMEELKAFFRPELLNRIDEMVVFRPLEKTQMLAILDIILKEVKGRLLALGIGLEVSDAMKDLICQEGYDKSYGARPLRRAVTHIIEDVISEAILFGEFKPGDTILMDIDAEGKPCMGHLDQQIVQVSDPTRAI

SEQ ID NO: 181459 - protein, 101 aa, Zea Mays
MCVLSVETWASRRSSFSSMESSGTFPMEPDRGVDAPLVFDTKLMRPPLEGLFGDRRGERRRRLEPGTDLRGMINHQRIEIIRAVTGERYSHATANVGTRDR

SEQ ID NO: 181460 - protein, 342 aa, Zea Mays
MTSWQLLLIIHQFSTASYKDALPEILEVLRAACLTHKLPLAQTWVTCAQQGKRGNRHSDENYRYCISTIDEACFVNEAEMRGFHETCSEHHLLRGEGLKGAVAIRLRCTRTGTTDFVLEFFLPTDCEALEDQNIVLDSLSGTMRSVCQTLRVVTNREMEDEAVLEMNELNSFTPHGKDKVELSFGGNSADRRGEASWTSLAGTSQQESELAALRMHGMFSPGGQGPSLSGVQATAEGSKAKRRTKAEKTVSLQILRQYFAGSLKDAARSLGGDNSRSAGIMSLSRLCVYGSSSITYVLSARGTSGELVLFVRRPEMVLDYGGIQPLLFNSLSSLTKWMKMEI

SEQ ID NO: 181461 - protein, 226 aa, Zea Mays
MEEGGDPQLPSISARTTSEGAGGVDLDLLEQLLSDDNGWLETGGASPSSVEEQFSQALSYIRDTQSDGDVLVQLWVPVNHDDGKLVLTTSEQPFTLDHRSDSLLRFREVSTKYQFSANVKSGDSPGLSGRVFIGRLPEWSPDIRYFTSYEYPRVRDAQYLDVHGTMGLPVFEKGSYNCLGVIELIMIRQKINFTSELNTICSALQAVNLRSTEVSSIPRIKIGAQI

SEQ ID NO: 181462 - protein, 206 aa, Zea Mays
MEEGGDPQLPSISARTTSEGAGGVDLDLLEQLLSDDNGWLETGGASPSSVEEQFSQALSYIRDTQSDGDVLVQLWVPVNHDDGKLVLTTSEQPFTLDHRSDSLLRFREVSTKYQFSANVKSGDSPGLSGRVFIGRLPEWSPDIRYFTSYEYPRVRDAQYLDVHGTMGLPVFEKGSYNCLGVIELIMIRQKINFTSELNTICSALQV

SEQ ID NO: 181463 - protein, 273 aa, Zea Mays
MTSWQLLLIIHQFSTASYKDALPEILEVLRAACLTHKLPLAQTWVTCAQQGKRGNRHSDENYRYCISTIDEACFVNEAEMRGFHETCSEHHLLRGEGLKGAVAIRLRCTRTGTTDFVLEFFLPTDCEALEDQNIVLDSLSGTMRSVCQTLRVVTNREMEDEAVLEMNELNSFTPHGKDKVELSFGGNSADRRGEASWTSLAGTSQQESELAALRMHGMFSPGGQGPSLSGVQATAEGSKAKRRTKAEKTVSLQILRQYFAGSLKDAARSLGGA

SEQ ID NO: 181464 - protein, 143 aa, Zea Mays
MGLDLRMNLSIFLTIYISSIIFLMVFHTIFLGLWYLGFVSRMAEKKPEMLTIIQNCAVISIACCVFYSHCGNRTVSSDKSIDRRTASWIVFSLWTKHDDNTLIPRLLRMHKFKLQICSSWFPPVSIHTGKLKSVFEIYYVVYG

SEQ ID NO: 181465 - protein, 61 aa, Zea Mays
MEITNLLSVVSHDPSSRRWSSPQKTTSISQVSLHMHYMIRSMYSSHRSCWRQKERTMVKRG

SEQ ID NO: 181466 - protein, 125 aa, Zea Mays
MDYINWDLESDIIEWKIQENNCNLWERGDGNHEPFVRGLGQIQLKFGDFKSSLGSFEKVLEVHPENCESLKAIGHIHAKSGETEKAIETFKEVTRIDPKDHQVLASPSPQPLLSWLHVFGSKEVL

SEQ ID NO: 181467 - protein, 85 aa, Zea Mays
MCHSTTFLGLTTVSCIMKLLDDSFRVINQKMNKTKCGSCSISDDEYDVYSNYFLFVFSPRLLVAFLLSVMRPHINFTDRLFHVCI

SEQ ID NO: 181468 - protein, 133 aa, Zea Mays
MDYINWDLESDIIEWKIQENNCNLWERGDGNHEPFVRGLGQIQLKFGDFKSSLGSFEKVLEVHPENCESLKAIGHIHAKSGETEKAIETFKEVTRIDPKDHQAFVELGELLVESDWAAAMEYLKTVSFSVSSV

SEQ ID NO: 181469 - protein, 68 aa, Zea Mays
MQVAWKAWPQAGSTRTTSLASYSSRHTVHLRPQREREHQRSCQSVWRGGGFCNSSCRMQSRQDLLRDC

SEQ ID NO: 181470 - protein, 81 aa, Zea Mays
MKENERLRKAALLLNQENQALLSELKHRLAKSAAGGGGGGSNSNAAAASRASPKPGADADAAAPPSHHQAGGMPAPKPKPK

SEQ ID NO: 181471 - protein, 206 aa, Zea Mays
MPLIFWHLFLTRSANCLSDYFFQFLYFYWSSMEHPAPAISLLMYYIIVYNCRDLFCCLHPFLLSLLCKFSSSPLNLSLVYGSSTCLLFMMDFLSSFHHFLLPSINSYFCAPYSLFFWHLTGLAMFCCMPTTLSSGVTLTQLVGGNSALALAMTVASNLLGIIIVPLSLAKYISNGVGVSLPTEQLFKSLVTSLLIPLIIGKTIVPS

SEQ ID NO: 181472 - protein, 249 aa, Zea Mays
MITHHPSLIRPSVLTLRADVLRRRPTLHAVASAPPPRLWSLRATTGGTSPVSGDGGKRAVPLPTRGPALLGFVRSNFLPLALIGGIILGLLDPTLGCLAHKYSLSKYSTFGIFVISGLTLRTRELGAALEAWPAGLYGLGSILLFTPFLAQFIMQVQFFPPEFITGLAMFCCMPTTLSSGVTLTQLVGGNSALALAMTVASNLLGIIIVPLSLAKYISNGVGVSLPTEQLFKSLVTSLLIPLIIGKGLF

SEQ ID NO: 181473 - protein, 251 aa, Zea Mays
MITHHPSLIRPSVLTLRADVLRRRPTLHAVASAPPPRLWSLRATTGGTSPVSGDGGKRAVPLPTRGPALLGFVRSNFLPLALIGGIILGLLDPTLGCLAHKYSLSKYSTFGIFVISGLTLRTRELGAALEAWPAGLYGLGSILLFTPFLAQFIMQVQFFPPEFITGLAMFCCMPTTLSSGVTLTQLVGGNSALALAMTVASNLLGIIIVPLSLAKYISNGVGVSLPTEQLFKSLVTSLLIPLIIGKTIVPS

SEQ ID NO: 181474 - protein, 320 aa, Zea Mays
MITHHPSLIRPSVLTLRADVLRRRPTLHAVASAPPPRLWSLRATTGGTSPVSGDGGKRAVPLPTRGPALLGFVRSNFLPLALIGGIILGLLDPTLGCLAHKYSLSKYSTFGIFVISGLTLRTRELGAALEAWPAGLYGLFLYFYWSSMEHPAPAISLLMYYIIVYNCRDLFCCLHPFLLSLLCKFSSSPLNLSLVYGSSTCLLFMMDFLSSFHHFLLPSINSYFCAPYSLFFWHLTGLAMFCCMPTTLSSGVTLTQLVGGNSALALAMTVASNLLGIIIVPLSLAKYISNGVGVSLPTEQLFKSLVTSLLIPLIIGKGLF

SEQ ID NO: 181475 - protein, 203 aa, Zea Mays
MPCTQILPVKVQHFWDIRYLRDLFCCLHPFLLSLLCKFSSSPLNLSLVYGSSTCLLFMMDFLSSFHHFLLPSINSYFCAPYSLFFWHLTGLAMFCCMPTTLSSGVTLTQLVGGNSALALAMTVASNLLGIIIVPLSLAKYISNGVGVSLPTEQLFKSLVTSLLIPLIIGKVARETSKGIADFVDGNRQGFSVASAVLLSLVCL

SEQ ID NO: 181476 - protein, 120 aa, Zea Mays
MITHHPSLIRPSVLTLRADVLRRRPTLHAVASAPPPRLWSLRATTGGTSPVSGDGGKRAVPLPTRGPALLGFVRSNFLPLALIGGIILGLLDPTLGCLAHKYSLSKYSTFGIFVISGSVA

SEQ ID NO: 181477 - protein, 322 aa, Zea Mays
MITHHPSLIRPSVLTLRADVLRRRPTLHAVASAPPPRLWSLRATTGGTSPVSGDGGKRAVPLPTRGPALLGFVRSNFLPLALIGGIILGLLDPTLGCLAHKYSLSKYSTFGIFVISGLTLRTRELGAALEAWPAGLYGLFLYFYWSSMEHPAPAISLLMYYIIVYNCRDLFCCLHPFLLSLLCKFSSSPLNLSLVYGSSTCLLFMMDFLSSFHHFLLPSINSYFCAPYSLFFWHLTGLAMFCCMPTTLSSGVTLTQLVGGNSALALAMTVASNLLGIIIVPLSLAKYISNGVGVSLPTEQLFKSLVTSLLIPLIIGKTIVPS

SEQ ID NO: 181478 - protein, 148 aa, Zea Mays
MPSCLKKSCKRLLAPQVSGDGGKRAVPLPTRGPALLGFVRSNFLPLALIGGIILGLLDPTLGCLAHKYSLSKYSTFGIFVISGLTLRTRELGAALEAWPAGLYGLFLYFYWSSMEHPAPAISLLMVSYVLLHANNTIKWSHTNTACWW

SEQ ID NO: 181479 - protein, 146 aa, Zea Mays
MICVCQIKVDARGGARRRGAAAAGNPKFRRRWAGAGAARAFRVFFLLGLGLPPFPFPSPASAATRRDEARAPPVRRREDRVRDSGWSDTCRVVSQPSVHGQVCCLASQSALLCSALPCGKTRHARHKKPSSRVTSSRRQSRLGWLL

SEQ ID NO: 181480 - protein, 214 aa, Zea Mays
MELGDRFYLAGFSMGGEIMWSCLKYIPHRLSGVAILGPVGNFWWSGLPANVSLEAWNVQVAQDKWAVGVAHHAPWLTYWWNTQKLFPASSVIAFNPAIMSPADMELIPSFAYRTHAYQARQQGEHESLHRDMMVGFGKWSWSPLELEDPFPDGDGKVHLWHGAEDLIVPVGLSRHISKSLPWVRYHELPTAGHLFPMADGMADVIVKSLLLGDE

SEQ ID NO: 181481 - protein, 83 aa, Zea Mays
MMVGFGKWSWSPLELEDPFPDGDGKVHLWHGAEDLIVPVGLSRHISKSLPWVRYHELPTAGHLFPMADGMADVIVKSLLLGDE

SEQ ID NO: 181482 - protein, 231 aa, Zea Mays
MAPSPLCSASPRPLRAPGQPPRDVRSPRTVVVAAGTRVSGAEARASLVLALASHALSASQRRFAELADEAAKYAFPSGRFEPRTLEEALMSVPDLETVPFRVLKREAEYEIREVESYFVAETTMPGRSGFDFNGSSQSFNVLASYLFGKNTASEQMEMTTPVFTRKGESNGQSMDMTTPVITKKSAGTNKWKMSFVMPAKYGSNLPRPKDPSVIIKEVPSKIVAVAAFSGP

SEQ ID NO: 181483 - protein, 137 aa, Zea Mays
MEMTTPVFTRKGESNGQSMDMTTPVITKKSAGTNKWKMSFVMPAKYGSNLPRPKDPSVIIKEVPSKIVAVAAFSGLVTDDDINQRESKLRESLRKDTTFRVKDDSVVEVAQYNPPFTLPFTRRNEIALEVERNDIAL

SEQ ID NO: 181484 - protein, 118 aa, Zea Mays
MAAAAGRKVAVAAVQFACTDVEAENVATAERLIREAHKKGAKIVLVQELFEGHYFCQAQRLDFFRRAKPYKGNPTIISLLTTKTRKCWWQSLTWMRSSRLGMVGGYSGTGALNYTKCY

SEQ ID NO: 181485 - protein, 134 aa, Zea Mays
MHIIIRWLLSMLMALILDSIANHTFQMDQDIKRSFISTPVTLALRLSKPSMPPLVLESAGISGFQSVQEQWHFWGLKYCFIPLQLDPNPRIVTWIPVNIGSGLCKAMLVPTWSLLLLPTGLAEKLLTLSMARAR

SEQ ID NO: 181486 - protein, 107 aa, Zea Mays
MSRCPPVVLVFLLVVLIITSQFEWKQQLVNELESTARNQKHVSSREELVKDQIIFTQEKMIQRLNNFVRNLQQQLVQCRGNNRTVNRSGTSLTSYISEIQMPQMMDD

SEQ ID NO: 181487 - protein, 118 aa, Zea Mays
MSRCPGFLSYNIMVSKPVVLVFLLVVLIITSQFEWKQQLVNELESTARNQKHVSSREELVKDQIIFTQEKMIQRLNNFVRNLQQQLVQCRGNNRTVNRSGTSLTSYISEIQMPQMMDD

SEQ ID NO: 181488 - protein, 474 aa, Zea Mays
MTINHQSISCKMAKCDDDRSGNGSAAPRCLSLLDAGGSGRLTAVSSFCAADCSATKCDATVKSSIPPWLQHCRDHQEPSRCKKSSTCGGSPSHHHRTALNFSTVVSPSSSVSSYEQHYHLRHQSYQPWLLVADGAREAEHPCNKARCSAAVQLHVVDDEDGKPLSAIKVKSHDSSASNGSVECRSRFKELSAENLKVLCSALEKEVPWQAEIVPEIASTVLQCRSGMARRREAAVSSSRPSSTQACAKEDTWMLFHGGDAEGKARVARELARLVFGSRKSFVSIGGSRTTASSPACWSDGSSEQQRKRPRLTEASNHGCRHESLYEAVRDNPHRVILVQDVEQGGCWRCQRDILEAIQSGLVRSRAGDDDAALGDAIVVLSCQSLDAWSTTTSPLTTKKAKAESKEEPEEEESAGDHRRKEAITAAAASPSSSLCFDLNMDVENHDTESCFTDASLLKAVDRTFFFRRPDESSD

SEQ ID NO: 181489 - protein, 612 aa, Zea Mays
MIRDGIKEFERRSQTKEIFEGLRSTGELVEKFKSSLKSFNMESQGSKEIQPLDLPEILANLVRQSEPFLDQLGVRRDQCDKLVEALCRKQNHSLSENTSLPVNDKSSDELDLRIASVLQSSGYHADDGFWSEPTKSEVSDDKRHVAIVTTASLPWMTGTAVNPLFRAAYLAKGTRQDVTLVVPWLCKSDQELVYPNSMTFSSPEEQETYIRSWLEERLGFESNFKISFYPGKFSKERRSIIPAGDTSQFIPSREADIAILEEPEHLNWYHHGKRWTDKFNHVVGVVHTNYLEYIKREKNGALQAFLVKHINNWVTRAYCDKVLRLSAATQDLPKSIVCNVHGVNPKFLKIGEEITANRGSGEPPFSKGAYFLGKMVWAKGYRELIDLMAKHKSDLEGFKLDVYGSGEDSQEVQSTARRLDLSLNFFKGRDHADNSLHGYKVFINPSISDVLCTATAEALAMGKFVICAEHPSNEFFMSFPNCLTYKTSEEFVARVKEAMDREPQPLTPEQRYNLSWEAATERFMEYSDLDKVLNNEAAQPGQGRKRKNKRTSQPNLSDIMDGGLALAHRCLTGNEVLRLATGAIPGTRDYDKQHCVDMGLLPPQVQHPVYGW

SEQ ID NO: 181490 - protein, 521 aa, Zea Mays
MEARASPRPSVSIGGGGGFGAGRGDDSAFSFLSKGWREVRDSATADLRLMRARADSLRTLADRELEHILASASTALTSAPPPPLAAGAPIAELEFVRTRIQPKISELRRRYVSQERELGRRVLEGWAPRGAGKPARARVDLSGITAIRNAIVSEVDGGERWRRVVWNGEAEEGKEWEVLRMIRDGIKEFERRSQTKEIFEGLRSTGELVEKFKSSLKSFNMESQGSKEIQPLDLPEILANLVRQSEPFLDQLGVRRDQCDKLVEALCRKQNHSLSENTSLPVNDKSSDELDLRIASVLQSSGYHADDGFWSEPTKSEVSDDKRHVAIVTTASLPWMTGTAVNPLFRAAYLAKGTRQDVTLVVPWLCKSDQELVYPNSMTFSSPEEQETYIRSWLEERLGFESNFKISFYPGKFSKERRSIIPAGDTSQFIPSREADIAILEEPEHLNWYHHGKRWTDKFNHVVGVVHTNYLEYIKREKNGALQAFLVKHINNWVTRAYCDKQLKIYQSLLFAMFMVLTQSS

SEQ ID NO: 181491 - protein, 358 aa, Zea Mays
MEARASPRPSVSIGGGGGFGAGRGDDSAFSFLSKGWREVRDSATADLRLMRARADSLRTLADRELEHILASASTALTSAPPPPLAAGAPIAELEFVRTRIQPKISELRRRYVSQERELGRRVLEGWAPRGAGKPARARVDLSGITAIRNAIVSEVDGGERWRRVVWNGEAEEGKEWEVLRMIRDGIKEFERRSQTKEIFEGLRSTGELVEKFKSSLKSFNMESQGSKEIQPLDLPEILANLVRQSEPFLDQLGVRRDQCDKLVEALCRKQNHSLSENTSLPVNDKSSDELDLRIASVLQSSGYHADDGFWSEPTKSEVSDDKRHVAIVTTASLPWMTGTAVNPLFRAAYLAKVLKRAA

SEQ ID NO: 181492 - protein, 102 aa, Zea Mays
MFTVHCIWGYLVHYGGVKSDGTFLSLPSSGLVMFTVALCLSHVLFAMLGVVLWRQLTRAHFLLCCIIRRGMLNQLSAVRATNLLHRCILTGLNRLDVLLCFG

SEQ ID NO: 181493 - protein, 613 aa, Zea Mays
MSDFDEQDDIFLETSDDTRSSAYFSARCSTSEQLSASWGPEDELWTSELLSVNERRHRFLVRMGFAKPIPTGITFSQWQGEILADRAFRDLEDRINSICSSYRPSFSHGASAPDSTRNSVVLELDEIEHHELTGILDEKGSGRSPARGMEIEFSEKQNDPKSFCGRFKRKEEEDIICMHDTRMKSLKSGTLFATKVDQQNKKWMDFSALYMCQEIHAHGGSISVMKFSTSGRYLASVGEDCVVRIWRIHEVESSPDLYIRETPVKSMDRNMGLKMKVGKGRGRALAIIPRKVFNIAETPLHEFHGHTSDILDMTWSKSNFLLTSSKDKTVRMWKVGCDDCLAVFKHRDYERRVVDWADAKDIITAVGYQPDGQGLIVGIAAGRCRFYNHAGENVELEKVLKVTKKKSAGRQITSLQFSCGDPARILIASAGSKIRVSDGGAKINRKFEGRRGSKVLVPPSLTSDGQYLVSAGADSNVYIWDLDRPARGKSRTRGPRRVRSCEHFFSEGVTSVATWPGLAHQQEDLQSPEKGAAPTLCRDRELCSFGTWFSADGARGAATWPEEKLLPSLRYVNCAGMDDCRAKVSAAWNKVVVTGGSDGVIRCFHNYGLPVKL

SEQ ID NO: 181494 - protein, 363 aa, Zea Mays
MSDFDEQDDIFLETSDDTRSSAYFSARCSTSEQLSASWGPEDELWTSELLSVNERRHRFLVRMGFAKPIPTGITFSQWQGEILADRAFRDLEDRINSICSSYRPSFSHGASAPDSTRNSVVLELDEIEHHELTGILDEKGSGRSPARGMEIEFSEKQNDPKSFCGRFKRKEEEDIICMHDTRMKSLKSGTLFATKVDQQNKKWMDFSALYMCQEIHAHGGSISVMKFSTSGRYLASVGEDCVVRIWRIHEVESSPDLYIRETPVKSMDRNMGLKMKVGKGRGRALAIIPRKVFNIAETPLHEFHGHTSDILDMTWSKSNFLLTSSKDKTVRMWKVGCDDCLAVFKHRDYGSYRWHRCREVPVL

SEQ ID NO: 181495 - protein, 353 aa, Zea Mays
MSDFDEQDDIFLETSDDTRSSAYFSARCSTSEQLSASWGPEDELWTSELLSVNERRHRFLVRMGFAKPIPTGITFSQWQGEILADRAFRDLEDRINSICSSYRPSFSHGASAPDSTRNSVVLELDEIEHHELTGILDEKGSGRSPARGMEIEFSEKQNDPKSFCGRFKRKEEEDIICMHDTRMKSLKSGTLFATKVDQQNKKWMDFSALYMCQEIHAHGGSISVMKFSTSGRYLASVGEDCVVRIWRIHEVESSPDLYIRETPVKSMDRNMGLKMKVGKGRGRALAIIPRKVFNIAETPLHEFHGHTSDILDMTWSKSNFLLTSSKDKTVRMWKVGCDDCLAVFKHRDYVQSC

SEQ ID NO: 181496 - protein, 580 aa, Zea Mays
MGFAKPIPTGITFSQWQGEILADRAFRDLEDRINSICSSYRPSFSHGASAPDSTRNSVVLELDEIEHHELTGILDEKGSGRSPARGMEIEFSEKQNDPKSFCGRFKRKEEEDIICMHDTRMKSLKSGTLFATKVDQQNKKWMDFSALYMCQEIHAHGGSISVMKFSTSGRYLASVGEDCVVRIWRIHEVESSPDLYIRETPVKSMDRNMGLKMKVGKGRGRALAIIPRKVFNIAETPLHEFHGHTSDILDMTWSKSNFLLTSSKDKTVRMWKVGCDDCLAVFKHRDYVTCIQFNPVDEGYFVSGSIDGKVRVWDVSERRVVDWADAKDIITAVGYQPDGQGLIVGIAAGRCRFYNHAGENVELEKVLKVTKKKSAGRQITSLQFSCGDPARILIASAGSKIRVSDGGAKINRKFEGRRGSKVLVPPSLTSDGQYLVSAGADSNVYIWDLDRPARGKSRTRGPRRVRSCEHFFSEGVTSVATWPGLAHQQEDLQSPEKGAAPTLCRDRELCSFGTWFSADGARGAATWPEEKLLPSLRYVNCAGMDDCRAKVSAAWNKVVVTGGSDGVIRCFHNYGLPVKL

SEQ ID NO: 181497 - protein, 442 aa, Zea Mays
MHAEEQHLHYSTLLSLHSDSGRSHPPQSHISGTCTSTVLQANHSLLPLPVFFVSPLGSSSRLTPSAPTATTSHTISVLQSRQTARTHNFHHTKPSTPHLSPQTSPIFTTTLSPTTTPFPSGCLTRLPTQIQLPSTKAAAFAILFHPRNPILPPDPSQNPPYVLAAPVPVQTLDNAVCAVESERCQLIPLGNTHEEIRQFARSDIHPRRCPGCSRSASSHVGHGAVPEHGGVWAPHVGARRHRRRCRLRATARPHLRPLPPRLPPSPSPAAAAGQPRAAAPHHRPAQESHECQGAQGHPRSPLPRRRRRPSEDAACARAGAPAPHATGLRAARDRQGAPRHAPGAAAAPQPPERRAFAARQRREPRWRRGARAPGGARGVPSGVGPLVHAQGAGDRDRDVRRRERDRRGRVRDRVPWRARKRHAGRRQELAKQQGAGREGIQG

SEQ ID NO: 181498 - protein, 724 aa, Zea Mays
MHAEEQHLHYSTLLSLHSDSGRSHPPQSHISGTCTSTVLQANHSLLPLPVFFVSPLGSSSRLTPSAPTATTSHTISVLQSRQTARTHNFHHTKPSTPHLSPQTSPIFTTTLSPTTTPFPSGCLTRLPTQIQLPSTKAAAFAILFHPRNPILPPDPSQNPPYVLAAPVPVQTLDNAVCAVESERCQLIPLGNTHEEIRQFARSDIHPRRCPGCSRSASSHVGHGAVPEHGGVWAPHVGARRHRRRCRLRATARPHLRPLPPRLPPSPSPAAAAGQPRAAAPHHRPAQESHECQGAQGHPRSPLPRRRRRPSEDAACARAGAPAPHATGLRAARDRQGAPRHAPGAAAAPQPPERRAFAARQRREPRWRRGARAPGGARGVPSGVGPLVHAQGAGDRDRDVRRRERDRRGRVRDRVPWRARKRHAGRRQELAKQQAEKEFKVEVEAIGRVRHKNLVRLLGYCAEGNQRMLVYEYVDNGNLEQWLHGDVGPRSPLAWDDRMKIILGTAKGLMYLHEGLEPKVVHRDVKSSNILLDKQWNAKLSDFGLAKLLGSERSYVTTRVMGTFGYVAPEYAGTGMLNETSDIYSFGILIMEIISGRVPVDYNRPPGEVNLVDWLKTMVSTRNSDGVVDPKIPKKPSSRALKKALLVALRCVDPDALKRPKISHVIHMLEVDDFPYRDDRRGTRAPGQARLPETPAGGSGRPETDSSGNGGSTQAEPFRWRNPEA

SEQ ID NO: 181499 - protein, 863 aa, Zea Mays
MQYNHRSRLPPPPLPFGRGGHPRGPKQPCYAPLPPPPFPPAPPPPPPSLERKYEVLMEAGRLATEYLVAQGVLPPAALQRGAGISGAWPDHPLPPPPQLQQQEPRGGYGRRRYKDEYNNNPRRANDTSSSTSSRDDCSRGSYNGRGKMKYGKYRRGYLDSGRDREKERRRPFPNGRRYEEDKDEDGAPGFRRERHGNRGSDEVRPHDTEALREGTPLTAKAVEGFCMEDATSKIMSSFKDTIKDSNDAPKVPEETEEGEVEDDRETQNSETEVVKQGIDTDVNHASCYVITESNPNQLSDGKIQDEIPDEEAEDDKKVMDEATLDHNTCDGEVTNMEVEMHVGKESLIDYCNFTRTPTRPRSARAHRNAASIPGEPAVVETFDLVSSGQASHMVSAESAERFFTKIVSENTEDKFCQENTSSGDVRAPPKELMLLQENGITVVTENMAEDNVDAEPHVVVQQYKEETNLSPLTDALEKSLRQEITLSPFAASHKDSLMQEGGLMQEVDLSPLTANHRESFTEETELPPSTASHKDSLIEGTDLTQTISSYNNNLKLQFKEGTQVCDIDMLPQDVNLIELPDQRKIIGRDVGAKAVTGMEEGKLDQSSSLNLSDVDLVGGTEVAAIHNNPVLVQLSAAGSSTESNNKQQQDPETFTGANASPTDDLCQLPLDNKDVQVVNIECGTPVEVGGFGLSKSIHNNPVLVQMSVAGSSAELINKQQEDPETFTGANANPTDDLCQLPLDNKDVQVIDIECGTPVEVGGFDLSKSKNKMVCSSMDSIMDPGDGIHTDVIPVVQDGYSLAFSDFLSSDIPCYPSMQSDLHAGISANDSEVSWTCGGSPLKTTTNSSRLPPKAQVHEFDKEN

SEQ ID NO: 181500 - protein, 881 aa, Zea Mays
MQYNHRSRLPPPPLPFGRGGHPRGPKQPCYAPLPPPPFPPAPPPPPPSLERKYEVLMEAGRLATEYLVAQGVLPPAALQRGAGISGAWPDHPLPPPPQLQQQEPRGGYGRRRYKDEYNNNPRRANDTSSSTSSRDDCSRGSYNGRGKMKYGKYRRGYLDSGRDREKERRRPFPNGRRYEEDKDEDGAPGFRRERHGNRGSDEVRPHDTEALREGTPLTAKAVEGFCMEDATSKIMSSFKDTIKDSNDAPKVPEETEEGEVEDDRETQNSETEVVKQGIDTDVNHASCYVITESNPNQLSDGKIQDEIPDEEAEDDKKVMDEATLDHNTCDGEVTNMEVEMHVGKESLIDYCNFTRTPTRPRSARAHRNAASIPGEPAVVETFDLVSSGQASHMVSAESAERFFTKIVSENTEDKFCQENTSSGDVRAPPKELMLLQENGITVVTENMAEDNVDAEPHVVVQQYKEETNLSPLTDALEKSLRQEITLSPFAASHKDSLMQEGGLMQEVDLSPLTANHRESFTEETELPPSTASHKDSLIEGTDLTQTISSYNNNLKLQFKEGTQVCDIDMLPQDVNLIELPDQRKIIGRDVGAKAVTGMEEGKLDQSSSLNLSDVDLVGGTEVAAIHNNPVLVQLSAAGSSTESNNKQQQDPETFTGANASPTDDLCQLPLDNKDVQVVNIECGTPVEVGGFGLSKSIHNNPVLVQMSVAGSSAELINKQQEDPETFTGANANPTDDLCQLPLDNKDVQVIDIECGTPVEVGGFDLSKSKNKMVCSSMDSIMDPGDGIHTDVIPVVQDGYSLAFSDFLSSDIPCYPSMQSDLHAGISANDSETRATKCILSPEQSSTLQPPVPLLLQALKRLQPEGMARRATQQPPERDQLL

SEQ ID NO: 181501 - protein, 837 aa, Zea Mays
MQYNHRSRLPPPPLPFGRGGHPRGPKQPCYAPLPPPPFPPAPPPPPPSLERKYEVLMEAGRLATEYLVAQGVLPPAALQRGAGISGAWPDHPLPPPPQLQQQEPRGGYGRRRYKDEYNNNPRRANDTSSSTSSRDDCSRGSYNGRGKMKYGKYRRGYLDSGRDREKERRRPFPNGRRYEEDKDEDGAPGFRRERHGNRGSDEVRPHDTEALREGTPLTAKAVEGFCMEDATSKIMSSFKDTIKDSNDAPKVPEETEEGEVEDDRETQNSETEVVKQGIDTDVNHASCYVITESNPNQLSDGKIQDEIPDEEAEDDKKVMDEATLDHNTCDGEVTNMEVEMHVGKESLIDYCNFTRTPTRPRSARAHRNAASIPGEPAVVETFDLVSSGQASHMVSAESAERFFTKIVSENTEDKFCQENTSSGDVRAPPKELMLLQENGITVVTENMAEDNVDAEPHVVVQQYKEETNLSPLTDALEKSLRQEITLSPFAASHKDSLMQEGGLMQEVDLSPLTANHRESFTEETELPPSTASHKDSLIEGTDLTQTISSYNNNLKLQFKEGTQVCDIDMLPQDVNLIELPDQRKIIGRDVGAKAVTGMEEGKLDQSSSLNLSDVDLVGGTEVAAIHNNPVLVQLSAAGSSTESNNKQQQDPETFTGANASPTDDLCQLPLDNKDVQVVNIECGTPVEVGGFGLSKSIHNNPVLVQMSVAGSSAELINKQQEDPETFTGANANPTDDLCQLPLDNKDVQVIDIECGTPVEVGGFDLSKSKNKMVCSSMDSIMDPGDGIHTDVIPVVQDGYSLAFSDFLSSDIPCYPSMQSDLHAGISANDSEGYYRYG

SEQ ID NO: 181502 - protein, 97 aa, Zea Mays
MDMLNTLKCYSVVYMRGRDGKSIVSLEKKLNQTVTHINVEIWLNICEKGGGNFLFFLSTEGEKCSVRGMFHAALWADLPAWYIYLKKGTALETVYQK

SEQ ID NO: 181503 - protein, 320 aa, Zea Mays
MAGGGAAYQSSSASPDWLNKGDNAWQMTSATLVGLQSMPGLVILYGSIVKKKWAINSAFMALYAFAAVWLCWVVWAYNMSFGDRLLPFWGKARPALGQRFLVAQSQLTATAVRYRDGSLEAEMLHPFYPAATMVYFQCVFASITVIILAGSLLGRMDIKAWMAFVPLWITFSYTVSAFSLWGGGFLFQWGVIDYSGGYVIHLSSGIAGLTAAYWVGPRSASDRERFPPNNILLVLAGAGLLWLGWTGFNGGDPYSANIDSSMAVLNTHICASTSLLMWTLLDVFFFGKPSVIGAVQGMITGLVCITPGAVERKQTKENKV

SEQ ID NO: 181504 - protein, 157 aa, Zea Mays
MSKSNEQSKPAAREKKIYRERNGQAKLKLQPEPLKMLCGKWEKKFHGQACFHVVPPRRFRLCRCSLLLLENNSIHRDSNASAHRSQHSEAHLKLLVLHPVQVVHVLGVDVVWLIMSVRPHPPCASRMECTRSCENMTWSQRSKIMEGTSHRKDRCNA

SEQ ID NO: 181505 - protein, 208 aa, Zea Mays
MKTHSADNYHVCQYPECGRRFTQESKLRAHIRAQHEKNPGASAMNHSAIGEQHQPPKPAKVSATPPAPSAERPYVCPYDGCDKAYIHEYKLNLHLKKEHPNHYQDGGPQGAAPSKRSISKSSHRSRPDITARMPPAKVSKRKGGYAAPSPAVNLPEEHLPEEQQWPRKVMYEDDSEETEEEEGGNNVEDRWNYNRVASSDDEETEDEQ

SEQ ID NO: 181506 - protein, 408 aa, Zea Mays
MASAAGAAFAAITLLILVPLTAASDSDHKYQAAEPVTLWVNKVGPYNNPQETYNYYSLPFCHASENHVHKWGGLGEVLGGNELIDSQIDIKFGKNVDKATICSLDLDLVKAKQLSDAIENSYWFEFFIGFVGEADRNNDNKYFLFTHKNIVIRYNGNQIIHVNLTQESPKLIDVNKALDMTYSVKWEPTNITFAHRFDVYLDYPFFEHQIHWFSIFNSFMMVIFLTGLVSMILMRTLRNDYAKYARDDDDIETLERDVNEESGWKLVHGDVFRPPCNLVLLSALVGIGTQLAALILLVILLAIIGMLYIGKCLFDYIKRLIQLKDGAPILSVEQFVKILSPSMSDLILLQEARSYCHNIHCLLCSYFIHLWICQWCIILTSWREKLDQGNGHDSITFPIYVLWNWPGA

SEQ ID NO: 181507 - protein, 474 aa, Zea Mays
MASAAGAAFAAITLLILVPLTAASDSDHKYQAAEPVTLWVNKVGPYNNPQETYNYYSLPFCHASENHVHKWGGLGEVLGGNELIDSQIDIKFGKNVDKATICSLDLDLVKAKQLSDAIENSYWFEFFIDDLPLWGFVGEADRNNDNKYFLFTHKNIVIRYNGNQIIHVNLTQESPKLIDVNKALDMTYSVKWEPTNITFAHRFDVYLDYPFFEHQIHWFSIFNSFMMVIFLTGLVSMILMRTLRNDYAKYARDDDDIETLERDVNEESGWKLVHGDVFRPPCNLVLLSALVGIGTQLAALILLVILLAIIGMLYIGRGAIVTTFIVCYALTSFISGYVSGALYSRHGGKNWIKAMAMTASLFPFMCFGIGLVLNTIAIFYGSLAAIPFGTMVVVFILWAFISFPLALLGTVVGRNWSGAPNNPCRVKTIPRPIPEKKWYLTPSVIALMGGLLPFGSIFIEMYFVFTSFWNYKVW

SEQ ID NO: 181508 - protein, 403 aa, Zea Mays
MTYSVKWEPTNITFAHRFDVYLDYPFFEHQIHWFSIFNSFMMVIFLTGLVSMILMRTLRNDYAKYARDDDDIETLERDVNEESGWKLVHGDVFRPPCNLVLLSALVGIGTQLAALILLVILLAIIGMLYIGRGAIVTTFIVCYALTSFISGYVSGALYSRHGGGAGKNWIKAMAMTASLFPFMCFGIGLVLNTIAIFYGSLAAIPFGTMVVVFILWAFISFPLALLGTVVGRNWSGAPNNPCRVKTIPRPIPEKKWYLTPSVIALMGGLLPFGSIFIEMYFVFTSFWNYKVYYVYGFMLLVFLILIIVTICVTIVGTYFLLNAENYHWQWTSFFSAASTAVYVYLYSIYYYHMKTKMSGFFQTSFYFGYTLMFCLGLGTLCGAVGYLGSTLFVRRIYRNIKCD

SEQ ID NO: 181509 - protein, 588 aa, Zea Mays
MASAAGAAFAAITLLILVPLTAASDSDHKYQAAEPVTLWVNKVGPYNNPQETYNYYSLPFCHASENHVHKWGGLGEVLGGNELIDSQIDIKFGKNVDKATICSLDLDLVKAKQLSDAIENSYWFEFFIDDLPLWGFVGEADRNNDNKYFLFTHKNIVIRYNGNQIIHVNLTQESPKLIDVNKALDMTYSVKWEPTNITFAHRFDVYLDYPFFEHQIHWFSIFNSFMMVIFLTGLVSMILMRTLRNDYAKYARDDDDIETLERDVNEESGWKLVHGDVFRPPCNLVLLSALVGIGTQLAALILLVILLAIIGMLYIGRGAIVTTFIVCYALTSFISGYVSGALYSRHGGGAGKNWIKAMAMTASLFPFMCFGIGLVLNTIAIFYGSLAAIPFGTMVVVFILWAFISFPLALLGTVVGRNWSGAPNNPCRVKTIPRPIPEKKWYLTPSVIALMGGLLPFGSIFIEMYFVFTSFWNYKVYYVYGFMLLVFLILIIVTICVTIVGTYFLLNAENYHWQWTSFFSAASTAVYVYLYSIYYYHMKTKMSGFFQTSFYFGYTLMFCLGLGTLCGAVGYLGSTLFVRRIYRNIKCD

SEQ ID NO: 181510 - protein, 453 aa, Zea Mays
MASAAGAAFAAITLLILVPLTAASDSDHKYQAAEPVTLWVNKVGPYNNPQETYNYYSLPFCHASENHVHKWGGLGEVLGGNELIDSQIDIKFGKNVDKATICSLDLDLVKAKQLSDAIENSYWFEFFIGFVGEADRNNDNKYFLFTHKNIVIRYNGNQIIHVNLTQESPKLIDVNKALDMTYSVKWEPTNITFAHRFDVYLDYPFFEHQIHWFSIFNSFMMVIFLTGLVSMILMRTLRNDYAKYARDDDDIETLERDVNEESGWKLVHGDVFRPPCNLVLLSALVGIGTQLAALILLVILLAIIGMLYIGRGAIVTTFIVCYALTSFISGYVSGALYSRHGGLLCLWVHVAGLSDTHHCHHMCNNCRYIFLAKCGELPLAMDFILLCCFHCGVCLPLLHILLPHEDQDVWILPDQLLFRLHSNVLPRLRNTMRCRRVSWIDIVCEEDLQEHKV

SEQ ID NO: 181511 - protein, 249 aa, Zea Mays
MMVIFLTGLVSMILMRTLRNDYAKYARDDDDIETLERDVNEESGWKLVHGDVFRPPCNLVLLSALVGIGTQLAALILLVILLAIIGMLYIGRGAIVTTFIVCYALTSFISGYVSGALYSRHGGKNWIKAMAMTASLFPFMCFGIGLVLNTIAIFYGSLAAIPFGTMVVVFILWAFISFPLALLGTVVGRNWSGAPNNPCRVKTIPRPIPEKKWYLTPSVIALMGGLLPFGSIFIEMYFVFTSFWNYKVW

SEQ ID NO: 181512 - protein, 548 aa, Zea Mays
MASAAGAAFAAITLLILVPLTAASDSDHKYQAAEPVTLWVNKVGPYNNPQETYNYYSLPFCHASENHVHKWGGLGEVLGGNELIDSQIDIKFGKNVDKATICSLDLDLVKAKQLSDAIENSYWFEFFIGFVGEADRNNDNKYFLFTHKNIVIRYNGNQIIHVNLTQESPKLIDVNKALDMTYSVKWEPTNITFAHRFDVYLDYPFFEHQIHWFSIFNSFMMVIFLTGLVSMILMRTLRNDYAKYARDDDDIETLERDVNEESGWKLVHGDVFRPPCNLVLLSALVGIGTQLAALILLVILLAIIGMLYIGRGAIVTTFIVCYALTSFISGYVSGALYSRHGGGAGKNWIKAMAMTASLFPFMCFGIGLVLNTIAIFYGSLAAIPFGTMVVVFILWAFISFPLALLGTVVGRNWSGAPNNPCRVKTIPRPIPEKKWYLTPSVIALMGGLLPFGSIFIEMYFVFTSFWNYKNYHWQWTSFFSAASTAVYVYLYSIYYYHMKTKMSGFFQTSFYFGYTLMFCLGLGTLCGAVGYLGSTLFVRRIYRNIKCD

SEQ ID NO: 181513 - protein, 394 aa, Zea Mays
MVCNCKPPQDGRMGCRDGCLNRMLNIECVKRTCPCGEQCSNQKFQRRSYAKLRWFHSGKKGYGLQLQEDVTEGRFLIEYVGEVLDITSYESRQRYYACKGQKHFYFMALNGGEVIDACTKGNLGRFINHSCSPNCCTEKWMVNGEVCIGIFALRSIKKGEELTFDYNYVRVSGAAPQKCFCGTAKCRGYLGGDISIVDTIITQDDTEADHFEQMVVDKDSKELLGPNESDSDGSHPNISEPEFSIQGEDLHDCSAAKVELDLLEGTRGTSLETSEPEHPLEAWSPPEDEDVIRTPVHVSRTFESSLQKFSVHDTQSSDLLRKTANSMEGSKAPNITNGSTLGSDFRGNLVPTFRPAERKNLKQHKNQKRQPSSPIDNEHILGGTILPHAFLFPL

SEQ ID NO: 181514 - protein, 1798 aa, Zea Mays
MEESGAAVRGEEDRVADAQRLGPAEVALSTATAPEPVHGLGDAAVEVCHAPEARLSTEIGDEGSNFAFGLVTPVDCASSSHRGRRFQLGQEKGSSSEQRVMDMDERKEGSLAPAASAENAALQTCHEVNDRLSNKTIPYPPCSEVVCSKDAGCLYGMFDKTAEGSQFEHVGLTGDGGDCRAVVEVVKETVQDLLAARNGAKCGYEGLSVSMDHGSEQEPRGIGSITFANDELQPNGLVSDIEAVSRPAHIDSVPSIPGSIDLSLDLKAGQFGGMSGDSGTCHGADRAMRNDDFTHDSGDLSDPGKHHLEKLPSGAEGLALITDAVGGSDHLDQGLNACYAAANSSANFISNANDGELRNEKLTALHVFIRRNPKRAVSSRSLNSEKQDQIGKGNSGSRKPKKVDIVSSLHQSTVNMFPNKITKGRSGMNRPPKSFTWGNLERLLDCCPSYGPSTSNSRPICLDKGGSYNRSDQRSQPSIWKSRSSRSSRSKRSSFSEIGHAANELDGQPTLAIVADMGHAASELNEQPTFSIAANTDICLESHRGNIPNLSSDKLINILDSTRKTAESIDSHRTESKCIQSQRERALVSSGKETCAAYVHRECAKLSTSELMDNANGNVMLHVGFSPDSVLELASVTCEGNASASHDVMLHENPTDAGALNDGDPSVLSTSDYEKEHASSLMNLEQHARSTLHEDTRKEEVGPSHGIVENDIEGKARALQKSNSVRKIGIVRKAGCKKKDGSKGVKKNVIGFSKASPCESSKLRPSNDPISPGPPDVGSCFEALTSGSQDLGMHEHGGIQSHSVMHGDKGHAFDSMKSPRHKIKDTNARKKGKVRDPHKKEKGKKKNTSEETSLDHGLLQLPSTERAASDMNEQSDLDPITELPFKNSSAISTNLPGNVACKMDGASVPPLPPRAAWVCCDDCQKWRTCKDNGDKTFADCSIPQEKSNAEINAELDLSDASADEADNGGSNSKACKPPSWTLVRSNLFLHRNRRTQSIDESMVCNCKPPQDGRMGCRDGCLNRMLNIECVKRTCPCGEQCSNQKFQRRSYAKLRWFHSGKKGYGLQLQEDVTEGRFLIEYVGEVLDITSYESRQRYYACKGQKHFYFMALNGGEVIDACTKGNLGRFINHSCSPNCCTEKWMVNGEVCIGIFALRSIKKGEELTFDYNYVRVSGAAPQKCFCGTAKCRGYLGGDISIVDTIITQDDTEADHFEQMVVDKDSKELLGPNESDSDGSHPNISEPEFSIQGEDLHDCSAAKVELDLLEGTRGTSLETSEPEHPLEAWSPPEDEDVIRTPVHVSRTFESSLQKFSVHDTQSSDLLRKTANSMEGSKAPNITNGSTLGSDFRGNLVPTFRPAERKNLKQHKNQKRQPSSPIDNEHILGVEGTLNSLLDVDGGISKRKDATKGYLKLLVVTAAEDGSAGGTSKSLRDLSLILEALLKTKSHSVLLDIINKNGLQMLHNILKQSRGIFHRRPIIRKLLKVLEFLAQKGILTSEHINGGPRFAGVESFRDLMLSLTRHSDIQVQQIARSFRDRWIPPNNARSEPTEYPHTSTFVHDIQGTNTVWSSARRKRKSRWDYQPDEHYKMPGLKIQKVCSGHGEFDVQFGFMKNKLKRNQGANNYHNDVLGMGSSTEGEDDEAPPPGFESQLDRRPAQLSIGSEVAPGLCMERYQSSLSISYGVPVTLVQHFGTPESEGGQCHKKWKVAPGVPFSPFPPLPPYPRGNPCPSTSSSQMFQHDGIPQVKHNNSGQRGRIMGRDGRVHRSWRNESRTKWQYHHQGRRFSSTHHRFERSEPARPQ

SEQ ID NO: 181515 - protein, 797 aa, Zea Mays
MVCNCKPPQDGRMGCRDGCLNRMLNIECVKRTCPCGEQCSNQKFQRRSYAKLRWFHSGKKGYGLQLQEDVTEGRFLIEYVGEVLDITSYESRQRYYACKGQKHFYFMALNGGEVIDACTKGNLGRFINHSCSPNCCTEKWMVNGEVCIGIFALRSIKKGEELTFDYNYVRVSGAAPQKCFCGTAKCRGYLGGDISIVDTIITQDDTEADHFEQMVVDKDSKELLGPNESDSDGSHPNISEPEFSIQGEDLHDCSAAKVELDLLEGTRGTSLETSEPEHPLEAWSPPEDEDVIRTPVHVSRTFESSLQKFSVHDTQSSDLLRKTANSMEGSKAPNITNGSTLGSDFRGNLVPTFRPAERKNLKQHKNQKRQPSSPIDNEHILGVEGTLNSLLDVDGGISKRKDATKGYLKLLVVTAAEDGSAGGTSKSLRDLSLILEALLKTKSHSVLLDIINKNGLQMLHNILKQSRGIFHRRPIIRKLLKVLEFLAQKGILTSEHINGGPRFAGVESFRDLMLSLTRHSDIQVQQIARSFRDRWIPPNNARSEPTEYPHTSTFVHDIQGTNTVWSSARRKRKSRWDYQPDEHYKMPGLKIQKVCSGHGEFDVQFGFMKNKLKRNQGANNYHNDVLGMGSSTEGEDDEAPPPGFESQLDRRPAQLSIGSEVAPGLCMERYQSSLSISYGVPVTLVQHFGTPESEGGQCHKKWKVAPGVPFSPFPPLPPYPRGNPCPSTSSSQMFQHDGIPQVKHNNSGQRGRIMGRDGRVHRSWRNESRTKWQYHHQGRRFSSTHHRFERSEPARPQ

SEQ ID NO: 181516 - protein, 1502 aa, Zea Mays
MEESGAAVRGEEDRVADAQRLGPAEVALSTATAPEPVHGLGDAAVEVCHAPEARLSTEIGDEGSNFAFGLVTPVDCASSSHRGRRFQLGQEKGSSSEQRVMDMDERKEGSLAPAASAENAALQTCHEVNDRLSNKTIPYPPCSEVVCSKDAGCLYGMFDKTAEGSQFEHVGLTGDGGDCRAVVEVVKETVQDLLAARNGAKCGYEGLSVSMDHGSEQEPRGIGSITFANDELQPNGLVSDIEAVSRPAHIDSVPSIPGSIDLSLDLKAGQFGGMSGDSGTCHGADRAMRNDDFTHDSGDLSDPGKHHLEKLPSGAEGLALITDAVGGSDHLDQGLNACYAAANSSANFISNANDGELRNEKLTALHVFIRRNPKRAVSSRSLNSEKQDQIGKGNSGSRKPKKVDIVSSLHQSTVNMFPNKITKGRSGMNRPPKSFTWGNLERLLDCCPSYGPSTSNSRPICLDKGGSYNRSDQRSQPSIWKSRSSRSSRSKRSSFSEIGHAANELDGQPTLAIVADMGHAASELNEQPTFSIAANTDICLESHRGNIPNLSSDKLINILDSTRKTAESIDSHRTESKCIQSQRERALVSSGKETCAAYVHRECAKLSTSELMDNANGNVMLHVGFSPDSVLELASVTCEGNASASHDVMLHENPTDAGALNDGDPSVLSTSDYEKEHASSLMNLEQHARSTLHEDTRKEEVGPSHGIVENDIEGKARALQKSNSVRKIGIVRKAGCKKKDGSKGVKKNVIGFSKASPCESSKLRPSNDPISPGPPDVGSCFEALTSGSQDLGMHEHGGIQSHSVMHGDKGHAFDSMKSPRHKIKDTNARKKGKVRDPHKKEKGDLDPITELPFKNSSAISTNLPGNVACKMDGASVPPLPPRAAWVCCDDCQKWRTCKDNGDKTFADCSIPQEKSNAEINAELDLSDASADEADNGGSNSKACKPPSWTLVRSNLFLHRNRRTQSIDESMVCNCKPPQDGRMGCRDGCLNRMLNIECVKRTCPCGEQCSNQKFQRRSYAKLRWFHSGKKGYGLQLQEDVTEGRFLIEYVGEVLDITSYESRQRYYACKGQKHFYFMALNGGEVIDACTKGNLGRFINHSCSPNCCTEKWMVNGEVCIGIFALRSIKKGEELTFDYNYVRVSGAAPQKCFCGTAKCRGYLGGDISIVDTIITQDDTEADHFEQMVVDKDSKELLGPNESDSDGSHPNISEPEFSIQGEDLHDCSAAKVELDLLEGTRGTSLETSEPEHPLEAWSPPEDEDVIRTPVHVSRTFESSLQKFSVHDTQSSDLLRKTANSMEGSKAPNITNGSTLGSDFRGNLVPTFRPAERKNLKQHKNQKRQPSSPIDNEHILGVEGTLNSLLDVDGGISKRKDATKGYLKLLVVTAAEDGSAGGTSKSLRDLSLILEALLKTKSHSVLLDIINKNGLQMLHNILKQSRGIFHRRPIIRKLLKVLEFLAQKGILTSEHINGGPRFAGVERLHYLNLFFQCYLVLIEGFYIQFVSR

SEQ ID NO: 181517 - protein, 386 aa, Zea Mays
MLRQLTHQNIVQYYGSELTDEALSIYLEYVSGGSIDKLLKYYGPFKEPVIRNYTRQILSGLAYLHGRKTVHRDVKGANVLVGPNGEVKLADFGMAKHITSLAEIHSLRGSPYWMAPEVIMNKNGYSFEVDIWSLGCTIIEMGTGRHPWHQYEHVHAMFKIVNTKDMPEIPERLSKEGKDFLSLCLKRDPAQRPSATQLLRHPFVQDNQEISGAKCNTTLRNGLSSPAEACHKKSNKEPSLKRSVAPLRDIGGIRARGFTGSSSACVSPHKTSRHSNLHLLTILLSGSSHHTQYLDFCHHPSCSRHIDVRANMSLPVSPCSSPLRQLKQWNWSCVASPSHLAFSSGSVAHNTVSDMQNQMRGSDPVPDPWRDISHRRQSPYDSPKRF

SEQ ID NO: 181518 - protein, 273 aa, Zea Mays
MAPEVIMNKNGYSFEVDIWSLGCTIIEMGTGRHPWHQYEHVHAMFKIVNTKDMPEIPERLSKEGKDFLSLCLKRDPAQRPSATQLLRHPFVQDNQEISGAKCNTTLRNGLSSPAEACHKKSNKEPSLKRSVAPLRDIGGIRARGFTGSSSACVSPHKTSRHSNLHLLTILLSGSSHHTQYLDFCHHPSCSRHIDVRANMSLPVSPCSSPLRQLKQWNWSCVASPSHLAFSSGSVAHNTVSDMQNQMRGSDPVPDPWRDISHRRQSPYDSPKRF

SEQ ID NO: 181519 - protein, 223 aa, Zea Mays
MAKETEYYDVLGVCPAASDEEIRKAYYIKARQVHPDKNPNDPHAAENFQALGEAYQVLSDPLQRKAYDGYGKNSVSRENILDGTVVFTLLFGSELFEDYIGHLAMATMASSELTSDNDTPEKLQDRLKNVQREREEKLARFLKEFLSQYVRGDKEGFANRAEAEAKKLSCTCSKGAWQEGHVPRSAIRSRVGQEQGSSVEVTDHRSERGLAAVAVARGGLPAE

SEQ ID NO: 181520 - protein, 231 aa, Zea Mays
MAKETEYYDVLGVCPAASDEEIRKAYYIKARQVHPDKNPNDPHAAENFQALGEAYQVLSDPLQRKAYDGYGKNSVSRENILDGTVVFTLLFGSELFEDYIGHLAMATMASSELTSDNDTPEKLQDRLKNVQREREEKLARFLKEFLSQYVRGDKEGFANRAEAEAKKLSCTSSGLDILRTIGYVYSRQAAKELGKKAMYLGVPFVAEWVRNKGHLWKSQITAAKGELFLVS

SEQ ID NO: 181521 - protein, 308 aa, Zea Mays
MAKETEYYDVLGVCPAASDEEIRKAYYIKARQVHPDKNPNDPHAAENFQALGEAYQVLSDPLQRKAYDGYGKNSVSRENILDGTVVFTLLFGSELFEDYIGHLAMATMASSELTSDNDTPEKLQDRLKNVQREREEKLARFLKEFLSQYVRGDKEGFANRAEAEAKKLSCTSSGLDILRTIGYVYSRQAAKELGKKAMYLGVPFVAEWVRNKGHLWKSQITAAKGALQLLQLQEEACRQSSKDGNATEQDVDLQMRMNKDLMMSSLWKLNVVDIEMTLLHVCEMVRVSRYLIYIRYDKYEQYVFLAFL

SEQ ID NO: 181522 - protein, 128 aa, Zea Mays
MLHLELPHINVLSKIDLIENYGNLAFNLDFYTDVQDLSYLQYHLEQDPRSAKYRKLTKELCDVIDDFGLVNFSTLDIQDKESVGNLVKLIDKSNGYIFSSIDSSAVEFSKIAAAPLDWDYYRYPILVL

SEQ ID NO: 181523 - protein, 54 aa, Zea Mays
MEVALLHPLLVVLPELPVPLCGQLLDLLGVRCNLHHGQQNPAVPKAQDLLRGGD

SEQ ID NO: 181524 - protein, 94 aa, Zea Mays
MRRQARARATGGTVGPLALPSFPSPLHFVDIPQGHSPSGPRRLASPPPDALLLHASIGATAHWPLCLPLRPLLDSAAVYPAAFSFLDQGLVKES

SEQ ID NO: 181525 - protein, 594 aa, Zea Mays
MFKKPVDVKTIQRLSGADKKKLRRTAKGRFPQASDADLDAILPPKAEITVAKYPNHVLVYGIEGEFPMIFNTDARVYALWKVPHLLPAFTLKGGEVSRFVIGGADLMFPGISIPPEGFPSFEAGQPWAVKVPGNPAAIAVGSTTMSSTEALKAGLRGKALKILHYYRDMLWDSADGCYVPNEGFFDDIVVEDPNPVSTSQAPDSAEEPEVTNDGSVSAEDAGVDISDNHGTNPGIQIEAVEEITDVVNELKLPEDKTTEQAPVEMEHHNLRTEEIDSLLDKCLLQALYTSIKEKDLPMPGSTLWANHILPNRPPGVTIDIKKSSHKKLSKWLQSKSSSGLISAKEDKYKKEVVLLAINHKHPDYMAFRPEKRVQELVEHEKDVAESSVTKQLEVAEIYKPSSHVKPIFVAVEADMEKYYSAPEASDIVFRYVEKEKLVKPTDRAKVILDVTLCDALYKGAIKKGSAYPTEIHKKDLGSAFLNRMQVHHKVSRGTQEVIRKGAIRTIQIMTERRQGNKKMTRLSGLECFLMDPDSLASELQKKFACSTTTAELPGKKGQYEVLVQGGVIDDLAKHLVDHYDVPKRYIEVYDKTKR

SEQ ID NO: 181526 - protein, 447 aa, Zea Mays
MFKKPVDVKTIQRLSGADKKKLRRTAKGRFPQASDADLDAILPPKAEITVAKYPNHVLVYGIEGEFPMIFNTDARGHELFPTVYALWKVPHLLPAFTLKGGEVSRFVIGGADLMFPGISIPPEGFPSFEAGQPWAVKVPGNPAAIAVGSTTMSSTEALKAGLRGKALKILHYYRDMLWDSADGCYVPNEGFFDDIVVEDPNPVSTSQAPDSAEEPEVTNDGSVSAEDAGVDISDNHGTNPGIQIEAVEEITDVVNELKLPEDKTTEQAPVEMEHHNLRTEEIDSLLDKCLLQALYTSIKEKDLPMPGSTLWANHILPNRPPGVTIDIKKSSHKKLSKWLQSKSSSGLISAKEDKYKKEVVLLAINHKHPDYMAFRPEKRVQELVEHEKDVAESSVTKQLEVAEIYKPSSHVKPIFVAVEADMEKYYSAPEASDIVFRGYQKGLGIPN

SEQ ID NO: 181527 - protein, 395 aa, Zea Mays
MAPDSAEEPEVTNDGSVSAEDAGVDISDNHGTNPGIQIEAVEEITDVVNELKLPEDKTTEQAPVEMEHHNLRTEEIDSLLDKCLLQALYTSIKEKDLPMPGSTLWANHILPNRPPGVTIDIKKSSHKKLSKWLQSKSSSGLISAKEDKYKKEVVLLAINHKHPDYMAFRPEKRVQELVEHEKDVAESSVTKQLEVAEIYKPSSHVKPIFVAVEADMEKYYSAPEASDIVFRYVEKEKLVKPTDRAKVILDVTLCDALYKGAIKKGSAYPTEIHKKDLGSAFLNRMQVHHKVSRGTQEVIRKGAIRTIQIMTERRQGNKKMTRLSGLECFLMDPDSLASELQKKFACSTTTAELPGKKGQYEVLVQGGVIDDLAKHLVDHYDVPKRYIEVYDKTKR

SEQ ID NO: 181528 - protein, 542 aa, Zea Mays
MAADVGLRFNGWSYSDLPYNDHNAQDSSVQEMVLNHGSVSFGRFAAESLSWERRSVFEHNRRQEELSKLTAPGLVAQKKAFFEEYYKRARHLKAQGVLHQAGAAVEENDSSQADELPAAMSEDPVATAPSSSFEPSTDVESKCQDAHEHGYLTFNPLFSQTASLPNIQEESSSSGQKHGFSCETIERKVLAPRRVASNDNDQSNIAGSRIVLPIVSLQSEYLKADPEKSEASKNVPIINRSKKVSKDLATSVISIPRVDLRRNSENGPSRDLEDPFHKRVEMKLRALSDRMDADRTTASSRSSSYQPPERAMTSARSAYQDRLAISSRSSVSQNTSKALAPSKLAAQASHKFLKGVQRLDAMPRGIFVNKGSSASLVASCNSSATGKLSAKILVAPSSSQVGAKTSRTAQVTPKRAAGPTSVNNVSHNKRKHTPVALGEKYPKREYVRRSAPPSARSSSENLPRAAKAPKISKVMNAVSKAEAVQKSKSSSNLVGGRNLSTKRSANCNEENRKAIPSRKVNMAECTRSNLKGGPSLTKNKPR

SEQ ID NO: 181529 - protein, 547 aa, Zea Mays
MAADVGLRFNGWSYSDLPYNDHNAQDSSVQEMVLNHGSVSFGRFAAESLSWERRSVFEHNRRQEELSKLTAPGLVAQKKAFFEEYYKRARHLKAQGVLHQAGAAVEENDSSQADELPAAMSEDPVATAPSSSFEPSTDVESKCQDAHEHGYLTFNPLFSQTASLPNIQEESSSSGQKHGFSCETIERKVLAPRRVASNDNDQSNIAGSRIVLPIVSLQSEYLKADPEKSEASKNVPIINRSKKVSKDLATSVISIPRVDLRRNSENGPSRDLEDPFHKRVEMKLRALSDRMDADRTTASSRSSSYQPPERAMTSARSAYQDRLAISSRSSVSQNTSKALAPSKLAAQASHKFLKGVQRLDAMPRGIFVNKGSSASLVASCNSSATGKLSAKILVAPSSSQVGAKTSRTAQVTPKRAAGPTSVNNVSHNKRKHTPVALGEKYPKREYVRRSAPPSASSENLPRAAKAPKISKVMNAVSKAEAVQKSKSSSNLVGGRNLSTKRSANCNEENRKAIPSRKVNMAECTRSNLKGGPSLTKNKPRQERPRWR

SEQ ID NO: 181530 - protein, 501 aa, Zea Mays
MAADVGLRFNGWSYSDLPYNDHNAQDSSVQEMVLNHGSVSFGRFAAESLSWERRSVFEHNRRQEELSKLTAPGLVAQKKAFFEEYYKRARHLKAQGVLHQAGAAVEENDSSQADELPAAMSEDPVATAPSSSFEPSTDVESKCQDAHEHGYLTFNPLFSQTASLPNIQEESSSSGQKHGFSCETIERKVLAPRRVASNDNDQSNIAGSRIVLPIVSLQSEYLKADPEKSEASKNVPIINRSKKVSKDLATSVISIPRVDLRRNSENGPSRDLEDPFHKRVEMKLRALSDRMDADRTTASSRSSSYQPPERAMTSARSAYQDRLAISSRSSVSQNTSKALAPSKLAAQASHKFLKGVQRLDAMPRGIFVNKGSSASLVASCNSSATGKLSAKILVAPSSSQVGAKTSRTAQVTPKRAAGPTSVNNVSHNKRKHTPVALGEKYPKREYVRRSAPPSARYNRSRFAELSVSSRYSLNHLKLLWSCAEAAPRISLVLQRRLRYQK

SEQ ID NO: 181531 - protein, 287 aa, Zea Mays
MSMEDDASKISDWEVLSATSSRGGGDDDEVLTVSGGGGDVVLLDHFVLTPDPAASCPGDGEGSWSDDRGAWQGLELLDGFDPIPEASFDLAVGVRSQQLLISDVDDAREEGSIVQATVARGATRSAEGNQDDVVEVEIEQESSSVISRGALCPVLQVAADHGVEETLDSEAVTPTGGSLQSQVSESSLVQLDDGGIGAGEKRSCLEDAVSSDEIHGEQEEQEQGSNANAAIGCDEPDGEAKDDALPLAHTPGEASMVLLRRSGTSRPGRAGEEDVQDEAQGKGLAPD

SEQ ID NO: 181532 - protein, 459 aa, Zea Mays
MISSRLVPYSRPVRLHLRSPGPDTPLYQSRPPAHFSHPRAASGAGEPSRRSSNDPSLSRPFSLPLPAQGEERERMWSSSQASTRGVVEMGRVEAGPSHFPKRPAPQNSARVNLSRTHTVKPTSAGDRSGISVKCNLGWSSQPSPDLRHHFRGYSSASEAVLTSQSDVRKLFVGNEKIGVLLLNLGGPETLDDVQPFLFNLFADPDIIRLPRLFRFLQKPLAKFISEVRAPKSKEGYASIGGGSPLRQITDAQAEALREALHGKDVPANVYVGMRYWHPFTEEAIEQIKRDGITKLVVLPLYPQFSISTSGSSLRLLESIFREDEYLVNMQHTVIPSWYQREGYIKAMATLIENELTKFQEPQKVMIFFSAHGVPLAYVEEAGDPYKAEMEECIDLIMEELEKRGITNPCILAYQSRVGPVEWLKPYTDETIIELGQKGVKSLLAVPISLSYPSGAWRSC

SEQ ID NO: 181533 - protein, 524 aa, Zea Mays
MISSRLVPYSRPVRLHLRSPGPDTPLYQSRPPAHFSHPRAASGAGEPSRRSSNDPSLSRPFSLPLPAQGEERERMWSSSQASTRGVVEMGRVEAGPSHFPKRPAPQNSARVNLSRTHTVKPTSAGDRSGISVKCNLGWSSQPSPDLRHHFRGYSSASEAVLTSQSDVRKLFVGNEKIGVLLLNLGGPETLDDVQPFLFNLFADPDIIRLPRLFRFLQKPLAKFISEVRAPKSKEGYASIGGGSPLRQITDAQAEALREALHGKDVPANVYVGMRYWHPFTEEAIEQIKRDGITKLVVLPLYPQFSISTSGSSLRLLESIFREDEYLVNMQHTVIPSWYQREGYIKAMATLIENELTKFQEPQKVMIFFSAHGVPLAYVEEAGDPYKAEMEECIDLIMEELEKRGITNPCILAYQSRVGPVEWLKPYTDETIIELGQKGVKSLLAVPISFVSEHIETLEEIDVEYKELALESGIKHWGRVPALGCEPTFISDLADAVIESLPYVGAMAVSNLEARQLWILRWAQS

SEQ ID NO: 181534 - protein, 398 aa, Zea Mays
MPSHLNLHWNVHQDIIRLPRLFRFLQKPLAKFISEVRAPKSKEGYASIGGGSPLRQITDAQAEALREALHGKDVPANVYVGMRYWHPFTEEAIEQIKRDGITKLVVLPLYPQFSISTSGSSLRLLESIFREDEYLVNMQHTVIPSWYQREGYIKAMATLIENELTKFQEPQKVMIFFSAHGVPLAYVEEAGDPYKAEMEECIDLIMEELEKRGITNPCILAYQSRVGPVEWLKPYTDETIIELGQKGVKSLLAVPISFVSEHIETLEEIDVEYKELALESGIKHWGRVPALGCEPTFISDLADAVIESLPYVGAMAVSNLEARQSLVPLGSVEELLAAYDSKRDELPPPVIVWEWGWTKSAETWNGRAAMLAVLALLVLEVTTGEGFLHQWGILPLFR

SEQ ID NO: 181535 - protein, 871 aa, Zea Mays
MGYFIIRLYGGQTIKPDWIRRVYGPLALLGHCVIQETVKARQSQHQTSREHRSRARRPMDMDGNSPRRPPRRPEREGSYGYDIESMDGSGAGGPPPWSAHHNGSSEALLRYDDGGADRGSTQQPLLRKRTVNTTSQIAIVGANVCPIESLDYEVVENDLFKQDWRSRKKKQIFQYIVLKWSLVLLIGLLTGFVGFFNNLAVENIAGFKLLLTSDLMLKGRYIRAFFVYGGCNLVLAAAAAAICAYIAPAAAGSGIPEVKAYLNGVDAYSILAPSTLFVKIFGSILGVSAGFVLGKEGPMVHTGACIANLLGQGGSRKYHLTCNWLRYFKNDRDRRDLITCGSAAGVAAAFRAPVGGVLFALEEAASWWRSALLWRTFFTTAVVAVVLRGLIEFCRSGKCGLFGQGGLIMFDLSSTVAVYSTPDLIAIIVLGIIGGIFGGLFNYLLDKILRVYSIINERGAPFKILLTITISIITSMCSYGLPWLAACTPCPVDAVEQCPTVGRSGNYKNFQCPPGHYNGLASLFFNTNDDAIRNLFSNGTSTEFQMSSLFIFFTAIYCLGLVTYGIAVPSGLFIPVILAGATYGRIVGTLLGSISDLDPGLFALLGAASFLGGTMRMTVSVCVILLELTNDLPMLPLVMLVLLISKTIADSFNKGVYDQIVVMKGLPYMEAHAEPYMRHLVAGDVVSGPLITFSGVEKVGNIVHALRLTGHNGFPVLDEPPITETPELVGLVTRSHLLVLLNSKNFMKGRVKTSGSFVLRRFGAFDFAKPGSGKGLKIEDLDFTDEEMDMYVDLHPITNTSPYTVVETMSLAKAAILFRELGLRHLLVVPKTPDRPPIVGILTRHDFMPEHIHSLFPNLNPHKYHSASMAG

SEQ ID NO: 181536 - protein, 650 aa, Zea Mays
MQRPGRLQRSGSKRGLEPTGGGDDDDHAPKRPRVPALASVIVEALKMDSLQKLCSSLEPILRRVVSEEVERALAKLGPARIQGRSSPKRIEGPDGRNLQLQFRSQLALPIFTGGKVEGEQGAAIHVVLLDANTGCVVTSGPESFAKLDILVLEGDFSKEEDEDWTEEEFESNIVKEREGKRPLLTGDLQVTLKEGVGTIGELTFTDNSSWIRSRKFRLGLRIAPGFCEGIRVREAKTEAFPVKDHRGELYKKHYPPALKDDVWRLEKIGKDGAFHKKLNASGIYTVEDFLRLLVRDQQRLRSILGSGMSNKMWDSLVEHAKTCVLSGKHYVYYARDSRNVGAIFNNIYEFTGLIADDQFISAENLTDNQKVYADALVKKAYEDWMQVVEYDGKALLSFKQKKKTVTTRSDVASASTSNPASYGSANSQKQLSLPAKAGQTSSAGTMNEDGTRNAYNANGNQSARYAANTQSIPANVGMQYDGSAVSPEIQFSGSSLQSQSSRGSNMLALGPPQQHQSFEFPALGQPVQPTGLNPFEEWPQQQENRGGGVDDYLMEEIRMRSHEILENEEMQQMLRLLSMGGAGTSLAEDGFNFPPYMPAPSPNVSYEDDRTRAPGKAVVGWLKIKAAMRWGIFVRKKAAERRAQLVELDD

SEQ ID NO: 181537 - protein, 611 aa, Zea Mays
MQRPGRLQRSGSKRGLEPTGGGDDDDHAPKRPRVPALASVIVEALKMDSLQKLCSSLEPILRRVVSEEVERALAKLGPARIQGRSSPKRIEGPDGRNLQLQFRSQLALPIFTGGKVEGEQGAAIHVVLLDANTGCVVTSGPESFAKLDILVLEGDFSKEEDEDWTEEEFESNIVKEREGKRPLLTGDLQVTLKEGIRVREAKTEAFPVKDHRGELYKKHYPPALKDDVWRLEKIGKDGAFHKKLNASGIYTVEDFLRLLVRDQQRLRSILGSGMSNKMWDSLVEHAKTCVLSGKHYVYYARDSRNVGAIFNNIYEFTGLIADDQFISAENLTDNQKVYADALVKKAYEDWMQVVEYDGKALLSFKQKKKTVTTRSDVASASTSNPASYGSANSQKQLSLPAKAGQTSSADGTRNAYNANGNQSARYAANTQSIPANVGMQYDGSAVSPEIQFSGSSLQSQSSRGSNMLALGPPQQHQSFEFPALGQPVQPTGLNPFEEWPQQQENRGGGVDDYLMEEIRMRSHEILENEEMQQMLRLLSMGGAGTSLAEDGFNFPPYMPAPSPNVSYEDDRTRAPGKAVVGWLKIKAAMRWGIFVRKKAAERRAQLVELDD

SEQ ID NO: 181538 - protein, 605 aa, Zea Mays
MDSLQKLCSSLEPILRRVVSEEVERALAKLGPARIQGRSSPKRIEGPDGRNLQLQFRSQLALPIFTGGKVEGEQGAAIHVVLLDANTGCVVTSGPESFAKLDILVLEGDFSKEEDEDWTEEEFESNIVKEREGKRPLLTGDLQVTLKEGVGTIGELTFTDNSSWIRSRKFRLGLRIAPGFCEGIRVREAKTEAFPVKDHRGELYKKHYPPALKDDVWRLEKIGKDGAFHKKLNASGIYTVEDFLRLLVRDQQRLRSILGSGMSNKMWDSLVEHAKTCVLSGKHYVYYARDSRNVGAIFNNIYEFTGLIADDQFISAENLTDNQKVYADALVKKAYEDWMQVVEYDGKALLSFKQKKKTVTTRSDVASASTSNPASYGSANSQKQLSLPAKAGQTSSAGTMNEADGTRNAYNANGNQSARYAANTQSIPANVGMQYDGSAVSPEIQFSGSSLQSQSSRGSNMLALGPPQQHQSFEFPALGQPVQPTGLNPFEEWPQQQENRGGGVDDYLMEEIRMRSHEILENEEMQQMLRLLSMGGAGTSLAEDGFNFPPYMPAPSPNVSYEDDRTRAPGKAVVGWLKIKAAMRWGIFVRKKAAERRAQLVELDD

SEQ ID NO: 181539 - protein, 646 aa, Zea Mays
MQRPGRLQRSGSKRGLEPTGGGDDDDHAPKRPRVPALASVIVEALKMDSLQKLCSSLEPILRRVVSEEVERALAKLGPARIQGRSSPKRIEGPDGRNLQLQFRSQLALPIFTGGKVEGEQGAAIHVVLLDANTGCVVTSGPESFAKLDILVLEGDFSKEEDEDWTEEEFESNIVKEREGKRPLLTGDLQVTLKEGVGTIGELTFTDNSSWIRSRKFRLGLRIAPGFCEGIRVREAKTEAFPVKDHRGELYKKHYPPALKDDVWRLEKIGKDGAFHKKLNASGIYTVEDFLRLLVRDQQRLRSILGSGMSNKMWDSLVEHAKTCVLSGKHYVYYARDSRNVGAIFNNIYEFTGLIADDQFISAENLTDNQKVYADALVKKAYEDWMQVVEYDGKALLSFKQKKKTVTTRSDVASASTSNPASYGSANSQKQLSLPAKAGQTSSAADGTRNAYNANGNQSARYAANTQSIPANVGMQYDGSAVSPEIQFSGSSLQSQSSRGSNMLALGPPQQHQSFEFPALGQPVQPTGLNPFEEWPQQQENRGGGVDDYLMEEIRMRSHEILENEEMQQMLRLLSMGGAGTSLAEDGFNFPPYMPAPSPNVSYEDDRTRAPGKAVVGWLKIKAAMRWGIFVRKKAAERRAQLVELDD

SEQ ID NO: 181540 - protein, 261 aa, Zea Mays
MDGDGGGAGALHHHTRSPEDVFRDFRARRAGIVKALTTDVEKFYQQCDPEKENLCLYGLPNETWEVTLPAEEVPPELPEPALGINFARDGMVEKDWLSLVAVHSDAWLLSVAFYFGARFGFDKDARRRLFTMINNLPTVYEVVTGVAKKQSKAPNGSSKSSKPNSKPSKLTNSNSKPAKPAHPKEEEDSGREDAEEDQAYLCGSCGESYANGEFWICCDVCEKWFHGKCVRITPAKAEHIKQYKCPSCSTKRSTSSSTSVP

SEQ ID NO: 181541 - protein, 105 aa, Zea Mays
MRMLQGTTGGQFLPPPEAMESKSTSASSISPRWTRLRRRLLAPSPRRGGALGCLLHLVSTCWSCCSGVARCILDLGFGVCREEEDAARSAGFGSSGADDVAVAMR

SEQ ID NO: 181542 - protein, 346 aa, Zea Mays
MGPTGSGKTLLAKTLARFVNVPFVIADATTLTQAGYVGEDVESILYKLLTVADFNVQAAQQGMVYIDEVDKITKKAESLNISRDVSGEGVQQALLKMLEGTIVNVPEKGARKHPRGDNIQIDTKDILFICGGAFVDLEKTISERRQDSSIGFGAPVRANMRVGGTSSAQVTSSLLESVESGDLIAYGLIPEFIGRFPILVSLTALNEDQLVQVLTEPKNALGKQFKKLFSMNDVKLHFTDGALRIIAEKAMSKNTGARGLRTILENILMDSMYEIPDAKSGEKRIDAVVVDEDAVGSVDQPGYGAKILYGDGALDQYLSHIKVAGDGVASEMDGEAELSPSRAIGM

SEQ ID NO: 181543 - protein, 215 aa, Zea Mays
MTHARSNAIDQIDTKDILFICGGAFVDLEKTISERRQDSSIGFGAPVRANMRVGGTSSAQVTSSLLESVESGDLIAYGLIPEFIGRFPILVSLTALNEDQLVQVLTEPKNALGKQFKKLFSMNDVKLHFTDGALRIIAEKAMSKNTGARGLRTILENILMDSMYEVCRMMVLYSLSIHLTCKVYGVGILIVVTIDLLPYRFQMQNLGRSELMQWL

SEQ ID NO: 181544 - protein, 287 aa, Zea Mays
MGPTGSGKTLLAKTLARFVNVPFVIADATTLTQAGYVGEDVESILYKLLTVADFNVQAAQQGMVYIDEVDKITKKAESLNISRDVSGEGVQQALLKMLEGTIVNVPEKGARKHPRGDNIQIDTKDILFICGGAFVDLEKTISERRQDSSIGFGAPVRANMRVGGTSSAQVTSSLLESVESGDLIAYGLIPEFIGRFPILVSLTALNEDQLVQVLTEPKNALGKQFKKLFSMNDVKLHFTDGALRIIAEKAMSKNTGARGLRTILENILMDSIFQMQNLGRSELMQWL

SEQ ID NO: 181545 - protein, 444 aa, Zea Mays
MALPKHSQGAGAEVAADGSTSTSTSPVEDDGGTLDDLGQGQRQGHHEEDNDDDHHFSSSSSTGNKHKQTSCLLPARSLRSTDEASHSQQADCGVRSLSFSKILSFRMWAPGGSSSPTCLEDYIAGQHQLEHDDDEADKLMKQVCRSQSVPATSVARRRSSGTTAKGKGSRRVADSSSLRRLRVVPLRVPLPPPPPLQDEAARGTADAIATTVTTGEEEEDQDIAAEEAVCRICMVALSEEAVFKLECCCKGELALAHRACAIKWFSIKGNGSCDVCSQEVLNLPVTLRRLPDHPSVIQAAAALAQAQAQAQAQGTQADGGGGDPTATTNTTRYRVWHGTPILIIVSMLAYFCFLEQLLVGDHGTAALAISLPFACVLGLFSSLSTTKMVSRRYVWIYSAAQFLFIVLFTHIFYRYRRHLHQLLPPPDSQMEAGETRCGIAHLNR

SEQ ID NO: 181546 - protein, 89 aa, Zea Mays
MSRSTQRMQQPNIEKYHGELPACWADALPLSLATSRSIRLRCATSASERGSMAWAAFATVGTAQGSVSWPTTAMQAVLLYKRASKHPVH

SEQ ID NO: 181547 - protein, 90 aa, Zea Mays
MSRSTQRMQQPNIEKYHGELPACWADALPQLSLATSRSIRLRCATSASERGSMAWAAFATVGTAQGSVSWPTTAMQAVLLYKRASKHPVH

SEQ ID NO: 181548 - protein, 180 aa, Zea Mays
MNPSSSSTSSSGGYHSRAAAFASPQPRGGGGGGGRDGSDRIDALGRLLTRVLRHMAAELRIDMRTDGYVRVRDLLKLNLQTFAKAPLKSHTVDEIREAVRQDNKQRFSLLEEDGELLIRANQGHTVTTVTSESLLKPILSPDEVSAYGKVTHTFLKRLTIRWRSNQWCTAECKHLDTSGR

SEQ ID NO: 181549 - protein, 194 aa, Zea Mays
MAAELRIDMRTDGYVRVRDLLKLNLQTFAKAPLKSHTVDEIREAVRQDNKQRFSLLEEDGELLIRANQGHTVTTVTSESLLKPILSPDEVSVCVHGTYRKNLDSILQFGLKRMARLHIHFSSGLPSDGEVTSGVRQNVNILIHLDVSKALKGGMKLYISDNKVILTEGFDGVVPVKYFERVETWPGRAPIPFQR

SEQ ID NO: 181550 - protein, 94 aa, Zea Mays
MRNCDILAGVQAVRQDNKQRFSLLEEDGELLIRANQGHTVTTVTSESLLKPILSPDEVSAYGKVTHTFLKRLTIRWRSNQWCTAECKHLDTSGR

SEQ ID NO: 181551 - protein, 568 aa, Zea Mays
MAAAPPPAALPSHMSAALITLPSSHSYPSLPAQPKPPTPRPPQLHLVPRVAAYPAASAATPRRKASSASATERLRVLVRRGELDDALRLVDSLAGLNPPSPAAVGPCAALIKKLCASGRTADARRVLAASGPDVMVYNAMVAGYCGAGQLDAARRLVADMPVEPDAYTYNTLIRGLCGRGRTSNALAVLEDMFRRGCLPDVVTYTILLEATCKRSGYKQAMKLLDEMHDKGCAPDIVTYNVVLNGICQEGRVEDAMEFLKNLPSYGCEPNTVSYNIVLKGLFTAERWEDAEKLMEEMAHKGCPPNVVTFNMLISFLCRRGLVEPAMEVLEQMPQYGCTPNSLSYNPLLHAFCKQKKIHKAMEFVELMVSRGCYPDIVSYNTLLTALCRNGEVDVAIELLHQLKDKGCSPVLISYNTVIDGLTKAGKTKEALELLDEMTSKGLQPDIITYSTIASGLCREDRIEEAVRTFCKVQDMGIRPTAALYNAILLGLCKRRETHNAIDLFAYMISSGCMPNESTYTILVEGLAYEGLVKECSNASGRQPQYSSARHVIWTHVQCLPSGHNANNR

SEQ ID NO: 181552 - protein, 186 aa, Zea Mays
MALSRTAWIAGGLVARLLLIAVLALTVQSRFSNRTYYDFKAAGYNNDLQSYTYAVVVYLLCRGKRMMTPRRPARSSSTSVCTPTLWSPWCWPAAWARASAPPTTSWSTSSMARGGRKRPRKISSSTTTRGSSPSSSSSSAWSCPCAPLSSPPGSGSGQQATTTSPTTSDQWIRARAREIKQTQPVR

SEQ ID NO: 181553 - protein, 129 aa, Zea Mays
MQMAAAVAPTDAPASAAAPAPHPPHAHAAHGPPHPHHHMPQPRWVVIPYPPPHHPMVAAPPPPPPPFVKHFTPPVSVTPPPAGSGGNGGDDNRTIWVGDLQYWMDENYLHSCFGPGGEAWRRSFGRKFW

SEQ ID NO: 181554 - protein, 137 aa, Zea Mays
MEGCRGRHQSHPPHAIDGARGKTAHLLPTPNLLPFQLKQHRRLVAVWLLVKAPADKGKMEHTTAAVSSVRWVCRSRCKATARSSWEAMVTANFGLWLANTCCRAPDYGSQGEVMLTFAENGSSKVGVRFDKTDPWGH

SEQ ID NO: 181555 - protein, 143 aa, Zea Mays
MDPQKLESDLIKQIPGAIDLGGSCELDHGLLCSVDSLCLDGPGWEDRAKHSFDVVFEDVEKICGNNYTYHGLKNKLESFPAGVLLLGPRFRQMLGKISQTMGLLGSSSHTAKQQYLTLHFRSFLRPREPEDHIVQVNIAASNL

SEQ ID NO: 181556 - protein, 126 aa, Zea Mays
MVNNIISLGTTCSEVAFLVSGSKISNLVISCPILSPEDFFDVLSSRVWSFQVTDFISLNSLLAQGVHPSSVGASLQGEVLMILICYLALATCVPCFYLQADMTHDCYLADVRNIDHVCSQYCSCYI

SEQ ID NO: 181557 - protein, 92 aa, Zea Mays
MVNNIISLGTTCSEVAFLVSGSKISNLVISCPILSPEDFFDVLSSRVWSFQVTDFISLNSLLAQGVHPSSVGASLQGEAQSYVYFYLGCKRN

SEQ ID NO: 181558 - protein, 591 aa, Zea Mays
MPGSSRAAQRTLEIWGFVFTFIFKAWLNNQKFTYRGGMTEEKKIMRRKVLAKWLKESLLRLGPTFIKIGQQFSTRVDILPQEYVDQLSELQDQVPPFPSETAVKIVEEELGASVNEIFDRFDFEPIAAASLGQVHRARLNGQEVVIKVQRPGLKELFDIDLKNLRVIAEYLQKVDPKSDGAKRDWVAIYDECASVLYQEIDYMKEAFNAEKFAENFKKLDYVKVPEIYWAHTTPQVLTMEYVPGIKINRIKQLDKLGVDRKRLGRYAVESYLEQILSHGFFHADPHPGNIAVDDVNGGRLIFYDFGMMGSISQNIREGLLEVFYGVYEKDPDKVLQAMVQMGVLVPTGDMTAVRRTAQFFLNSFQERLAAQRKEREMATAELGFKKQLTKEEKFEKRKQRLAAIGEDLLAIAADQPFRFPATFTFVVRAFSVLDGIGKGLDPRFDITEIAKPYAKELLRFNDAGVEIVVKDAKKRWERQSRAFYNLFRQPDRVEKLAQIIERLEQGELKLRVRTLESERAFQRVAAVQKTIGYGVAAGSLMNLATMLYFNSIRGPATIAYSLCAFFGLQVLIGLVKVKKLDRQERLITGTA

SEQ ID NO: 181559 - protein, 389 aa, Zea Mays
MKEAFNAEKFAENFKKLDYVKVPEIYWAHTTPQVLTMEYVPGIKINRIKQLDKLGVDRKRLGRYAVESYLEQILSHGFFHADPHPGNIAVDDVNGGRLIFYDFGMMGSISQNIREGLLEVFYGVYEKDPDKVLQAMVQMGVLVPTGDMTAVRRTAQFFLNSFQERLAAQRKEREMATAELGFKKQLTKEEKFEKRKQRLAAIGEDLLAIAADQPFRFPATFTFVVRAFSVLDGIGKGLDPRFDITEIAKPYAKELLRFNDAGVEIVVKDAKKRWERQSRAFYNLFRQPDRVEKLAQIIERLEQGELKLRVRTLESERAFQRVAAVQKTIGYGVAAGSLMNLATMLYFNSIRGPATIAYSLCAFFGLQVLIGLVKVKKLDRQERLITGTA

SEQ ID NO: 181560 - protein, 462 aa, Zea Mays
MSVASAAAAASLIASTSLSVPDRIRLHPRPALPPLPCFRRRSRVCLVRAILEDRPSPPAEEDAKRYGLNGNGSGLGYDDAAVQAYLGSNGNGSASGNGGAVKQNPEVAGSSAAIVPAPVPPAEGERRRKERVEEIGREDAWFKQSSAEVSVAPGGRWNRFKTYSTIQRTLEIWGFVFTFIFKAWLNNQKFTYRGGMTEEKKIMRRKVLAKWLKESLLRLGPTFIKIGQQFSTRVDILPQEYVDQLSELQDQVPPFPSETAVKIVEEELGASVNEIFDRFDFEPIAAASLGQVHRARLNGQEVVIKVQRPGLKELFDIDLKNLRVIAEYLQKVDPKSDGAKRDWVAIYDECASVLYQEIDYMKEAFNAEKFAENFKKLDYVKVPEIYWAHTTPQVLTMEYVPGIKINRIKQLDKLGVDRKRLGRYAVESYLEQILSHGFFHADPETLLLMMSMEGDLSSMTSG

SEQ ID NO: 181561 - protein, 750 aa, Zea Mays
MSVASAAAAASLIASTSLSVPDRIRLHPRPALPPLPCFRRRSRVCLVRAILEDRPSPPAEEDAKRYGLNGNGSGLGYDDAAVQAYLGSNGNGSASGNGGAVKQNPEVAGSSAAIVPAPVPPAEGERRRKERVEEIGREDAWFKQSSAEVSVAPGGRWNRFKTYSTIQRTLEIWGFVFTFIFKAWLNNQKFTYRASAGGMTEEKKIMRRKVLAKWLKESLLRLGPTFIKIGQQFSTRVDILPQEYVDQLSELQDQVPPFPSETAVKIVEEELGASVNEIFDRFDFEPIAAASLGQVHRARLNGQEVVIKVQRPGLKELFDIDLKNLRVIAEYLQKVDPKSDGAKRDWVAIYDECASVLYQEIDYMKEAFNAEKFAENFKKLDYVKVPEIYWAHTTPQVLTMEYVPGIKINRIKQLDKLGVDRKRLGRYAVESYLEQILSHGFFHADPHPGNIAVDDVNGGRLIFYDFGMMGSQNIREGLLEVFYGVYEKDPDKVLQAMVQMGVLVPTGDMTAVRRTAQFFLNSFQERLAAQRKEREMATAELGFKKQLTKEEKFEKRKQRLAAIGEDLLAIAADQPFRFPATFTFVVRAFSVLDGIGKGLDPRFDITEIAKPYAKELLRFNDAGVEIVVKDAKKRWERQSRAFYNLFRQPDRVEKLAQIIERLEQGELKLRVRTLESERAFQRVAAVQKTIGYGVAAGSLMNLATMLYFNSIRGPATIAYSLCAFFGLQVLIGLVKVKKLDRQERLITGTA

SEQ ID NO: 181562 - protein, 507 aa, Zea Mays
MSVASAAAAASLIASTSLSVPDRIRLHPRPALPPLPCFRRRSRVCLVRAILEDRPSPPAEEDAKRYGLNGNGSGLGYDDAAVQAYLGSNGNGSASGNGGAVKQNPEVAGSSAAIVPAPVPPAEGERRRKERVEEIGREDAWFKQSSAEVSVAPGGRWNRFKTYSTIQRTLEIWGFVFTFIFKAWLNNQKFTYRGGMTEEKKIMRRKVLAKWLKESLLRLGPTFIKIGQQFSTRVDILPQEYVDQLSELQDQVPPFPSETAVKIVEEELGASVNEIFDRFDFEPIAAASLGQVHRARLNGQEVVIKVQRPGLKELFDIDLKNLRVIAEYLQKVDPKSDGAKRDWVAIYDECASVLYQEIDYMKEAFNAEKFAENFKKLDYVKVPEIYWAHTTPQVLTMEYVPGIKINRIKQLDKLGVDRKRLGRYAVESYLEQILSHGFFHADPHPGNIAVDDVNGGRLIFYDFGMMGSISQNIREGLLEVFYGVYEKDPDKCFKQWFKWVSLFLLEI

SEQ ID NO: 181563 - protein, 604 aa, Zea Mays
MSTGSAGVFLHRGNQALMDDSAVPIGFSMTSYTTGNQFQSRITFGIDQLGSAVNNSSSHGRRGFQRWIHAPAQDDGCRLVLGLGPTPDPDVNSPDQQPAGAGADKSRPPPVTLFGQSFSFADPGTLSLGIHQGRSTGANKHLGAGTIISFSTVDEGSTSARSSSGGYMPSLLFARRPNCSTAEEEQGLLDDTDTDNSNDGTEPSASMTEASFGGVSSDAVTLVSNSGQQAQRRHPKKCRFKGCSKGARGATGLCIAHGGGQRCQKPGCHKGAESRTAYCKAHGGGRRCLQLGCTKSAEGKTDHCIAHGGGQRCGYPDCPKAARGKSGRCIKHGGGKRCSVEGCIRSAEGRVGLCISHGGGRRCQFPDCRRGAQGSTLYCKSHGGGKRCVFEGCGKGAEGSTPLCKAHGGGKRCVYEGGGVCPKSVHGGTDFCVAHGGGKRCAVPGCSKSARGSTDCCKAHGGGKRCNFGDGQCEKFARGRSGLCAAHDTLVASQQRRGGGMIGPGLFHGIVRSASVANMNSDYSSSGVSTVSDCDGSPEAATRRQELIPPQVLVPRSMKSLTAATVQPPKRSREGRVVTVPEGRVHGGGLLSLLGGSFMNVDKL

SEQ ID NO: 181564 - protein, 437 aa, Zea Mays
MPSLLFARRPNCSTAEEEQGLLDDTDTDNSNDGTEPSASMTEASFGGVSSDAVTLVSNSGQQAQRRHPKKCRFKGCSKGARGATGLCIAHGGGQRCQKPGCHKGAESRTAYCKAHGGGRRCLQLGCTKSAEGKTDHCIAHGGGQRCGYPDCPKAARGKSGRCIKHGGGKRCSVEGCIRSAEGRVGLCISHGGGRRCQFPDCRRGAQGSTLYCKSHGGGKRCVFEGCGKGAEGSTPLCKAHGGGKRCVYEGGGVCPKSVHGGTDFCVAHGGGKRCAVPGCSKSARGSTDCCKAHGGGKRCNFGDGQCEKFARGRSGLCAAHDTLVASQQRRGGGMIGPGLFHGIVRSASVANMNSDYSSSGVSTVSDCDGSPEAATRRQELIPPQVLVPRSMKSLTAATVQPPKRSREGRVVTVPEGRVHGGGLLSLLGGSFMNVDKL

SEQ ID NO: 181565 - protein, 208 aa, Zea Mays
MTAPADKGKKAKTDADGGEENEQIDGALVFSIEKLQEIQDELEKVNEEASDKVMEVEQKYSEIRRPVYLKRGDIIKTIPDFWLTAFLSHPLLSELLTEEDQKIFKYLDSIDVDDSDVKAGYSIYLNFSENPYFEDTKLTKTYSFVDDGTTTIKASQIKWKDGMGPANGNGINKKGNKRPLVVESHFRLLKSCACHRLSSSQSFSQSGY

SEQ ID NO: 181566 - protein, 151 aa, Zea Mays
MTAPADKGKKAKTDADGGEENEQIDGALVFSIEKLQEIQDELEKVNEEASDKVMEVEQKYSEIRRPVYLKRGDIIKTIPDFWLTAFLSHPLLSELLTEEDQKIFKYLDSIDVDDSDVKAGYSIYLTSLRTRTLKTQSLQRPIPLLMMEQPQ

SEQ ID NO: 181567 - protein, 252 aa, Zea Mays
MTAPADKGKKAKTDADGGEENEQIDGALVFSIEKLQEIQDELEKVNEEASDKVMEVEQKYSEIRRPVYLKRGDIIKTIPDFWLTAFLSHPLLSELLTEEDQKIFKYLDSIDVDDSDVKAGYSIYLNFSENPYFEDTKLTKTYSFVDDGTTTIKASQIKWKDGMGPANGNGINKKGNKRPLVVESDTELKSLADGVQDEVAEIIKEDLWPNPLKYFNNEVEDEFEGDEEDDDDDDDDDNLDGDDNDDDGDQEN

SEQ ID NO: 181568 - protein, 522 aa, Zea Mays
MNGDGSKEDANRRLEWATLNMERAVVVSETTKGDGNGNAGRKAPISIVRLFLACMVSGGIQYGWALQLSLLSPYSQTLGISHSYVSLTWICGPIAGFVVQPIVGYYSDRCTSKMGRRRPFILAGCIIICLSVLVIGFSADIGRRLGDTKEHCSTFTGSRWSAAAVYIVGFWFLDFANNTVQGPARAMMADLAAGQHGPNVGQAIFSLWMALGSVLGYLSGANAKWHDWLPWLKTAACCDACANLKGAFLTAVVLIIISMSVTLWLAGEERLDKESVDTSGGACSAFMDLFKSLKNLPPAMFSVLAVTAVTWYNTDWMGREIFHGEPQGSGSKADLYEAGVREGAIGLLFCSVALGVTSFFIPRLCRKLTSRVVWSVSSLMVFVLMTAMVVLGMVSMKGYRPSLAASLSGPDHSFKGGALAIFALIGIPQAVLYSVPWAVASEVATEDGGGQGLTIGVLNIAIVLPQLVIALGAGPIDGAFNKGNTPAFGIGAAFALICAVLALILLPKTRGVSNATVMAGGH

SEQ ID NO: 181569 - protein, 417 aa, Zea Mays
MGRRRPFILAGCIIICLSVLVIGFSADIGRRLGDTKEHCSTFTGSRWSAAAVYIVGFWFLDFANNTVQGPARAMMADLAAGQHGPNVGQAIFSLWMALGSVLGYLSGANAKWHDWLPWLKTAACCDACANLKGAFLTAVVLIIISMSVTLWLAGEERLDKESVDTSGGACSAFMDLFKSLKNLPPAMFSVLAVTAVTWLSWFPFFQYNTDWMGREIFHGEPQGSGSKADLYEAGVREGAIGLLFCSVALGVTSFFIPRLCRKLTSRVVWSVSSLMVFVLMTAMVVLGMVSMKGYRPSLAASLSGPDHSFKGGALAIFALIGIPQAVLYSVPWAVASEVATEDGGGQGLTIGVLNIAIVLPQLVIALGAGPIDGAFNKGNTPAFGIGAAFALICAVLALILLPKTRGVSNATVMAGGH

SEQ ID NO: 181570 - protein, 86 aa, Zea Mays
MMRPCHSCVARMDYAAADEPWDDSLVLPRAARLNLLRKPDPVSPTHRMCRSAPSLCNSQSSLAGLPLHYAITATTVRSGERKLSGS

SEQ ID NO: 181571 - protein, 541 aa, Zea Mays
MFAWSRPRPHQPPAPISSSITPPNQNPNSTSPAIADVDGGFAGRSSADGCFAPPSSGPAAQASMPSIAPPSSSVAALTRQPVQFFKGCSVSKETKGPVRSFFTANSKSTTVKSADLKVASSFKNDGGYPAGGVSWKDDTLLPKSTTIRGQDHPVADPVLPMDSMITPEILSANVERVIDMFADDDTDTELDLDSPTEDFTSIAEAIEDIQQGKLVIVVDDESRENEGDLIMAASLVTPEAMAFIVRHETGIVCVSMKEDDLERLSLPLMVTTKENEKLCTAFTVTVDAKEGTTTGVSAKDRAKTVMTLASPDSKPEDLNRPGHIFPLKYREGGVLKRAGHTEASVDLAMLAGLPPVAVLCEIVDDADGSMARLPKLHVFAEKENLKIISIADLIRYRRKRDRLIERASVARLPLKWGNVHAYCYKSVIDGIEHIGMMKGDIGDSQDILVRVHSECLTGDIFGSARCDCGDQLAMAMEMIEKAGRGVLVYLRGHEGRGIGLGHKLRAYNLQDDGRDTVEANEELGLPVDSQEYGIGAQLLLR

SEQ ID NO: 181572 - protein, 329 aa, Zea Mays
MFAWSRPRPHQPPAPISSSITPPNQNPNSTSPAIADVDGGFAGRSSADGCFAPPSSGPAAQASMPSIAPPSSSVAALTRQPVQFFKGCSVSKETKGPVRSFFTANSKSTTVKSADLKVASSFKNDGGYPAGGVSWKDDTLLPKSTTIRGQDHPVADPVLPMDSMITPEILSANVERVIDMFADDDTDTELDLDSPTEDFTSIAEAIEDIQQGKLVIVVDDESRENEGDLIMAASLVTPEAMAFIVRHETGIVCVSMKEDDLERLSLPLMVTTKENEKLCTAFTVTVDAKEGTTTGVSAKDRAKTVMTLASPDSKPEDLNRPGIGGKETG

SEQ ID NO: 181573 - protein, 360 aa, Zea Mays
MVTPTAAPTTSPDFLLNHTPKPKPKQHFSCNRRRRRRLRRPEQRRRVQFFKGCSVSKETKGPVRSFFTANSKSTTVKSADLKVASSFKNDGGYPAGGVSWKDDTLLPKSTTIRGQDHPVADPVLPMDSMITPEILSANVERVIDMFADDDTDTELDLDSPTEDFTSIAEAIEDIQQGKLVIVVDDESRENEGDLIMAASLVTPEAMAFIVRHETGIVCVSMKEDDLERLSLPLMVTTKENEKLCTAFTVTVDAKEGTTTGVSAKDRAKTVMTLASPDSKPEDLNRPGHIFPLKYREGGVLKRAGHTEASVDLAMLAGLPPVAVLCEIVDDADGSMARLPKLHVFAEKENLKIISIADLIR

SEQ ID NO: 181574 - protein, 604 aa, Zea Mays
MVTPTAAPTTSPDFLLNHTPKPKPKQHFSCNRRRRRRLRRPEQRRRVQFFKGCSVSKETKGPVRSFFTANSKSTTVKSADLKVASSFKNDGGYPAGGVSWKDDTLLPKSTTIRGQDHPVADPVLPMDSMITPEILSANVERVIDMFADDDTDTELDLDSPTEDFTSIAEAIEDIQQGKLVIVVDDESRENEGDLIMAASLVTPEAMAFIVRHETGIVCVSMKEDDLERLSLPLMVTTKENEKLCTAFTVTVDAKEGTTTGVSAKDRAKTVMTLASPDSKPEDLNRPGHIFPLKYREGGVLKRAGHTEASVDLAMLAGLPPVAVLCEIVDDADGSMARLPKLHVFAEKENLKIISIADLIRYRRKRDRLIERASVARLPLKWGNVHAYCYKSVIDGIEHIGMMKGDIGDSQDILVRVHSECLTGDIFGSARCDCGDQLAMAMEMIEKAGRGVLVYLRGHEGRGIGLGHKLRAYNLQDDGRDTVEANEELGLPVDSQEYGIGAQILRDLGVRSMKLMTNNPAKYSGIKGYGLSIAGRVPLITPITSENRKYLETKRTKMGHVYGLANAQANQANKWQPEHRRESLGPQACFHYYSSNPASWHKRVI

SEQ ID NO: 181575 - protein, 85 aa, Zea Mays
MARSSRGSRPSNWSDPNPDTFALSPPAPAATVYSAAYSSASCPPRAGTHSCARGPRASRHAGGRMLGTVVSTVSKLTPCAMSPFR

SEQ ID NO: 181576 - protein, 234 aa, Zea Mays
MHGVAHFTTPFSYSCLSSIHSAMNGLLPPEIRVREISAARPEFHARSSTKSKVYRYKIYNEAIMDPFHNHYAYHSAYKLNPHAMQEAANYFVGIHDFTSFANAAHNDGERRPTKKITRFDVTEMGAVLQLEVEGTGFLYRQVRNMVALLLQVGKEALPPDIVPAIIAARDRKELAKVALSAPPHGLYLMSVNYDEEILKPPEGSPPISFGRTHHLRFSWFRTVNRGLSWPASFC

SEQ ID NO: 181577 - protein, 218 aa, Zea Mays
MGSGLINILHNCILKLKLISIIWFAYPALLNVNIMFYMKYWGITYNICCFQVAHFTTPFSYSCLSSIHSAMNGLLPPEIRVREISAARPEFHARSSTKSKVYRYKIYNEAIMDPFHNHYAYHSAYKLNPHAMQEAANYFVGIHDFTSFANAAHNDGERRPTKKITRFDVTEMGAVLQLEVEGTGFLYRQVRNMVVPKNPKQLIVWNGKGSYMDLNIIA

SEQ ID NO: 181578 - protein, 216 aa, Zea Mays
MNGLLPPEIRVREISAARPEFHARSSTKSKVYRYKIYNEAIMDPFHNHYAYHSAYKLNPHAMQEAANYFVGIHDFTSFANAAHNDGERRPTKKITRFDVTEMGAVLQLEVEGTGFLYRQVRNMVALLLQVGKEALPPDIVPAIIAARDRKELAKVALSAPPHGLYLMSVNYDEEILKPPEDELSSRNVSSFSFRCLLGFSWFRTVNRGLSWPASFC

SEQ ID NO: 181579 - protein, 269 aa, Zea Mays
MAANSLFSRQRRPKVTRRCRRTCTSGGWSSPTMEQSSKVAHFTTPFSYSCLSSIHSAMNGLLPPEIRVREISAARPEFHARSSTKSKVYRYKIYNEAIMDPFHNHYAYHSAYKLNPHAMQEAANYFVGIHDFTSFANAAHNDGERRPTKKITRFDVTEMGAVLQLEVEGTGFLYRQVRNMVALLLQVGKEALPPDIVPAIIAARDRKELAKVALSAPPHGLYLMSVNYDEEILKPPEGSPPISFGRTHHLRFSWFRTVNRGLSWPASFC

SEQ ID NO: 181580 - protein, 887 aa, Zea Mays
MMAGRPRPQTELHSPSASTRRRERWLVVLGVALHAVYMLSIFDIYFKSPIVHGMDPVPPRLSAPPAKRLVLLVADGLRADKFFEPDERGRYRAPFLRGVIEEKGRWGVSHARPPTESRPGHVSLIAGFYEDPSAVTKGWKANPVEFDSVFNQSRHTISFGSPDIVPIFCSNLPHSTWDTYPHEYEDFATDASFLDHWSFDQFQDLVNRSFDDIKLRQLLLQDKLVIFLHLLGCDTNGHAHRPYSSIYLNNVKVVDQIAESVYNLMENYFNDNQTAYVFTADHGMSDKGSHGDGHPSNTDTPLVAWGAGIRSPKFLAYTEKPDDGFRFVDNHKHDTPTPKDWALEGFERVDVNQADIAPLMATLVGLPCPMNSVGSLPTPYLKLRKADEVEAVLANTKQILNQFLRKSQLKESSSLYFKPFKPLANFSLVLSQIEDLISGRDYETAMEQSEELRRLALAGLHYFQTYDWFMLMTTITLGYIGWMVNLIIHVLQSYTSYPVILLKRAQLYPNNTSMKVYICGCFFMGLSSILLLLEKSPLLYHAYVLCTIFLWTRIVQKIDFLKSVWRELANMPFKYIFNLLTSSVVALLVLEFLVMSFFDRKIYTWCFLVLGILGSTYVALFIQASAALAIYIWLACWFLSVFTLMPAEIPENNNLVIFSGGLIILIGLASRWIKSNSSSFWLYLTRANKRDPQSFKLYFVQVILVAISSIMVWLSTSHRSQNRELLSLHQFINWSVAGVAMVLPLFSPPSVLSRLTSIFLGFAPPFLLLSIGYEAVFYSAFAMVLIGWIFVESANLYCSEESGSARRRSLADNSVFGYEERHLRLSDLRIPLLFVILFNVAFFGTGNFASIASFEISSVYRFITVFSPFLMAGLLIFKLFIPFMLVM

SEQ ID NO: 181581 - protein, 442 aa, Zea Mays
MEQSEELRRLALAGLHYFQTYDWFMLMTTITLGYIGWMVNLIIHVLQSYTSYPVILLKRAQLYPNNTSMKVYICGCFFMGLSSILLLLEKSPLLYHAYVLCTIFLWTRIVQKIDFLKSVWRELANMPFKYIFNLLTSSVVALLVLEFLVMSFFDRKIYTWCFLVLGILGSTYVALFIQASAALAIYIWLACWFLSVFTLMPAEIPENNNLVIFSGGLIILIGLASRWIKSNSSSFWLYLTRANKRDPQSFKLYFVQVILVAISSIMVWLSTSHRSQNRELLSLHQFINWSVAGVAMVLPLFSPPSVLSRLTSIFLGFAPPFLLLSIGYEAVFYSAFAMVLIGWIFVESANLYCSEESGSARRRSLADNSVFGYEERHLRLSDLRIPLLFVILFNVAFFGTGNFASIASFEISSVYRFITVFSPFLMAGLLIFKLFIPFMLVM

SEQ ID NO: 181582 - protein, 607 aa, Zea Mays
MNSVGSLPTPYLKLRKADEVEAVLANTKQILNQFLRKSQLKESSSLYFKPFKPLANFSLVLSQIEDLISGRDYETAMEQSEELRRLALAGLHYFQTYDWFMLMTTITLGYIGWMVNLIIHVLQSYTSYPVILLKRAQLYPNNTSMKVYICGCFFMGLSSILLLLEKSPLLYHAYVLCTIFLWTRIVQKIDFLKSVWRELANMPFKYIFNLLTSSVVALLVLEFLVMSFFDRKIYTWCFLVLGILGSTYVALFIQASAALAIYIWLACWFLSVFTLMPAEIPENNNLVIFSGGLIILIGLASRWIKSNSSSFWLYLTRANKRDPQSFKLYFVQVILVAISSIMVWLSTSHRSQNRELLSLHQFINWSVAGVAMVLPLFSPPSVLSRLTSIFLGFAPPFLLLSIGYEAVFYSAFAMVLIGWIFVESANLYCSEESGSARRRSLADNSVFGYEERHLRLSDLRIPLLFVILFNVAFFGTGNFASIASFEISSVYRFITVFSPFLMAGLLIFKLFIPFMLVICTFSAITKVVRIPRLGCYFLVILLSDVMTIHFFFLVRNTGSWMEIGNSISHFGIVSAQVVFVLLLFALTNIYTRDILVSSRQLTARKVM

SEQ ID NO: 181583 - protein, 604 aa, Zea Mays
MMAGRPRPQTELHSPSASTRRRERWLVVLGVALHAVYMLSIFDIYFKSPIVHGMDPVPPRLSAPPAKRLVLLVADGLRADKFFEPDERGRYRAPFLRGVIEEKGRWGVSHARPPTESRPGHVSLIAGFYEDPSAVTKGWKANPVEFDSVFNQSRHTISFGSPDIVPIFCSNLPHSTWDTYPHEYEDFATDASFLDHWSFDQFQDLVNRSFDDIKLRQLLLQDKLVIFLHLLGCDTNGHAHRPYSSIYLNNVKVVDQIAESVYNLMENYFNDNQTAYVFTADHGMSDKGSHGDGHPSNTDTPLVAWGAGIRSPKFLAYTEKPDDGFRFVDNHKHDTPTPKDWALEGFERVDVNQADIAPLMATLVGLPCPMNSVGSLPTPYLKLRKADEVEAVLANTKQILNQFLRKSQLKESSSLYFKPFKPLANFSLVLSQIEDLISGRDYETAMEQSEELRRLALAGLHYFQTYDWFMLMTTITLGYIGWMVNLIIHVLQSYTSYPVILLKRAQLYPNNTSMKVYICGCFFMGLSSILLLLEKSPLLYHAYVLCTIFLWTRIVQKIDFLKSVWRELANMPFKYIFNLLTSSVVALLVLEFLVCTHILTQLSF

SEQ ID NO: 181584 - protein, 395 aa, Zea Mays
MEFDVKFDTCGQVMSFFDRKIYTWCFLVLGILGSTYVALFIQASAALAIYIWLACWFLSVFTLMPAEIPENNNLVIFSGGLIILIGLASRWIKSNSSSFWLYLTRANKRDPQSFKLYFVQVILVAISSIMVWLSTSHRSQNRELLSLHQFINWSVAGVAMVLPLFSPPSVLSRLTSIFLGFAPPFLLLSIGYEAVFYSAFAMVLIGWIFVESANLYCSEESGSARRRSLADNSVFGYEERHLRLSDLRIPLLFVILFNVAFFGTGNFASIASFEISSVYRFITVFSPFLMAGLLIFKLFIPFMLVICTFSAITKVVRIPRLGCYFLVILLSDVMTIHFFFLVRNTGSWMEIGNSISHFGIVSAQVVFVLLLFALTNIYTRDILVSSRQLTARKVM

SEQ ID NO: 181585 - protein, 418 aa, Zea Mays
MMAGRPRPQTELHSPSASTRRRERWLVVLGVALHAVYMLSIFDIYFKSPIVHGMDPVPPRLSAPPAKRLVLLVADGLRADKFFEPDERGRYRAPFLRGVIEEKGRWGVSHARPPTESRPGHVSLIAGFYEDPSAVTKGWKANPVEFDSVFNQSRHTISFGSPDIVPIFCSNLPHSTWDTYPHEYEDFATDASFLDHWSFDQFQDLVNRSFDDIKLRQLLLQDKLVIFLHLLGCDTNGHAHRPYSSIYLNNVKVVDQIAESVYNLMENYFNDNQTAYVFTADHGMSDKGSHGDGHPSNTDTPLVAWGAGIRSPKFLAYTEKPDDGFRFVDNHKHDTPTPKDWALEGFERVDVNQADIAPLMATLVGLPCPMNSVGSLPTPYLKLRKADEVEAVLANTKQILNQFLRKSRILSKQFLLHT

SEQ ID NO: 181586 - protein, 408 aa, Zea Mays
MMAGRPRPQTELHSPSASTRRRERWLVVLGVALHAVYMLSIFDIYFKSPIVHGMDPVPPRLSAPPAKRLVLLVADGLRADKFFEPDERGRYRAPFLRGVIEEKGRWGVSHARPPTESRPGHVSLIAGFYEDPSAVTKGWKANPVEFDSVFNQSRHTISFGSPDIVPIFCSNLPHSTWDTYPHEYEDFATDASFLDHWSFDQFQDLVNRSFDDIKLRQLLLQDKLVIFLHLLGCDTNGHAHRPYSSIYLNNVKVVDQIAESVYNLMENYFNDNQTAYVFTADHGMSDKGSHGDGHPSNTDTPLVAWGAGIRSPKFLAYTEKPDDGFRFVDNHKHDTPTPKDWALEGFERVDVNQADIAPLMATLVGLPCPMNSVGSLPTPYLKLRKADEVEAVLANTKQILNQFLRKSH

SEQ ID NO: 181587 - protein, 518 aa, Zea Mays
MNSVGSLPTPYLKLRKADEVEAVLANTKQILNQFLRKSQLKESSSLYFKPFKPLANFSLVLSQIEDLISGRDYETAMEQSEELRRLALAGLHYFQTYDWFMLMTTITLGYIGWMVNLIIHVLQSYTSYPVILLKRAQLYPNNTSMKVYICGCFFMGLSSILLLLEKSPLLYHAYVLCTIFLWTRIVQKIDFLKSVWRELANMPFKYIFNLLTSSVVALLVLEFLVMSFFDRKIYTWCFLVLGILGSTYVALFIQASAALAIYIWLACWFLSVFTLMPAEIPENNNLVIFSGGLIILIGLASRWIKSNSSSFWLYLTRANKRDPQSFKLYFVQVILVAISSIMVWLSTSHRSQNRELLSLHQFINWSVAGVAMVLPLFSPPSVLSRLTSIFLGFAPPFLLLSIGYEAVFYSAFAMVLIGWIFVESANLYCSEESGSARRRSLADNSVFGYEERHLRLSDLRIPLLFVILFNVAFFGTGNFASIASFEISSVYRFITVFSPFLMAGLLIFKLFIPFMLVM

SEQ ID NO: 181588 - protein, 832 aa, Zea Mays
MMAGRPRPQTELHSPSASTRRRERWLVVLGVALHAVYMLSIFDIYFKSPIVHGMDPVPPRLSAPPAKRLVLLVADGLRADKFFEPDERGRYRAPFLRGVIEEKGRWGVSHARPPTESRPGHVSLIAGFYEDPSAVTKGWKANPVEFDSVFNQSRHTISFGSPDIVPIFCSNLPHSTWDTYPHEYEDFATDASFLDHWSFDQFQDLVNRSFDDIKLRQLLLQDKLVIFLHLLGCDTNGHAHRPYSSIYLNNVKVVDQIAESVYNLMENYFNDNQTAYVFTADHGMSDKGSHGDGHPSNTDTPLVAWGAGIRSPKFLAYTEKPDDGFRFVDNHKHDTPTPKDWALEGFERVDVNQADIAPLMATLVGLPCPMNSVGSLPTPYLKLRKADEVEAVLANTKQILNQFLRKSQLKESSSLYFKPFKPLANFSLVLSQIEDLISGRDYETAMEQSEELRRLALAGLHYFQTYDWFMLMTTITLGYIGWMVNLIIHVLQSYTSYPVILLKRAQLYPNNTSMKVYICGCFFMGLSSILLLLEKSPLLYHAYVLCTIFLWTRIVQKIDFLKSVWRELANMPFKYIFNLLTSSVVALLVLEFLVMSFFDRKIYTWCFLVLGILGSTYVALFIQASAALAIYIWLACWFLSVFTLMPAEIPENNNLVIFSGGLIILIGLASRWIKSNSSSFWLYLTRANKRDPQSFKLYFVQVILVAISSIMVWLSTSHRSQNRELLSLHQFINWSVAGVAMVLPLFSPPSVLSRLTSIFLGFAPPFLLLSIGYEAVFYSAFAMVLIGWIFVESANLYCSEESGSARRRSLADNSVFGYEERHLRLSDLRIPL

SEQ ID NO: 181589 - protein, 77 aa, Zea Mays
MASLTMMASFPATLAATEARPAADGRRAVMLAAAAAAVAAIGGAGAAMAGPKNGTPEAKKKYAAICVTMPTAKVCHN

SEQ ID NO: 181590 - protein, 62 aa, Zea Mays
MKVQKNFFLEYKMLLPDYTKGCTLSSTTLPIFILSRRLVEITVQTIKQKDTSLLSTVYANRL

SEQ ID NO: 181591 - protein, 83 aa, Zea Mays
MYFFPQTHRRVNLCIKGRERADPYNTAPRILRGGCKNENKENDDLIQKDQSQPKEYHISMVKINEDETKKVKKRSRWTIKINA

SEQ ID NO: 181592 - protein, 544 aa, Zea Mays
MVLTTLDSAAYYAMQAPQGPVHINCAFREPLDYTNQHWNVDCLLGLDKWFKNSEPYTKYVRMKTVSALGNYSCSVMEVLEIIEKAEQGLLLVGAIHTDEDMWAVALLARHLSWPVATDILSGLRLRKVVNSLPGLDKSILFIDHIDQILLSESAKNWIRPDVIVQIGSRITSKRVGMFLETSFPSSYILIDRHPCRHDPSHVVTHRIQANVAEFAARLCRCTFQRKRSRWTEFLTILNSVVCQEIMFQIHAKCSLTEPYVAHVIGESLYGDAVMFVGNSMVIRDLDMFGNGWMDYTTNGNNVMTHHFPDFVGTVVAGNRGASGIDGLISTAVGFAVGSNKHVFCVVGDISFLHDTNGLALLNQRAWRKPMTIIVVNNHGGAIFSLLPVAKTTSPQILEKFFYTSHDISISKLCAAHRVKHFLVQTKAELHDALVKSNMEQVDCVVEINNSIDSNAEFHRFMSMFSNYSTSQYLGYLLGVPRFKNEVDAMPVDRIDAVEYMLYRIQLSAPRTSGLSDGRFIHEGFVLKLRVEDNIVGFGCTNRNS

SEQ ID NO: 181593 - protein, 635 aa, Zea Mays
MPCLLTELMQWNTCCTGFVLKLRVEDNIVGFGEVAPIEIHEEDLLDVEEQIRYLLHRVKDSVLDIIPLLRGSFSNWIWTSLGVPPSSIFPSVKCGLEMAILNLLASQRKCSLFKVLSGCDLFCRDENVVEYNQNSSASIQICALVDCNGSPMEVALGVAKLVAEGFTTFKLKVGRRESPIEDATVLHKIREVVGYQINIRVDANQKWTYEQAVEFGSRVQSLHLEYIEEPVSSVYDLIKFCEKNVLPVALDETIDNLRGDVICKLHQFVHPGIIALVIKPSVVGGFENAAHIAKWAQLHDKMAVISSTYESSIGLASYIQLAHYVDQQSSIVSRIRNKDTCRATAHGLGTYQWLREDVSEQKLKIHASPLGDGIRATVEDAHGYLHHLNINNEKIKSTYGEEKHRSYSIQVDVDDCSYLVKLREAGDHTNEKVVLLLHGFLGTSEDWVPTMKALAPSARVIAIDLPGHGESQILQRHKNSEQPAVTVQLVADLLLKLIYHITNGEVVVVGYSMGARIALHMALNQDHKIRGAVTISGSPGLRDEASRRRRIAIDKSRAQFLMCCGLECFLQTWYSGKLWTSLREHPEFNSLVRTRSKHKNIKALAKVLADSSVGRQKSPVGRPEALEEAFTRRCW

SEQ ID NO: 181594 - protein, 523 aa, Zea Mays
MVLTTLDSAAYYAMQAPQGPVHINCAFREPLDYTNQHWNVDCLLGLDKWFKNSEPYTKYVRMKTVSALGNYSCSVMEVLEIIEKAEQGLLLVGAIHTDEDMWAVALLARHLSWPVATDILSGLRLRKVVNSLPGLDKSILFIDHIDQILLSESAKNWIRPDVIVQIGSRITSKRVGMFLETSFPSSYILIDRHPCRHDPSHVVTHRIQANVAEFAARLCRCTFQRKRSRWTEFLTILNSVVCQEIMFQIHAKCSLTEPYVAHVIGESLYGDAVMFVGNSMVIRDLDMFGNGWMDYTTNGNNVMTHHFPDFVGTVVAGNRGASGIDGLISTAVGFAVGSNKHVFCVVGDISFLHDTNGLALLNQRAWRKPMTIIVVNNHGGAIFSLLPVAKTTSPQILEKFFYTSHDISISKLCAAHRVKHFLVQTKAELHDALVKSNMEQVDCVVEINNSIDSNAEFHRFMSMFSNYSTSQYLGYLLGVPRFKNEVDAMPVDRIDAVEYMLYSFLHHVLQDYLMVDSFMKDLF

SEQ ID NO: 181595 - protein, 508 aa, Zea Mays
MSMFSNYSTSQYLGYLLGVPRFKNEVDAMPVDRIDAVEYMLYRIQLSAPRTSGLSDGRFIHEGFVLKLRVEDNIVGFGEVAPIEIHEEDLLDVEEQIRYLLHRVKDSVLDIIPLLRGSFSNWIWTSLGVPPSSIFPSVKCGLEMAILNLLASQRKCSLFKVLSGCDLFCRDENVVEYNQNSSASIQICALVDCNGSPMEVALGVAKLVAEGFTTFKLKVGRRESPIEDATVLHKIREVVGYQINIRVDANQKWTYEQAVEFGSRVQSLHLEYIEEPVSSVYDLIKFCEKNVLPVALDETIDNLRGDVICKLHQFVHPGIIALVIKPSVVGGFENAAHIAKWAQLHDKMAVISSTYESSIGLASYIQLAHYVDQQSSIVSRIRNKDTCRATAHGLGTYQWLREDVSEQKLKIHASPLGDGIRATVEDAHGYLHHLNINNEKIKSTYGEEKHRSYSIQVDVDDCSYLVKLREAGDHTNEKVVLLLHGFLGTSEDWVPTMKALAPSARICC

SEQ ID NO: 181596 - protein, 538 aa, Zea Mays
MAILNLLASQRKCSLFKVLSGCDLFCRDENVVEYNQNSSASIQICALVDCNGSPMEVALGVAKLVAEGFTTFKLKVGRRESPIEDATVLHKIREVVGYQINIRVDANQKWTYEQAVEFGSRVQSLHLEYIEEPVSSVYDLIKFCEKNVLPVALDETIDNLRGDVICKLHQFVHPGIIALVIKPSVVGGFENAAHIAKWAQLHDKMAVISSTYESSIGLASYIQLAHYVDQQSSIVSRIRNKDTCRATAHGLGTYQWLREDVSEQKLKIHASPLGDGIRATVEDAHGYLHHLNINNEKIKSTYGEEKHRSYSIQVDVDDCSYLVKLREAGDHTNEKVVLLLHGFLGTSEDWVPTMKALAPSARVIAIDLPGHGESQILQRHKNSEQPAVTVQLVADLLLKLIYHITNGEVVVVGYSMGARIALHMALNQDHKIRGAVTISGSPGLRDEASRRRRIAIDKSRAQFLMCCGLECFLQTWYSGKLWTSLREHPEFNSLVRTRSKHKNIKALAKVLADSSVGRQKSPVGRPEALEEAFTRRCW

SEQ ID NO: 181597 - protein, 365 aa, Zea Mays
MAILNLLASQRKCSLFKVLSGCDLFCRDENVVEYNQNSSASIQICALVDCNGSPMEVALGVAKLVAEGFTTFKLKVGRRESPIEDATVLHKIREVVGYQINIRVDANQKWTYEQAVEFGSRVQSLHLEYIEEPVSSVYDLIKFCEKNVLPVALDETIDNLRGDVICKLHQFVHPGIIALVIKPSVVGGFENAAHIAKWAQLHDKMAVISSTYESSIGLASYIQLAHYVDQQSSIVSRIRNKDTCRATAHGLGTYQWLREDVSEQKLKIHASPLGDGIRATVEDAHGYLHHLNINNEKIKSTYGEEKHRSYSIQVDVDDCSYLVKLREAGDHTNEKVVLLLHGFLGTSEDWVPTMKALAPSARICC

SEQ ID NO: 181598 - protein, 681 aa, Zea Mays
MSMFSNYSTSQYLGYLLGVPRFKNEVDAMPVDRIDAVEYMLYRIQLSAPRTSGLSDGRFIHEGFVLKLRVEDNIVGFGEVAPIEIHEEDLLDVEEQIRYLLHRVKDSVLDIIPLLRGSFSNWIWTSLGVPPSSIFPSVKCGLEMAILNLLASQRKCSLFKVLSGCDLFCRDENVVEYNQNSSASIQICALVDCNGSPMEVALGVAKLVAEGFTTFKLKVGRRESPIEDATVLHKIREVVGYQINIRVDANQKWTYEQAVEFGSRVQSLHLEYIEEPVSSVYDLIKFCEKNVLPVALDETIDNLRGDVICKLHQFVHPGIIALVIKPSVVGGFENAAHIAKWAQLHDKMAVISSTYESSIGLASYIQLAHYVDQQSSIVSRIRNKDTCRATAHGLGTYQWLREDVSEQKLKIHASPLGDGIRATVEDAHGYLHHLNINNEKIKSTYGEEKHRSYSIQVDVDDCSYLVKLREAGDHTNEKVVLLLHGFLGTSEDWVPTMKALAPSARVIAIDLPGHGESQILQRHKNSEQPAVTVQLVADLLLKLIYHITNGEVVVVGYSMGARIALHMALNQDHKIRGAVTISGSPGLRDEASRRRRIAIDKSRAQFLMCCGLECFLQTWYSGKLWTSLREHPEFNSLVRTRSKHKNIKALAKVLADSSVGRQKSPVGRPEALEEAFTRRCW

SEQ ID NO: 181599 - protein, 645 aa, Zea Mays
MPCLLTELMQWNTCCTGLSDGRFIHEGFVLKLRVEDNIVGFGEVAPIEIHEEDLLDVEEQIRYLLHRVKDSVLDIIPLLRGSFSNWIWTSLGVPPSSIFPSVKCGLEMAILNLLASQRKCSLFKVLSGCDLFCRDENVVEYNQNSSASIQICALVDCNGSPMEVALGVAKLVAEGFTTFKLKVGRRESPIEDATVLHKIREVVGYQINIRVDANQKWTYEQAVEFGSRVQSLHLEYIEEPVSSVYDLIKFCEKNVLPVALDETIDNLRGDVICKLHQFVHPGIIALVIKPSVVGGFENAAHIAKWAQLHDKMAVISSTYESSIGLASYIQLAHYVDQQSSIVSRIRNKDTCRATAHGLGTYQWLREDVSEQKLKIHASPLGDGIRATVEDAHGYLHHLNINNEKIKSTYGEEKHRSYSIQVDVDDCSYLVKLREAGDHTNEKVVLLLHGFLGTSEDWVPTMKALAPSARVIAIDLPGHGESQILQRHKNSEQPAVTVQLVADLLLKLIYHITNGEVVVVGYSMGARIALHMALNQDHKIRGAVTISGSPGLRDEASRRRRIAIDKSRAQFLMCCGLECFLQTWYSGKLWTSLREHPEFNSLVRTRSKHKNIKALAKVLADSSVGRQKSPVGRPEALEEAFTRRCW

SEQ ID NO: 181600 - protein, 968 aa, Zea Mays
MVLTTLDSAAYYAMQAPQGPVHINCAFREPLDYTNQHWNVDCLLGLDKWFKNSEPYTKYVRMKTVSALGNYSCSVMEVLEIIEKAEQGLLLVGAIHTDEDMWAVALLARHLSWPVATDILSGLRLRKVVNSLPGLDKSILFIDHIDQILLSESAKNWIRPDVIVQIGSRITSKRVGMFLETSFPSSYILIDRHPCRHDPSHVVTHRIQANVAEFAARLCRCTFQRKRSRWTEFLTILNSVVCQEIMFQIHAKCSLTEPYVAHVIGESLYGDAVMFVGNSMVIRDLDMFGNGWMDYTTNGNNVMTHHFPDFVGTVVAGNRGASGIDGLISTAVGFAVGSNKHVFCVVGDISFLHDTNGLALLNQRAWRKPMTIIVVNNHGGAIFSLLPVAKTTSPQILEKFFYTSHDISISKLCAAHRVKHFLVQTKAELHDALVKSNMEQVDCVVEINNSIDSNAEFHRFMSMFSNYSTSQYLGYLLGVPRFKNEVDAMPVDRIDAVEYMLYRIQLSAPRTSGLSDGRFIHEGFVLKLRVEDNIVGFGEVAPIEIHEEDLLDVEEQIRYLLHRVKDSVLDIIPLLRGSFSNWIWTSLGVPPSSIFPSVKCGLEMAILNLLASQRKCSLFKVLSGCDLFCRDENVVEYNQNSSASIQICALVDCNGSPMEVALGVAKLVAEGFTTFKLKVGRRESPIEDATVLHKIREVVGYQINIRVDANQKWTYEQAVEFGSRVQSLHLEYIEEPVSSVYDLIKFCEKNVLPVALDETIDNLRGDVICKLHQFVHPGIIALVIKPSVVGGFENAAHIAKWAQLHDKMAVISSTYESSIGLASYIQLAHYVDQQSSIVSRIRNKDTCRATAHGLGTYQWLREDVSEQKLKIHASPLGDGIRATVEDAHGYLHHLNINNEKIKSTYGEEKHRSYSIQVDVDDCSYLVKLREAGDHTNEKVVLLLHGFLGTSEDWVPTMKALAPSARICC

SEQ ID NO: 181601 - protein, 132 aa, Zea Mays
MLAVSPSPPPRLPLLTLTHLCAFPLLPPRRRGLSRLRSHRSGTPLVLLRARAVRHAGIVIDIDEMVENEDRDLPVDVSFTRRLPPALTFGDGLDALLRAANEVKATPPAGARSGVIRFEGSKQYWKLINSTY

SEQ ID NO: 181602 - protein, 65 aa, Zea Mays
MFLETSFPSSYILIDRHPCRHDPSHVVTHRIQANVAEFAARLCRCTFQRKRSRWTEFLTILNSVV

SEQ ID NO: 181603 - protein, 466 aa, Zea Mays
MSAMRPEGSVGHEWEANRCPRCGSVPDVVNAVSHLWRVAPIEIHEEDLLDVEEQIRYLLHRVKDSVLDIIPLLRGSFSNWIWTSLGVPPSSIFPSVKCGLEMAILNLLASQRKCSLFKVLSGCDLFCRDENVVEYNQNSSASIQICALVDCNGSPMEVALGVAKLVAEGFTTFKLKVGRRESPIEDATVLHKIREVVGYQINIRVDANQKWTYEQAVEFGSRVQSLHLEYIEEPVSSVYDLIKFCEKNVLPVALDETIDNLRGDVICKLHQFVHPGIIALVIKPSVVGGFENAAHIAKWAQLHDKMAVISSTYESSIGLASYIQLAHYVDQQSSIVSRIRNKDTCRATAHGLGTYQWLREDVSEQKLKIHASPLGDGIRATVEDAHGYLHHLNINNEKIKSTYGEEKHRSYSIQVDVDDCSYLVKLREAGDHTNEKVVLLLHGFLGTSEDWVPTMKALAPSARICC

SEQ ID NO: 181604 - protein, 265 aa, Zea Mays
MSAMRPEGSVGHEWEANRCPRCGSVPDVVNAVSHLWRVAPIEIHEEDLLDVEEQIRYLLHRVKDSVLDIIPLLRGSFSNWIWTSLGVPPSSIFPSVKCGLEMAILNLLASQRKCSLFKVLSGCDLFCRDENVVEYNQNSSASIQICALVDCNGSPMEVALGVAKLVAEGFTTFKLKVGRRESPIEDATVLHKIREVVGYQINIRVDANQKWTYEQAVEFGSRVQSLHLEYIEVIYLIFISYVLKSHSHTHHALTLMNTHTHTLPL

SEQ ID NO: 181605 - protein, 75 aa, Zea Mays
MASKRLLVLALLLAAVFLAVSGAANDDQAQPRKDGGENKADVQDYRGGAHRGPQLKPSHTSIYKDAWTTTLILAN

SEQ ID NO: 181606 - protein, 319 aa, Zea Mays
MCNFYCTGHTFASKLTILLAAMISNPMSTYKLYRNPRNKNAGNFMRLSDFLTFAKGKDLSGIMITVEHAAFMAEKLGFGVVDAVVKALDDSGYSKQTAQNVMIQSTNSSVLKKFKQETKYSLVYMIEEGVRDAAPSSLADIKKFANAVSVSTTSVLPQTHYYLTNQTNKLVTSLQSAGLQVYVYVLMNEFASQPNDFFADATSQINAYVQGAKVDGIITDFPGTAHRYKLNSCTSMGNSAPLFMQPPQPGSLLLTMAPDVQPPAAAPMPLLTDADVAEPALPPVSNTTTAASPSHAALRMRTDVSILIALLMLCASLLI

SEQ ID NO: 181607 - protein, 102 aa, Zea Mays
MVLSSGRLGSFYHLQATRRMCHQWELSGLHQRGGPPCLTGTRGHHSVTSHQSSRWWTISLLLSNSILLYLVHALYSIICYSVVQCFICESLCSECLVSGQQR

SEQ ID NO: 181608 - protein, 299 aa, Zea Mays
MDKFLVPAPPHCGEEPAPPPRRHRWRRIIAELDGRIDSRFQHRDSRLLLDSFTEVYCDCFYQVDRIISASTINFHPVREGVSAIEFDRKGIYIASVTLSGCLTVHDFETLYCSKYGPPCSMPDESSNYVLHISNRIPLNAVRWNPGNQDEIACTSNQSDNVFLFDIGYVSSTPTEVLHKGKSKFPSLYSESCKSLTDITFTSDDKSRIFASGLDGAVYMWDRRSSKTHCLELVASPEAQFNTVKLTVDNRTVFGATKNGTIHVGISVEGGHQLLFKATTRDMVQKHRHCLPCQGAKQNL

SEQ ID NO: 181609 - protein, 163 aa, Zea Mays
MPDESSNYVLHISNRIPLNAVRWNPGNQDEIACTSNQSDNVFLFDIGYVSSTPTEVLHKGKSKFPSLYSESCKSLTDITFTSDDKSRIFASGLDGAVYMWDRRSSKTHCLELVASPEAQFNTVKLTVDNRTVFGATKNGTIHVGISVEGGHQLLFKATTRFSN

SEQ ID NO: 181610 - protein, 294 aa, Zea Mays
MWKRNPFGGKAHSGLDGRTIVVRSLKISVRNVIAQGGFSCVYLACDTVHPSKMYALKHIICNDSESLDLVMKEIQVMNLLKGHPNVVTLVAHDVVDMGRTKEALLVMEFCEKSLVSAMESRGSGYYEEKKVLLIFRDVCNAVFAMHGQSLPIAHRDLKAENVLLGSDGAWKICDFGSTSTNHKCFNKPEEMGIEEDVIRKHTTPDYRAPEMWDLYRREVISEKVDIWALGCLLYRICYFKSAFDGESKLQVLNGNYHIPEQPKYSIAVTGLIKDMLEASPNARPDITQARALID

SEQ ID NO: 181611 - protein, 326 aa, Zea Mays
MGIEEDVIRKHTTPDYRAPEMWDLYRREVISEKVDIWALGCLLYRICYFKSAFDGESKLQVLNGNYHIPEQPKYSIAVTGLIKDMLEASPNARPDITQVWFRVNELLSLELQKRLPDGPSPAVSLSSQDEGAHKRTPVMPRRNPPPPREQSNSFLPHGSSKAGDAPLGAFWATQHAQGAQAVVNRNPLFDGESIKAPLSSKQNQSWVDTSISIPGNRHDHSGQMSLTSKAQNNSLSNNGFRGLSDTEIQNSGKSRAQQPQPEPKCEKDPFNSFVADFDTHNLNIAVGKASELELEVSNLKEQLKKTTLEKAEMTAKHLLIVRRSKS

SEQ ID NO: 181612 - protein, 294 aa, Zea Mays
MNLLDLFGKASELHNNEQKSNVFPIQCSEDDLMVVQNLLPCERFDFPCRYLGIPLSLRKLSKEQFQPFIDRFADCLPSWKADLMTRAGTKVMVQHVLTGAHKRTPVMPRRNPPPPREQSNSFLPHGSSKAGDAPLGAFWATQHAQGAQAVVNRNPLFDGESIKAPLSSKQNQSWVDTSISIPGNRHDHSGQMSLTSKAQNNSLSNNGFRGLSDTEIQNSGKSRAQQPQPEPKCEKDPFNSFVADFDTHNLNIAVGKASELELEVSNLKEQLKKTTLEKAEMTAKHLLIVRRSKS

SEQ ID NO: 181613 - protein, 366 aa, Zea Mays
MAATFALLLLLILSSSVRAAPDAVVSRIAFGSCANQSEPQPIWNAVAGFDPQVFVWLGDNVYGDNKRPFRVFGRERTVGPWKNVPRFYPSTEEELRRRYQLARAQPGYARLRERAQVLGTWDDHDYGLNDAGKELSGKVIAQRLMLDFLDEPEDSKRRKQAGVYASYMFGPEGKRVKVILLDTRYHRDPLLSDGTILGDPQWQWLERELHGPQSEITIIGSSIQVVSNLSATTGPLFYVESWARFPRERERLFRLIDSSKRPGVLFISGDVHFGEITRFDCGAEYPSYDVTSSGLTQSVENSVPEVFQPLMRLLAILTPTTMRVLSPNCQYKSCTIGTILSWVEPYKYESTSVDNLFCFTEFLSFF

SEQ ID NO: 181614 - protein, 157 aa, Zea Mays
MLRFENVAKQIVGKPCETLLKNISASNAHTIPTDITVIISTKYTFAVTLTKYSFHTDKKVFQPLSILESHGRQKSLPKLLLDKEETTPSTPTKCSFIPYLEHSPSNNTKETSTFERSHVIKSLTFSNEENTSKKTQKRMLMLHIRIQKIWYLLILNS

SEQ ID NO: 181615 - protein, 190 aa, Zea Mays
MTLCCLRSTSAGPPSVRTCRSLLLEASHCGSTFSVLHTSASLSSCPAPKTSHPPPPPHGSQGPSLPSNSATSLTMGNELRLLAPSIEARGGVSLSLAQEPQPRVGADAAAVTILGLMSMTVFLKIKMSHGQIEGDTKFFGALAFVIFSGKLDLCSVGRPFSYANYIRLIVNDLKNDLQDLFTLDLFNYTF

SEQ ID NO: 181616 - protein, 82 aa, Zea Mays
MADPGASVNIAARHHLTPQLAGQPPVTHAGWWGGARPYRHGRGHGIKGEGGASRRRTPTSPHIQHPTRKLTFLCCCCCAQCG

SEQ ID NO: 181617 - protein, 104 aa, Zea Mays
MADPGASVNIAARHHLTPQLAGQPPVTHAGWWGGARPYRHGRGHGIKGEGGASRRRTPTSPHIQHPTRLCDPYRCIMGLPDPMEVDFPLLLLLCSVWMTLCCLR

SEQ ID NO: 181618 - protein, 164 aa, Zea Mays
MADPGASVNIAARHHLTPQLAGQPPVTHAGWWGGARPYRHGRGHGIKGEGGASRRRTPTSPHIQHPTRLCDPYRCIMGLPDPMEVDFPLLLLLCSVWMTLCCLRSTSAGPPSVVKSLAFPDEGNVRTYVALFAGIYMSISWTTKINRIAKDNDVDKHNTTIRYV

SEQ ID NO: 181619 - protein, 102 aa, Zea Mays
MLRLQVWTSVVFSTLGKLEEPFELSFFANSGVMVKQSFVCMYQQLKCKHDIIIVEYRNNYLRSLLVVSYTNLRNFLMRFMTTSCAERYIRSIFVIMKKMDDL

SEQ ID NO: 181620 - protein, 73 aa, Zea Mays
MPAPDPARPNSEEAAIKRSRQIDNDKDESMSSPTPPLDVGAGALWVEVLQECLSSIIPIRISRPTVRECYLTM

SEQ ID NO: 181621 - protein, 474 aa, Zea Mays
MPSTSIGNVSSEITRASKLRCARCGLKGAALGCYYGPCLTSFHVPCAVQTIGCRWDGDGYMLCPQHVSNALPCDKQGTDTKENYNASSLHQSQHTDKKGSFDDHNRENEQADQLNISNASLLPQTRSDCHEAEFCTNFSRDGEQTDQLNSSPYIEREQVFDSRRRRKNGQTDHLDISTPCVPHNQHSHPKEEISTDSSRDHHQQIDQLQTSRSSLPLGACQGEEMESDQPDASSCPADELVLLGLCLSVDEKDFVQKFACWTKATLAEEWAENVTHVIVGKGAGSSWCRSFEVLMAILLGKWVVRFEWVADCLQLTPGPEASYEVLLLAASSIDSLGANDGPKQSRIRATEGLQEPKLFSGLCFCLSDLMSPGNRGRTRGLIAAGGGRVLDKRDLRLLPKKDPDPDGRRSPSPVNPRPYFVYDVEAPGGGRFSARLLRREIDEAREQAAAGAQVIGHLSVFDAVAAYDAGILLV

SEQ ID NO: 181622 - protein, 86 aa, Zea Mays
MPLNASRIKVLQAQDDLVTDMLKSASKELLRISRDHLTYKKLLKTLIVQSLLRLKEPAVLLRCRKEDLQLVDLVLESARNEYANKA

SEQ ID NO: 181623 - protein, 455 aa, Zea Mays
MASLTSASTSLLFPQASSSRSRVRLSTSLGFSAQPARLRSRAAAGGQRRGSLLVVRAARGKFERTKPHVNIGTIGHVDHGKTTLTAALTMVLASVGGSAPKKYDEIDAAPEERARGITINTATVEYETETRHYAHVDCPGHADYVKNMITGAAQMDGAILVVSGADGPMPQTKEHILLAKQVGVPKIVVFLNKKDMVDDEELLELVELEVRELLSNYEYDGDEVPIVAGSALKALEALMGNPTLKRGDDEWVDCIFKLVDSVDSYIPVPQRQTDLPFLLAVEDVFSITGRGTVATGRIERGTVKIGDTVDIVGIRDTRNCTVTGVEMFQKTMDDAMAGDNVGLLLRGMQKDDIERGMVLAKPGSITPHTKFEAVVYVLKKEEGGRHSPFFPGYRPQFYMRTTDVTGNVTVIMNDKDEEAKMCMPGDRIKMVVQLIQPVACEQGELCHSVKIESKK

SEQ ID NO: 181624 - protein, 100 aa, Zea Mays
MSEKITQMEEQLELLRTAMDDKIRFLQRPGSGAGRVIASPPTNFVDEPQIKESMERPRAHSSTEQYTKPTEERWGFQGSRDRGSFGGNRISERSSAGQRW

SEQ ID NO: 181625 - protein, 125 aa, Zea Mays
MLAEETRLVESGSPVLAFEESRSPCHLQGQIGDALLNCGSPLLELCLCHLDSDETRGRTLFRVVDAVREVVVALLEVATEGDAAIVEVALEKATTPFDGARQTDFHLLQLLQHLGDGGLGWCHGG

SEQ ID NO: 181626 - protein, 446 aa, Zea Mays
MDTALCDDLLQVVFGLLPPSAAPAVSLVSRRWLALLRAATSSLSLRLPASSAATLAALLSHYPFLAALTVVSAGTPVHDADAVLLAVAAAPAASRLSTLRLLPDWAVSPAALLTVCPALAGLTSLHLTAVRPLSFRWLKLLPRLKSFALVNSAATVDSAGSSSDDADGEAEDVAGTLPLEKLSLCGIRSGDRGLGWLWRRCGSLKWLQLRACDADHCRTLTSLLVYDGGGSEALHRFIQQRAAGLHTLDLRLPLDLHNDHLLAIGADSVHNATHGLASLRLQSCVLITGDGLRSLARTAAGAGIEELALVSCDVVEREPGLLTFLSQSMPRLRRLNLSYNETLNDKVIGAMLSSCRNLIDIRLRGCRGLTGGSLLSLLRHCGQSLEILDISRCPGIAVGNVELFAQRAARLNHVIIEESAMSEELKAIAQKKGMKVGSLPCEGGPF

SEQ ID NO: 181627 - protein, 205 aa, Zea Mays
MVFCADFAALRPSPADVRVVTSDGSAIRAHCSVLAAASPVLERMIEGTRRGWDAGCTVHVLGAPADAVAAFLRFLYSSPRAEDAVGAHGAALLALAHAYRVPWLKRRAEAAVAARLTAERAVDALKLAALCDAPRLYLACARLAGKDLDAVERSEGWRFAGRHDAALQLNLLQLVHDAHQQPQGQDAGGRSGQDMEASGEESDQG

SEQ ID NO: 181628 - protein, 207 aa, Zea Mays
MDALSRPAVVIDNGTGYTKMGFAGNVEPCFITPTVVAVNDSFSGSAQPAVRGTPARGNWLAQHSAGVMADLDFYIGDEALARSRASSSHSLSYPIRNGQVENWDTMERFWQQCIFNYLRCDPEDHYFLLTESPLTAPETREYTGEIMFETFNVPGLYIAVQPVLALAAGYTTTKCEMTGVVVDVGDGATHIVPVADGYVIGRAIKVH

SEQ ID NO: 181629 - protein, 270 aa, Zea Mays
MAIAFSRPCFSCEMTGVVVDVGDGATHIVPVADGYVIGSSIRSIPITGKDVTQFIHQLLKERGENIPAEESFDVARRIKEMYCYTSSDIVKEFNKHDKEPSKYIKHWTGTKPKTGAKYTCDIGYERFLGPEIFFNPEIYNNDFTTPLQVVIDKCIQSSPIDTRRALYKNIVLSGGSTMFKDFHRRLQRDLKKIVDARVRASNSRLISGDAKAQPIEVNVVSHPIQRYAVWFGGSVLASTAEFYEACHTKAEYEEYGASICRTNPVFKGMY

SEQ ID NO: 181630 - protein, 154 aa, Zea Mays
MIKLSYSKRLFKRISSTSNKQQAAASGGGGDNGSAAAAGGGGAREIEWEVRPGGMLVQKRDGRGGRETVAVRVSTGFSWHDVSIGATSTFGLEPREQRLLFRGKERNDTDHLHMVGVRDKDKVLLLEDPALKDMKLRALSARVVPRPCQSFIQV

SEQ ID NO: 181631 - protein, 486 aa, Zea Mays
MGMACHDNWNFCTYSRLMAYACDLDILLHHQDGTWSTITGSCTVVRDMKDMLVHSYFSIMDEVRLHAPPDGKPYEIRLLQIPGAIFAAACGLVVDAIMFTLIALYKFPVMLFKGWKRLIEDLIGREGPFLETACMPFAGLAILLWPFAVIGAFIASVICSVPFGVYAAVVVYQESSLFLGLSYAISSVSIFDEYTNDVLDMAPGSCFPRFKYRTNEASSHGGSLSRPASFKDKHDGKKAPQRVTSFKSSFDEFNPFKLLDHLFIECKHHGKDLVAEGVITPKDIEGTKAGKASTGVLNVGLPAYVILKALLRSAKANSDGLVLSNGSEITSDNRPTSKIFEWFFDPLMVIKDQIKAENFTEEEEAYLEKQVLLISDPKRIKENLIRLPPLSERKQAEIEAFARRLQGITKSISRYPTSKRRFDALVKALSEELARTMGGNQSANGSQVRKIRSGIVRMLSQRSLGKTTGIPGDDHEAQLTSDGFTS

SEQ ID NO: 181632 - protein, 232 aa, Zea Mays
MQDGTWSTITGSCTVVRDMKDMLVHSYFSIMDEVRLHAPPDGKPYEIRLLQIPGAIFAAACGLVVDAIMFTLIALYKFPVMLFKGWKRLIEDLIGREGPFLETACMPFAGLAILLWPFAVIGAFIASVICSVPFGVYAAVVVYQESSLFLGLSYAISSVSIFDEYTNDVLDMAPGSCFPRFKYRTNEASSHGGSLSRPASFKDKHDGKKAPQRVTSFKSSFDEFNPFKITFS

SEQ ID NO: 181633 - protein, 416 aa, Zea Mays
MFTLIALYKFPVMLFKGWKRLIEDLIGREGPFLETACMPFAGLAILLWPFAVIGAFIASVICSVPFGVYAAVVVYQESSLFLGLSYAISSVSIFDEYTNDVLDMAPGSCFPRFKYRTNEASSHGGSLSRPASFKDKHDGKKAPQRVTSFKSSFDEFNPFKLLDHLFIECKHHGKDLVAEGVITPKDIEGTKAGKASTGVLNVGLPAYVILKALLRSAKANSDGLVLSKGAFFSPLKRFVVPFIDLPDFPVKYAGNGSEITSDNRPTSKIFEWFFDPLMVIKDQIKAENFTEEEEAYLEKQVLLISDPKRIKENLIRLPPLSERKQAEIEAFARRLQGITKSISRYPTSKRRFDALVKALSEELARTMGGNQSANGSQVRKIRSGIVRMLSQRSLGKTTGIPGDDHEAQLTSDGFTS

SEQ ID NO: 181634 - protein, 389 aa, Zea Mays
MFTLIALYKFPVMLFKGWKRLIEDLIGREGPFLETACMPFAGLAILLWPFAVIGAFIASVICSVPFGVYAAVVVYQESSLFLGLSYAISSVSIFDEYTNDVLDMAPGSCFPRFKYRTNEASSHGGSLSRPASFKDKHDGKKAPQRVTSFKSSFDEFNPFKLLDHLFIECKHHGKDLVAEGVITPKDIEGTKAGKASTGVLNVGLPAYVILKALLRSAKANSDGLVLSNGSEITSDNRPTSKIFEWFFDPLMVIKDQIKAENFTEEEEAYLEKQVLLISDPKRIKENLIRLPPLSERKQAEIEAFARRLQGITKSISRYPTSKRRFDALVKALSEELARTMGGNQSANGSQVRKIRSGIVRMLSQRSLGKTTGIPGDDHEAQLTSDGFTS

SEQ ID NO: 181635 - protein, 1776 aa, Zea Mays
MPDGLIRSPTRTRPRSVVAAAVAMGDHSDSDSSPKSSSSSSSPSARRRSSPQRSRAHTDETGSSDGVLVELPTQEARSPGADPDSGVLVNMPADDATSGETFDDAPEDLAAAGSLSARSLDESIAVIDFPEVSSTSAELRKYQEEKAVFAREAVALRRLLQEMLGQEASVALHGEDADETLLHSMLDDCSRLVLELNSMARAREQEIESLHARAAEAEVSSEVAHVYLGSWREGSEQAVGRMLASIDAVVRQDDASFEGADQDGISILERKTSLLVERYRQASMGIEQLEQILAEVKPGFAATGHGDLATTLSVLSDELVGSKRNEVDLLQKMNAFAEEKKAIADELEEVKAARNAVNAEASKAKAEFEQMEQKLSTTKEKLSMAVTKGKSLVQHRDSLKQALAEKTGELQSCMTELQKKSDALQAAESRVDELQIFLDEKTSEHEKCLDELRDTYSAWEAAKTSMEQLNESKSALHASLSLKDGVFERIEDIMSEATFPEDLLSLEMTDRLGWLVEQKKIADMIFSEHQKVKEILSSVDIPHSVLTSELDSQISWLASSLNQAKDDAVRLRDESAEMLAKMAAHESKLVSMHEEIDRLTIILLEEKQEKDILLNEHSELMSLYKAAVNKLSLVSSQNNELLKAFAEFFDVTLEGSQSMDIAKLVQQGLRNIQQRPKSSPIESGSFEKLQALLYTLDQESTLCKMILEEDMINRSERTGELQRMAEEIIVLKNEKVSLQKEVERVEERSALLREKLSMAVKKGKGLVHEREGLKQALDEKRSQIENLKQVLEGKSSEIEKLKHALDENKSVTENVKQVLDGKNTEIERLKHALGDSCVETENLKQAFAEKTSEAYKIKQELDAKNMDIENLRGAIESRESAMTDLREHVEHLLSSQVARLEKLQVDIVTLNDEKVKLESMLEEARASWDTLADSISSLTLPIDQPFEGPMEKFSQIAQYIQESQVAKSSLENELQKANEQITLHASRHSDALSTINMLEHELSKLKDHISSISEEKRQMQLNTSAVQEELEKTNEELAINFRNLESANTTINSLQDALSQARSNIFILAAEKNEAEAKYETEINALNAELTKCLEELDKTHGHLQSHSTEYHGYLEKLGMFMMDDSLLSLIAEEYGKTFNSLRDMCLIVKSMHEQLSVKSFQNDSIVEDSELSSLLSLPDYESFVRERLVKNINRKGNIDDTSSFSTIVEQLSNQTEYLSSFLKDLSTYMNSNIIVVLRSLQLVSNTFAHTLEEHDMLKVELGNKDAHNRAQESEVLSLQKDLRAMSSKCIYCVQQIEIVFDDMVDLGYAIDLATGSSSIGSELEVTVSDLKNEDTSDYSKVADTLLATIDTLKSKSEKLSTIKGLVITSLDDFKMKLKQAEAAAETASHEHQLSVERVCMLEKELKILQDECNKMELNIQEYKEREGALKARELELLSVEHTQISADRGLTDNAISKDQTEALVEKISKLNMLSGESNVQREEATSPLDKLFVVIDEFSALQHEVETLRYENEDLQLNIESYTREIEQLREVSRNSDLTNRELESKGSELLEVAVSMERMIQRLGYLGGKDVLEDNKPASTQALLSKLEKLIIASSTESGNSKSIIQELGAKLQSREKAVDELSTKVKMLEDLCHAQLSQPEPSKDRSFEASSSTIGSDMSDIEDAGPVGKTTSVSSVSTAAHARTMRKGSADHLVVNIGSESERLIAAQDSDDKGRIKSLHTSGFIPAQGKHIADRVDAFWVSGSQILMNRPRARLGLMLYWLAVHLWLMGSIL

SEQ ID NO: 181636 - protein, 1650 aa, Zea Mays
MGDHSDSDSSPKSSSSSSSPSARRRSSPQRSRAHTDETGSSDGVLVELPTQEARSPGADPDSGVLVNMPADDATSGETFDDAPEDLAAAGSLSARSLDESIAVIDFPEVSSTSAELRKYQEEKAVFAREAVALRRLLQEMLGQEASVALHGEDADETLLHSMLDDCSRLVLELNSMARAREQEIESLHARAAEAEVSSEVAHVYLGSWREGSEQAVGRMLASIDAVVRQDDASFEGADQDGISILERKTSLLVERYRQASMGIEQLEQILAEVKPGFAATGHGDLATTLSVLSDELVGSKRNEVDLLQKMNAFAEEKKAIADELEEVKAARNAVNAEASKAKAEFEQMEQKLSTTKEKLSMAVTKGKSLVQHRDSLKQALAEKTGELQSCMTELQKKSDALQAAESRVDELQIFLDEKTSEHEKCLDELRDTYSAWEAAKTSMEQLNESKSALHASLSLKDGVFERIEDIMSEATFPEDLLSLEMTDRLGWLVEQKKIADMIFSEHQKVKEILSSVDIPHSVLTSELDSQISWLASSLNQAKDDAVRLRDESAEMLAKMAAHESKLVSMHEEIDRLTIILLEEKQEKDILLNEHSELMSLYKAAVNKLSLVSSQNNELLKAFAEFFDVTLEGSQSMDIAKLVQQGLRNIQQRPKSSPIESGSFEKLQALLYTLDQESTLCKMILEEDMINRSERTGELQRMAEEIIVLKNEKVSLQKEVERVEERSALLREKLSMAVKKGKGLVHEREGLKQALDEKRSQIENLKQVLEGKSSEIEKLKHALDENKSVTENVKQVLDGKNTEIERLKHALGDSCVETENLKQAFAEKTSEAYKIKQELDAKNMDIENLRGAIESRESAMTDLREHVEHLLSSQVARLEKLQVDIVTLNDEKVKLESMLEEARASWDTLADSISSLTLPIDQPFEGPMEKFSQIAQYIQESQVAKSSLENELQKANEQITLHASRHSDALSTINMLEHELSKLKDHISSISEEKRQMQLNTSAVQEELEKTNEELAINFRNLESANTTINSLQDALSQARSNIFILAAEKNEAEAKYETEINALNAELTKCLEELDKTHGHLQSHSTEYHGYLEKLGMFMMDDSLLSLIAEEYGKTFNSLRDMCLIVKSMHEQLSVKSFQNDSIVEDSELSSLLSLPDYESFVRERLVKNINRKGNIDDTSSFSTIVEQLSNQTEYLSSFLKDLSTYMNSNIIVVLRSLQLVSNTFAHTLEEHDMLKVELGNKDAHNRAQESEVLSLQKDLRAMSSKCIYCVQQIEIVFDDMVDLGYAIDLATGSSSIGSELEVTVSDLKNEDTSDYSKVADTLLATIDTLKSKSEKLSTIKGLVITSLDDFKMKLKQAEAAAETASHEHQLSVERVCMLEKELKILQDECNKMELNIQEYKEREGALKARELELLSVEHTQISADRGLTDNAISKDQTEALVEKISKLNMLSGESNVQREEATSPLDKLFVVIDEFSALQHEELGAKLQSREKAVDELSTKVKMLEDLCHAQLSQPEPSKDRSFEASSSTIGSDMSDIEDAGPVGKTTSVSSVSTAAHARTMRKGSADHLVVNIGSESERLIAAQDSDDKGRIKSLHTSGFIPAQGKHIADRVDAFWVSGSQILMNRPRARLGLMLYWLAVHLWLMGSIL

SEQ ID NO: 181637 - protein, 835 aa, Zea Mays
MQAGRDSPRSITVCSALFFPDRTTGLQLELDWTAALHGLVLVPEQLSCAHRLLLHKSAVYKCFESCAPVLLFLSSSKQVISFVVTWWLAECWCTHSLLVPPCCCCCSSWHGLVFSAGAAAARRWISPEAPAMERSCYFPLRWESTGDQWWYASPIDWAAADGHYDIVRQLLHLDPNLLIKLTSLRRIRRLEALWDDDARFADAARNRASVARSLLLECECRNHRPGAGENTLLRAGYGGWVLYAAASAGDAAFVRELLERDPLLVFGEGEYGVTDMFYAAARGGSADVFRLLLDHAMSPRCSTSCRNGEASARRSSVFRLEMMSRAVHAAARGGSVEMLRELLDESSVSTYLDIRGSTVLHAAAGRGQLQVVKYLVASFDIINSTDNHGNTALHVAAYRGHQPVVEALVAASPSTLSVVNNAGDTFLHSAVTGFRTPGFRRLDRQLELMRYLIRERTADIQKIINLRNDAGLTALHLAVVGCAHPDLVELLMATPSIDLNAEDANGMTALALLKQQLRSATSDRLIKQIVSAGGVLNSSILRTRSAIASQIKMQGGIASSPGTTFKVSDAEIFLFSGMGAAESLRPSSCSSNGKDDDPTHADADCAENRGSSEKRLSSASRAKDRLKMMLRWPRHKDKTPKKSEDSSPLGSISRLNEHGAETPAPLRQKFTKTTALNGKRTLAVKSSTPSSSSTKKKLNTKLIHGIMEAMPQLAPSTARSASPTDTFLRSSVSSTPQPLAKLKDICLDDEISMVTPPAGRLKDSDDAMEDPSCSNNSSMDDGCGAGTAESAARKHGCGNGRLINICFGAQGLTVEDSASGQQTSKMFKQQCLRVS

SEQ ID NO: 181638 - protein, 56 aa, Zea Mays
MPSLLRIRYAPFKNNMYIIICHQNVCCGFYTGFSLSWYHTRQMVNSYQKSIRRRKF

SEQ ID NO: 181639 - protein, 464 aa, Zea Mays
MACLEAPPRVELCPVSCQPRGLQLPPWRLSLSRSSSSCRSCTLVSRQLPICNAQSSEREEAKAVLSLFLRQKGLRSTLAARIVNKSDGFIEHLVSKLQIAYRSRYAEGRELSTPEIRDALLPYLEALSKEHGDSLVEVVENFPDPFAMEREALSSSMAFTPTSSNKQKAIARISTAASGAALPELVPYLLDLGMDHEEIKDIVRKFPAFAYYSVDRKIKPLVELLLELGVKNSSIPGIIKKRPQLCGISMSDNLKPMMAYLESIGVDKAQWSKVITRFPALLTYSRNKVQTTVSFLAELGVSEKSIGKILTRCPHIMSYSVDDNLRPTAAYFRSIGADAASLIQKSPQAFGLNVEAKLRPTTEFFLARGFSVEEVGVMANRFGIVHTLSLEENLLPKYEFFLAMEYPRCELVKFPQYFGYSLDRRIKPRYARMTGCGVRLILNQMLSVSDARFEKILEKKTARL

SEQ ID NO: 181640 - protein, 126 aa, Zea Mays
MHGVGIASLSHSYRPGGESALSGGQDTGTVASWMCMRARGLSPVPEPIHMACLMWYRPDGKGCCTTAGNRRGTAGRLFSGAFSCVADLLAMSALSRIQDFIIEYANQNLHIHYPNHLIIRGDSDTI

SEQ ID NO: 181641 - protein, 325 aa, Zea Mays
MRRFLPAGGGGGGGEPSSSSSSGGHQHHQHGGLASGERAAAGLRYRGGADISLGHGHDDGGHGRSIDAADRRNDGSMDMLARHSSSPVGFFSNLVVDNGYPRSNKAGGGGGVEGQQHDPSTAANASGSSARKMKTPEFNFTGAQQGQQLGAAAGHLSRISEDGAFPGGMMGDRAGRGSAGESSGAAAAARSYSAGGFSIVGPWEESRDIITTLGAYDPQFSGAMAGTALEMAGMDRYVQLQQDQVPFKVRAKRGCATHPRSIAERERRTRISEKLRKLQDLVPNMDKQTSTADMLDLAVEHIRGLQSELQALKHEQEKCTCCRKR

SEQ ID NO: 181642 - protein, 196 aa, Zea Mays
MKTPEFNFTGAQQGQQLGAAAGHLSRISEDGAFPGGMMGDRAGRGSAGESSGAAAAARSYSAGGFSIVGPWEESRDIITTLGAYDPQFSGAMAGTALEMAGMDRYVQLQQDQVPFKVRAKRGCATHPRSIAERERRTRISEKLRKLQDLVPNMDKQTSTADMLDLAVEHIRGLQSELQVIIIYVRTYVRACACICM

SEQ ID NO: 181643 - protein, 51 aa, Zea Mays
MESLLSLGSYTRWLEVQRMKDPFDSNSSQPHQTITINKDIIMSIVHINNSI

SEQ ID NO: 181644 - protein, 487 aa, Zea Mays
MASPPPALEILVREPDGVTVWSGPPYPPGTTSPPQRLPKTACSATSFSTDGARLLATVASASATVYDCRTLAVVKCFELPGLLAAALSPTGAYLQTFQKSSSPQEKNVTVWHVDTAAALYQHYQKSMSKTTWPMVQFSADESVACRMMPNEIQFFDPKDFAKGILYRIRMPGIATMKLATAPGSHVAGFVPEAKGVPASVQIFSCNKDAQNQVVARRSFFRCSTVQLQWNKGSTGLLILAQADVDKTNQSYYGETKLNYLTTDRAFEGIVPLKKDGPVHDVQWSSSGSEFAVVYGVMPPKATIFNKKCNPLVEFGEGPYNTIRWNPKGRFVVLAGFGNLPGDMAFWDYSEKKLVAKTKAECSVTSEWSPDGRHFMTATTAPRLQIDNCIKIFDHNGSLQFKKMFERLYQADWKPEAAERFTDIADLTTSLSTLKIEETKKQVSAQGSKSAQTSSKAPAITAPKPTAYRPPHAKGSAELQDKVQASIQ

SEQ ID NO: 181645 - protein, 521 aa, Zea Mays
MASPPPALEILVREPDGVTVWSGPPYPPGTTSPPQRLPKTACSATSFSTDGARLLATVASASATVYDCRTLAVVKCFELPGLLAAALSPTGAYLQTFQKSSSPQEKNVTVWHVDTAAALYQHYQKSMSKTTWPMVQFSADESVACRMMPNEIQFFDPKDFAKGILYRIRMPGIATMKLATAPGSHVAGFVPEAKGVPASVQIFSCNKDAQNQVVARRSFFRCSTVQLQWNKGSTGLLILAQADVDKTNQSYYGETKLNYLTTDRAFEGIVPLKKDGPVHDVQWSSSGSEFAVVYGVMPPKATIFNKKCNPLVEFGEGPYNTIRWNPKGRFVVLAGFGNLPGDMAFWDYSEKKLVAKTKAECSVTSEWSPDGRHFMTATTAPRLQIDNCIKIFDHNGSLQFKKMFERLYQADWKPEAAERFTDIADLTTSLSTLKIEETKKQAQGSKSAQTSSKAPAITAPKPTAYRPPHAKGSAELQDKLFGGLAPAGGEMSKNALRNKKRREKQKEKKAAEASGSPADES

SEQ ID NO: 181646 - protein, 304 aa, Zea Mays
MSAVEEDGCSLRCDLCDTEIVHSMAELLLRGLATASVDSTTGDIFKSASSVAAAVKTELENYMLVRTESLIREFVDGAQDHSDQLMKASTRPTEFLSDLIGDFVASKRNLLSHVSGFLSSESRLNRIKDFMQKMEMENVWTLDVRQATSETILESIDMKCIFHCPEKFVEQDKLVDHRSRCKFRVVGCENDGCSVSLSAIHSEEHDSICPFKALPCEQLCEQHVMRSEMDKHCATVCAMKLINCPFYHVGCETAFPQGNLENHCSKLLQTHMLYVLQASTRQNAAVNDMNQRLQLLEKMLGRSL

SEQ ID NO: 181647 - protein, 364 aa, Zea Mays
MSAVEEDGCSLRCDLCDTEIVHSMAELLLRGLATASVDSTTGDIFKSASSVAAAVKTELENYMLVRTESLIREFVDGAQDHSDQLMKASTRPTEFLSDLIGDFVASKRNLLSHVSGFLSSESRLNRIKDFMQKMEMENVWTLDVRQATSETILESIDMKCIFHCPEKFVEQDKLVDHRSRCKFRVVGCENDGCSVSLSAIHSEEHDSICPFKALPCEQLCEQHVMRSEMDKHCATVCAMKLINCPFYHVGCETAFPQGNLENHCSKLLQTHMLYVLQASTRQNAAVNDMNQRLQLLEKAQSLNEISGALDVRSLTLIIKEQEAKIKDLESGIKAQEAKSYVNARLIFHLKISVYRDDIGLKANH

SEQ ID NO: 181648 - protein, 65 aa, Zea Mays
MKNWPESFCHYFNSILLTIDCGSDLICASYLLEEQLNFYRFSEEYEMILWCALIILGFEEGWREV

SEQ ID NO: 181649 - protein, 834 aa, Zea Mays
MSHGVPAPMLEELAREATLADVSILVDGNDAELHVHGNGAEVHDNGTELHGNGAVLKRVEMPQDLGAISAKEVPLHEGKEVILVDDNDSGQEDDAEGVCRRLVIGCSRAGRGRANACYLSRESTKINCPARISLKLRQDRWLHIDDAKLEHNHPYNQSTTSLINCYKKLTDAKNGVSASRLKGRRNIPAEKEQGNFTEIGRLKFGEGDDEYIQKFFGNMQNKNPYFFYLVDLDNQGRLRNLFWSDARSRAANDYFGHDVVYFDTSYLTEKYDLPLVFFTGMNNHGQPVLFGTALLSDLSVDSYAWLLRAFLSCMKGLCPKAIITEHYNAIMDAVQEVLPEVRHRLCLYRIMKDVAENLKEHAEFKTINKALKKVTYGSLKIPEFEMEWKKIIEEHGLGGNECLSSLYEHRQLWAPAYLRDKFWAGMSISQRGESISSYYDGFVYPKTSLKQFFSKYEMILENKYKKEWQADEESSHRSPLTVTKFYMEEQLAKAYTINMFRKFQDELKATMYCDGMPIKVDGRLVTFEVKECSYMEDGKDTESRTYEVYFCKEEPKVEIECECGFVQFTGILCRHALSVLKLQEIFEIPKDYVLDRWRRDYKKLYYNAKKPNEMPLSDIVERSDYLFTQCSQLLNLGFVSESRYLVALKLLREMERSLLDDGLPARDRQPMLLSFEADAPENGQGLFSPQFSEGVKNSQSAHAKRRGRPLKKVTESTDDTVTQPNKEQQDFLRSSFVTENTNMIQGPSSASHLEGPHMGVQGGIDLMDGIPNLSFGNHFGMDINHQHQVPNHQRMQQNNFIQVQAEPHGFGNQWVYHPMLQDNPVLRTPARRAG

SEQ ID NO: 181650 - protein, 813 aa, Zea Mays
MEVEEPLPTSKNPRRARRRDLNALDPTLEESDGEDIGVPEVGMVFNNHTEVNRFYRRYARRVGFGVSVRRSSFSREGTCLYLELMCCKGGRPRYEPKFRKRASSTTNCPAKVRVKLWGDKLLHIELAILDHNHPVSPAMARFLNSYKQLSGPAKRRLRMGGPGTMPVEESSKMPMDKLGELEQLLFGESKHNSFVERGRLKLQPGDSEALRLFFTRMQAKNANFFNVIDLDDEGCTRNVFWADARSRAMCEYYSDVITLDTSYVASKYDMPLATFIGVNHHGQSVLMGCALLSDETAETYSWLLKSWIACMYGNLPKAIVTDYCRGIQSAVAEIIPGVRHRMCLFQIMRKAAERLGGLSEYRAINKAMHKAVYDSLTIDEFEEEWNTLITYSGLQSNDWLRSLYECRSSWVPVFIKDTFWAGMSTTQRNETITPFFDGYVDLKTTLKQFLVKYEMALQSKYEKEAQADFETFHKQRPPVSKFYMEEQLSKVYTHNMFKKFQDEIEAIMYCHVSLISVDGPVSTFNVKECIFFEDGKRTMSKIFAVTYKVDEKNISCICGGFQFSGILCRHSLSMLKFQLVREIPQHYILDRWKKDFRQLHVMRRPPSDLVPNNRMDRYDYLSIRCLQLVDSAVLSDKYRLALRLVRETEKFLLNSNTHDDTQPRIKSRVPKVNKPNIVTGQTMVGAATGNGNDGLKGPEATAVTQVPQSQKGGAEKGIVPTGYIGVPANLQQFVGNQTAFRPSIVYMVPSGVDPHAFGNVMMPVMYQQMFQVPPKPNETVQDTSANGKSKRPRGQKLTETSQQANGTPASASG

SEQ ID NO: 181651 - protein, 811 aa, Zea Mays
MEVEEPLPTSKNPRRARRRDLNALDPTLEESDGEDIGVPEVGMVFNNHTEVNRFYRRYARRVGFGVSVRRSSFSREGTCLYLELMCCKGGRPRYEPKFRKRASSTTNCPAKVRVKLWGDKLLHIELAILDHNHPVSPAMARFLNSYKQLSGPAKRRLRMGGPGTMPVEESSKMPMDKLGELEQLLFGESKHNSFVERGRLKLQPGDSEALRLFFTRMQAKNANFFNVIDLDDEGCTRNVFWADARSRAMCEYYSDVITLDTSYVASKYDMPLATFIGVNHHGQSVLMGCALLSDETAETYSWLLKSWIACMYGNLPKAIVTDYCRGIQSAVAEIIPGVRHRMCLFQIMRKAAERLGGLSEYRAINKAMHKAVYDSLTIDEFEEEWNTLITYSGLQSNDWLRSLYECRSSWVPVFIKDTFWAGMSTTQRNETITPFFDGYVDLKTTLKQFLVKYEMALQSKYEKEAQADFETFHKQRPPVSKFYMEEQLSKVYTHNMFKKFQDEIEAIMYCHVSLISVDGPVSTFNVKECIFFEDGKRTMSKIFAVTYKVDEKNISCICGGFQFSGILCRHSLSMLKFQLVREIPQHYILDRWKKDFRQLHVMRRPPSDLVPNNRMDRYDYLSIRCLQLVDSAVLSDKYRLALRLVRETEKFLLNSNTHDDTQPRIKSRVPKVNKPNIVTGQTMVGAATGNGNDGLKGPEATAVTQVPQSQKGGAEKGIVPTGYIGVPANLQQFVGNQTAFRPSIVYMSGVDPHAFGNVMMPVMYQQMFQVPPKPNETVQDTSANGKSKRPRGQKLTETSQQANGTPASASG

SEQ ID NO: 181652 - protein, 391 aa, Zea Mays
MINRIAGVFARRGYNIESLAVGLNKDKALFTIVVSGTDMVLNQVIEQLNKLVNVHSVEDLSKEPQVERELMLIKLNVEPDQRPEVMVLVDIFRAKVVDISEKTLTIEVAGDPGKIAAVQRNLRKFGIKEICRTGKIALRREKIGATARFWRFSAASYPDLIEALPKKPLTSVNKTVNGSFVRPSNAGGDVYPVESYESSANQVLDAHWGVLDDDDATGLCSHTLSILVNDCPGVLNIVTGVFARRGYNIQSLAVGSAEKEGISRITTVVPGTVESIGKLVQQLYKLIDVHEVHDITHSPFAERELMLIKVSVNTAARREILDIAEIFRAKPIDVSDHTVTLQLTGDLDKMVALQRLLEPYGICEVARTGRVALVRESKVDSKYLRGYSLPL

SEQ ID NO: 181653 - protein, 495 aa, Zea Mays
MSLASSHHLRPSPAGPARRPGCPAPRVALCRPPGASPPYRGRCCTIVAAAAPAAGAGGEAASAPAAAVPAVAPGAAARDKVRRHTISVFVGDESGMINRIAGVFARRGYNIESLAVGLNKDKALFTIVVSGTDMVLNQVIEQLNKLVNVHSVEDLSKEPQVERELMLIKLNVEPDQRPEVMVLVDIFRAKVVDISEKTLTIEVAGDPGKIAAVQRNLRKFGIKEICRTGKIALRREKIGATARFWRFSAASYPDLIEALPKKPLTSVNKTVNGSFVRPSNAGGDVYPVESYESSANQVLDAHWGVLDDDDATGLCSHTLSILVNDCPGVLNIVTGVFARRGYNIQSLAVGSAEKEGISRITTVVPGTVESIGKLVQQLYKLIDVHEVHDITHSPFAERELMLIKVSVNTAARREILDIAEIFRAKPIDVSDHTVTLQLTGDLDKMVALQRSPELDEWHWSVNRRSTPSTSAVTLFHCSLAFVIGGGPDKELGLLL

SEQ ID NO: 181654 - protein, 321 aa, Zea Mays
MLIKLNVEPDQRPEVMVLVDIFRAKVVDISEKTLTIEVAGDPGKIAAVQRNLRKFGIKEICRTGKIALRREKIGATARFWRFSAASYPDLIEALPKKPLTSVNKTVNGSFVRPSNAGGDVYPVESYESSANQVLDAHWGVLDDDDATGLCSHTLSILVNDCPGVLNIVTGVFARRGYNIQSLAVGSAEKEGISRITTVVPGTVESIGKLVQQLYKLIDVHEVHDITHSPFAERELMLIKVSVNTAARREILDIAEIFRAKPIDVSDHTVTLQLTGDLDKMVALQRLLEPYGICEVARTGRVALVRESKVDSKYLRGYSLPL

SEQ ID NO: 181655 - protein, 253 aa, Zea Mays
MVGLVGGSTARAEHVVANAGGEAEYVRRMHRHAPTEHQCTSTLVKHIKAPVHLVWELVRRFDQPQRYKPFVRNCVVRGDQLEVGSLRDVNVNPGLDMPATVACEIKAQLVRTAEAARQLAPMLEVGRPSYQGRSSVYQSSSKMMSAISVAHLGCKDMDVVDVGVVGMVDSQSLSSALEKLYFWERKLYAEVKIVGCGVRSSQNLGDEQPQGNPLIVSCQQPHPRPVLSRTLSPTCGCPSAAKHPTPAVAILLL

SEQ ID NO: 181656 - protein, 258 aa, Zea Mays
MVGLVGGSTARAEHVVANAGGEAEYVRRMHRHAPTEHQCTSTLVKHIKAPVHLVWELVRRFDQPQRYKPFVRNCVVRGDQLEVGSLRDVNVNPGLDMPATVACEIKAQLVRTAEAARQLAPMLEVGRPSYQGRSSVYQSSSKMMSAISVAHLGCKDMDVVDVGVVGMVDSQSLSSALEKLYFWERKLYAEVKIVGCGVRSSQNLGDEQPQGNPLIVSCQQPHPRPVLSRTLSPTCGCPSAAKHPTPAVAMRLRCAWRT

SEQ ID NO: 181657 - protein, 76 aa, Zea Mays
MPAAAPTSCSVSHALANLWLSIRRQAPDPSSRNAIALCMADLRQLMVCPKHWKSENYFCENYTEQADWALRRLWFY

SEQ ID NO: 181658 - protein, 310 aa, Zea Mays
MKEKGIAPDVIISIVLVHMYSRAGKLEQAKEAFDFIRREDFKPDRKLFSSMIKCYINHGEPEQAENLIKVMRDTRVKPTREIYIGLLRSYVQRGLMAYAERVLKTMSFDRVEPTQELYTICIEAYGRVGDPKEACAMFDQMRRKFGHEADDSSIAGVVAAYMKNNQLDHALQWLLSLEKEGLQLGVKTNLMLLDWLSMLQLVPEAEQFVQKIKNLGEEPIEVHVFLADMYAKSSQEDKARRSLKILEEKKKLLKSDQFERVIRGLVDGGFSEEANKFYKMMKSCGFEPSKTIEVAVKALRIRGGSHRTGR

SEQ ID NO: 181659 - protein, 351 aa, Zea Mays
MVAEILLDQESFEANIRDYSKLIDLHAKANNVESAERVLGKMKEKGIAPDVIISIVLVHMYSRAGKLEQAKEAFDFIRREDFKPDRKLFSSMIKCYINHGEPEQAENLIKVMRDTRVKPTREIYIGLLRSYVQRGLMAYAERVLKTMSFDRVEPTQELYTICIEAYGRVGDPKEACAMFDQMRRKFGHEADDSSIAGVVAAYMKNNQLDHALQWLLSLEKEGLQLGVKTNLMLLDWLSMLQLVPEAEQFVQKIKNLGEEPIEVHVFLADMYAKSSQEDKARRSLKILEEKKKLLKSDQFERVIRGLVDGGFSEEANKFYKMMKSCGFEPSKTIEVAVKALRIRGGSHRTGR

SEQ ID NO: 181660 - protein, 86 aa, Zea Mays
MEFNRTRVMDYAFYIIITIKGQDGKNESLQFSKEYEKSEWGPPKTFPNLILNQTAASCSRVGQHAPPGRISSPSSKHLLSLAPRRG

SEQ ID NO: 181661 - protein, 80 aa, Zea Mays
MSLEPQGSGSGSALPNRCNRGVRVRLTGQERRGGSDAGKKGGRAVLSTSLADWSPVRLQRGRERRRHGCAMVYTTILIIV

SEQ ID NO: 181662 - protein, 231 aa, Zea Mays
MTLMRSYNRQGAAHRDGLRFGRKVGQPVENGGLVEYFFGKDGNEHLHYDKFSSFLKQLHDEIVRLEFSHYDLKSSNTISAKDFALSMVASADMNHIDKLLDRVDDLDDNLDLKDLRITFEEFKAFADLRRRLEPFAMAIFSYGKVNGLLTKQDLKRAASHVCGVDLTDKVVDIIFHVFDANCDGNLSSEEFLRSLQRRENDIRQPATSGFLGVIACWLNCTKCSLQQMLPQ

SEQ ID NO: 181663 - protein, 187 aa, Zea Mays
MGEEASCNAASAMEAATNARPAKENGRAPAVAEVVAQEAAADPRLQGISDAIRVVPHFPKHGIMFNDITTLLLRPRVFKDAVDLFVERYRGMRIDAVAGIEARGFIFGPAVALAIGAKFIPLRKPRKLPGEVISEKYVLEYGTDCLEMHVGAIERPGERVLITDDLVATGGTLCAAIRLLAKGILRL

SEQ ID NO: 181664 - protein, 212 aa, Zea Mays
MGEEASCNAASAMEAATNARPAKENGRAPAVAEVVAQEAAADPRLQGISDAIRVVPHFPKHGIMFNDITTLLLRPRVFKDAVDLFVERYRGMRIDAVAGIEARGFIFGPAVALAIGAKFIPLRKPRKLPGEVISEKYVLEYGTDCLEMHVGAIERPGERVLITDDLVATGGTLCAAIRLLERAEADVVECACLIGLPKFKVPYNISAVHYVY

SEQ ID NO: 181665 - protein, 151 aa, Zea Mays
MGEEASCNAASAMEAATNARPAKENGRAPAVAEVVAQEAAADPRLQGISDAIRVVPHFPKHGIMFNDITTLLLRPRVFKDAVDLFVERYRGMRIDAVAGIEARGFIFGPAVALAIGAKFIPLRKPRKLPAHDGKLRNAWIRLLREIIVHSC

SEQ ID NO: 181666 - protein, 79 aa, Zea Mays
MGEEASCNAASAMEAATNARPAKENGRAPAVAEVVAQEAAADPRLQGISDAIRVVPHFPKHVTPSLLCMRRRWGPRDAA

SEQ ID NO: 181667 - protein, 194 aa, Zea Mays
MGEEASCNAASAMEAATNARPAKENGRAPAVAEVVAQEAAADPRLQGISDAIRVVPHFPKHGIMFNDITTLLLRPRVFKDAVDLFVERYRGMRIDAVAGIEARGFIFGPAVALAIGAKFIPLRKPRKLPGEVISEKYVLEYGTDCLEMHVGAIERPGERVLITDDLVATGGTLCAAIRLLGFLQVEWKARLRAG

SEQ ID NO: 181668 - protein, 188 aa, Zea Mays
MAKGGGERGTLLPVSADDGKGNDGGGGGDDAVLFKGSAMTRRGGAAALSYMACSVLLVMFNKAALSSYKFPCANVITLLQMVCSTCLLYVLRRLKIISFTNSDPSVPSDSLFFVPFRLLLRTTPLSLAYLLYMLASMESVRGVNVPMYTTLRRTTVVFTMTMEYFLAKQKHTPPIIGSICCWSSRLVI

SEQ ID NO: 181669 - protein, 202 aa, Zea Mays
MAKGGGERGTLLPVSADDGKGNDGGGGGDDAVLFKGSAMTRRGGAAALSYMACSVLLVMFNKAALSSYKFPCANVITLLQMVCSTCLLYVLRRLKIISFTNSDPSVPSDSLFFVPFRLLLRTTPLSLAYLLYMLASMESVRGVNVPMYTTLRRTTVVFTMTMEYFLAKQKHTPPIIGSVALIVFGAFVAGARDLSFDARGKI

SEQ ID NO: 181670 - protein, 343 aa, Zea Mays
MASANNWLGFSLSGQDNPQPNQDSSPAAGIDISGASDFYGLPTQQGSDGHLGVPGLRDDHASYGIMEAYNRVPQETQDWNMRGLDYNGGGSELSMLVGSSGGGGGNGKRAVEDSEPKLEDFLGGNSFVSDQDQSGGYLFSGVPIASSANSNSGSNTMELSMIKTWLRNNQVAQPQPPAPHQPQPEEMSTDASGSSFGCSDSMGRNSMVAAGGSSQSLALSMSTGSHLPMVVPSGAASGAASESTSSENKRASGAMDSPGSAVEAVPRKSIDTFGQRTSIYRGVTRHRWTGRYEAHLWDNSCRREGQSRKGRQVLCLLVPLHTPWLQTLPTGMTPTICSLPWWL

SEQ ID NO: 181671 - protein, 240 aa, Zea Mays
MVPCHGAATANPQQFGVIAANRYGSPVKPSLCPSVAFLRLQGSAFLLGNKSLALRAGVDSHRYATSSAFAKYNPVKNIKPLLSSPKLKPRTKVGCQASLSSFSYPELSFKPKWWWRTLACVPYLLPLHNMWGHADAIYQLHPYLQRFSLPYAFIDTMALLPGWLFLAIFMTIYFFVVRRKWSPHFLRFHIILAILLDTGSQALATACNWNPSIAFQGKQMAHFWMAMAFIQIFTVAECVR

SEQ ID NO: 181672 - protein, 285 aa, Zea Mays
MLFRFSRPLPPPIVVLIPSGLSESGDLSTLVFSSSITAFRQVYHTMVPCHGAATANPQQFGVIAANRYGSPVKPSLCPSVAFLRLQGSAFLLGNKSLALRAGVDSHRYATSSAFAKYNPVKNIKPLLSSPKLKPRTKVGCQASLSSFSYPELSFKPKWWWRTLACVPYLLPLHNMWGHADAIYQLHPYLQRFSLPYAFIDTMALLPGWLFLAIFMTIYFFVVRRKWSPHFLRFHIILAILLDTGSQALATACNWNPSIAFQGKQMAHFWMAMAFIQIFTVAECVR

SEQ ID NO: 181673 - protein, 78 aa, Zea Mays
MDSDFQTSPRAPYSNLSLFFSFFLSLKRTTGSVFKMPPCKLFLALTRAFRCINTCRLLQASKGGFDGTACKAFHKAPY

SEQ ID NO: 181674 - protein, 112 aa, Zea Mays
MNAPDRYERFVVPEGTKKVSYERDTKIVNAASFTVEREDHTVGNILRMQLHRDPNVLFAGYKLPHPLQYKIIVRIHTTSQSSPTQAYTQAINDLDKELEYLKQAFEVAWHFF

SEQ ID NO: 181675 - protein, 65 aa, Zea Mays
MQLHRDPNVLFAGYKLPHPLQYKIIVRIHTTSQSSPTQAYTQAINDLDKELEYLKQAFETPTDHH

SEQ ID NO: 181676 - protein, 71 aa, Zea Mays
MIVFHCCCLLLPNMFEEFSYHVPRLPDLVFQLVIINCSVGDLNFHTYHVQPVIMCFSCQSSVTCLNSLIAE

SEQ ID NO: 181677 - protein, 51 aa, Zea Mays
MDSTQDFQPRTFSIKLWPPSESTRLMLVERMTKTMSTESIFLSQIWFFGQA

SEQ ID NO: 181678 - protein, 427 aa, Zea Mays
MLKYIARNKDLRHIPIIMMSNRDEVSVVVKCLRLGAAEYLVKPLRTNELLNLWTHVWRRRRMLGLPEKNFFNDNFELVLSEPSDANTNSATLLSDETDDRPKENTNQETGTSNQLEYESNPSVAERDQRDKIGAPGSALDASQSSTPGRMFSRPIKTNLKVAESSAFLAYVKSSTPATSSFDSGLQRGDSRLDSLDNHGNCSSATDRSDTGADVNIRNKEAFEMPVQYPMVCFSSSSMHMERSNEGHNDTSGTPPAYHFPFYYPGMVEHNMALSSVQNFQANINSAQAHTPPAMLHQYNVFSQCHSLPMISPFQFNTSGMSMHSSHLPTQNVWSSASSTPTPDETCNRSERRAAALAKFRQKRKERCFDKKVRYVNRKKLAETRLRVRGQFVRHASNMDIISTGDDISEDEDDDPTSREVDMISSPE

SEQ ID NO: 181679 - protein, 60 aa, Zea Mays
MATSTMRLVKDEKGEHLSLVTDIFLFHRLFFFFHQSSVASDPLHPLYFFSEAENMHICDA

SEQ ID NO: 181680 - protein, 312 aa, Zea Mays
MLGQILITKQTGPEGKIVSKVYLCEKLSLTNEMYFAITLDRKTAGPLIIACSKGGTSIEDLAEKYPDMIIKVPIDVFKGITDEDAAKVVDGLALKAADRQSSIEQIKKLYELFCKCDCTLLEINPLAETADNKLVAADAKLNFDDNAAFRQKEIFALRDTTQEDPREVAAAKADLNYIGLDGEIGCMVNGAGLAMATMDIIKLHGGTPANFLDVGGSASEGQVVEAFKILTSDDRVKAILVNIFGGIMKCDVIASGIVNAAKQVDLKVPVVVRLEGTNVDQGKRILKESGMTLITAEDLDDAAEKAVKASVK

SEQ ID NO: 181681 - protein, 270 aa, Zea Mays
MVFSTEQSRRDDLESLGYVLMYFLRGSLPWQGLKAGTKKQKYDKISEKKMLTSIEALCKSYPSEFVTYFHYCRSLQFEDKPDYSYLKKNFRDLFIREGCQPDYVFDWTVSRQAADNNRLRLSGKTGGLVGPSVDRAERAAAKQDVPHRFTGPADALAKRTGSGSGHYGEHTKHRTLLDSLMASNMRNGSTSRKALLSSNRGSGDPSEPNRSSHLVPTTTSSSRPSTNQRLHHSTGLEGRTPSFPKPGRIGYDDPTMRSFERLTISAERRK

SEQ ID NO: 181682 - protein, 250 aa, Zea Mays
MYFLRGSLPWQGLKAGTKKQKYDKISEKKMLTSIEALCKSYPSEFVTYFHYCRSLQFEDKPDYSYLKKNFRDLFIREGCQPDYVFDWTVSRQAADNNRLRLSGKTGGLVGPSVDRAERAAAKQDVPHRFTGPADALAKRTGSGSGHYGEHTKHRTLLDSLMASNMRNGSTSRKALLSSNRGSGDPSEPNRSSHLVPTTTSSSRPSTNQRLHHSTGLEGRTPSFPKPGRIGYDDPTMRSFERLTISAERRK

SEQ ID NO: 181683 - protein, 113 aa, Zea Mays
MNEQWQLAAPTAKTAPPPRPPSHAMAPEPDHSASGGYYGLSFAPQQEVAHELFHSITAAARSPSTTTTASREPAGEESPAVSAGLAASTTWPALVETPVLLKEYNYYDMGFDR

SEQ ID NO: 181684 - protein, 151 aa, Zea Mays
MDTPMGVPWKLPPWSALPRDTSMSGLSLTELISRSMDLVAKRITSICGPSHCGEVRSAYLSCFGFISGSSSPSFLASFMYELPSRTCSMIAAASICPGWCFSLCVRWSVNSGLPVMTSQNTAEMTSAMTARTLASKSTVEARPEPTAVPEL

SEQ ID NO: 181685 - protein, 396 aa, Zea Mays
MEHILEGSSYMKLAKKLGELDPLMKPKQDRYALRTSPQWLGPQIEVIRAATKSIEREINSVNDNPLIDVARSKALHGGNFQGTPIGVSMDNTRLAIAAIGKLMFAQFSELVNDYYNNGLPSNLSGGRNPSLDYGFKGAEIAMASYCSELQFLGNPVTNHVQSAEQHNQDVNSLGLISSRKTAEAIEILKLMSSTFLIALCQAVDLRHIEENVKSAVKSCVMTVAKKTLSTNSTGGLHVARFCEKDLLQEIEREAVFAYADDPCSANYPLMKKLRNVLVERALANGAAEFNAETSVFAKVAQFEEDLRAALPKAVEAARAAVENGTAGIPNRIAECRSYPLYRFVREELGAVYLTGEKTRSPGEELNKVLVAINQGKHIDPLLECLKEWNGEPLPIC

SEQ ID NO: 181686 - protein, 590 aa, Zea Mays
MGTSKCFLFMRILILTTMAISAAMNATIIGTLVTKRDYKFAELMRLPDTFLMLFVLLCFDFSIYLSFKILWSARTSVDQKICSQVLLESGHGYKVGNKRNPLTDHLLGELEDTTKTTGIGRDPVMDSECETTLQKQVMVFDQQDETFDIGETPLSKTSKDHLGQTVGKETPVSEALHVDTTDSLSFHDSLFLSKHGCIARNPILPYRQVSTPKFHSVKNMLDMIDYLAVEGFANGEVVRDDVSAALSQQVAELISIRCNEINNTVRFCNEYASSMKSKVQVVFPSHHQFADILDDFWGNLFDLHGNLTEKGNAIRLDLLIGLDVEEIKSCPCYFDVLPGGLCDPLKLNLGNMGLPPLFRIINNMCPEHGNCTLPAVVAFRRRIMDTFLTEDPSLLKDEKVSYFPMDNEVQYEVPIYKNLDMVAQSIGMGSPLEELNKMEVLVQKCPSQQVAHQASKTNVYFSYNELKGLLLNSFRVCILNISEIEKADWLFQNRGGYDEKLVGLAAEMVIFGDIHPSGVFCPNAVVGPDGKIFNLCTSTLGCGDGCMWLPTLLISFGVWCISRMLEVLPSAKKPLLFGKYSRVLNRLQHS

SEQ ID NO: 181687 - protein, 317 aa, Zea Mays
MRRRTQFSRRTVRNLIVLSVLAEVLAVVYAIMMTRNEDLTWQMRAIRVLPMFVLPVVSSVIYSTVVNFTRMLERKDQKTLEKLRAERKAKIDELKERTNYYLTQQLIQKYDLDPAAKAAAASVLASKLGEDTGLKVHVGEEPKLDAAVARSNDVEIVPSDGLRNRKQPNARGSRTGSPTADTPARGTESSLTAGADLETAPAPLVVEHHQGLGASDGGGWIAKIAALLVAEDPSQSYALICGNCHMHNGLARKEDYPHVTYYCPHCHALNTSKQSMWQYSGSNSGRSSPVVLDDGLSTSSSVQETELSNLTHTAGAT

SEQ ID NO: 181688 - protein, 368 aa, Zea Mays
MAASPAEAGAQALPEATEAKEKGKRGGVLRRVWRALFGGREDFEKRLQYLSKEEAAVHARMRRRTQFSRRTVRNLIVLSVLAEVLAVVYAIMMTRNEDLTWQMRAIRVLPMFVLPVVSSVIYSTVVNFTRMLERKDQKTLEKLRAERKAKIDELKERTNYYLTQQLIQAAAASVLASKLGEDTGLKVHVGEEPKLDAAVARSNDVEIVPSDGLRNRKQPNARGSRTGSPTADTPARGTESSLTAGADLETAPAPLVVEHHQGLGASDGGGWIAKIAALLVAEDPSQSYALICGNCHMHNGLARKEDYPHVTYYCPHCHALNTSKQSMWQYSGSNSGRSSPVVLDDGLSTSSSVQETELSNLTHTAGAT

SEQ ID NO: 181689 - protein, 219 aa, Zea Mays
MCLQHSRARLPPDKQLAAEKSFALYCKPVELYNIIQRRAIKNPPFVQRSLLYKIQARRKKRLQPRLLKLLRSNAFKAKPALITLIGACAAMGANAEVTASITCLRDAIASDDWAARKAAAEALAALALEHTDLLTTYKSSCVTFFEARRFDKVKVVQESMNQMIEAGKEIPGAEEDECSSLCHQRPSHNEDLLLQVRGIPFVVLTVLGYFLLLPHVQIC

SEQ ID NO: 181690 - protein, 102 aa, Zea Mays
MMMIICIFMVTPLLFEHVVVYCVVAKEYVNYQSVEIERDSPARSSSGLGSGSSSSSDSDSDVTVYFFSNQRMTSLLQELVLSYKISLTFFTEYTNVRFSCLG

SEQ ID NO: 181691 - protein, 510 aa, Zea Mays
MAALATLLRHSRRSHAHVLPISRALSTTTPTTGGTDPVAITLSDAKRQLLRERDPDRVVSILDAIDTASISAASTRHALSLAARRLSRSRRFADAEALLSSHLTASTTEAHLAAVLCSYASANLPEKAIDAFRSAAPSLPTPNSPLPFNALLSTFIRCRRYRRVPVLFAELSKEFSITPNATSYGILVKAYCMARDDAKAKQALDLMREQGISPTNRIYTTLIDSMYKRKMTNEAESLWKEMVESECEPDVATYNVKAMYYALHGKPEEVMEVMTEMEAAGVKPDTTTYNFLMTSYCKSGKLEDAKVLYHSLAEKGCSADAATYKHMLAELCAYGDFDAGLGIFKDSLKRRKVPDFRTMKGLVEGLAKGGRVADAKEVVAEVKKMFPENLLSGWKKVEKELGLDSDSGETPLLEVTSGETVAEVRPDAAEVEALELEGSAAEEVTVSEESSDDEAYVPEASSSEEVPQGILLRSLVIFGEHAGLTISLAAAVSLPAYTMNTDCWYNSSKS

SEQ ID NO: 181692 - protein, 278 aa, Zea Mays
MASPPLPRASSSVRGGGGGGSNLDGRPLSPAVARPTGMESSRALPAGKQNLQPSALPVLLLGVSPAPRPAASQRPCSKAPSSSPWPPCSLIHGAQKIPAGSPFFFLQPAARPPLSPMAFPPASSAFSVVFNLRSLPSPCSTLSIFFHPADSLYCPRRGRYFPMAEQPLAASFSFSPALHSSSTVKRRCSCSPNTSPCFLAASAARVPRARQTVQVGCCAANSTSGCSSGVCCFCAVNSTPSTLIECLLFFLRSPNIIVVHPGETATLLVRFRINIIFL

SEQ ID NO: 181693 - protein, 220 aa, Zea Mays
MAFPPASSAFSVVFNLRSLPSPCSTLSIFFHPADSLYCPRRGRYFPMAEQPLAASFSFSPALHSSSTVKRRCSCSPNTSPCFLAASAARVPRARQTVQVGCCAANSTSGCSSGVCCFCAVNSTPSTLIECLLFFLRSPNIIVVHPGPRDGDRARDMVPTTGCRWWTTQGRMDVTSGCSPSEYLPSKHCLSVKLKASPGFMHNRYICYFTALNVCRLVLCT

SEQ ID NO: 181694 - protein, 82 aa, Zea Mays
MHLASHLGPRDGDRARDMVPTTGCRWWTTQGRMDVTSGCSPSEYLPSKHCLSVKLKASPGFMHNRYICYFTALNVCRLVLCT

SEQ ID NO: 181695 - protein, 142 aa, Zea Mays
MQASRARLFKEYKEVQREKSADPDIQLICDDSNIFKWTALIKGPSETPYEGGVFQLAFAIPEQYPLLPPQTGEICLDILKNAWSPAWTFQSVCRAIIALMAHPEPDSPLNCDSGNLLRSGDIRGYQSMARMYTRLAAMPKKG

SEQ ID NO: 181696 - protein, 444 aa, Zea Mays
MRAALYGLSKKRRIYAAQVRAKPLLLPRRRSPSPPPHFLSVRTVLPSCSGVPTSVARFSSLPPAAALVYATVEWLSSSTSSKSYYRLGENADEKDAEEIIDLASKASIADQQKQVQDNVHYELTHMCQAMDSILCPDTINDPSKGPSEAHNHSQRSGLSFAVGGAASANKQSAIIPATRPLTRAELSKKFRDHFGYTLDIGPSGIPHKDAGQGLFLSGQANAGAVLAIYPGVIYSPAYYRYIPGYPRIDVCNNYLITRYDGTIIDAKPWCFGGETRALWDGSDLVDYNAMAPKGSENNSDRVWRMLSKPLEKGVRENFGEVLERRNPLAFGHFANHPPKGSSPNVMICPYDFPLTEKDMRVYIPNITFGGQETIRMKRFGSFYFKSGGSDNQAGDSLVLKTLVLVSTRSICDEELFLNYRYSNSKRRPEWYSPVDEEEDKRRWS

SEQ ID NO: 181697 - protein, 434 aa, Zea Mays
MAPACSLLALALSVCSVVAVAAAQQVDAVAAAQQEADRVAGLPGQPPVGFAQYAGYVTVNETHGRALFYWFFEATASPDKKPLVLWLNGGPGCSSIGYGEAEELGPFLVQKGKPELRWNNYSWNTEANLMFLESPVGVGFSYTNTSSDLLQLGDKITADDAYKFLLNWFKRFPQYKSHDFYIAGESYAGHYVPQLSEKIFDGNRAGHKESHVNLKGLMVGNALMDDETDQTGMIDYAWDHAVISDRVYGDVKARCDFGMANVTDACDAALQEYFAVYRLIDMYSLYTPVCTDPASSSAPYARKVAVHGAAPGIFSRYRGWIMKPAGYDPCTAEYSEVYFNRPDVQAALHANVTKIGYNWTRCSDAIYTWNDAAFSTLPVIRKLVAGGLRLWVFSGDTDGRIPVTSTRLTLHKLGLKTVQEWTPWLVDGRSCTRA

SEQ ID NO: 181698 - protein, 316 aa, Zea Mays
MNSKRRRSHSPVEYKEGRDKDYGTSGKKDKSRDLDDTCDARRGHETDRHSDKHSFGTSRESKKHDDYRRYHDKYGDDYGRSHPRASRSDRESRADTYYDRSKHDNTSGRSRGDQRDVGSRYGEKSVNRDQRSINEGKQESPRGYQKNDGGEYNKHMDARKQEYKGYGDDRDHYRVVRKNKETIKEEEDSKRRNGKEIEKEALVETRDKKRSLFSSTGPNVDNPGDVKLSSATNEALDNAAETVDGVNAAKVAAMKAAELVNRNIAAFGAGTGRLSTDQKKKLLWGNKTSNPSEETSKRWDLFSDRERQEKFNKLMF

SEQ ID NO: 181699 - protein, 225 aa, Zea Mays
MNSKRRRSHSPVEYKEGRDKDYGTSGKKDKSRDLDDTCDARRGHETDRHSDKHSFGTSRESKKHDDYRRYHDKYGDDYGRSHPRASRSDRESRADTYYDRSKHDNTSGRSRGDQRDVGSRYGEKSVNRDQRSINEGKQESPRGYQKNDGGEYNKHMDARKQEYKGYGDDRDHYRVVRKNKETIKEEEDSKRRNGKEIEKEALVETRDKKRSLFSSTGPNVDNPGG

SEQ ID NO: 181700 - protein, 214 aa, Zea Mays
MDARKQEYKGYGDDRDHYRVVRKNKETIKEEEDSKRRNGKEIEKEALVETRDKKRSLFSSTGPNVDNPGDVKLSSATNEALDNAAETVDGVNAAKVAAMKAAELVNRNIAAFGAGTGRLSTDQKKKLLWGNKTSNPSEETSKRWDLFSDRERQEKFNKLMGVKSSAPVQENTVENKVGSSAEEAKKLEELDTNLEKHYIAGLRRRDGRTVGLGL

SEQ ID NO: 181701 - protein, 58 aa, Zea Mays
MAGQSALACRNSACSCRCCGIEKCRELALYNLQCLVYSCTYKISCTAYVDCFRVILKL

SEQ ID NO: 181702 - protein, 378 aa, Zea Mays
MNSKRRRSHSPVEYKEGRDKDYGTSGKKDKSRDLDDTCDARRGHETDRHSDKHSFGTSRESKKHDDYRRYHDKYGDDYGRSHPRASRSDRESRADTYYDRSKHDNTSGRSRGDQRDVGSRYGEKSVNRDQRSINEGKQESPRGYQKNDGGEYNKHMDARKQEYKGYGDDRDHYRVVRKNKETIKEEEDSKRRNGKEIEKEALVETRDKKRSLFSSTGPNVDNPGGSVNLWNSTDVKLSSATNEALDNAAETVDGVNAAKVAAMKAAELVNRNIAAFGAGTGRLSTDQKKKLLWGNKTSNPSEETSKRWDLFSDRERQEKFNKLMGVKSSAPVQENTVENKVGSSAEEAKKLEELDTNLEKHYIAGLRRRDGRTVGLGL

SEQ ID NO: 181703 - protein, 563 aa, Zea Mays
MSVEEEVERGEEDLFYESLDRILSSSGSSTSASDDDGADRPRHRRSCDAPAAAALDLWTSQPAPVHERRRRLLHLMGLTGDPSLAGFEIARSASGEAAGPPPASPVSWSRSGGAALGSAGKPPLGGGRLRFSLSDGSDAADEDPRCLIRNLDDGREYVVREEFALREVGTGRHLTVEELARSPIVQELMRRQAFSTPNSNCTSNSQSGTSTPIERSSSGSSNGGGRAKRRSSWLRSIRCVAGSFASHSRDRRSSDEKDASPEKGGHHSSSTTDDSQDSVPRHGPARVKVRQYGKSYKELSGLFMTQEIQAHSGSIWSIKFSPDGRYLATAGEDCVIHVWEVLEFERARKENEVCNPLVAMVCNESSETTVGSAAPSESHWEKKLRSKVLHGGGSVSSDRLMVPEYVFALSEKPVITFAGHSEDVLDLSWSKSQYLLSSSMDKTVRLWHMSSTYCLKTFSHTDYVTCIQFNPVDDRYFISGSLDEKVRIWSIPKREIVDWVDLHEMVTAACYTPDGKGALVGSHKGSCHLYDTSGTSACILMTCFATKHRSTYKTREGNLARRK

SEQ ID NO: 181704 - protein, 572 aa, Zea Mays
MSVEEEVERGEEDLFYESLDRILSSSGSSTSASDDDGADRPRHRRSCDAPAAAALDLWTSQPAPVHERRRRLLHLMGLTGDPSLAGFEIARSASGEAAGPPPASPVSWSRSGGAALGSAGKPPLGGGRLRFSLSDGSDAADEDPRCLIRNLDDGREYVVREEFALREVGTGRHLTVEELARSPIVQELMRRQAFSTPNSNCTSNSQSGTSTPIERSSSGSSNGGGRAKRRSSWLRSIRCVAGSFASHSRDRRSSDEKDASPEKGGHHSSSTTDDSQDSVPRHGPARVKVRQYGKSYKELSGLFMTQEIQAHSGSIWSIKFSPDGRYLATAGEDCVIHVWEVLEFERARKENEVCNPLVAMVCNESSETTVGSAAPSESHWEKKLRSKVLHGGGSVSSDRLMVPEYVFALSEKPVITFAGHSEDVLDLSWSKSQYLLSSSMDKTVRLWHMSSTYCLKTFSHTDYVTCIQFNPVDDRYFISGSLDEKVRIWSIPKREIVDWVDLHEMVTAACYTPDGKGALVGSHKGSCHLYDTSDDMLCYKTQIDLQNKRRKSSQKKITGFQIHGSEFLMVLS

SEQ ID NO: 181705 - protein, 557 aa, Zea Mays
MRRINYESMWFLHLLHIMLHRQRDFDEGLLPRISNVHYEDEVNDISSAPDVGNYLITEDENVALVNGNRDSLPFDGMSDAEIERRMKEANAQAFHQTATNFVMPVAPAQNFVSSSVAPLAPPLSMMPPPFSQPVVQPGFSDPLQGSPAREEGEVPESELDPDTRRRLLILQHGQDTRDPTPPHPAIPPVQVPVPPVQPHGNWFPTEDGINPSNLSRGSAGFTVESDSMPYEKKQPPHPSFFHGGDSPMSSDRFGYQNQRFPSQLPHTEDHHMLQNHAPPKYRSFSGEELATRHVPSSQRNHIESGRHFSQYAGTSAGVLEGIAVKCGSKVEYRSTLCDTAELQFSIEVWIVGEKFGEGIGRTRREAQRQAAEMSLRNLANKYLSSDPNKLTDMKQDAFGSNRNIFGYSGNTRDDMLPLSSTSEESRFMKMEENNSRKTGDSVTALKELCTVEGYNLVFQACPSPADGLVGKESYAQVQIGRQILGKGVGLTWEEAKLQAADEALGTLRSMLGQLGHRRSGSPRSLAPNFNKRFKPDFPRTVQRVPYGTYSRIEGHAP

SEQ ID NO: 181706 - protein, 529 aa, Zea Mays
MRRINYESMWFLHLLHIMLHRQRDFDEGLLPRISNVHYEDEVNDISSAPDVGNYLITEDENVALVNGNRDSLPFDGMSDAEIERRMKEANAQAFHQTATNFVMPVAPAQNFVSSSVAPLAPPLSMMPPPFSQPVVQPGFSDPLQGSPAREEGEVPESELDPDTRRRLLILQHGQDTRDPTPPHPAIPPVQVPVPPVQPHGNWFPTEDGINPSNLSRGSAGFTVESDSMPYEKKQPPHPSFFHGGDSPMSSDRFGYQNQRFPSQLPHTEDHHMLQNHAPPKYRSFSGEELATRHVPSSQRNHIESGRHFSQYAGTSAGVLEGIAVKCGSKVEYRSTLCDTAELQFSIEVWIVGEKFGEGIGRTRREAQRQAAEMSLRNLANKYLSSDPNKLTDMKQDAFGSNRNIFGYSGNTRDDMLPLSSTSEESRFMKMEENNSRKTGDSVTALKELVQIGRQILGKGVGLTWEEAKLQAADEALGTLRSMLGQLGHRRSGSPRSLAPNFNKRFKPDFPRTVQRVPYGTYSRIEGHAP

SEQ ID NO: 181707 - protein, 934 aa, Zea Mays
MFKSMVYFVNISIGEVEVWPKGQASAGLAVAAWARDIRVDRLSPPSERCPPLAVMHTVAVAARCLVMESRPPVAADVASLPLVDMHAACLRDNKTAVVALGDEELHLVAMTSRRNLTNHACFWGYKLPFGLYNSCLTMLNLRCLGIVFDLDETLVVANTSRSFEDRIDALQRKLSNETDPQRRNGMLSEIKRYQDDKSILKQYIEGDQVYDDGKVYKAQPEIVPPLSDNQQTMTRPVIRLQEKDIILTRINPLIRDTSVLVRLRPAWEDLRSYLIARGRKRFEVYVCTMAERDYALEMWRLLDPDSRLINSVRLHDRMVCVKSGLKKSLLNVFHDGSCHPGMALVIDDRLKVWDEKDQLRVHVVPAFTPYYAPQAEANCSIPVLCVARNVACNVRGGFFKDFDEGLLPRISNVHYEDEVNDISSAPDVGNYLITEDENVALVNGNRDSLPFDGMSDAEIERRMKEANAQAFHQTATNFVMPVAPAQNFVSSSVAPLAPPLSMMPPPFSQPVVQPGFSDPLQGSPAREEGEVPESELDPDTRRRLLILQHGQDTRDPTPPHPAIPPVQVPVPPVQPHGNWFPTEDGINPSNLSRGSAGFTVESDSMPYEKKQPPHPSFFHGGDSPMSSDRFGYQNQRFPSQLPHTEDHHMLQNHAPPKYRSFSGEELATRHVPSSQRNHIESGRHFSQYAGTSAGVLEGIAVKCGSKVEYRSTLCDTAELQFSIEVWIVGEKFGEGIGRTRREAQRQAAEMSLRNLANKYLSSDPNKLTDMKQDAFGSNRNIFGYSGNTRDDMLPLSSTSEESRFMKMEENNSRKTGDSVTALKELCTVEGYNLVFQACPSPADGLVGKESYAQVQIGRQILGKGVGLTWEEAKLQAADEALGTLRSMLGQLGHRRSGSPRSLAPNFNKRFKPDFPRTVQRVPYGTYSRIEGHAP

SEQ ID NO: 181708 - protein, 74 aa, Zea Mays
MAKKKLQSKQWTPVKSKEKKVCPHSNLLQKGSRKEAYISKAMMTMCRRNKHRCLERQIFLLLTHVFYKLWCNPI

SEQ ID NO: 181709 - protein, 90 aa, Zea Mays
MFRLAKRVRKLSSSSLALSSSLEVSYLVEDFDFTFFLLPSFAMRHLWPTLGKRRPLVMAMFVASSSEEESVELSSESYSRQTWASPPFFL

SEQ ID NO: 181710 - protein, 126 aa, Zea Mays
MGCKACDKPKPNYRKGLWSPEEDQKLRDYILLHGHGCWSALPAKAGGPGSHGTCLAGPTTRSRTTGTRTSRRGSRARTRGPARPRRRRPIRTTTRTASSSAGTTTARRTPARRSRASRRRPTTRAA

SEQ ID NO: 181711 - protein, 105 aa, Zea Mays
MFADWLDMDYVGGALPATAPAAPGLLGAAGVATASTGDRDQHQVMSMSQGSVQVDGPSGADVSLHGFDDSGAGCWEFQEHFDAIDHMQAAGFCDLLSMSDYFGLD

SEQ ID NO: 181712 - protein, 312 aa, Zea Mays
MDPRARYPSGMGNGRGGNLNYYGRGPPPQQPHQHHNHQQTSGAHHHQQTSGAHHHQQYAQRQHQHQHHGHNRHQQQQQHHIYQQQQQQWLRRSQIARETSGAAVTSEPKSLAPSTAADGVDSSSQDWKAQLKLPPPDTRYRTEDVTATKGNEFEDYFLKRELLMGIYEKGFERPSPIQEESIPIALTGSDILARAKNGTGKTAAFCIPALEKIDQEKNAIQVVILVPTRELALQTSQVCKELGKHLKIQVMVTTGGTSLKDDIVRLYQPVHLLVGTPGRILDLTKKGVCILNDCSMLIMDETSFSLLSFNLP

SEQ ID NO: 181713 - protein, 127 aa, Zea Mays
MDPRARYPSGMGNGRGGNLNYYGRGPPPQQPHQHHNHQQTSGAHHHQQTSGAHHHQQYAQRQHQHQHHGHNRHQQQQQHHIYQQQQQQWLRRSQIARETSGAAVTSEPKSLAPSTAADGVDSSYTGT

SEQ ID NO: 181714 - protein, 58 aa, Zea Mays
MGRAPCCDRTKGLKKGPWTPEEDKLLVDYIQTNGHGSWRLLPKLAAASLPASTIRIRL

SEQ ID NO: 181715 - protein, 300 aa, Zea Mays
MAAGACSPSSQFCSCLPAGLNHTDTAVMLLARIAGTRAVSSNPHSRRICRAKPVRQELPTAVDELPPAGHQARALHIRGAEVHRPAPRHRRQQVVHDRGAAPWPDGQRDQELLEHAPQEAAASDGPRRAPARPGRRLPLRAPHGAVGNGQARGGGAPLPPRHRRLLLLLRRHRGHLRLILLLHRGLEDRMRQARGHLPAPVELGHRGLLPPQDGRGARGQEEGRGDQAGVAGAAAGSRGRLLGRVQRDGGGGGAGGVPDVPRLRRRRAGAVSRPARRLLAVPAARRARRGVPGHGVQVKT

SEQ ID NO: 181716 - protein, 54 aa, Zea Mays
MIFTSSKRMKQGKCEQVPSGLRGYNADFLSSKIPSLILTKSITATSFAVIGLSA

SEQ ID NO: 181717 - protein, 213 aa, Zea Mays
MHARAGRRALQQPVQDGDGALWPLRQPTLRQPPRPPAPARRAGAAQPSQLRSLLAVTHIPAWPLGRVGSPAGAELPDGAGECQPEQHHDGPQQQQQLRQQPAAAGADACSSACAAGSRTAQDRPVGKQASGEAAESPVGIQPVHQGRDPAHQGRQPGHHPPGGVQRSRKELGPFPTHPLRPHAGPGPQEDLQDSSGIRADTETLITRCIFCMP

SEQ ID NO: 181718 - protein, 204 aa, Zea Mays
MSTESGELLGIDPVDLRFPFELNKQISCTLQLTNKTDKQVAFKVKTTSPKKYCVRPNNGMVAPRSKADVVVTMQAQRDAPPDMHCKDKFLVQSAIVAKETMPKEVTGDMFTKDSGNIVDEVKLKVVYTAPSSSQSEGFEDGNLGSLSYQEETKEPKESEKIISEPFALISKLMEEKNSAVELNNKLRQELVSASLDFFAYYANS

SEQ ID NO: 181719 - protein, 153 aa, Zea Mays
MTPASTSPLAAAVLPTNLSSFSRCPPRRLPRISCLAAPERGGNNASNASPAPQQPRWGAAVSAALAAAVVAASMPAYADLNKFEAEQRGEFGIGSAAQFGSADLKKAVHVNENFRRANFTSADMRESDFSGSTFNGAYLEKAVAYKANFTGSE

SEQ ID NO: 181720 - protein, 145 aa, Zea Mays
MRESDFSGSTFNGAYLEKAVAYKANFTGADLSDTLMDRMVLNEANLTNAVLVRSVLTRSDLGGAIIEGADFSDAVIDLSQKQALCKYASGTNPMTGVSTRKSLGCGNSRRNAYGSPSSPLLSAPPQKILDRDGFCDPATGMCDAS

SEQ ID NO: 181721 - protein, 126 aa, Zea Mays
MTPASTSPLAAAVLPTNLSSFSRCPPRRLPRISCLAAPERGGNNASNASPAPQQPRWGAAVSAALAAAVVAASMPAYADLNKFEAEQRGEFGIGSAAQFGSADLKYASTSASSSLLHDHFVVTLPR

SEQ ID NO: 181722 - protein, 126 aa, Zea Mays
MTPASTSPLAAAVLPTNLSSFSRCPPRRLPRISCLAAPERGGNNASNASPAPQQPRWGAAVSAALAAAVVAASMPAYADLNKFEAEQRGEFGIGSAAQFGSADLKKAVHVNENFRFQWFHIQWCLS

SEQ ID NO: 181723 - protein, 69 aa, Zea Mays
MCHDTHCMIHICTLINQVWEAYFIYMNCIGLPMDSCTLCSSYFHMLASPSPEADVEAKSSASSGCLFSD

SEQ ID NO: 181724 - protein, 540 aa, Zea Mays
MGTSSGANFHQQPPPTQGMLPPRHGPRPSGLQTSLSLASSEQVGSPDMQEPGSNSEPGHDSATESASSKDTWPAEPNQSNGGVAASDVVSKAAEKEVANGVSKPQVIHGPSSRMSGMLLREVARERVDLVAEKMKMMSDEHLEEVKNELRSILEGTGGSHHIEEFLYLQKLVQDRHDLTPSMLSVAHHVQLEILVAIKTGIQAFLHPSVTIPHNRLVEVFLYKRCRNIACQSALPAEECRCNVCASRNGFCNLCMCVICNKFDFEVNTCRWIGCDFCSHWTHTDCAIHNGQIGMGQSVKSSIGHAEMLFRCRACQRTSELLGWVKDVFQQCAPGWDRDALLRELEFVCKIFRLSEDAKGRVLFRKCLDLIERLRNTPADSINPRMILQALQELEMDSPKISENEDVGHLITPQEACNRIAEVVQEAVRKMELVAEEKMRLYKKANEARQEAERLQSIALTKSKTAEQDYASMYLKRRLEEAEAEKQFLFEKIKLQENQRPTVGVGSSSGAGGDSTPTMMLSKIQDLLKNVRSMPAKSEGH

SEQ ID NO: 181725 - protein, 256 aa, Zea Mays
MISRALTRKGTALVKLAKTSKDFDIAIETYQKALTEHRNPDTLKKLNEAERAKKELEQQEYYDPKLADEEREKGNEFFKEQKYPEAIKHYTEALKRNPKDPRVYSNRAACYTKLGAMPEGLKDAEKCLELDPTFTKGYTRKGAIQFFMKEYDKAMETYQAGLKHDPKNQELLDGVRRCIEQINKANRGEISQDELQERQNKAMQDPEIQNILTDPIMRQVLNDFQENPRAAQEHLKNPGVMQKIQKLVSAGIVQMR

SEQ ID NO: 181726 - protein, 140 aa, Zea Mays
MPEGLKDAEKCLELDPTFTKGYTRKGAIQFFMKEYDKAMETYQAGLKHDPKNQELLDGVRRCIEQINKANRGEISQDELQERQNKAMQDPEIQNILTDPIMRQVLNDFQENPRAAQEHLKNPGVMQKIQKLVSAGIVQMR

SEQ ID NO: 181727 - protein, 102 aa, Zea Mays
MQNLHLHRGHLFLPRGYYQESLIQIQDVEHHSNISIVNHFFTKEVNCVSTFEGSNFTAKSTSSWWCWYGIRSNGGTYKWKETLMEDMSFCQCPLEGVEHNNT

SEQ ID NO: 181728 - protein, 93 aa, Zea Mays
MFGVSICNMYLSEKGYSMRAKHIFRDLKEDPYVVELDTRVDGRDIQSVLLDLVGRRTVPQVFVNGQHIGGSDDTVNALSNGQLQKLLGKSQSQ

SEQ ID NO: 181729 - protein, 95 aa, Zea Mays
MALVRLAFPVFFFLAAAEFAAGTRSPSAFVQNAIYSNRITIFSKTYCPYSMRAKHIFRDLKEDPYVVELDTRVDGRDIQSVLLDLVGRRTVPQIQ

SEQ ID NO: 181730 - protein, 85 aa, Zea Mays
MRFQMDSSRNFSGRVSHNDGSLDKLALSRTREYMFGRGVLLCLGLNRIWCCDNHLYCWICDLLNCTHPCFTLFIMEIISIGSSMN

SEQ ID NO: 181731 - protein, 475 aa, Zea Mays
MASAAAETLASFPIASPSRSLLRPFPRRPAGARTGAPSIRISAVPPRGLGLALVHRRCPPAARANVERDGDGASGNGEPSSSSGDGDRDAAAESGGDSTSTSTTSTAATPPPPSSKRNENKWRRRLTKGGGVGRWLWEPIVQGREMGFLLLQLGFAIFALRMLRPEIALPGSEPRPQTTYVSVPYSDFLASINKDQVKKVEVDGVHIMFRLRPEVESQVRVEQTPTQRGADYVIDNAGVSRRIVFTTTRPVDIKTPYEKMVENMVEFGSPDKRSGGMLNSALVGLIYVVLIAVVLQRLPISFSQQSPGQLRNRKNSNSGGAKVSESSDIVTFADVAGVDEAKEELEEIVEFLRNPERYIPFISCSASEFVELYVGMGAARVRDLFAKAKKESPSIIFIDEIDAVAKSRDSRYRIVSNDEREQTLNQLLTGFEPHSTSLLRILLYHAIFVFEKGRKWYYYWFSCLDFGFSPGNGWL

SEQ ID NO: 181732 - protein, 373 aa, Zea Mays
MQYLFLRKGGNGIIIGLAALILGSPQEMDGFDTNSAVIVLGATNRADVLDPALRRPGRFDRVVMVEAPDRFGRESILKVHVKRRELPLSKDVDLANIAAMTTGFTGADLANLVNEAALLAGRLNKEIVEKVDFIRAVERSIAGIEKKHAKLKGNEKAVVARHEVGHALVGTAVANLLPGQPRVEKLSILPRSGGALGFTYTPPVTEDRYLLFVDELRGRLVTLLGGRAAEEVVLAGRVSTGALDDIRRATDMAYKAVAEYGLSQRIGPISLATLSNGGLDDSGGSPWGKDQGHLVDLVQREVKALLQSSLEVALSVIRANPAVLEGLGAYLEEKEKVEGEELQEWLKSVVASKELTSFIRGQQEQVLQLEAGS

SEQ ID NO: 181733 - protein, 776 aa, Zea Mays
MASAAAETLASFPIASPSRSLLRPFPRRPAGARTGAPSIRISAVPPRGLGLALVHRRCPPAARANVERDGDGASGNGEPSSSSGDGDRDAAAESGGDSTSTSTTSTAATPPPPSSKRNENKWRRRLTKGGGVGRWLWEPIVQGREMGFLLLQLGFAIFALRMLRPEIALPGSEPRPQTTYVSVPYSDFLASINKDQVKKVEVDGVHIMFRLRPEVESQVRVEQTPTQRGADYVIDNAGVSRRIVFTTTRPVDIKTPYEKMVENMVEFGSPDKRSGGMLNSALVGLIYVVLIAVVLQRLPISFSQQSPGQLRNRKNSNSGGAKVSESSDIVTFADVAGVDEAKEELEEIVEFLRNPERYIPFISCSASEFVELYVGMGAARVRDLFAKAKKESPSIIFIDEIDAVAKSRDSRYRIVSNDEREQTLNQLLTEMDGFDTNSAVIVLGATNRADVLDPALRRPGRFDRVVMVEAPDRFGRESILKVHVKRRELPLSKDVDLANIAAMTTGFTGADLANLVNEAALLAGRLNKEIVEKVDFIRAVERSIAGIEKKHAKLKGNEKAVVARHEVGHALVGTAVANLLPGQPRVEKLSILPRSGGALGFTYTPPVTEDRYLLFVDELRGRLVTLLGGRAAEEVVLAGRVSTGALDDIRRATDMAYKAVAEYGLSQRIGPISLATLSNGGLDDSGGSPWGKDQGHLVDLVQREVKALLQSSLEVALSVIRANPAVLEGLGAYLEEKEKVEGEELQEWLKSVVASKELTSFIRGQQEQVLQLEAGS

SEQ ID NO: 181734 - protein, 525 aa, Zea Mays
MASAAAETLASFPIASPSRSLLRPFPRRPAGARTGAPSIRISAVPPRGLGLALVHRRCPPAARANVERDGDGASGNGEPSSSSGDGDRDAAAESGGDSTSTSTTSTAATPPPPSSKRNENKWRRRLTKGGGVGRWLWEPIVQGREMGFLLLQLGFAIFALRMLRPEIALPGSEPRPQTTYVSVPYSDFLASINKDQVKKVEVDGVHIMFRLRPEVESQVRVEQTPTQRGADYVIDNAGVSRRIVFTTTRPVDIKTPYEKMVENMVEFGSPDKRSGGMLNSALVGLIYVVLIAVVLQRLPISFSQQSPGQLRNRKNSNSGGAKVSESSDIVTFADVAGVDEAKEELEEIVEFLRNPERYIPFISCSASEFVELYVGMGAARVRDLFAKAKKESPSIIFIDEIDAVAKSRDSRYRIVSNDEREQTLNQLLTEMDGFDTNSAVIVLGATNRADVLDPALRRPGRFDRVVMVEAPDRFGRESILKVHVKRRELPLSKDVDLANIAAMTTGFTGPCKLGKRSCSVGWAIK

SEQ ID NO: 181735 - protein, 401 aa, Zea Mays
MGAARVRDLFAKAKKESPSIIFIDEIDAVAKSRDSRYRIVSNDEREQTLNQLLTEMDGFDTNSAVIVLGATNRADVLDPALRRPGRFDRVVMVEAPDRFGRESILKVHVKRRELPLSKDVDLANIAAMTTGFTGADLANLVNEAALLAGRLNKEIVEKVDFIRAVERSIAGIEKKHAKLKGNEKAVVARHEVGHALVGTAVANLLPGQPRVEKLSILPRSGGALGFTYTPPVTEDRYLLFVDELRGRLVTLLGGRAAEEVVLAGRVSTGALDDIRRATDMAYKAVAEYGLSQRIGPISLATLSNGGLDDSGGSPWGKDQGHLVDLVQREVKALLQSSLEVALSVIRANPAVLEGLGAYLEEKEKVEGEELQEWLKSVVASKELTSFIRGQQEQVLQLEAGS

SEQ ID NO: 181736 - protein, 454 aa, Zea Mays
MRQKKSLKKLWRGVLLVGLPGTGKTLLAKAVAGEAEVPFISCSASEFVELYVGMGAARVRDLFAKAKKESPSIIFIDEIDAVAKSRDSRYRIVSNDEREQTLNQLLTEMDGFDTNSAVIVLGATNRADVLDPALRRPGRFDRVVMVEAPDRFGRESILKVHVKRRELPLSKDVDLANIAAMTTGFTGADLANLVNEAALLAGRLNKEIVEKVDFIRAVERSIAGIEKKHAKLKGNEKAVVARHEVGHALVGTAVANLLPGQPRVEKLSILPRSGGALGFTYTPPVTEDRYLLFVDELRGRLVTLLGGRAAEEVVLAGRVSTGALDDIRRATDMAYKAVAEYGLSQRIGPISLATLSNGGLDDSGGSPWGKDQGHLVDLVQREVKALLQSSLEVALSVIRANPAVLEGLGAYLEEKEKVEGEELQEWLKSVVASKELTSFIRGQQEQVLQLEAGS

SEQ ID NO: 181737 - protein, 607 aa, Zea Mays
MASAAAETLASFPIASPSRSLLRPFPRRPAGARTGAPSIRISAVPPRGLGLALVHRRCPPAARANVERDGDGASGNGEPSSSSGDGDRDAAAESGGDSTSTSTTSTAATPPPPSSKRNENKWRRRLTKGGGVGRWLWEPIVQGREMGFLLLQLGFAIFALRMLRPEIALPGSEPRPQTTYVSVPYSDFLASINKDQVKKVEVDGVHIMFRLRPEVESQVRVEQTPTQRGADYVIDNAGVSRRIVFTTTRPVDIKTPYEKMVENMVEFGSPDKRSGGMLNSALVGLIYVVLIAVVLQRLPISFSQQSPGQLRNRKNSNSGGAKVSESSDIVTFADVAGVDEAKEELEEIVEFLRNPERYIPFISCSASEFVELYVGMGAARVRDLFAKAKKESPSIIFIDEIDAVAKSRDSRYRIVSNDEREQTLNQLLTEMDGFDTNSAVIVLGATNRADVLDPALRRPGRFDRVVMVEAPDRFGRESILKVHVKRRELPLSKDVDLANIAAMTTGFTGADLANLVNEAALLAGRLNKEIVEKVDFIRAVERSIAGIEKKHAKLKGNEKAVVARHEVGHALVGTAVANLLPGQPQIEYIAKIWRCIRLHVHPSRHRG

SEQ ID NO: 181738 - protein, 147 aa, Zea Mays
MLMLPSVTMLVVLLRTDAVDAAGNTTAAIGKGFAIGSAALVSLALFGAFVSKAGVKVVDVLSPKVFIGLIVGAMLPYWFSAMTMKSVGSAALKMVEEVRRQFNTIPGLMEGTAKPDYATYWKISTDASIKEMIPPGALPAARGAWRM

SEQ ID NO: 181739 - protein, 309 aa, Zea Mays
MMKPPAPAVPSPEPPRLAGGGRGPRGLRSLPALSYNTHRALVLGLTFLAYALYHASRKPPSIVKRELARSWPPFADPALLGATDVAFLTSYSLGMFVAGHLGDCLDLRRFLAFGMVTSGAAVALFGAGYFLGQHSLAFYVVAQVIAGLLQSTGWPSVVAIVGNWFSGRRRGLIMGIWNAHTSVGNITGSLVAAAMLGYGWGWSFVVPGGLIALGGVLVLFFLAPYPQYVGFGPSPIEEPVTDESTDGEDISAAGKDRRDAVGIFKALAIPGVVIFALCLFFAKLVAYTFLYWLPFYLSQTGKPMFFFCQ

SEQ ID NO: 181740 - protein, 474 aa, Zea Mays
MMKPPAPAVPSPEPPRLAGGGRGPRGLRSLPALSYNTHRALVLGLTFLAYALYHASRKPPSIVKRELARSWPPFADPALLGATDVAFLTSYSLGMFVAGHLGDCLDLRRFLAFGMVTSGAAVALFGAGYFLGQHSLAFYVVAQVIAGLLQSTGWPSVVAIVGNWFSGRRRGLIMGIWNAHTSVGNITGSLVAAAMLGYGWGWSFVVPGGLIALGGVLVLFFLAPYPQYVGFGPSPIEEPVTDESTDGEDISAAGKDRRDAVGIFKALAIPGVVIFALCLFFAKLVAYTFLYWLPFYLSQTGGIVGGVLAGFISDQLNARATTAAVFMYLAIPSLFLFHAYGSTSKATNIGLMMISGLFVNGPYALITTAVSADLGTHKSLKGDSRALATVTAIIDGTGSLGAALGPFITGFISRKGWDLVFTMLALCALVAAVLLSSHVKTEIPQIIQKWRDRSTNAQNGNADPGVQPLLVDES

SEQ ID NO: 181741 - protein, 52 aa, Zea Mays
MNPEYDYLFKLLLIGDSGVGKSCLLLRFADDSYLDSYISTIGVDFLICFAIF

SEQ ID NO: 181742 - protein, 66 aa, Zea Mays
MRWASHSWRRVPKTPSMWSRPSWLWLHPSRTGWPANQLRLTQGQRPCRSAVNPSTRRRLAAHPKVA

SEQ ID NO: 181743 - protein, 188 aa, Zea Mays
MSSSDVGGYARSLRSTFSSFEALPIPTIAVIEGAALGGGLELALACDLRICGENAELGLPETSLAIIPGAGGTQRLPRIIGRSRAKELIFTGRRCGAAEAVTMGLANYCVPAGEAYQKALDIACEITQKGPMGIRMAKKAINEGAEVADMSSALAIEGECYEQLLYTQDRVEALAAFAEKRKPVYTGK

SEQ ID NO: 181744 - protein, 248 aa, Zea Mays
MRSPRGLLTASGYLAGRHAPSPSVSTTGHNSLLARTFQILAQPESVRLQKHPAPNSGILELRLERPEVKNAINWDMMRMLRSAIEKIQADTTAKVVLVASSVPGAFSAGADLKERRLMSSSDVGGYARSLRSTFSSFEALPIPTIAVIEGAALGGGLELALACDLRICGENAELGLPETSLAIIPGAGGTQRLPRIIGRSRAKELIFTGRRCGAAEAVTMGLANYCVPAGEAYQKALDIACEITQKDC

SEQ ID NO: 181745 - protein, 227 aa, Zea Mays
MLGLRRLPAVSGRLAPEVTSVSAASSHSAVFFRTLQILVQQGPVRLQKLSAPDTGIVELRLERPEAKNAIGKEMLQGLRSAIQEVEADTAANVVLVTSSVPKVFCAGADLKERRLMGPSEVRDFVNSLRSTFSSFEALSIPTIAVVEGVAFGGGLELALSCDLRICGKDAKFSLPETGLAIIPGAGGTQRLPRIVGRSRAKELIFTGRRFDAVEAVTMGSCMLTLQE

SEQ ID NO: 181746 - protein, 227 aa, Zea Mays
MLQGLRSAIQEVEADTAANVVLVTSSVPKVFCAGADLKERRLMGPSEVRDFVNSLRSTFSSFEALSIPTIAVVEGVAFGGGLELALSCDLRICGKDAKFSLPETGLAIIPGAGGTQRLPRIVGRSRAKELIFTGRRFDAVEAVTMVNYCVPAGDAYQKALELAREINQKGPLAVKMAKKAIDQGAEVDLPSALAVEEECYQQVLHTEDRLEGLAAFAEKRKPIYKGK

SEQ ID NO: 181747 - protein, 373 aa, Zea Mays
MLGLRRLPAVSGRLAPEVTSVSAASSHSAVFFRTLQILVQQGPVRLQKLSAPDTGIVELRLERPEAKNAIGKEMLQGLRSAIQEVEADTAANVVLVTSSVPKVFCAGADLKERRLMGPSEVRDFVNSLRSTFSSFEVCCKITIYSSVSVQLLSDFWKFRKSMVMKSETLDKAIQTNVHFVCILNCILTDKCCINSPIDVNFCIMFKQALSIPTIAVVEGVAFGGGLELALSCDLRICGKDAKFSLPETGLAIIPGAGGTQRLPRIVGRSRAKELIFTGRRFDAVEAVTMGVVNYCVPAGDAYQKALELAREINQKGPLAVKMAKKAIDQGAEVDLPSALAVEEECYQQVLHTEDRLEGLAAFAEKRKPIYKGK

SEQ ID NO: 181748 - protein, 205 aa, Zea Mays
MGKRWIPLEANPDVMNQFIWGLGVSERAVQFCDVYGLDDELIALVPHPVLAVLFLYPFTSLDEENKEESSVSAKSTAGGKDLSKKVYFTKQTIGNACGTIGVIHAIGNATSQIKLVEGSYFGKFYKQTADMDPVQRAAFLEEDDEMEDAHSIAASAGDTNINLDVNVHFVCFSCVDGELYELDGLKSQPTPHGPSSPETLLQCAM

SEQ ID NO: 181749 - protein, 122 aa, Zea Mays
MGKRWIPLEANPDVMNQFIWGLGVSERAVQFCDVYGLDDELIALVPHPVLAVLFLYPFTSLDEENKEESSVSAKSTAGGKDLSKKVYFTKQTIGNACGTIGVIHAIGNATSQIKLGTSLICS

SEQ ID NO: 181750 - protein, 116 aa, Zea Mays
MGKRWIPLEANPDVMNQFIWGLGVSERAVQFCDVYGLDDELIALVPHPVLAVLFLYPFTSLDEENKEESSVSAKSTAGGKDLSKKVYFTKQTIGNACGTIGVIHAIGNATSQIKLD

SEQ ID NO: 181751 - protein, 168 aa, Zea Mays
MGKRWIPLEANPDVMNQFIWGLGVSERAVQFCDVYGLDDELIALVPHPVLAVLFLYPFTSLDEENKEESSVSAKSTAGGKDLSKKVYFTKQTIGNACGTIGVIHAIGNATSQIKLVEGSYFGKFYKQTADMDPVQRAAFLEEDDEMEDAHSIAASAGDTNVNFTSLMD

SEQ ID NO: 181752 - protein, 490 aa, Zea Mays
MKPGVTISFVLAGAACVLNALCYAELASRLPAVVGGAYLYTYAAFNEITAFLVFTQLMVDYHIGAASIARSLASYFIEFLELIPLLKGQIPSWVGHGEEFFGGVVSINILAPVLLIILTAILCYGVKESSAVNTFMTTLKIIIVIVIVFAGVFEVDVSNWSPFMPNGFKSVVTGATVVFFAYVGFDAVANSAEEAKRPQRDLPIGILGSLIACVLLYVAVCLVITGMVPYTLLGEDAPLAEAFAAKGLKFITVLISIGAVAGLTTTLLVGLYVQSRLYFGLGRDGLLPSVFAEVHPTRHTPVQSQIWVGCVAAVMAGLFNVRMLSHILSVGTLTGYSVVSACVITLRWNDKGTSRRSLGSMSIWQEGVLSLVIVALCGFIVGLCYRFNYAIAFMVVAFLIAVAASFALQFRQVYVDPPGFSCPGVPLVPIISVFFNMVLFAQLHEEAWYRFVILSLIAVGVYAGYGQYNAVPSSSEHSTIGYHGIPSEAA

SEQ ID NO: 181753 - protein, 290 aa, Zea Mays
MPNGFKSVVTGATVVFFAYVGFDAVANSAEEAKRPQRDLPIGILGSLIACVLLYVAVCLVITGMVPYTLLGEDAPLAEAFAAKGLKFITVLISIGAVAGLTTTLLVGLYVQSRLYFGLGRDGLLPSVFAEVHPTRHTPVQSQIWVGCVAAVMAGLFNVRMLSHILSVGTLTGYSVVSACVITLRWNDKGTSRRSLGTFLIAVAASFALQFRQVYVDPPGFSCPGVPLVPIISVFFNMVLFAQLHEEAWYRFVILSLIAVGVYAGYGQYNAVPSSSEHSTIGYHGIPSEAA

SEQ ID NO: 181754 - protein, 248 aa, Zea Mays
MRTITRQIGLGMIQQMNTVCPECKGSGEIISDKDKCPSCKGNKVVQEKKVLEVHVEKGMQHNQKIVFQGQADEAPDTVTGDIVFVLQLKDHPKFKRMYDDLYVEHTISLTEALCGFQFVLTHLDGRQLLIKSDPGEVIKPGQHKAINDEGMPQHGRPFMKGRLFVEFNVVFPEPGALSPAQCRSLEKILPPKPGSQLSDMELDQCEETTLHDVNIEEEMRRRQQQKKQEAYDEDEEEDAQPRVQCAQQ

SEQ ID NO: 181755 - protein, 68 aa, Zea Mays
MYSSSGIEKILVPASLLQLFPIVVPLSYSSCNPTFRYTTSSLGIFCVPYSSHLLSIEPGETSYPLDSS

SEQ ID NO: 181756 - protein, 55 aa, Zea Mays
MKKELATCGARTFGSWGPIGGRGGSCKGTISGRGWSASRAAAIALRDGGDIKQEA

SEQ ID NO: 181757 - protein, 91 aa, Zea Mays
MASTCFRAAARVASAASRSAAAYRSAPSAARAVATAAHRISCFSRVPVELGCCAGLSLLPLHSAVASARLTSRLSTASSCRALSQHENDGT

SEQ ID NO: 181758 - protein, 156 aa, Zea Mays
MATKMVLCRFVALAAVACLLRPGAPVELHRKLSGWSDDAGATWYGAATGAGSDGGACGYQNAVDQPPFSSMIAAGSPSIFQNGKGCGACYQVKCTGHASCSGSPVTVVLTDECPGGACLDEPVHFDLSGTAFGAMAKDGQADQLRGAGHLKIQYTR

SEQ ID NO: 181759 - protein, 85 aa, Zea Mays
MKSEGNPNLVPFISPDPHDDASRQPLWAERDAETPEDQPIQLAREGEATLASWQARGCGPWRADAATLADGEHEEDDKGDMNALS

SEQ ID NO: 181760 - protein, 89 aa, Zea Mays
MKSEGNPNLVPFISPDPHDDASRQPLWAERDAETPEDQPIQLAREGEATLASWQARGCGPWRADAATLADGEHEEDDKGVEAVHQRRST

SEQ ID NO: 181761 - protein, 755 aa, Zea Mays
MIDDEVNFGNIFDASEEVQVTAKFGPKQRPKTRKTALSSRSAAPNPTEETGDRKVGTFSQVNSSKELTSQERTSLMCPSTESVDIIAGSHSILDTPLEDALTVPQGSLSGASAADRTSQYGEHNDDPSKLATHQENLVVSDINVPPNSSCSKAIDDIVEFGDMCDVQIEEERVTKFQPKVQTKLLKEIAKSRKTNQKVETSTVDVVTQNGKGNNIQTRLHGDPVQDPKSHESVQIPDSEGLLATDNSKGCNLANLNNLLEESVQEETIAKFRSDLQPNLGKASSQVAAIKINVVAVAPIVGVCDSNNDMYKEPKDQETITGPVAWSPQAVHADVDLDNHNEPINPPIDGTQSMFGEVPGREKGKSKSVSFALSDVSGIASPIDTNSEMGNIGDSCSDKLTDENLSNSSRHIAEKHSITKDQYSNEQDHEREPLDHAVQQQPKSDVGERASSMKRRCRKKVQKVGTPNHTVDDYFGEDCVEPSLAEEDNDTGDHYTTGNKHKARKKSRGGVEESQQQKAQKNKSKVSSRGRKRTLKDESTEKPEKKLTHRIRQRIPKEVKALLETPREQIKPMKLCASHLRLLQEARERVDPKGIPSGPSSNTRNFQLDDMDDLGYRDEEARFFDNDITEEHVQNATKLNYHSYMNKPARGKWSKSDTDLFYEGLRQFGSDFAMIQQLFPDKTRHQVRQKFKSEERKNPLLVHDAIVHRSGDSLYFKKVIKQLNIEDVVLPDIKSTQNKMVHQVKEALEMRMYWMI

SEQ ID NO: 181762 - protein, 806 aa, Zea Mays
MIFISFFAGLILCLPPLLLPKPAIFISAFNWHSKFKIACCRPSAAQMIDDEVNFGNIFDASEEVQVTAKFGPKQRPKTRKTALSSRSAAPNPTEETGDRKVGTFSQVNSSKELTSQERTSLMCPSTESVDIIAGSHSILDTPLEDALTVPQGSLSGASAADRTSQYGEHNDDPSKLATHQENLVVSDINVPPNSSCSKAIDDIVEFGDMCDVQIEEERVTKFQPKVQTKLLKEIAKSRKTNQKVETSTVDVVTQNGKGNNIQTRLHGDPVQDPKSHESVQIPDSEGLLATDNSKGCNLANLNNLLEESVQEETIAKFRSDLQPNLGKASSQVAAIKINVVAVAPIVGVCDSNNDMYKEPKDQETITGPVAWSPQAVHADVDLDNHNEPINPPIDGTQSMFGEVPGTAFTGREKGKSKSVSFALSDVSGIASPIDTNSEMGNIGDSCSDKLTDENLSNSSRHIAEKHSITKDQYSNEQDHEREPLDHAVQQQPKSDVGERASSMKRRCRKKVQKVGTPNHTVDDYFGEDCVEPSLAEEDNDTGDHYTTGNKHKARKKSRGGVEESQQQKAQKNKSKVSSRGRKRTLKDESTEKPEKKLTHRIRQRIPKEVKALLETPREQIKPMKLCASHLRLLQEARERVDPKGIPSGPSSNTRNFQLDDMDDLGYRDEEARFFDNDITEEHVQNATKLNYHSYMNKPARGKWSKSDTDLFYEGLRQFGSDFAMIQQLFPDKTRHQVRQKFKSEERKNPLLVHDAIVHRSGDSLYFKKVIKQLNIEDVVLPDIKSTQNKMVHQVKEALEMRMYWMI

SEQ ID NO: 181763 - protein, 482 aa, Zea Mays
MIFISFFAGLILCLPPLLLPKPAIFISAFNWHSKFKIACCRPSAAQMIDDEVNFGNIFDASEEVQVTAKFGPKQRPKTRKTALSSRSAAPNPTEETGDRKVGTFSQVNSSKELTSQERTSLMCPSTESVDIIAGSHSILDTPLEDALTVPQGSLSGASAADRTSQYGEHNDDPSKLATHQENLVVSDINVPPNSSCSKAIDDIVEFGDMCDVQIEEERVTKFQPKVQTKLLKEIAKSRKTNQKVETSTVDVVTQNGKGNNIQTRLHGDPVQDPKSHESVQIPDSEGLLATDNSKGCNLANLNNLLEESVQEETIAKFRSDLQPNLGKASSQVAAIKINVVAVAPIVGVCDSNNDMYKEPKDQETITGPVAWSPQAVHADVDLDNHNEPINPPIDGTQSMFGEVPGREKGKSKSVSFALSDVSGIASPIDTNSEMGNIGDSCSDKLTDENLSNSSRHIAEKVSIILLRRCNDLYLHGYYKVSP

SEQ ID NO: 181764 - protein, 775 aa, Zea Mays
MSFNWHSKFKIACCRPSAAQMIDDEVNFGNIFDASEEVQVTAKFGPKQRPKTRKTALSSRSAAPNPTEETGDRKVGTFSQVNSSKELTSQERTSLMCPSTESVDIIAGSHSILDTPLEDALTVPQGSLSGASAADRTSQYGEHNDDPSKLATHQENLVVSDINVPPNSSCSKAIDDIVEFGDMCDVQIEEERVTKFQPKVQTKLLKEIAKSRKTNQKVETSTVDVVTQNGKGNNIQTRLHGDPVQDPKSHESVQIPDSEGLLATDNSKGCNLANLNNLLEESVQEETIAKFRSDLQPNLGKASSQVAAIKINVVAVAPIVGVCDSNNDMYKEPKDQETITGPVAWSPQAVHADVDLDNHNEPINPPIDGTQSMFGEVPGREKGKSKSVSFALSDVSGIASPIDTNSEMGNIGDSCSDKLTDENLSNSSRHIAEKHSITKDQYSNEQDHEREPLDHAVQQQPKSDVGERASSMKRRCRKKVQKVGTPNHTVDDYFGEDCVEPSLAEEDNDTGDHYTTGNKHKARKKSRGGVEESQQQKAQKNKSKVSSRGRKRTLKDESTEKPEKKLTHRIRQRIPKEVKALLETPREQIKPMKLCASHLRLLQEARERVDPKGIPSGPSSNTRNFQLDDMDDLGYRDEEARFFDNDITEEHVQNATKLNYHSYMNKPARGKWSKSDTDLFYEGLRQFGSDFAMIQQLFPDKTRHQVRQKFKSEERKNPLLVHDAIVHRSGDSLYFKKVIKQLNIEDVVLPDIKSTQNKMVHQVKEALEMRMYWMI

SEQ ID NO: 181765 - protein, 642 aa, Zea Mays
MIFISFFAGLILCLPPLLLPKPAIFISAFNWHSKFKIACCRPSAAQMIDDEVNFGNIFDASEEVQVTAKFGPKQRPKTRKTALSSRSAAPNPTEETGDRKVGTFSQVNSSKELTSQERTSLMCPSTESVDIIAGSHSILDTPLEDALTVPQGSLSGASAADRTSQYGEHNDDPSKLATHQENLVVSDINVPPNSSCSKAIDDIVEFGDMCDVQIEEERVTKFQPKVQTKLLKEIAKSRKTNQKVETSTVDVVTQNGKGNNIQTRLHGDPVQDPKSHESVQIPDSEGLLATDNSKGCNLANLNNLLEESVQEETIAKFRSDLQPNLGKASSQVAAIKINVVAVAPIVGVCDSNNDMYKEPKDQETITGPVAWSPQAVHADVDLDNHNEPINPPIDGTQSMFGEVPGREKGKSKSVSFALSDVSGIASPIDTNSEMGNIGDSCSDKLTDENLSNSSRHIAEKHSITKDQYSNEQDHEREPLDHAVQQQPKSDVGERASSMKRRCRKKVQKVGTPNHTVDDYFGEDCVEPSLAEEDNDTGDHYTTGNKHKARKKSRGGVEESQQQKAQKNKSKVSSRGRKRTLKDESTEKPEKKLTHRIRQRIPKEVKALLETPREQIKPMKLCASHLSQKGFHPGHPLIQETFN

SEQ ID NO: 181766 - protein, 619 aa, Zea Mays
MIFISFFAGLILCLPPLLLPKPAIFISAFNWHSKFKIACCRPSAAQMIDDEVNFGNIFDASEEVQVTAKFGPKQRPKTRKTALSSRSAAPNPTEETGDRKVGTFSQVNSSKELTSQERTSLMCPSTESVDIIAGSHSILDTPLEDALTVPQGSLSGASAADRTSQYGEHNDDPSKLATHQENLVVSDINVPPNSSCSKAIDDIVEFGDMCDVQIEEERVTKFQPKVQTKLLKEIAKSRKTNQKVETSTVDVVTQNGKGNNIQTRLHGDPVQDPKSHESVQIPDSEGLLATDNSKGCNLANLNNLLEESVQEETIAKFRSDLQPNLGKASSQVAAIKINVVAVAPIVGVCDSNNDMYKEPKDQETITGPVAWSPQAVHADVDLDNHNEPINPPIDGTQSMFGEVPGREKGKSKSVSFALSDVSGIASPIDTNSEMGNIGDSCSDKLTDENLSNSSRHIAEKHSITKDQYSNEQDHEREPLDHAVQQQPKSDVGERASSMKRRCRKKVQKVGTPNHTVDDYFGEDCVEPSLAEEDNDTGDHYTTGNKHKARKKSRGGVEESQQQKAQKNKSKVSSRGRKRTLKDESTEKPEKKLTHRIRQRIPKDKTHEALCITSQVVTRS

SEQ ID NO: 181767 - protein, 801 aa, Zea Mays
MIFISFFAGLILCLPPLLLPKPAIFISAFNWHSKFKIACCRPSAAQMIDDEVNFGNIFDASEEVQVTAKFGPKQRPKTRKTALSSRSAAPNPTEETGDRKVGTFSQVNSSKELTSQERTSLMCPSTESVDIIAGSHSILDTPLEDALTVPQGSLSGASAADRTSQYGEHNDDPSKLATHQENLVVSDINVPPNSSCSKAIDDIVEFGDMCDVQIEEERVTKFQPKVQTKLLKEIAKSRKTNQKVETSTVDVVTQNGKGNNIQTRLHGDPVQDPKSHESVQIPDSEGLLATDNSKGCNLANLNNLLEESVQEETIAKFRSDLQPNLGKASSQVAAIKINVVAVAPIVGVCDSNNDMYKEPKDQETITGPVAWSPQAVHADVDLDNHNEPINPPIDGTQSMFGEVPGREKGKSKSVSFALSDVSGIASPIDTNSEMGNIGDSCSDKLTDENLSNSSRHIAEKHSITKDQYSNEQDHEREPLDHAVQQQPKSDVGERASSMKRRCRKKVQKVGTPNHTVDDYFGEDCVEPSLAEEDNDTGDHYTTGNKHKARKKSRGGVEESQQQKAQKNKSKVSSRGRKRTLKDESTEKPEKKLTHRIRQRIPKEVKALLETPREQIKPMKLCASHLRLLQEARERVDPKGIPSGPSSNTRNFQLDDMDDLGYRDEEARFFDNDITEEHVQNATKLNYHSYMNKPARGKWSKSDTEFFYEGLRQFGSDFAMIQQLFPDKTRHQVRQKFKSEERKNPLLVHDAIVHRSGDSLYFKKVIKQLNIEDVVLPDIKSTQNKMVHQVKEALEMRMYWMI

SEQ ID NO: 181768 - protein, 708 aa, Zea Mays
MIFISFFAGLILCLPPLLLPKPAIFISAFNWHSKFKIACCRPSAAQMIDDEVNFGNIFDASEEVQVTAKFGPKQRPKTRKTALSSRSAAPNPTEETGDRKVGTFSQVNSSKELTSQERTSLMCPSTESVDIIAGSHSILDTPLEDALTVPQGSLSGASAADRTSQYGEHNDDPSKLATHQENLVVSDINVPPNSSCSKAIDDIVEFGDMCDVQIEEERVTKFQPKVQTKLLKEIAKSRKTNQKVETSTVDVVTQNGKGNNIQTRLHGDPVQDPKSHESVQIPDSEGLLATDNSKGCNLANLNNLLEESVQEETIAKFRSDLQPNLGKASSQVAAIKINVVAVAPIVGVCDSNNDMYKEPKDQETITGPVAWSPQAVHADVDLDNHNEPINPPIDGTQSMFGEVPGREKGKSKSVSFALSDVSGIASPIDTNSEMGNIGDSCSDKLTDENLSNSSRHIAEKHSITKDQYSNEQDHEREPLDHAVQQQPKSDVGERASSMKRRCRKKVQKVGTPNHTVDDYFGEDCVEPSLAEEDNDTGDHYTTGNKHKARKKSRGGVEESQQQKAQKNKSKVSSRGRKRTLKDESTEKPEKKLTHRIRQRIPKEVKALLETPREQIKPMKLCASHLRLLQEARERVDPKGIPSGPSSNTRNFQLDDMDDLGYRDEEARFFDNDITEEHVQNATKLNYHSYMNKPARGKWVFDNLVAILQ

SEQ ID NO: 181769 - protein, 789 aa, Zea Mays
MAAHHLRHRQRHGSFTFNWHSKFKIACCRPSAAQMIDDEVNFGNIFDASEEVQVTAKFGPKQRPKTRKTALSSRSAAPNPTEETGDRKVGTFSQVNSSKELTSQERTSLMCPSTESVDIIAGSHSILDTPLEDALTVPQGSLSGASAADRTSQYGEHNDDPSKLATHQENLVVSDINVPPNSSCSKAIDDIVEFGDMCDVQIEEERVTKFQPKVQTKLLKEIAKSRKTNQKVETSTVDVVTQNGKGNNIQTRLHGDPVQDPKSHESVQIPDSEGLLATDNSKGCNLANLNNLLEESVQEETIAKFRSDLQPNLGKASSQVAAIKINVVAVAPIVGVCDSNNDMYKEPKDQETITGPVAWSPQAVHADVDLDNHNEPINPPIDGTQSMFGEVPGREKGKSKSVSFALSDVSGIASPIDTNSEMGNIGDSCSDKLTDENLSNSSRHIAEKHSITKDQYSNEQDHEREPLDHAVQQQPKSDVGERASSMKRRCRKKVQKVGTPNHTVDDYFGEDCVEPSLAEEDNDTGDHYTTGNKHKARKKSRGGVEESQQQKAQKNKSKVSSRGRKRTLKDESTEKPEKKLTHRIRQRIPKEVKALLETPREQIKPMKLCASHLRLLQEARERVDPKGIPSGPSSNTRNFQLDDMDDLGYRDEEARFFDNDITEEHVQNATKLNYHSYMNKPARGKWSKSDTDLFYEGLRQFGSDFAMIQQLFPDKTRHQVRQKFKSEERKNPLLVHDAIVHRSGDSLYFKKVIKQLNIEDVVLPDIKSTQNKMVHQVKEALEMRMYWMI

SEQ ID NO: 181770 - protein, 145 aa, Zea Mays
MKRRCKKKVQKVGTPNHTVDDYFGEDCVEPSLAEEDNDTGDHYTTGNKHKARKKSRGGVEESQQQKVQKNKSKVSSRGRKRTLKDESTEKPEKKLTQRIRQRIPKEVKALLETPREQIKPMKLCASHLSQKGFHPGHPLIQETFN

SEQ ID NO: 181771 - protein, 177 aa, Zea Mays
MGAAAADLEARQLRILGRISDLELAAQQHRLGALSISTAPSEKGEADAGATEVHLAALLAARGVRDFAFRRVPADYYDRSLEERRDLLRADSVAQLCKSIVMVNTQAAADVVDCSNPKNSKYYVVVVQYMARLNAENIKNFLYELNEKQIPKKRFNRQALFPMWMMVSTWSSLIHIW

SEQ ID NO: 181772 - protein, 221 aa, Zea Mays
MITILLRKKNAVGALGFSCLQKVTAAFRQLAYGVPADYVDEYLWIGESTTIESLRKFVRAVCEVFGPEYLRPPNENDIARLLTIGEQRGFPGMIGSVDCMHWKWKNCPTTYQGMYCGHVKEPTIVLEAVASTDLWIWHAFFGLPGSFNDINVLHRFHLFDRLAQGEAPSVNYTINGHNYDKGYYLADGIYPNWSTFVKTIKAPANLKDKLFSSSGIPAKRC

SEQ ID NO: 181773 - protein, 342 aa, Zea Mays
MGVVVADSWDAMLGNAAAAAQDQTFLNWFIGAAGDLDQSGPPLPVHHQPLLDNVGFGFPAADPLGFTLDPHLGGVASDMSSPGAVSQTTNSGGGGNKASSAFGLLSPESASFQPPPLPVLFHEGIDTKPPLDTQSPGLLHQYQHQPTPATTFLMSIPSFPSYNQQSPLVHPPAKRHQSIGGDLYLARTRLLPPPPTGQGHAFPPLNGPAPFQLQPSPPLPHGAMKRTAAEAAQQQLLDELAAAAKAAEAGNSIGARAILARLNHQLPPLGKPFLRSASYLKEALLALAEGHHGGCHLKSPLDVALKLAAYKTFSDHSPVLQFTNFTATQALLDEIGGSTSSY

SEQ ID NO: 181774 - protein, 730 aa, Zea Mays
MWATLHKPVAHANLRLLLTVSAFSGPLHLGTASAVAAAVTTRRSSSSRGVAATAMPSSSPPPLPPAEETTASAAALAPEGGFSLTEPSFLESLMPKKEIGVDRFLAAHPEYDGRSALIAIFDSGVDPAAAGLQTTSDGKPKILDVLDCTGSGDVDTSKVVKADADGAIVGASGARLVINPSWKNPSQEWHVGCKLIYELFTDTLTSRLKKERKKKWDEENQESISDALKQLNEFEKKHPKPDDTMLKKAHEDMQSRLDYLRKQAEGYDDKGPVIDIVTWNDGDVWRVAVDTQTLEGNNDGGKLADFVPLTNYRLERKYAIFSKLDACSFVANVYNDGNLVSIVTDCSPHATHVAGIAAAFHPDEPLLNGVAPGAQLISCKIGDTRLGSMETGTGLVRALIAAVEHKCDLINMSYGEPTLLPDYGRFIDLSNEVVDKHRIIFISSAGNNGPALNTVGAPGGTSTSIIGVGAYVSPAMAAGAHCVVQPPAKGMEYTWSSRGPTADGDLGVSISAPGGAVAPVPTWTLQSRMLMNGTSMSSPSACGGVALLVSGMKAEGIPLSPYSVRKAIENTAASISNAPEEKLTTGNGLLQVDRAFEYAQQAKKLPLVSYRISINQVGKSDHPGPKSDEGVQAFLNHSRFPDTAAEPGLTSFLEWWKGAAEAVQGMVKKGLDSLIILGAWKICNLRNRCVFDGENPSLSRILKQADEERSLWELAGAKGLSYLAAPLSVA

SEQ ID NO: 181775 - protein, 1433 aa, Zea Mays
MWATLHKPVAHANLRLLLTVSAFSGPLHLGTASAVAAAVTTRRSSSSRGVAATAMPSSSPPPLPPAEETTASAAALAPEGGFSLTEPSFLESLMPKKEIGVDRFLAAHPEYDGRSALIAIFDSGVDPAAAGLQTTSDGKPKILDVLDCTGSGDVDTSKVVKADADGAIVGASGARLVINPSWKNPSQEWHVGCKLIYELFTDTLTSRLKKERKKKWDEENQESISDALKQLNEFEKKHPKPDDTMLKKAHEDMQSRLDYLRKQAEGYDDKGPVIDIVTWNDGDVWRVAVDTQTLEGNNDGGKLADFVPLTNYRLERKYAIFSKLDACSFVANVYNDGNLVSIVTDCSPHATHVAGIAAAFHPDEPLLNGVAPGAQLISCKIGDTRLGSMETGTGLVRALIAAVEHKCDLINMSYGEPTLLPDYGRFIDLSNEVVDKHRIIFISSAGNNGPALNTVGAPGGTSTSIIGVGAYVSPAMAAGAHCVVQPPAKGMEYTWSSRGPTADGDLGVSISAPGGAVAPVPTWTLQSRMLMNGTSMSSPSACGGVALLVSGMKAEGIPLSPYSVRKAIENTAASISNAPEEKLTTGNGLLQVDRAFEYAQQAKKLPLVSYRISINQVGKSVPKLRGIYLRGGNACCQTSEWTVQLDPKFHEGASNLEQLVPFEECLQLHSTDTSVVQIPEYILVTNNGRSFNIVVNPANISSGLHYFEVYGIDYKAPWRGPIFRVPITVIKPIALLGEPPLLSISNLRFQSGHIERRFINVPFGASWAEVTMRTSAFDTPRRFFLDTVQICPLKRPVKWEAVVTFSSPSSKNFSFPVEGGLTLELSIAQFWSSGIASHEPTCVDFEIVLHGISIDQKVSTLDGESPLLIVARSLLASEKLVPVGTLNKIRIPYRPVECNLSSLPTDRDKLPSGKQIIALTLTYKFKLEDNAEIKPHVPLLNNRIYDNKFESQFYRISDSNKRIYSSGDVYPSYVRLSKGEYTLQLYIRHENVQFLEKLKELVLFIERKLDKKDFVPLMFYSQPDGPIVGSGTFKSTVLVPGEPEAFYVGPPSSEKLPKNAPPGAVLVGSITYGTVSTFNKKDEQNHRAPVSYSISYTILPSKVSSIECAVSLLSTFVVMMILVLVLDHQFRITIRVHSPDPDTFCTAYICALDFVSYMLRYILFHAVVHSLFGLRCNQYKLLQVDDKEKGVLVGTKSIPEQLDEEVRDTKIKFLSSVKQLTEEDKSAWSELVVSLKSEYPKYTPLLSKILQCVLQKGTDGDKISHEKEVIAAADEVVGSIDKEELAKYLSLNSDPEDEEAQKFKKKIEETRDQLADALYQKCLALAEIESLKSDESIEVSAKDIFEENYKELIKWVDVKSAKYGTSTVLREKRCGRPGTALKILNDLIQNESEPKKKLYDLKIQLIEEMGWNHVSTYEKQWMQVRFPPCLPPF

SEQ ID NO: 181776 - protein, 947 aa, Zea Mays
MWATLHKPVAHANLRLLLTVSAFSGPLHLGTASAVAAAVTTRRSSSSRGVAATAMPSSSPPPLPPAEETTASAAALAPEGGFSLTEPSFLESLMPKKEIGVDRFLAAHPEYDGRSALIAIFDSGVDPAAAGLQTTSDGKPKILDVLDCTGSGDVDTSKVVKADADGAIVGASGARLVINPSWKNPSQEWHVGCKLIYELFTDTLTSRLKKERKKKWDEENQESISDALKQLNEFEKKHPKPDDTMLKKAHEDMQSRLDYLRKQAEGYDDKGPVIDIVTWNDGDVWRVAVDTQTLEGNNDGGKLADFVPLTNYRLERKYAIFSKLDACSFVANVYNDGNLVSIVTDCSPHATHVAGIAAAFHPDEPLLNGVAPGAQLISCKIGDTRLGSMETGTGLVRALIAAVEHKCDLINMSYGEPTLLPDYGRFIDLSNEVVDKHRIIFISSAGNNGPALNTVGAPGGTSTSIIGVGAYVSPAMAAGAHCVVQPPAKGMEYTWSSRGPTADGDLGVSISAPGGAVAPVPTWTLQSRMLMNGTSMSSPSACGGVALLVSGMKAEGIPLSPYSVRKAIENTAASISNAPEEKLTTGNGLLQVDRAFEYAQQAKKLPLVSYRISINQVGKSVPKLRGIYLRGGNACCQTSEWTVQLDPKFHEGASNLEQLVPFEECLQLHSTDTSVVQIPEYILVTNNGRSFNIVVNPANISSGLHYFEVYGIDYKAPWRGPIFRVPITVIKPIALLGEPPLLSISNLRFQSGHIERRFINVPFGASWAEVTMRTSAFDTPRRFFLDTVQICPLKRPVKWEAVVTFSSPSSKNFSFPVEGGLTLELSIAQFWSSGIASHEPTCVDFEIVLHGISIDQKVSTLDGESPLLIVARSLLASEKLVPVGTLNKIRIPYRPVECNLSSLPTDRDKLPSGKQIIALTLTVFTRPETFTLVMSDFPKENTRCNCT

SEQ ID NO: 181777 - protein, 896 aa, Zea Mays
MWATLHKPVAHANLRLLLTVSAFSGPLHLGTASAVAAAVTTRRSSSSRGVAATAMPSSSPPPLPPAEETTASAAALAPEGGFSLTEPSFLESLMPKKEIGVDRFLAAHPEYDGRSALIAIFDSGVDPAAAGLQTTSDGKPKILDVLDCTGSGDVDTSKVVKADADGAIVGASGARLVINPSWKNPSQEWHVGCKLIYELFTDTLTSRLKKERKKKWDEENQESISDALKQLNEFEKKHPKPDDTMLKKAHEDMQSRLDYLRKQAEGYDDKGPVIDIVTWNDGDVWRVAVDTQTLEGNNDGGKLADFVPLTNYRLERKYAIFSKLDACSFVANVYNDGNLVSIVTDCSPHATHVAGIAAAFHPDEPLLNGVAPGAQLISCKIGDTRLGSMETGTGLVRALIAAVEHKCDLINMSYGEPTLLPDYGRFIDLSNEVVDKHRIIFISSAGNNGPALNTVGAPGGTSTSIIGVGAYVSPAMAAGAHCVVQPPAKGMEYTWSSRGPTADGDLGVSISAPGGAVAPVPTWTLQSRMLMNGTSMSSPSACGGVALLVSGMKAEGIPLSPYSVRKAIENTAASISNAPEEKLTTGNGLLQVDRAFEYAQQAKKLPLVSYRISINQVGKSVPKLRGIYLRGGNACCQTSEWTVQLDPKFHEGASNLEQLVPFEECLQLHSTDTSVVQIPEYILVTNNGRSFNIVVNPANISSGLHYFEVYGIDYKAPWRGPIFRVPITVIKPIALLGEPPLLSISNLRFQSGHIERRFINVPFGASWAEVTMRTSAFDTPRRFFLDTVQICPLKRPVKWEAVVTFSSPSSKNFSFPVEGGLTLELSIAQFWSSGIASHEPTCVDFEIVLHGISIDQKVSTLDGESPLLIVARSLLASEKLVPVGTLNKDTLSTRGV

SEQ ID NO: 181778 - protein, 1339 aa, Zea Mays
MWATLHKPVAHANLRLLLTVSAFSGPLHLGTASAVAAAVTTRRSSSSRGVAATAMPSSSPPPLPPAEETTASAAALAPEGGFSLTEPSFLESLMPKKEIGVDRFLAAHPEYDGRSALIAIFDSGVDPAAAGLQTTSDGKPKILDVLDCTGSGDVDTSKVVKADADGAIVGASGARLVINPSWKNPSQEWHVGCKLIYELFTDTLTSRLKVNFIFSAYTPKFYIELDILTRVYPPTLQKERKKKWDEENQESISDALKQLNEFEKKHPKPDDTMLKKAHEDMQSRLDYLRKQAEGYDDKGPVIDIVTWNDGDVWRVAVDTQTLEGNNDGGKLADFVPLTNYRLERKYAIFSKLDACSFVANVYNDGNLVSIVTDCSPHATHVAGIAAAFHPDEPLLNGVAPGAQLISCKIGDTRLGSMETGTGLVRALIAAVEHKCDLINMSYGEPTLLPDYGRFIDLSNEVVDKHRIIFISSAGNNGPALNTVGAPGGTSTSIIGVGAYVSPAMAAGAHCVVQPPAKGMEYTWSSRGPTADGDLGVSISAPGGAVAPVPTWTLQSRMLMNGTSMSSPSACGGVALLVSGMKAEGIPLSPYSVRKAIENTAASISNAPEEKLTTGNGLLQVDRAFEYAQQAKKLPLVSYRISINQVGKSVPKLRGIYLRGGNACCQTSEWTVQLDPKFHEGASNLEQLVPFEECLQLHSTDTSVVQIPEYILVTNNGRSFNIVVNPANISSGLHYFEVYGIDYKAPWRGPIFRVPITVIKPIALLGEPPLLSISNLRFQSGHIERRFINVPFGASWAEVTMRTSAFDTPRRFFLDTVQICPLKRPVKWEAVVTFSSPSSKNFSFPVEGGLTLELSIAQFWSSGIASHEPTCVDFEIVLHGISIDQKVSTLDGESPLLIVARSLLASEKLVPVGTLNKIRIPYRPVECNLSSLPTDRDKLPSGKQIIALTLTYKFKLEDNAEIKPHVPLLNNRIYDNKFESQFYRISDSNKRIYSSGDVYPSYVRLSKGEYTLQLYIRHENVQFLEKLKELVLFIERKLDKKDFVPLMFYSQPDGPIVGSGTFKSTVLVPGEPEAFYVGPPSSEKLPKNAPPGAVLVGSITYGTVSTFNKKDEQNHRAPVSYSISYTILPSKVDDKEKGVLVGTKSIPEQLDEEVRDTKIKFLSSVKQLTEEDKSAWSELVVSLKSEYPKYTPLLSKILQCVLQKGTDGDKISHEKEVIAAADEVVGSIDKEELAKYLSLNSDPEDEEAQKFKKKIEETRDQLADALYQKCLALAEIESLKSDESIEVSAKDIFEENYKELIKWVDVKSAKYGTSTVLREKRCGRPGTALKVWLLETLLNW

SEQ ID NO: 181779 - protein, 918 aa, Zea Mays
MWATLHKPVAHANLRLLLTVSAFSGPLHLGTASAVAAAVTTRRSSSSRGVAATAMPSSSPPPLPPAEETTASAAALAPEGGFSLTEPSFLESLMPKKEIGVDRFLAAHPEYDGRSALIAIFDSGVDPAAAGLQTTSDGKPKILDVLDCTGSGDVDTSKVVKADADGAIVGASGARLVINPSWKNPSQEWHVGCKLIYELFTDTLTSRLKVNFIFSAYTPKFYIELDILTRVYPPTLQKERKKKWDEENQESISDALKQLNEFEKKHPKPDDTMLKKAHEDMQSRLDYLRKQAEGYDDKGPVIDIVTWNDGDVWRVAVDTQTLEGNNDGGKLADFVPLTNYRLERKYAIFSKLDACSFVANVYNDGNLVSIVTDCSPHATHVAGIAAAFHPDEPLLNGVAPGAQLISCKIGDTRLGSMETGTGLVRALIAAVEHKCDLINMSYGEPTLLPDYGRFIDLSNEVVDKHRIIFISSAGNNGPALNTVGAPGGTSTSIIGVGAYVSPAMAAGAHCVVQPPAKGMEYTWSSRGPTADGDLGVSISAPGGAVAPVPTWTLQSRMLMNGTSMSSPSACGGVALLVSGMKAEGIPLSPYSVRKAIENTAASISNAPEEKLTTGNGLLQVDRAFEYAQQAKKLPLVSYRISINQVGKSVPKLRGIYLRGGNACCQTSEWTVQLDPKFHEGASNLEQLVPFEECLQLHSTDTSVVQIPEYILVTNNGRSFNIVVNPANISSGLHYFEVYGIDYKAPWRGPIFRVPITVIKPIALLGEPPLLSISNLRFQSGHIERRFINVPFGASWAEVTMRTSAFDTPRRFFLDTVQICPLKRPVKWEAVVTFSSPSSKNFSFPVEGGLTLELSIAQFWSSGIASHEPTCVDFEIVLHGISIDQKVSTLDGESPLLIVARSLLASEKLVPVGTLNKVS

SEQ ID NO: 181780 - protein, 381 aa, Zea Mays
MLKKAHEDMQSRLDYLRKQAEGYDDKGPVIDIVTWNDGDVWRVAVDTQTLEGNNDGGKLADFVPLTNYRLERKYAIFSKLDACSFVANVYNDGNLVSIVTDCSPHATHVAGIAAAFHPDEPLLNGVAPGAQLISCKIGDTRLGSMETGTGLVRALIAAVEHKCDLINMSYGEPTLLPDYGRFIDLSNEVVDKHRIIFISSAGNNGPALNTVGAPGGTSTSIIGVGAYVSPAMAAGAHCVVQPPAKGMEYTWSSRGPTADGDLGVSISAPGGAVAPVPTWTLQSRMLMNGTSMSSPSACGGVALLVSGMKAEGIPLSPYSVRKAIENTAASISNAPEEKLTTGNGLLQVDRAFEYAQQAKKLPLVSYRISINQVGKSVDCAT

SEQ ID NO: 181781 - protein, 508 aa, Zea Mays
MRTSAFDTPRRFFLDTVQICPLKRPVKWEAVVTFSSPSSKNFSFPVEGGLTLELSIAQFWSSGIASHEPTCVDFEIVLHGISIDQKVSTLDGESPLLIVARSLLASEKLVPVGTLNKRIYSSGDVYPSYVRLSKGEYTLQLYIRHENVQFLEKLKELVLFIERKLDKKDFVPLMFYSQPDGPIVGSGTFKSTVLVPGEPEAFYVGPPSSEKLPKNAPPGAVLVGSITYGTVSTFNKKDEQNHRAPVSYSISYTILPSKVDDKEKGVLVGTKSIPEQLDEEVRDTKIKFLSSVKQLTEEDKSAWSELVVSLKSEYPKYTPLLSKILQCVLQKGTDGDKISHEKEVIAAADEVVGSIDKEELAKYLSLNSDPEDEEAQKFKKKIEETRDQLADALYQKCLALAEIESLKSDESIEVSAKDIFEENYKELIKWVDVKSAKYGTSTVLREKRCGRPGTALKILNDLIQNESEPKKKLYDLKIQLIEEMGWNHVSTYEKQWMQVRFPPCLPPF

SEQ ID NO: 181782 - protein, 275 aa, Zea Mays
MEGKEEDVRLGANKFSERQPIGTAAQGAADDKDYKEPPPAPLFEPGELKSWSFYRAGIAEFVATFLFLYITILTVMGVSKSTSKCATVGIQGIAWSFGGMIFALVYCTAGISARKLSLTRALFYIIMQCLGAICGAGVVKGFQQGLYMGNGGGANVVAPGYTKGDGLGAEIVGTFILVYTVFSATDAKRNARDSHVPILAPLPIGFAVFLVHLATIPITGTGINPARSLGAAIIYNRDHAWNDHWIFWVGPFIGAALAAIYHQVIIRAIPFKSRS

SEQ ID NO: 181783 - protein, 141 aa, Zea Mays
MEGKEEDVRLGANKFSERQPIGTAAQGAADDKDYKEPPPAPLFEPGELKSWSFYRAGIAEFVATFLFLYITILTVMGVSKSTSKCATVGIQGIAWSFGGMIFALVYCTAGISDPCPTANWVRGVPGPPCHHPHYWHWHQPS

SEQ ID NO: 181784 - protein, 242 aa, Zea Mays
MEGKEEDVRLGANKFSERQPIGTAAQGAADDKDYKEPPPAPLFEPGELKSWSFYRAGIAEFVATFLFLYITILTVMGVSKSTSKCATVGIQGIAWSFGGMIFALVYCTAGISGGHINPAVTFGLFLARKLSLTRALFYIIMQCLGAICGAGVVKGFQQGLYMGNGGGANVVAPGYTKGDGLGAEIVGTFILVYTVFSATDAKRNARDSHVPWIFWVGPFIGAALAAIYHQVIIRAIPFKSRS

SEQ ID NO: 181785 - protein, 243 aa, Zea Mays
MEGKEEDVRLGANKFSERQPIGTAAQGAADDKDYKEPPPAPLFEPGELKSWSFYRAGIAEFVATFLFLYINPAVTFGLFLARKLSLTRALFYIIMQCLGAICGAGVVKGFQQGLYMGNGGGANVVAPGYTKGDGLGAEIVGTFILVYTVFSATDAKRNARDSHVPILAPLPIGFAVFLVHLATIPITGTGINPARSLGAAIIYNRDHAWNDHWIFWVGPFIGAALAAIYHQVIIRAIPFKSRS

SEQ ID NO: 181786 - protein, 87 aa, Zea Mays
MSFGDWNLADSLILCFNKLKISLPHCQLGSRCSWSTLPPSPLLALASTQLGALALPSSTTGITPGTTIGSSGSAPSLALLWLPSTTR

SEQ ID NO: 181787 - protein, 115 aa, Zea Mays
MGPPGLDYISLGLVDEEAIPKYELTVEDGRRLAKEYSRVLMRRHRARQTAESMLLTLKKEAIDALPEKLRAAAMVPDMTPFPANRYMATLTPPIEGYIEKVREAAKKHSVKEKLR

SEQ ID NO: 181788 - protein, 899 aa, Zea Mays
MDQARSKSGLRSHGSGKASSRPGSGTLGSPEEQPMLSDRREVVVKVDGNGNGHAPFSFHGADAGGGGKAGNATSSTHSTATTTPAESRPRSSEANSPRSPPKVWREGSYEFWNNDGGGAGAAATEAFSFKNRPPPQAPQSSSPSMSPTQPPRPEGGGVDPPTRLIGSFLRRQAASGGEVSLDLDLEMEELGRTAQLRSHPSFSSSLERDGRVSFQEPQKSHSTSSCSSDSDTDDGRKRRGDDGEVVRCTSSSTAAGTGPLLRVKTRSRLMDPPPQSQPAPAPAPAPASVPAASPVIDEERKSSGLRTPTKSGRLFSGLMHGNKSGPVGGKSGPMDDDEDDPFVDEDIPDDFKRGKFDALTVLQWLGLFLIVAALACSLSIKILSTKKVLGLHLWKWELLVFVLICGRLVSGWVIRLAVFGVERNFLLRKRVLYFVYGVRSAVQNALWLGLVLASWHFLFDKNVQQETNSPVLPYVTKILFCFLVATLIRLVKTLLLKVLASSFHVSTYFDRIQEALFNQYVIETLSGPPLVDENHVLAEVHELQRAGATIPKELRDAVPTKTVSGQRNIQLSGVMPKGEGSKQLSKEKGEGISIDALHKLNQKNISAWNMKRLMRIVRFGTLTTMDEQIQQATGEGDESATQIRSEYEAKIAAKKIFHNVAKPGSKYIYLSDLIRFMRQEEAVKAMNLFEGAQEHNRVSKRSLKNWVVNAFRERKALALTLNDTKTAVNKLNQMVNVVVGIIVFVLWLLILGIATTHFFVFLSSQLLLAVFVFGNTLKTVFEAIVFLFVMHPFDVGDRCEIEGVQAVVEEMNIMTTVFLRYDNLKIYYPNSVLATKPIMNFYRSPDMGEAIDFSIHVSTPVEKLALMKERILRYVLSSSICFVFIFQSDYPRDLDSREG

SEQ ID NO: 181789 - protein, 386 aa, Zea Mays
MAAASPPPSPPHAKRPKMSSSSDPEADAEPTSASAAVEGADPAQRRPRYKRRKVAILLGYCGAGYQGMQKNPGARTIEGDLEEALYQAGAVPEADRSAPRRYDWARAARTDKGVSAAAQVVSGRFYVDPPGFIDRLNAQLAPQIRAYGYVRVTNSFNAKKFCDRRRYLYLLPVFALDPSAHPDREAVMASMGSGSELTKCLECSERGRKIPGVMGREGKLPSPGQNGVDAPVEGSSHDESGTLGDAKCDHTSSDGNNPFAHGEVGSNSKEKPDLPVSGDRTEVANAKMGSNGDGAVVSSADADIYIGNEEKKLEPAATENKAQGFSSTILGHTISITSLQEPKQRILQQKDLSFPLLLTVLSAWMGLILSGVKLLDRVSCSIRSGR

SEQ ID NO: 181790 - protein, 241 aa, Zea Mays
MESEKINGEEKLPTKSTFSYTDEVKERFNRILKYYIGTHNFHNFTTRTKAEDPAAKRFIISFAADRVVSLDGIDFVRCEVVGQSFMLHQIRKMIGLAVAVMRNCAPESIYDVAFRKDVNLNVPTAPEVGLYLDECMFTSYNKKWKDSHEAVSMEPYSEEAEEFKVKYIFTHIAAMEHKEGAVALWLHSLNHRNYPDFRYMETAEHNPGAEVESIAAGAEPKVGAEVENTEEVQMPSDNLSE

SEQ ID NO: 181791 - protein, 68 aa, Zea Mays
MRPGASVEKTEAHYSSAFQLRKKNRVYKVESLAKLSSHPYRQGGSPLGRSLTHSYRSGFTPIEREDPY

SEQ ID NO: 181792 - protein, 164 aa, Zea Mays
MASSSAAESSSRLSDRARRSALGLRFMVLLMHVLFVGAVFILDPTLDWRIHGEPWYIGLYGVLVLLTLVQYFYTAGSCPGYVIDVMRAGSMMHATFVNTAALSKQSNSRNGNINSPTSRAQLQKLSTMTPTSSWAQMVMDLYPPGSSSRDWTCTYCRIVQVVHI

SEQ ID NO: 181793 - protein, 50 aa, Zea Mays
MGTDGYGSLSSRVKQQGLDLHLLQDCSGGTYLKKQSCVSGLLLSASSHCV

SEQ ID NO: 181794 - protein, 753 aa, Zea Mays
MGCKGSKLDDQEAVALCRGRADLLAAAVRHRYALADAHGALADSLASVAAALHLLMTAPGQPRLALPAARKAADVDAPPAAAAASASPPHSSSHINFAPSSDSDSGSVTSSPPRRLAAGYDHLSHHHPLPFPHYGYGYAPEPPYGGYPPPGSLRLYYARSRPPPASVAIEQRAPPSERVYHGSVEPAGGHPQYYSYGGEPAGRAAAPPPPSPPRTTSWDFFNVFADYDVYDNYCYDDAGGVGATSAAYTPSRSSREVREEEGIPDLEEEDAVVKQVAGEFSAPGSGARSRRSSIGGVSSGIAQVDQEDSSVVDKQVIGGGNVAPAQRNTASSAPTPRRPVDTTDVAGEIKAQFVRAADAVRALSPLLEIGRRRYHHRSSVYHVSSSMVSAIALPHSDVGGIELLDVGSEKVLGGRSLCSTLEKLYVWEKKLYDEVKAEEKMRLLLTKNAKRLKYLDLKGAEAQKIDPIRNMVRKLSTKLRISVRVITKVSKKINRVRDEELWPQINALIQGFVRMWRDKLDCYQIQCQMISEAKNLDSIVPHGNNRDLALELELEMMKWIVNFSSWVNEQRSFVKALNGWLSLCLDYKVDETVDGVPPYSPGRVGAPLVFVICNSWSQAMDRFSEKEVVTSMQALVSSVRKLLDKQNVEQMEQTIATREREKWNKILEKKTVEINKEADVLNRKLALIPGRHSRLPSAQTYQEHLLDASSLQSSLHRVVQALESFTSNSLQAFEQTLRHAEEERSSRESAKVS

SEQ ID NO: 181795 - protein, 313 aa, Zea Mays
MRLLLTKNAKRLKYLDLKGAEAQKIDPIRNMVRKLSTKLRISVRVITKVSKKINRVRDEELWPQINALIQGFVRMWRDKLDCYQIQCQMISEAKNLDSIVPHGNNRDLALELELEMMKWIVNFSSWVNEQRSFVKALNGWLSLCLDYKVDETVDGVPPYSPGRVGAPLVFVICNSWSQAMDRFSEKEVVTSMQALVSSVRKLLDKQNVEQMEQTIATREREKWNKILEKKTVEINKEADVLNRKLALIPGRHSRLPSAQTYQEHLLDASSLQSSLHRVVQALESFTSNSLQAFEQTLRHAEEERSSRESAKVS

SEQ ID NO: 181796 - protein, 486 aa, Zea Mays
MRCCSPGAAARQSSVSSSSLAPVVSSSTSPVATPPDLSSARRTEKRRRGGRSHSSDRRAWNNNNGASSSSSRLDPAAPLLPRHGSSGGREGGGLSSQPKTFANVFIAVVGAGVLGLPYTFSRTGWAAGSLLLFSVAALTFYCMMLLVACRRRLADEHPKIASFGDLGDAVFGAHGRFAVDVMLVLSQFSFCVGYLIFISNTMAHLYPITAAASSSSALLSPKALVIWAMLPFQLGLNSIKTLTLLAPLSIFADVVDLGAMGVVLGQDVAAWLAKPVPVVAFGGAGALLYGLGVSVYAFEGIGMVLPLEAEAANKSKFGVTLGLSMAFIAVMYGLFGVMGYVAFGDATRDIITTNLGAGWLSAAVQLGLCINLFFTMPVMMNPVYEVAERLLHGKRYCWWLRWLLVVVVGLAAMYVPNFTDFLALVGSSVCVLLGFVLPASFHLKVFGAEMEWPGVLSDVLLVVIGLALAVFGTYTSLLQIFQSSSA

SEQ ID NO: 181797 - protein, 326 aa, Zea Mays
MGGAGGGGRNGAATRRYNRSKVPRLRWTSELHRNFVRAVDCLGGQDKATPKLILQLMDVGGLTIAHVKSHLQMYRSSGQDIRRREVQPRRLGHLVEHYSFAIDEEGGPKEFVCCPHMKRAEAGPEAAATATATHESVQGNSDMGAPGTRRCGDDYTRAIPIPMGSSSSRSRRITEGLAWQWQSSGAASAARAATAASTLRELGFWVRGTEPFKVRQTGRPMANRLSPVARQLSSKSKEIKCGDDGRFLFGTATRDEAARRHSPSRRPDSIDPKAVAAVSWSSEGGACALPPPLSSTGLSARSGPSGSCVFARQRVNLDLSLSICGS

SEQ ID NO: 181798 - protein, 290 aa, Zea Mays
MHMHMFCCLPHLHTRGAKWKLESRTAFFSALNHLYLLGYYLSSFPCRSLPLEVQPRRLGHLVEHYSFAIDEEGGPKEFVCCPHMKRAEAGPEAAATATATHESVQGNSDMGAPGTRRCGDDYTRAIPIPMGSSSSRSRRITEGLAWQWQSSGAASAARAATAASTLRELGFWVRGTEPFKTGRPMANRLSPVARQLSSKSKEIKCGDDGRFLFGTATRDEAARRHSPSRRPDSIDPKAVAAVSWSSEGGACALPPPLSSTGLSARSGPSGSCVFARQRVNLDLSLSICGS

SEQ ID NO: 181799 - protein, 71 aa, Zea Mays
MWLHWCRTWRPRLRMSVPRGQDDHNDKGRRGADGSRCRGRGVDVTGCQEVQDGGRRGEPKPKSHTRAGRHR

SEQ ID NO: 181800 - protein, 82 aa, Zea Mays
MWLHWCRTWRPRLRMSVPRGQDDHNDKGRREGDSTPTRRSQHSIIFVDKGTPNQQLMIDQRMKILQDPMPGCRQDVGGLVYE

SEQ ID NO: 181801 - protein, 372 aa, Zea Mays
MEAQTDSAPGGGDDLAIMREQCRTLEESISTRREAQLDLIGSLQHLVPDLVPSLEQSLRLIAAFNGRPFVPTLYPNASVHVQNPNLKPQHRRALPGPARSTRLKTSPGSSPASAAARCAGTSGGIHAVRTMVAVCLLELVPFAEIDAAALARRLQSETSSASEAERAALADLAAELGGSAPAAVALALRRIAEDSGGLQIEEAFIGGKQMTMVWAIDRSKLLKELPESASVLQIQPPPTPQVVPLDTDTNIIPRPPPLQQSDMWGNPMPPMFPRPRGMTMPRIPPGLMPLQRPFMAPGAVIPMGGGPVPSSTQLKLRTEEDDLKDLELLLNKKTYREKQNTKTGEELLDLIHRPTAKETAVAAKLKQRVAPS

SEQ ID NO: 181802 - protein, 404 aa, Zea Mays
MEAQTDSAPGGGDDLAIMREQCRTLEESISTRREAQLDLIGSLQHLVPDLVPSLEQSLRLIAAFNGRPFVPTLYPNASVHVQNPNLKPQHRRALPGPARSTRLKTSPGSSPASAAARCAGTSGGIHAVRTMVAVCLLELVPFAEIDAAALARRLQSETSSASEAERAALADLAAELGGSAPAAVALALRRIAEDSGGLQIEEAFIGGKQMTMVWAIDRSKLLKELPESASVLQIQPPPTPQVVPLDTDTNIIPRPPPLQQSDMWGNPMPPMFPRPRGMTMPRIPPGLMPLQRPFMAPGAVIPMGGGPVPSSTQLKLRTEEDDLKDLELLLNKKTYREKQNTKTGEELLDLIHRPTAKETAVAAKFKTKGGSQLKEYCTNLTKEDCRRQTGSFVACDKLHILIQI

SEQ ID NO: 181803 - protein, 69 aa, Zea Mays
MCMWRGGLKNGMTQYLKPSSGNTIGYQGCILSREVWSRILLPLGLSSLAARQEIDALLWWIQTRKQVQC

SEQ ID NO: 181804 - protein, 741 aa, Zea Mays
MAEALGALCRAGGWSYGAIWRPDRRDPRLLTVGECHCEDEARKVVDKMVNQVHVVGEGLIGRTLISGEHQWISDDIPFSFSQISDEDNLGLCQGYTWWQHQFLSGIKTIAVVPMPAFGVAQFGSMQKVSESLQFLDQVKGATFLMESLSWSPSTKDAQKDAFMYNPQFQLDSSTTREGLPRTKAEPENSRLENAISIDSLKNFAITSNGLNPHVVAMPVNSKSISTVKLIQSDSNLRYNNISENAQQFKSAKQPDSSWASAATCFSNLTNLQRIERGLSCTPNKLRHCLQSEKSSGFLDSYSSIVSTDAELKCTLFDNATPFVQSDVIQEVGTSGSTRACGLHELPNEIWAEIASGEMKPVIKEVNENNGFLESTAFDPVMNDWWGDTALLAGNTSHLSATTMNSVSGQASSEQLSIEDRGLFSESVFEELLGFDGNVGPVMDSTEPLAGFVSGCHLPRYNLQGSLSVCKAQVPPLILPSGSCTSENVVMGSSKEAPVSLQNLSMDDCGSLNTASSKISQVKKPEGEKVVKKRARPGESTRPRPKDRQQIQERVKELREIVPNSAKCSIDALLDRTIKHMLFLQSVTKYAEKIKQADEPNMISKDNGSVLNDNSHGVVLKDNPSGGSNGGATWAYEVAGQTMVCPIIVEDLAPPGQMLVEMLCEERGFFLEIADTIRGFGLTILKGLMELRDGKIMARFLVEANKNVTRMDIFLSLVQLLQQNSRNRSSDQLVKAIFFNER

SEQ ID NO: 181805 - protein, 752 aa, Zea Mays
MAEALGALCRAGGWSYGAIWRPDRRDPRLLTVGECHCEDEARKVVDKMVNQVHVVGEGLIGRTLISGEHQWISDDIPFSFSQISDEDNLGLCQGYTWWQHQFLSGIKTIAVVPMPAFGVAQFGSMQKFLDQVKGATFLMESLSWSPSTKDAQKDAFMYNPQFQLDSSTTREGLPRTKAEPENSRLENAISIDSLKNFAITSNGLNPHVVAMPVNSKSISTVKLIQSDSNLRYNNISENAQQFKSAKQPDSSWASAATCFSNLTNLQRIERGLSCTPNKLRHCLQSEKSSGFLDSYSSIVSTDAELKCTLFDNATPFVQSDVIQEVGTSGSTRACGLHELPNEIWAEIASGEMKPVIKEVNENNGFLESTAFDPVMNDWWGDTALLAGNTSHLSATTMNSVSGQASSEQLSIEDRGLFSESVFEELLGFDGNVGPVMDSTEPLAGFVSGCHLPRYNLQGSLSVCKAQVPPLILPSGSCTSENVVMGSSKEAPVSLQNLSMDDCGSLNTASSKISQVKKPEGEKVVKKRARPGESTRPRPKDRQQIQERVKELREIVPNSAKCSIDALLDRTIKHMLFLQSVTKYAEKIKQADEPNMISKDNGSVLNDNSHGVVLKDNPSGGSNGGATWAYEVAGQTMVCPIIVEDLAPPGQMLVEMLCEERGFFLEIADTIRGFGLTILKGLMELRDGKIMARFLVEANKNVTRMDIFLSLVQLLQQNSRNRSSDQLVKVMNNGIPSFVDHQQSPASIPVWPC

SEQ ID NO: 181806 - protein, 711 aa, Zea Mays
MVNQVHVVGEGLIGRTLISGEHQWISDDIPFSFSQISDEDNLGLCQGYTWWQHQFLSGIKTIAVVPMPAFGVAQFGSMQKVSESLQFLDQVKGATFLMESLSWSPSTKDAQKDAFMYNPQFQLDSSTTREGLPRTKAEPENSRLENAISIDSLKNFAITSNGLNPHVVAMPVNSKSISTVKLIQSDSNLRYNNISENAQQFKSAKQPDSSWASAATCFSNLTNLQRIERGLSCTPNKLRHCLQSEKSSGFLDSYSSIVSTDAELKCTLFDNATPFVQSDVIQEVGTSGSTRACGLHELPNEIWAEIASGEMKPVIKEVNENNGFLESTAFDPVMNDWWGDTALLAGNTSHLSATTMNSVSGQASSEQLSIEDRGLFSESVFEELLGFDGNVGPVMDSTEPLAGFVSGCHLPRYNLQGSLSVCKAQVPPLILPSGSCTSENVVMGSSKEAPVSLQNLSMDDCGSLNTASSKISQVKKPEGEKVVKKRARPGESTRPRPKDRQQIQERVKELREIVPNSAKCSIDALLDRTIKHMLFLQSVTKYAEKIKQADEPNMISKDNGSVLNDNSHGVVLKDNPSGGSNGGATWAYEVAGQTMVCPIIVEDLAPPGQMLVEMLCEERGFFLEIADTIRGFGLTILKGLMELRDGKIMARFLVEANKNVTRMDIFLSLVQLLQQNSRNRSSDQLVKVMNNGIPSFVDHQQSPASIPVWPC

SEQ ID NO: 181807 - protein, 694 aa, Zea Mays
MVNQVHVVGEGLIGRTLISGEHQWISDDIPFSFSQISDEDNLGLCQGYTWWQHQFLSGIKTIAVVPMPAFGVAQFGSMQKVSESLQFLDQVKGATFLMESLSWSPSTKDAQKDAFMYNPQFQLDSSTTREGLPRTKAEPENSRLENAISIDSLKNFAITSNGLNPHVVAMPVNSKSISTVKLIQSDSNLRYNNISENAQQFKSAKQPDSSWASAATCFSNLTNLQRIERGLSCTPNKLRHCLQSEKSSGFLDSYSSIVSTDAELKCTLFDNATPFVQSDVIQEVGTSGSTRACGLHELPNEIWAEIASGEMKPVIKEVNENNGFLESTAFDPVMNDWWGDTALLAGNTSHLSATTMNSVSGQASSEQLSIEDRGLFSESVFEELLGFDGNVGPVMDSTEPLAGFVSGCHLPRYNLQGSLSVCKAQVPPLILPSGSCTSENVVMGSSKEAPVSLQNLSMDDCGSLNTASSKISQVKKPEGEKVVKKRARPGESTRPRPKDRQQIQERVKELREIVPNSAKCSIDALLDRTIKHMLFLQSVTKYAEKIKQADEPNMISKDNGSVLNDNSHGVVLKDNPSGGSNGGATWAYEVAGQTMVCPIIVEDLAPPGQMLVEMLCEERGFFLEIADTIRGFGLTILKGLMELRDGKIMARFLVEANKNVTRMDIFLSLVQLLQQNSRNRSSDQLVKAIFFNER

SEQ ID NO: 181808 - protein, 606 aa, Zea Mays
MPAFGVAQFGSMQKFLDQVKGATFLMESLSWSPSTKDAQKDAFMYNPQFQLDSSTTREGLPRTKAEPENSRLENAISIDSLKNFAITSNGLNPHVVAMPVNSKSISTVKLIQSDSNLRYNNISENAQQFKSAKQPDSSWASAATCFSNLTNLQRIERGLSCTPNKLRHCLQSEKSSGFLDSYSSIVSTDAELKCTLFDNATPFVQSDVIQEVGTSGSTRACGLHELPNEIWAEIASGEMKPVIKEVNENNGFLESTAFDPVMNDWWGDTALLAGNTSHLSATTMNSVSGQASSEQLSIEDRGLFSESVFEELLGFDGNVGPVMDSTEPLAGFVSGCHLPRYNLQGSLSVCKAQVPPLILPSGSCTSENVVMGSSKEAPVSLQNLSMDDCGSLNTASSKISQVKKPEGEKVVKKRARPGESTRPRPKDRQQIQERVKELREIVPNSAKCSIDALLDRTIKHMLFLQSVTKYAEKIKQADEPNMISKDNGSVLNDNSHGVVLKDNPSGGSNGGATWAYEVAGQTMVCPIIVEDLAPPGQMLVEMLCEERGFFLEIADTIRGFGLTILKGLMELRDGKIMARFLVEVKKLLFWDAFSFMVRFSNESRVL

SEQ ID NO: 181809 - protein, 645 aa, Zea Mays
MPAFGVAQFGSMQKVSESLQFLDQVKGATFLMESLSWSPSTKDAQKDAFMYNPQFQLDSSTTREGLPRTKAEPENSRLENAISIDSLKNFAITSNGLNPHVVAMPVNSKSISTVKLIQSDSNLRYNNISENAQQFKSAKQPDSSWASAATCFSNLTNLQRIERGLSCTPNKLRHCLQSEKSSGFLDSYSSIVSTDAELKCTLFDNATPFVQSDVIQEVGTSGSTRACGLHELPNEIWAEIASGEMKPVIKEVNENNGFLESTAFDPVMNDWWGDTALLAGNTSHLSATTMNSVSGQASSEQLSIEDRGLFSESVFEELLGFDGNVGPVMDSTEPLAGFVSGCHLPRYNLQGSLSVCKAQVPPLILPSGSCTSENVVMGSSKEAPVSLQNLSMDDCGSLNTASSKISQVKKPEGEKVVKKRARPGESTRPRPKDRQQIQERVKELREIVPNSAKCSIDALLDRTIKHMLFLQSVTKYAEKIKQADEPNMISKDNGSVLNDNSHGVVLKDNPSGGSNGGATWAYEVAGQTMVCPIIVEDLAPPGQMLVEMLCEERGFFLEIADTIRGFGLTILKGLMELRDGKIMARFLVEANKNVTRMDIFLSLVQLLQQNSRNRSSDQLVKVMNNGIPSFVDHQQSPASIPVWPC

SEQ ID NO: 181810 - protein, 117 aa, Zea Mays
MRLARLARWRLLLLLVLERSEARRKSNRNRCPGSFRKRVKKFRPCNAFPSVLALSVYVAIFFWAGSGGSYRKNQSVTAASRARSPWHDGASHVRREPCHVRATNRGCGFSALIKHIL

SEQ ID NO: 181811 - protein, 58 aa, Zea Mays
MDPKSIFFVLSHFVSMIMVFVLVLQMTWDLDIFLFSPTTMLQFCLPVPPCKCSIATVC

SEQ ID NO: 181812 - protein, 140 aa, Zea Mays
MFAPLLTCHFTSSSCLQGPRSIHTSSLFLLLSALVFAYWATCHSLKRLRSVACLMLQQRLLRQGRGHQPGGDELPGGGLPVRRRLRPQRGAGDVRRLLRRAAVGATVRGGCPPRHSGCSTAACPRMTPGPGCSAQQQLAA

SEQ ID NO: 181813 - protein, 155 aa, Zea Mays
MRCIGRSPRETSIAGWGCPVLSCHIADGISRWHASCSCIISGFCMTGVMVIVKILKNCKKAIPPMIAEGKMIILDMDGRVLNASLDTILGPSNLLDPNASFAQMWQKMIVSPIVSTPVFSKVPEKKKTEWNSKFGGRSSGIHIYLVRLNVSLKLK

SEQ ID NO: 181814 - protein, 291 aa, Zea Mays
MDIEADGRFGNKRVHNRLGPGSGGAPPSTNGKVCNYWRAGRCNRFPCPFLHSELPEAAPPKRPTGPGGNVWRNPNTGGRGGGHHNRWGKGPGGGSGIASHKPPERPCKYFLAGTECSYGERCRYPHSYCISDSIAMLTLLKGHEQGVTGIALPAGSDKLYSGSKDGTVRMWDCQTGQCAGVITMGREVGCMIIEGPWLFVGIPDAVKVWNMQTAAEMSLTGPTGQVYALAVASELLFAATQAGRILAWRFSAATNCFEPAASLDGHKLAVVSLIVGGMRLYSASMDKTIRV

SEQ ID NO: 181815 - protein, 217 aa, Zea Mays
MDIEADGRFGNKRVHNRLGPGSGGAPPSTNGKVCNYWRAGRCNRFPCPFLHSELPEAAPPKRPTGPGGNVWRNPNTGGRGGGHHNRWGKGPGGGSGIASHKPPERPCKYFLAGTECSYGERCRYPHSYCISDSIAMLTLLKGHEQGVTGIALPAGSDKLYSGSKDGTVRMWDCQTGQCAGVITMGREVGCMIIEGPWLFVGIPDAVKAQGTSLLPII

SEQ ID NO: 181816 - protein, 192 aa, Zea Mays
MHSPLPAGRILAWRFSAATNCFEPAASLDGHKLAVVSLIVGGMRLYSASMDKTIRVWDLATLQCIQTLSDHTDVVMSVLCWDQFLLSCSLDQTIKVWAATESGNLEVTYTHKEDQGALALSGMPDAQSKPVLLCSLNDNTVRLYDLPSFSDRGRLFSKKEIRAIQMGPGGLFFTGDGTGELKVWQWVDLAQT

SEQ ID NO: 181817 - protein, 117 aa, Zea Mays
MSVLCWDQFLLSCSLDQTIKVWAATESGNLEVTYTHKEDQGALALSGMPDAQSKPVLLCSLNDNTVRLYDLPSFSDRGRLFSKKEIRAIQMGPGGLFFTGDGTGELKVWQWVDLAQT

SEQ ID NO: 181818 - protein, 80 aa, Zea Mays
MAKGALALSGMPDAQSKPVLLCSLNDNTVRLYDLPSFSDRGRLFSKKEIRAIQMGPGGLFFTGDGTGELKVWQWVDLAQT

SEQ ID NO: 181819 - protein, 701 aa, Zea Mays
MQVSGAETKMVNFGKKLMADQLEEWREYYINYKMMKKKVKQYVQQTQTGGKNRDQVLKEFSRMLDDQIEKIVLFLLQQQGHLARRIENLGEQRVVLMERSDVSQICQIRQAYREVGYDLVKLLRFLDSNATGIRKILKKFDKRFGYKFTDYYVSTRANHPYSQLQQIFKQVGVVAVVGALSRNLSYLQDHQGSLANIYDYPSLILKDPVIEQINHSVQKLTHSTSFLQFLGQHALIVPGDMQSGSDLGDDKDYHFLSLLLNLVNTFLYMVNTYIIVPTADDYSVSLGAAATVCGVIIGSMAVAQIFSSVYFSAWSNRSYFRPLVFSCIMLFLGNLLYALAYDLNSLTVLIAGRLLCGLGSARAVNRRYISDCVPLKTRLQASAGFVSASALGMACGPALAGLLQTKFKIYGLTFNQNTLPGWVMCLAWIAYLFWLWISFKEPGHIATENSVSTQSSDSGRRVSGNLEGGLGEPLLIDAKAGQDEDDEDNDDPEESHTPATSLAAAYRLLTPSVKVQLLIYFMLKFAMEILLSESSVVTTFYFKWTTSTVAIFLAVLGLTVLPVNVIVGSYVTNLFQDRQILVASEIMVLIGIVMSFCFTPHYSVPQYVTSALITFVFAEVLEGVNLSLLSRVMSSRLSRGTYNGGLLSTEAGTLARVAADMTITAAGYLGQGRLLNATLLPSLVICLASIVATFCTYNSLY

SEQ ID NO: 181820 - protein, 106 aa, Zea Mays
MGLGSLCFDYRSSMEPEPGRCRRTDGKKWRCSRDVVPGHKYCERHVHRGRGRSRKPVEAAAPAPSAAAATSLGGGPVHHTGGAPPPHGLGLSPTSVLLAHSAARAT

SEQ ID NO: 181821 - protein, 80 aa, Zea Mays
MAIHLLHAYISITINLQKKKNKCTNRNIQTAVIPSPTKGNASHISSNMKGNQYTANLLPKINILRTYLLQVLNDTYHSLK

SEQ ID NO: 181822 - protein, 304 aa, Zea Mays
MQKKLYSLGGLQAEGIFRINADNSQELYVRDQLNRGIVPDGVDLHCLAGLMKAWFRELPSGVLDSLTPEQVMHCNTEEECSHLASTLPPVEAALLEWAISLMADVVENESYNKMNARNIAMVFAPNMTKMADPLTALIHAVQVMNFLKTLILRTVKEREEAAKVARAFPSSSGSPSDKDEPQTVEQLDMLFVCSSQQNVEYPMVDEAKFDQFLFRVEEALHHETQGSTDGPKNHDSGRGDQRSNSEITPLDTGLTGQNEFSNNSEEGLFDKFKFRKGVGRLCRHPVFQLSRSMKKSDEAEQACV

SEQ ID NO: 181823 - protein, 322 aa, Zea Mays
MQCSYDRRGNSVPTILLTMQKKLYSLGGLQAEGIFRINADNSQELYVRDQLNRGIVPDGVDLHCLAGLMKAWFRELPSGVLDSLTPEQVMHCNTEEECSHLASTLPPVEAALLEWAISLMADVVENESYNKMNARNIAMVFAPNMTKMADPLTALIHAVQVMNFLKTLILRTVKEREEAAKVARAFPSSSGSPSDKDEPQTVEQLDMLFVCSSQQNVEYPMVDEAKFDQFLFRVEEALHHETQGSTDGPKNHDSGRGDQRSNSEITPLDTGLTGQNEFSNNSEEGLFDKFKFRKGVGRLCRHPVFQLSRSMKKSDEAEQACV

SEQ ID NO: 181824 - protein, 250 aa, Zea Mays
MGRGRVELKRIENKINRQVTFSKRRNGLLKKAYELSVLCDAEVALIIFSSRGKLYEFGSAGITKTLERYQHCCYNAQDSNGALSETQSWYQEMSKLRAKFEALQRTQRHLLGEELGPLSVKELQQLEKQLECALSQTQLMMEQVEELRRKERHLGEMNRQLKHKLEAEGCSNYRTLQHAAWPAPGSTMVEHDGATYHVHPTTAQSVAMDCEPTLQIGYPPHHQFLPSEAANNIPRSPPGGENNFMLGWVL

SEQ ID NO: 181825 - protein, 156 aa, Zea Mays
MAKRFCLCHPVELEFILTQIITQDALPKVKDGQSGTIMTQDFRYGGTNGVRAVGGFIEVIRVQDSEVCKESNLRVSGVNKSTRTILYFYLLNHENVLYMSEYLFLTREEYQFSRIWKYPHIIYVSQMMRVPRFSLVSHRSTSLVLLLVKIILLPFL

SEQ ID NO: 181826 - protein, 68 aa, Zea Mays
MILVAIVAELLEEYTALVARVLEQLLHGAPFPRRMRFLMLRSLPFATPPLPPPPPAHALHVGAPSPPL

SEQ ID NO: 181827 - protein, 198 aa, Zea Mays
MAAAPAPLPAPVADWWERVNGSPAWQDGIFWTLAVLYGAIATASFIQVARIQCRVPEYGWTTQKVFQFLNFVVNGARCSIFAFRRQVQQVNPPIFQHVILDLPGLAFFTTYALLALFWAEILYQARGIMTDRLRSGFYIINCVVYALQGFLWLWLWWNPNHSMLVTSKLFIAGLSFFTALGFLIYGGRQDHEYYSMLL

SEQ ID NO: 181828 - protein, 177 aa, Zea Mays
MAAAPAPLPAPVADWWERVNGSPAWQDGIFWTLAVLYGAIATASFIQVARIQCRVPEYGWTTQKVFQFLNFVVNGARCSIFAFRRQVQQVNPPIFQHVILDLPGLAFFTTYALLALFWAEILYQARGIMTDRLRSGFYIINCVVYALQGFLWLWLWWNPNHSMLVTSKLFIAGFSSC

SEQ ID NO: 181829 - protein, 156 aa, Zea Mays
MAAAPAPLPAPVADWWERVNGSPAWQDGIFWTLAVLYGAIATASFIQVARIQCRVPEYGWTTQKVFQFLNFVVNGARCSIFAFRRQVQQVNPPIFQHVILDLPGLAFFTTYALLALFWAEILYQARGIMTDRLRSGFYIINCVVYALQVKHDLSIY

SEQ ID NO: 181830 - protein, 215 aa, Zea Mays
MGLLPSGNRALKLSIHAFLLFHFLVFFLPWQFRKGGSVGSQILTEISILIVTAGVSFCLEINYHFVQVAHTRRCSFAPPQSTAAAETNPTEFILETLEQSDPQSLIQYLAYQDLCVVSECNLEPWRRAAFFEESGETYRRIVTACLKPLEEFTSKIAEALEGFSSDQPELMLQQSRLFSAFDDSQVKLHHVYNDLCCIFGHELSTVICTQYLIRN

SEQ ID NO: 181831 - protein, 629 aa, Zea Mays
MAARQPTREGQRPPMPQARGGGLAAPRGGRGSLPRSSRGRAILGGRDRGHARGSGRGWFNPGRGRGFGQVQAAAPQQRYVPVDLQEASQGTQAEAPEPIKAKKPRTPFCFRCKCLGHLQENCSAILDCCICNKKNNHVPAKCPILKMPRPTASMLGCAKNELTFFRIPEFDLMVEAPAPAPTALISVSGGKLDALAIQLELAKLSRVEWNWEALPHGDDSFLVVFPSEDELLRMADIEYKLKSGIAISISQWERTGDASPAYYLDEIWVHVTGVPHDWRHFLAFWAVGSMIGTTIEVDMLTYRKKGIIRLLVGILDREQLPLTTDIVFHKVGYDITFTPELPDFEPAMPSLVLDASEKEDGDNKEDGAPRVSEFDPSRKKQKNVLGSFGPNSSSDRQDSAPMHVDCSEVHRPMYTTGSGVCVVAPTEKSVIKSSLPPGFKTGKPNGSISLMKPLSPSKERTTDHAKQVSVHVVPGSALVAGTGAAIPAGDLASDNWAPVVPQAGPSLTSMVNGTTMPLQFGSLNMANQTLAACSRPAVERNLVATQQMKTTQGVVQDQSLRGESEPENYAPAPVISYEKAMRRAAARNLDADLGSKTVASSQEMLHSPLTPVQQETEAGRNFKNCIPSM

SEQ ID NO: 181832 - protein, 235 aa, Zea Mays
MQRSGATIAFDFFRNKLLTEVSTSRGNESGKDVAKVKYVPDNKAETVHKLFKFIEDGDLWRWKIPNSKAFSSGLKDLDIEFNVNANNKLFDQLLELDPEHVISHGQATLLEKQRLIDDCLEKSYEISLGCGQFGSCLAVDADAISNLRSELGNQLASKSRDFNLRGIGAVVYKVPELNNDQILKVSLRSLEQEDTTCISQEYGGGGHRNASSFILSVTEFDRWKVGSSRPKVLKT

SEQ ID NO: 181833 - protein, 376 aa, Zea Mays
MACAGAAQKVSAVLYHYPCPDGAFAALAAHLYFSGAAHPVRFFPNTVYDPIRSDSLPLEEIKDVYLLDFVGPPGFVEDIAPKVERITILDHHKTAFESLCVNATLGQNVTKVIDMQRSGATIAFDFFRNKLLTEVSTSRGNESGKDVAKVKYVPDNKAETVHKLFKFIEDGDLWRWKIPNSKAFSSGLKDLDIEFNVNANNKLFDQLLELDPEHVISHGQATLLEKQRLIDDCLEKSYEISLGCGQFGSCLAVDADAISNLRSELGNQLASKSRDFNLRGIGAVVYKVPELNNDQILKVSLRSLEQEDTTCISQEYGGGGHRNASSFILSVTEFDRWKVGSSRPKDMNCRVDEVSRAWPTSVTKRQQVGIFEASIG

SEQ ID NO: 181834 - protein, 345 aa, Zea Mays
MLMLLFWYIPSAMIFFCLFCRSDSLPLEEIKDVYLLDFVGPPGFVEDIAPKVERITILDHHKTAFESLCVNATLGQNVTKVIDMQRSGATIAFDFFRNKLLTEVSTSRGNESGKDVAKVKYVPDNKAETVHKLFKFIEDGDLWRWKIPNSKAFSSGLKDLDIEFNVNANNKLFDQLLELDPEHVISHGQATLLEKQRLIDDCLEKSYEISLGCGQFGSCLAVDADAISNLRSELGNQLASKSRDFNLRGIGAVVYKVPELNNDQILKVSLRSLEQEDTTCISQEYGGGGHRNASSFILSVTEFDRWKVGSSRPKDMNCRVDEVSRAWPTSVTKRQQVGIFEASIG

SEQ ID NO: 181835 - protein, 617 aa, Zea Mays
MSDNGHVSGTNISLPRLLKSSQILDVQSIACGEKHAAIVTKQGKVFSWGEENGGRLGHKTSDSVSDPKIIDSLASTPMKTIALGAKYTCAVSVSGELYEWGEGIHSLGFKNNQCQRSPWFPHKLIRTSDGISVAKIACGQWHTAIVSSTGKLFTYGHGTFGVLGHGDTRSVVQPKEVESLRGLRVKSVACGPWHTAAIVETSGTPKSNAPGGKLFTWGNASGEKLGHTDKKSKLVPTRVESLIDCDFTQVSCGVVFTIGSKDHGQLGNPRSDSACICMVEGPLKTEFVKDISSGNSHVAVLTMNGKVFTWGKGTEGQLGLGDYLDRTFPTLVEALEDKQVDSIVCSSNFTAVICVHGEISSKDTVCSSCRLAFRFTRKKHNCYNCGSMFCNSCSSNKVQRATLAPDKSKRCRVCDACFNELNKTAEHGKMSCESKIQKEPPLTETRTYTPKLSRMLKEANFIMEKMGSIRSPNQRNQESATLNQMQKQRWGQVECPDQFKCARDNISHCLTSKKQPVDIGRIGRMNDPVSQKTAAPLTRTTDKRRKEQDLIEKIMLEEVKQLQAQVTTLAEECRHRSLKVQLYKRKLEETWLIARDEATKCNAAKEIIKILTNQDRP

SEQ ID NO: 181836 - protein, 115 aa, Zea Mays
MGLAMGRLLGWKKEAQIALLGLGGAGKTAILHKLKLGHAITTGPTIGFNSETLEYNGISFRVWDVGGQGEVAHVSAAVLFLHSRRGIRRRQQRPGVDSSSQRSAEHHSGRGPVQE

SEQ ID NO: 181837 - protein, 185 aa, Zea Mays
MGLAMGRLLGWKKEAQIALLGLGGAGKTAILHKLKLGHAITTGPTIGFNSETLEYNGISFRVWDVGGQGEVAHVSAALRPLLRHYLYGVQGVVFVVDSSDREWILRAKDLLNIILDEDQFRNRDLALLVFANKQDRPNVMSAAEIADEFGLPSRLCNRRWHIQSSSAISGEGLHEGMAWLCTNIR

SEQ ID NO: 181838 - protein, 260 aa, Zea Mays
MSIVVASEVATALASRGAVVALESTIICHGMPYPKNLQMAMEVEAIIRDNGAIPATIAVLDGVPHVGLNNEQLKRLAISGRQFQKTARRDIVHVIASGGNGATTVSATMFFAHKVGIPVFVTGGIGGVHRHGEQTMDVSSDLTELGKTPVAVVSAGVKSILDIPRTLEYLETEGVTVAAYRTNEFPAFFTEISGCQVPCRVDSPEECAKIIYANKNLRLGSGILIAVPIPKQHATSGKIIESAIQTALKEAGYSQHLHFW

SEQ ID NO: 181839 - protein, 180 aa, Zea Mays
MDVSSDLTELGKTPVAVVSAGVKSILDIPRTLEYLETEGVTVAAYRTNEFPAFFTEISGCQVPCRVDSPEECAKIIYANKNLRLGSGILIAVPIPKQHATSGKIIESAIQTALKEAGDKRIIGNAITPFMLERVKELTGGSSLEANIALVKNNALIGANIAVALSNLQQREISRMGRSAL

SEQ ID NO: 181840 - protein, 83 aa, Zea Mays
MGTQFGTLNFDLPGALRDQNPMLPDGLTPSRCLSPPPPYYTHVKHPVEVFCSSVCPCFCPLFVVGAVALTAGFGRVKYVVQIS

SEQ ID NO: 181841 - protein, 628 aa, Zea Mays
MGSGASRLLTACACSRPPPAPADDGPCLDDALGHSFCYAASSAAAAAAGHSSSFRHAISGAALSANSSVPVPIYQSSVAGGMPPQYHSAFHTSSSFSSAPLQLSNLSSGPLFLSGPIDRGAQLSGPLDQAVPFSGPLPAKPTKPARPSSSRGFSRRFRKPSFGSLRRSISEKNRPCVVPLRREDGVQWAHGRAGEDRVHVVVSEDQRWLFVGIYDGFNGPEAPDFLVANLYRFLLRELRGIFYKEADPESKRLWQFLADGEDEDSELDFSGSGRFALSLARLKEQRHPLWAHAAAAGDGQSGREWGVKRLTAAPAVRDHRAVLSALARALATTESAYLDMTSQSMGSHPELAVTGACLLVVLLRDDDVYVMNLGDSRAIVAQRRDDEDCLIGSIPVEDIGVGLEIETRIPGYSAIGLEALQLSTDHSTSVEEYVDWPVQQHGFTIGRPFFFWSYEFIYRGIEVQRIRREHPDDDQCVVNDRVKGRLTVTRAFGAGYLKQARFNDGLLEMFRNEYIGDTPYISCTPTLCHHKLSIRDQFLVLSSDGLYQYLSNEEVVLHVENFMERFPEGDPAQSLIEELLSRAAKKAGMDFYELLDIPQGDRRKYHDDVTIMVISLEGRIWKSSGTYV

SEQ ID NO: 181842 - protein, 66 aa, Zea Mays
MLMFSHLTMTELGALRLCLNQISTVHTVEPIHMRAWCIACSAHAWLIRARQVLETMLPYTISLSKG

SEQ ID NO: 181843 - protein, 626 aa, Zea Mays
MGSGASRLLTACACSRPPPAPADDGPCLDDALGHSFCYAASSAAAAAAGHSSSFRHAISGAALSANSSVPVPIYQSSVAGGMPPQYHSAFHTSSSFSSAPLQLSNLSSGPLFLSGPIDRGAQLSGPLDQAVPFSGPLPAKPTKPARPSSSRGFSRRFRKPSFGSLRRSISEKNRPCVVPLRREDGVQWAHGRAGEDRVHVVVSEDQRWLFVGIYDGFNGPEAPDFLVANLYRFLLRELRGIFYKEADPESKRLWQFLADGEDEDSELDFSGSGRFALSLARLKEQRHPLWAHAAAAGDGQSGREWGVKRLTAAPAVRDHRAVLSALARALATTESAYLDMTSQSMGSHPELAVTGACLLVVLLRDDDVYVMNLGDSRAIVAQRRDDEDCLIGSIPVEDIGVGLEIETRIPGYSAIGLEALQLSTDHSTSVEEEVQRIRREHPDDDQCVVNDRVKGRLTVTRAFGAGYLKQARFNDGLLEMFRNEYIGDTPYISCTPTLCHHKLSIRDQFLVLSSDGLYQYLSNEEVVLHVENFMERFPEGDPAQSLIEELLSRAAKKAVSRSISGSSRFLFHEQYSTTNLESAFSGMDFYELLDIPQGDRRKYHDDVTIMVISLEGRIWKSSGTYV

SEQ ID NO: 181844 - protein, 597 aa, Zea Mays
MGSGASRLLTACACSRPPPAPADDGPCLDDALGHSFCYAASSAAAAAAGHSSSFRHAISGAALSANSSVPVPIYQSSVAGGMPPQYHSAFHTSSSFSSAPLQLSNLSSGPLFLSGPIDRGAQLSGPLDQAVPFSGPLPAKPTKPARPSSSRGFSRRFRKPSFGSLRRSISEKNRPCVVPLRREDGVQWAHGRAGEDRVHVVVSEDQRWLFVGIYDGFNGPEAPDFLVANLYRFLLRELRGIFYKEADPESKRLWQFLADGEDEDSELDFSGSGRFALSLARLKEQRHPLWAHAAAAGDGQSGREWGVKRLTAAPAVRDHRAVLSALARALATTESAYLDMTSQSMGSHPELAVTGACLLVVLLRDDDVYVMNLGDSRAIVAQRRDDEDCLIGSIPVEDIGVGLEIETRIPGYSAIGLEALQLSTDHSTSVEEYVDWPVQQHGFTIGRPFFFWSYEFIYRGIEVQRIRREHPDDDQCVVNDRVKGRLTVTRAFGAGYLKQARFNDGLLEMFRNEYIGDTPYISCTPTLCHHKLSIRDQFLVLSSDGLYQYLSNEEVVLHVENFMERFPEGDPAQSLIEELLSRAAKKAERRFETKNTK

SEQ ID NO: 181845 - protein, 159 aa, Zea Mays
MKYRITEGVNLPFRVLPTIKELGRTRMEINVKVKSVFGAKMFALGVVVKVPVPKQTAKTSFQTTSGKAKYNASIDSLVWKIRKFPGQTEATMSAEVELISTMGEKKSWNRPPIQMEFQVPMFTASGLRVRFLKVWEKSGYNTVEWVRYITRAGSYEIRC

SEQ ID NO: 181846 - protein, 461 aa, Zea Mays
MASPASASLKEAVGSLDRDGFVGLLSNLIGETAHLQNDPPTYRPQEERVAQHVVDVLRPVSADTGGGPLLVRKISYAEGRSNVIVEYPGTVPGRVVSFVGMHMDVVPANGSEWDFDPFSLTFDSEDKDKLRGRGTTDCLGHVALVAQLMRRLGEDGLLDKLKTGPLFWIDTADKQPCIGTGGMIPWHLKATGKLFHSGLAHKAINAMEMNMEALKVIQKRFYTDFPPHEKEKVYKFATPSTMKPTKWSYPGGGLNQIPGECTISGDVRLTPFYSTSHVMEKLKEYVEDINERFETVLDTRGPVSKYILPDENLQGRLEITFDGDVMNGVACNLESRGYHALCKATKEIVGHVEPYSITGSLPLIRELQDEGFDVQTAGYGLLKTYHAKNEYCLFSDMAQGFQVFLSIISQLEEEIPGHGHLTSLRGCLSPVENGAISPQCSRGHKTFVLQLGIKSLCYNST

SEQ ID NO: 181847 - protein, 299 aa, Zea Mays
MRRLGEVKPPLKHSVIAVFIANEENSSVTGIGVDGLVKDGLLDKLKTGPLFWIDTADKQPCIGTGGMIPWHLKATGKLFHSGLAHKAINAMEMNMEALKVIQKRFYTDFPPHEKEKVYKFATPSTMKPTKWSYPGGGLNQIPGECTISGDVRLTPFYSTSHVMEKLKEYVEDINERFETVLDTRGPVSKYILPDENLQGRLEITFDGDVMNGVACNLESRGYHALCKATKEIVGHVEPYSITGSLPLIRELQDEGFDVQTAGYGLLKTYHAKNEYCLFSDMAQGFQVFLSIISQLEEEV

SEQ ID NO: 181848 - protein, 233 aa, Zea Mays
MIPWHLKATGKLFHSGLAHKAINAMEMNMEALKVIQKRFYTDFPPHEKEKVYKFATPSTMKPTKWSYPGGGLNQIPGECTISGDVRLTPFYSTSHVMEKLKEYVEDINERFETVLDTRGPVSKYILPDENLQGRLEITFDGDVMNGVACNLESRGYHALCKATKEIVGHVEPYSITGSLPLIRELQDEGFDVQTAGYGLLKTYHAKNEYCLFSDMAQGFQVFLSIISQLEEEV

SEQ ID NO: 181849 - protein, 100 aa, Zea Mays
MSVRGLAWLDTGRAPPDPDDDLYRTAHHGICSRLSNLALASVVFRANLFVHRPGKRYLPQKNAATRSTPYGRVHGFARDVRARCTHACRARPPKEALVLS

SEQ ID NO: 181850 - protein, 209 aa, Zea Mays
MEVPEAPCREIRRRGVPPLPPGPPPPALPQLRARAALRLRRGVRLAVLLLLGLRRRGRPRPQPHRAGAPDRALQVRGHGLLRRARRPLGGDRVRGRQAEGAGLGVAAVLEARGAGGGRGARGGGGRRRGDGAAALELRVRHSGGGQERGRGGAGAVGVALPEPAEGVPAPQVVGERGGAGVSEVPHLQMPGKWLVWGSCGRDHYLLITS

SEQ ID NO: 181851 - protein, 63 aa, Zea Mays
MDWMGLEKIVKKFDLFGIQTHPIPLNPHGLRANRTSPNWVGGAKYISYTESMQVITQGLAPEP

SEQ ID NO: 181852 - protein, 263 aa, Zea Mays
MSSGATSSSSPPLAEAGDGYWEGREEAVARLKAMAARAHWEDELSAERLETNNQVQEDEMLALQAIYGDDMVILEDKAGFRSFQIFVWYPIPNGTKVFLNLHPNGTMVGTDNDESKDGGELIYACSLKHLPPVVLTCLLPCSYPSASAPYFTISAKWLDEPKVSHLCTMFDEIWTELPGQEVVYRWLDWLNSSSWACISLNDNIILIADKTSDVGDARAIARRLLVDHTIPLMQSYNERRSHEIFLKSLHKCRICLSENTEFT

SEQ ID NO: 181853 - protein, 267 aa, Zea Mays
MSSGATSSSSPPLAEAGDGYWEGREEAVARLKAMAARAHWEDELSAERLETNNQVQEDEMLALQAIYGDDMVILEDKAGFRSFQIFVWYPIPNGTKVFLNLHPNGTMVGTDNDESKDGGELIYACSLKHLPPVVLTCLLPCSYPSASAPYFTISAKWLDEPKVSHLCTMFDEIWTELPGQEVVYRWLDWLNSSSWACISLNDNIILIADKTSDVGDARAIARRLLVDHTIPLMQSYNERRSHEIFLKSLHKCRICLSENTAHFHHQF

SEQ ID NO: 181854 - protein, 284 aa, Zea Mays
MKSHCRIHVTEGSLTKLTCPDTTCCSPLPPSVLKSLLGDDCYKRWESFALQKLLDTMPDLVYCPRCNAACLEDDNDAQCPECFFTFCSLCKERRHVGKDCVTPEEKIRILREKHQKYSLPEKQLLKEQREIDELISVCEALRDSKQCPSCKMAISKTEGCNKMICRNCGKFFCYRCNQAIRGYEHFWDGNCVLFEHQNQVQIYGRLEESDDEEHFDDEDLEETEPELVWGCPCPVCGRWNGKLDTNNHILCMGCRGHYCALCRRRVMKSSEHYGPRGCQQHTDP

SEQ ID NO: 181855 - protein, 534 aa, Zea Mays
MSSGATSSSSPPLAEAGDGYWEGREEAVARLKAMAARAHWEDELSAERLETNNQVQEDEMLALQAIYGDDMVILEDKAGFRSFQIFVWYPIPNGTKVFLNLHPNGTMVGTDNDESKDGGELIYACSLKHLPPVVLTCLLPCSYPSASAPYFTISAKWLDEPKVSHLCTMFDEIWTELPGQEVVYRWLDWLNSSSWACISLNDNIILIADKTSDVGDARAIARRLLVDHTIPLMQSYNERRSHEIFLKSLHKCRICLSENTEGSLTKLTCPDTTCCSPLPPSVLKSLLGDDCYKRWESFALQKLLDTMPDLVYCPRCNAACLEDDNDAQCPECFFTFCSLCKERRHVGKDCVTPEEKIRILREKHQKYSLPEKQLLKEQREIDELISVCEALRDSKQCPSCKMAISKTEGCNKMICRNCGKFFCYRCNQAIRGYEHFWDGNCVLFEHQNQVQIYGRLEESDDEEHFDDEDLEETEPELVWGCPCPVCGRWNGKLDTNNHILCMGCRGHYCALCRRRVMKSSEHYGPRGCQQHTDP

SEQ ID NO: 181856 - protein, 60 aa, Zea Mays
MVGGTTGRLSSATPAAELLDTNNHILCMGCRGHYCALCRRRVMKSSEHYGPRGCQQHTDP

SEQ ID NO: 181857 - protein, 511 aa, Zea Mays
MWKIITCTVLTITTVEPPKHGEGESAAFDVLLGKTTIFPPNILLDHHVPVYRAIQKPGEFVVTFPRAYHSGFSHGFNCGEAVNFATGEWFPLGAVASQHYALLKRIPVLPYEELLCKEATFCANEFSLFEHGNVTLTGGTHIQSYMKGPFVQLMRFQHRVRWLLVKMGARTCYKADIDATVLCGICKRDCYVAHIMCNCRADAICLCHEEEISKCSCNCDRVVFVRKDIFELEEISKKFEEIGILDEVGKQMSQNDGYNMHPYLSNGIDHNAKYFPYCKILIDTSPELRTFSEVDVLGYDLNKPYPTLSTITSAHGPHEYSTQSDECTSSKQRTYSSSCPENGTLSVYPLCTSDQAFSTDKLAAQDTDDSDCEVFRVKRRSSIVMEKRCSEDLTITLTENQALRRLKKACSDDRQENATESHCLDFISGNTDNFINRSKQKMNVDQLDAKNVEDEVAFGQKSIGCSYLSPSVDLGPKRLKIRGPSFPSTVSEVEISYRFQEDIDLASQHTQ

SEQ ID NO: 181858 - protein, 390 aa, Zea Mays
MELEEILTVAELYAASSQSCSSNPMLYIGMLFSMFAWHVEDHYLYSINYHHCGAPKTWYGIPGSAASDFEKVVREHVYDHEILSGEGESAAFDVLLGKTTIFPPNILLDHHVPVYRAIQKPGEFVVTFPRAYHSGFSHGFNCGEAVNFATGEWFPLGAVASQHYALLKRIPVLPYEELLCKEATFCANEFSLFEHGNVTLTGGTHIQSYMKGPFVQLMRFQHRVRWLLVKMGARTCYKADIDATVLCGICKRDCYVAHIMCNCRADAICLCHEEEISKCSCNCDRVVFVRKDIFELEEISKKFEEIGILDEVGKQMSQNDGYNMHPYLSNGIDHNAKYFPYCKILIDTSPELRTFSEVDVLGYDLNKPYPTLSTITSAHGPHEYSTQSDV

SEQ ID NO: 181859 - protein, 628 aa, Zea Mays
MAGKDGVSLKSVSYGARLRRSCDASLREAGSMRDPFLKHRVKKFDLSSLDWIDEIPDCPVFSPSTQEFEDPLVYLSKIAPVAAKYGICKIISPVSASVPAGTVLMKELGGIKFTTRVQPLRLAEWTKDDKFAFFMSGRKYTFREFEKMANKEFVRRYSSAACLPSRYMEEEFWHEIAFGKMESVEYACDIDGSAFSSSSHDQLGRSKWNLKRFSRLPNSTLRLLRAAVPGITDPMLYIGMLFSMFAWHVEDHYLYSINYHHCGAPKTWYGIPGSAASDFEKVVREHVYDHEILSGEGESAAFDVLLGKTTIFPPNILLDHHVPVYRAIQKPGEFVVTFPRAYHSGFSHGFNCGEAVNFATGEWFPLGAVASQHYALLKRIPVLPYEELLCKEATFCANEFSLFEHGNVTLTGGTHIQSYMKGPFVQLMRFQHRVRWLLVKMGARTCYKADIDATVLCGICKRDCYVAHIMCNCRADAICLCHGKVVLHLLQITDIALFMIILFTCLPCFEEEEISKCSCNCDRVVFVRKDIFELEEISKKFEEIGILDEVGKQMSQNDGYNMHPYLSNGIDHNAKYFPYCKILIDTSPELRTFSEVDVLGYDLNKPYPTLSTITSAHGPHEYSTQSDV

SEQ ID NO: 181860 - protein, 382 aa, Zea Mays
MGVCSCAVPFSSGETSRFVNAPFRSKRRKRSRSLREGETARRRGSGMGKGAELWDDSALVDAFDRAMFSMKEMHCKSKRATPSEDGKTELAAATAEEEPITAGAADVCGEEDANCDSTHCDLSELQQQPYEDRQTIEHAPLQETDPGKETHVSEAKTLSTDASTNAGGNWSSSQQTGQYNELLRQYYELEEKSRNILEQLQQTNYSNYQASGYASTAQQQQVPVYSATVPDPYSSTTQSSCCNWNVPLVSVSCCSAGQPSGGSACTPPTAGCSVSLTCDQCPGATTAYPSVSNFMQVPTMVSTNDDQVDKAAMMTAEAAFNFMRSTISGQPSTQGSKSDTGKEESTNMGMNPNLDSDLAALLNSWYAAGFYTCSIMNLKCLF

SEQ ID NO: 181861 - protein, 312 aa, Zea Mays
MAAAAAAKAAAAAVSAGAAFVLSSERAHADGGGSTFRFPGFYSSAPSPAPAPAPAPAAPPPQESNAPEEAPKVSTQHPRTSAAGFDPAPLERGVEAINKLKQASDPKKLFEFMKKQEETHQQEIAAKKLELQKALAEIELEQKRVDFEERKKLDQQRAKIKSQMAQYEDELKRKRLQAEHEAQRLRNQELVKMQEESGIRLEQIRRATEEQIQEQRRQTERHRADLEQATISKKAMAEAEGRILVTRQTEDVKRRLILEEINADREKWIQVINTTFEHIGGGLRTILTDQNKLVVAVGGVTALAAGIYTTSC

SEQ ID NO: 181862 - protein, 266 aa, Zea Mays
MHHDPNPFDEGADENPFSNGGGGARGGGVKPQYGFRPTEPAGFGGGRGDATTDIPLDTMNDSKGKAKELSQWESDLRRRESDIRRREEALKSAGVPMEDKNWPPFFPIIHHDIANEIPANAQKLQYLAFASWLGIVLCLFWNFIAVIVCWIRGGDSKLFFLATIYGMLGIPLSYLMWYRPLYRAMRTDSAFSFGWFFLCYLLHIGFCIFAAIAPAVVFRGKSLTGILAAIDTFSDHAIVGIFYFVGFALFCLETLVSIWVLQIHML

SEQ ID NO: 181863 - protein, 234 aa, Zea Mays
MHHDPNPFDEGADENPFSNGGGGARGGGVKPQYGFRPTEPAGFGGGRGDATTDIPLDTMNDSKGKAKELSQWESDLRRRESDIRRREEALKSAGVPMEDKNWPPFFPIIHHDIANEIPANAQKLQYLAFASWLGIVLCLFWNFIAVIVCWIRGGDSKLFFLATIYGMLGIPLSYLMWYRPLYRAMRGILAAIDTFSDHAIVGIFYFVGFALFCLETLVSIWVLQKVYMYFRGHK

SEQ ID NO: 181864 - protein, 78 aa, Zea Mays
MPCSISTHFSREHALPSRLLLVTRCSRLLDLVSHRSELGSCSWGASSYVRRWSVRGGGGGVLMEVVPLMDSKGRKLDG

SEQ ID NO: 181865 - protein, 652 aa, Zea Mays
MEAAAMDFHTLSRRELQALCKRNGLRANMTNAAMAEALQGLTSVDGIDEIGTSLCLPTPGRSAMKSAAKMVAVAVEEQQHGSPLPRGRRVSVKPPEAIRMEVEEGEDEMKEIVKTPGVALRSTRRGTRATPAPLPTPVAACSTRATAGRTAARKTRDVAPTPATRRSQRTASRKAAGAVEVDRRAEDVSEEKTSDMTIALDQEAEVLAAASKEEKVQQDEKKDVKCDDPKEEDKVQQEEPKDVKIDDPEQEEVANKDEESEEGDEDVSVKSCNDPKVDEVVVVIGEQSTKSHDGIVKEQEPISVEKSAHLTVMEDSTILGVIEDLAELSPAREMPDEIIPVTEDNEVAINEETIKEDDFADAIQTDPTPKEINLTAAGEDKIIEGKEGADDKMPQAAETSEHDEDTEFKEGAADEVLQAELADNETSDGEDDRTEVREGAAAKTLQGELTDDETSEDDLHEDEEWASDDEETASSDESDEGTESNEGSYIADAVQMLQGTGIVEVADEDASTEDDFSGDLPPEFDNIMIFRDAETDSDSVPPALEENQAVAFATKAAESLGDSAMNAEHYEGPEEADATEKTMKVVEDIVKSLDESSFKEGESKETQKKQPQDYDIMSLIKLRSTYKKCLIARKEGKRPPLEEVDGNACIDH

SEQ ID NO: 181866 - protein, 245 aa, Zea Mays
MAMPDADALGRRSSLSLFLSLHILPLSIFVLLRPAFRRDTHRTFPSGRYPPRASPKSYATSLISPPAPRAPDSQRARRAVRQLPWPSLGACACGSWLLASCCSSYYLFRAVIDNPAAGAELGVRETQGHARDEHVRWDGEGWVRRRRWADGRGGAVAGPQAAAAVDARPARALRRGRHQARRGRQGDAQVRAAADGNERAHLVPLEESPPEIQAWKADQERHGFGRRQRGIRGAGHQFLHTSTSS

SEQ ID NO: 181867 - protein, 227 aa, Zea Mays
MKYQFPQIKGSQLAEVMTTASSDAIDLISSLCSWDPSKRPKAAEVLQHTFFQGCTCVPLPVRPKASSLPRTPPCVGSKGNSENSVARRFSTGTLSTMKSHSNASAKLNGLSKTGVQRKLNLDRQPSQKGMKPTETSNKLTTNRVPARNSPGNPVLRHSRSLPETGRGAIQKVSSITEKLSQMSVTSRTRSAVKPAAPMMKAGHGKSDFLGKSDDIPPAKRLTRKLVS

SEQ ID NO: 181868 - protein, 431 aa, Zea Mays
MVAVKKMKKKYYSFEECMGLREVKSLRRMNHPNIVKLKEVIRENDILYFIMEYMECNLYQLMKDKVKPFSESEVRNWCFQIFQALAYMHQRGYFHRDLKPENLLVSKDVIKLADFGLAREVSSLPPYTEYVSTRWYRAPEVLLQSSAYDSAVDMWAMGAIMAELLTLHPLFPGTSEADEIHKICNVIGSPDEQSWPQGLSLAEAMKYQFPQIKGSQLAEVMTTASSDAIDLISSLCSWDPSKRPKAAEVLQHTFFQGCTCVPLPVRPKASSLPRTPPCVGSKGNSENSVARRFSTGTLSTMKSHSNASAKLNGLSKTGVQRKLNLDRQPSQKGMKPTETSNKLTTNRVPARNSPGNPVLRHSRSLPETGRGAIQKVSSITEKLSQMSVTSRTRSAVKPAAPMMKAGHGKSDFLGKSDDIPPAKRLTRKLVS

SEQ ID NO: 181869 - protein, 343 aa, Zea Mays
MPLLEILHAPAPEIPPSPPRTFHRRYVVIPSTGHSTICFQLLGVQVVHKHKQGALPYMARPAEAGGPSNDGAPRPAQAGGPSIHESTQAALPLPPRKAVHSDYPQIVPAPRRPSIYGEILSLRASSADPQTASATTAHFHPRFVPPPPQLLPLRPIAGGAILSSKSSPSEPDLCSHPCRRARAAHFVLKSFPALNVVDGSPKGAQSRGEIHAWRTAEEPVVEPRPRRTAKGGRPGTRRAGMHGCWGQTAPAPAPDPRPRSRPCPEAEQFAARAHAEEQLGKLREENGSLKRSLESCKAVSANSNGTLERSPRVQRNAVQENSLNLTKQNGYGGGSSHSTQANG

SEQ ID NO: 181870 - protein, 298 aa, Zea Mays
MAHAALLHCSQSSRSLAACRRGSHYRAPSHVPRHSRRLRRAVVSLRPMASSTAQAPATAPPGLKEGIAGLYDESSGLWENIWGDHMHHGFYDSSEAASMADHRRAQIRMIEEALAFAGVPASDDPEKTPKTIVDVGCGIGGSSRYLAKKYGAQCTGITLSPVQAERGNALAAAQGLSDQVTLQVADALEQPFPDGQFDLVWSMESGEHLPDWCSPSDYVNIAKSLSLEDIKTADWSENVAPFWPAVIKSALTWKGFTSLLTTGWKTIRGAMVMPLMIQGYKKGLIKFTIITCRKPGAA

SEQ ID NO: 181871 - protein, 145 aa, Zea Mays
MLQLQCNDRGELARVAAPGGTIIIVTWCHRNLDPSETSLKPDELSLLRRICDAYYLPDWCSPSDYVNIAKSLSLEDIKTADWSENVAPFWPAVIKSALTWKGFTSLLTTGWKTIRGAMVMPLMIQGYKKGLIKFTIITCRKPGAA

SEQ ID NO: 181872 - protein, 449 aa, Zea Mays
MRAFSKEGDIKETEATWHWLLRSGCELPAQAYICRMELYARTGEPMKSLEMFKEMKNRNIPPNVASYHKIIEIMTKAREIEIAEKLMDEFVESDMKHLMPAFLDLMYLYLDLDMHEKLEHTFTKCLGRCRPNRILYTIYMESLVRIGNVSKAEEIFDEMHKNGMIGTNAKSANILLRGYLLAENYQKAESIYELMCKKKYDIPVESLEKLQSGLLSSKKVVKPPKPVSMKLDEEQREILIGLLLGGTQIESHAQKGVYIVNFKFQEDSHAHSALRVHIHERFFEWLPSACRSLNRESEIPYRFSTIPHAHFGFFADQFFQKGQPVLPKLVHRWLSPRVLAYWFMSGGVRLQSGDIVLKVSGGDTGGVERIVKSLQAQQSLACKVKRKGRFFWIGFQGCNADSFWKIVETYVLDSFASSTEESHNVGSDGLQDYTYYESDTQRHGRESEE

SEQ ID NO: 181873 - protein, 253 aa, Zea Mays
MAARERDGEGRRAHLTMVGVQLVYAGYHVIAKQALNVGVNRVVFCVFRDLLALSVLAPLAFFQHRISSVQARPPPLTRRLVGSFFLLGLTGVFGNQLLFLLGLSYTNPTYAAAIQPSIPAFTFILALIMGTETVSLISNEGRAKIGGTVVCVLGAVLMVLYRGPAVFGSSELELDVYSHGVIADMTQPEPAGPLISLFMAFGLENWHIGVLCLIGNCLCSNFGEISFKSVTDCILILLWSGFNGHFWGFCNKR

SEQ ID NO: 181874 - protein, 230 aa, Zea Mays
MPRLLLPSPSPRPCLNDSVRRPPLSKYRFFLPRTRRRPSPRLGVRMAEMTKVGSAGEPAEVGVSMESDPIVGGEAPSRPGWEASRWAPVEAALNRMMLNHERPAPALRSGPGMPSSHAQSIFYAATILALSLYYWLGTNYLTMILGPATLSVAAYLSWLRVSRRLHTLNQVMAGAVVGSVVGALWFVLWHSLVQEAFASSLLVRIAVVLGSSAFCVGFVIYMIRHWLKDE

SEQ ID NO: 181875 - protein, 75 aa, Zea Mays
MFILATGVSAPSYTKPGHGGSCCRICRRCSMVCALAFACAGGFCFFSAGQDCSRSWIISILCWLCHLHDSSLAQG

SEQ ID NO: 181876 - protein, 228 aa, Zea Mays
MRLNKVEVNLIRLLEAAPRQQNQAKLVYYVTTARELLEQLGAETTPEGISSISKAKLSEYSEKIEALASRLAASVPENEKPIIESKDEISYEEAKPESPISLSSGLRRRSTHQENKEDIGAPIKLDAEAQAHIEKHRKLQEDLTDEMVELARQLKESSLMMNQSVQETEKILDSTERAVEHSLASTGHATSRAAEVYSLASKTTCFQWLLMFVMTCMFVMVVLLIRIT

SEQ ID NO: 181877 - protein, 268 aa, Zea Mays
MNVENDKLLLAARKVRRATRTSFVISLVSDDFSRSSSTYVGKLKPNFLGTKFTIFDSQPPPDAVALPNNRPSKRQSKQVSPRLPLGNYNVATVTYELTVLRNRGPRRMQCTMHSIPAECIQEGGKAPTPTGTVQSLDEPVPTLPSTTKGKEVAVQFSSTSLSADLSGPVSGNEAPLVLKNKAPRWHEQLQCWCLNFRGRVTVASVKNFQLVASVDPSLNVPAAEQEKVILQFGKIGKDIFTMDYRYPLSAFQAFAICLTSFDTKPACE

SEQ ID NO: 181878 - protein, 86 aa, Zea Mays
MEDLAVEAFKTLLVRTKARIVEGDAGKVICREADRLKPAAVILGTRGRGLIQSVLQGSVSEYCFHNCKAAPIIIVPGKEAGEQSVL

SEQ ID NO: 181879 - protein, 512 aa, Zea Mays
MISSQAAGLVIVDVPSSRIVIIEGIYALSEKLRPVIDLRVSVTGGVHFDLVKRVLRDIQRAGQEPEEIIHQISETVYPMYKAFIEPDLETAHIKIINKFNPFSGFQNPMYILKSPRSLGPEKIKAVLGDDHTESNEETYDIYLLPPGEDPEACQSYLRMRNREGKYNLMFEEWVTDNSFIISPRITFEVSVRLLGGLMALGYTIAAILKRSTRVFSDGKATVKIDWLEQLNRQYIQVQGRDRLYVKSVADQLGLDGSYIPRTYIEQIQLEKLINDVMALPEDLKTKLSIDDELVSSPKEAFSRVSADRRNKLMKSGLSQSYSTHGDKNIVKLSKLTETNRRFGGGRALEPPAINQGAITQLSEQISTLNERMDEFTSRVEELNSKFTVKKHLPSQQNLALPNDACNGSTPTNLFVSHLGNGTLIPHSSSSNQLSKDSPMIEEIMNITRGQRQVIHQLDNLTNLLHEHLVLTRQTNNTASRNRVLDSDTLICPLICLTVASIGYFMFKGLSRG

SEQ ID NO: 181880 - protein, 315 aa, Zea Mays
MALGYTIAAILKRSTRVFSDGKATVKIDWLEQLNRQYIQVQGRDRLYVKSVADQLGLDGSYIPRTYIEQIQLEKLINDVMALPEDLKTKLSIDDELVSSPKEAFSRVSADRRNKLMKSGLSQSYSTHGDKNIVKLSKLTETNRRFGGGRALEPPAINQGAITQLSEQISTLNERMDEFTSRVEELNSKFTVKKHLPSQQNLALPNDACNGSTPTNLFVSHLGNGTLIPHSSSSNQLSKDSPMIEEIMNITRGQRQVIHQLDNLTNLLHEHLVLTRQTNNTASRNRVLDSDTLICPLICLTVASIGYFMFKGLSRG

SEQ ID NO: 181881 - protein, 282 aa, Zea Mays
MPFLSQVQGRDRLYVKSVADQLGLDGSYIPRTYIEQIQLEKLINDVMALPEDLKTKLSIDDELVSSPKEAFSRVSADRRNKLMKSGLSQSYSTHGDKNIVKLSKLTETNRRFGGGRALEPPAINQGAITQLSEQISTLNERMDEFTSRVEELNSKFTVKKHLPSQQNLALPNDACNGSTPTNLFVSHLGNGTLIPHSSSSNQLSKDSPMIEEIMNITRGQRQVIHQLDNLTNLLHEHLVLTRQTNNTASRNRVLDSDTLICPLICLTVASIGYFMFKGLSRG

SEQ ID NO: 181882 - protein, 108 aa, Zea Mays
MAIVVFEPWKMVWKSWATPKCKFFIWLAINNKQVLDCRHDEKSGLDFPKCCVLCDQEEETVQHIISSSLFARQFWHSILSRIGFSSLIPKGKKKGFNDSAVILGAWSL

SEQ ID NO: 181883 - protein, 1315 aa, Zea Mays
MLMDPPVMQMDCKLKNDVDKTSSIDYDRKVTISHDDYGWAGSDVKPKDDIVCNPVEGAELRNKNGDSSYSNVKLQLNSSAGNNNGLQTDDDNFTKQYFGKKDMHHRQEEMHPSSNTVSLPTSCRLNGDATPSEEEKIAEDRVKVDGNVDAVIKEVETDLVGCHAHQKEFQCTLQDLSEIACSIDLVHNTSSPQGENKKPVSPLNGMGHYVDNNSCNGDTNYKGEELNMGDAGDEDHAIALWVKWRGKWQTGIRCCRVDCPLPTLRAKPTHDRKSYVVVFFPRTKTYSWVDMLLVLPIEECPLPLVNGTHRKWRKLVKDLNIPRRFNMQNLAVFMINLIDELHIEELRQSLHGNKLKELRNASVQPELIPEWNRWKQELIKQYFSLHPAGNVGNFEKNNCYDDPALDQQGSRKRPKLEVRRGEIQISHMGEADYRTPTEDPNQNNLPGNSVMHENVGALGSTDQNNSVTLPGSFGTNENTISSSANAALQNARLDLDSFKSSRQCSAHIEAKGRQCGRWANDGDIYCCVHQSMHFLDHSSREDKALTIEAPLCSGMTNMGRKCKHRAQYGSTFCKKHRLQTNLDAMHPENLLDPSEVLHMGEEPPNKWVEEISKSQAMYSIDLETDKKVQDAVKVKLMTIVSIENSGEKGAMEKADMCVASTSITNTDDTSLCIGIHSHDSIVECQDYAMQHTLYCEKHLPRFLKRARNGKSRLVSKDIFVNLLKGCTSRKDKICLHQACEFLYWFLRNNLSHQHTSLASEHMPQILAEVSKNPDVGEFLLKLISTEREKLANIWGFDTNRSKQIYSENKEGSLVLHKEGTNLSSGPKCKICAHQFSDDEALGLHWTTVHKKEARWLFREGTNGLSLYDSHNIEDANGSQKFICRLCGLKFDLQPDLGRHHKVAHMDSDVVGHSSLGRGKYQLNRGRHYYSAFKKSLRPTSTLKKRSSSGIEKNFKFQSSALTSQIIQSETSSFGKLQDFQCSDVAQTLFSKIQKTRPHPSNLDILSVARTVCCKTSLAAALEVKYGSLPENIFVKAAKLCSDNGIQIDWHQEVFICPKGCKSRYNSNALLPMQLTAVDFPEAPSVDPLNDDEMWAMEEYHYVLDSKHFGWKPKNESVVLYEDISFGREKVPIVCVIDMDAKDSLGMKPEELLSHGSSVPWQGFHYITKRLMDSSLINSENSMPGCACSHPECSPEKCGHVSLFDGVYASLVDINGTPIHGRFAYDENSKIILQEGYPIYECNSSCTCDSSCRNKVLQKGLLVKLELFRTENKGWAIRAAEPIPQGTFVCEYIGEVVKADKTMKNAERLIGKDFGL

SEQ ID NO: 181884 - protein, 1337 aa, Zea Mays
MLMDPPVMQMDCKLKNDVDKTSSIDYDRKVTISHDDYGWAGSDVKPKDDIVCNPVEGAELRNKNGDSSYSNVKLQLNSSAGNNNGLQTDDDNFTKQYFGKKDMHHRQEEMHPSSNTVSLPTSCRLNGDATPSEEEKIAEDRVKVDGNVDAVIKEVETDLVGCHAHQKEFQCTLQDLSEIACSIDLVHNTSSPQGENKKPVSPLNGMGHYVDNNSCNGDTNYKGEELNMGDAGDEDHAIALWVKWRGKWQTGIRCCRVDCPLPTLRAKPTHDRKSYVVVFFPRTKTYSWVDMLLVLPIEECPLPLVNGTHRKWRKLVKDLNIPRRFNMQNLAVFMINLIDELHIEELRQSLHGNKLKELRNASVQPELIPEWNRWKQELIKQYFSLHPAGNVGNFEKNNCYDDPALDQQGSRKRPKLEVRRGEIQISHMGEADYRTPTEDPNQNNLPGNSVMHENVGALGSTDQNNSVTLPGSFGTNENTISSSANAALQNARLDLDSFKSSRQCSAHIEAKGRQCGRWANDGDIYCCVHQSMHFLDHSSREDKALTIEAPLCSGMTNMGRKCKHRAQYGSTFCKKHRLQTNLDAMHPENLLDPSEVLHMGEEPPNKWVEEISKSQAMYSIDLETDKKVQDAVKVKLMTIVSIENSGEKGAMEKADMCVASTSITNTDDTSLCIGIHSHDSIVECQDYAMQHTLYCEKHLPRFLKRARNGKSRLVSKDIFVNLLKGCTSRKDKICLHQACEFLYWFLRNNLSHQHTSLASEHMPQILAEVSKNPDVGEFLLKLISTEREKLANIWGFDTNRSKQIYSENKEGSLVLHKEGTNLSSGPKCKICAHQFSDDEALGLHWTTVHKKEARWLFREGTNGLSLYDSHNIEDANGSQKFICRLCGLKFDLQPDLGRHHKVAHMDSDVVGHSSLGRGKYQLNRGRHYYSAFKKSLRPTSTLKKRSSSGIEKNFKFQSSALTSQIIQSETSSFGKLQDFQCSDVAQTLFSKIQKTRPHPSNLDILSVARTVCCKTSLAAALEVKYGSLPENIFVKAAKLCSDNGIQIDWHQEVFICPKGCKSRYNSNALLPMQLTAVDFPEAPSVDPLNDDEMWAMEEYHYVLDSKHFGWKPKNESVVLYEDISFGREKVPIVCVIDMDAKDSLGMKPEELLSHGSSVPWQGFHYITKRLMDSSLINSENSMPGCACSHPECSPEKCGHVSLFDGVYASLVDINGTPIHGRFAYDENSKIILQEGYPIYECNSSCTCDSSCRNKVLQKGLLVKLELFRTENKGWAIRAAEPIPQGTFVCEYIGEVVKADKTMKNAERSSFYTDGMHLIEFSSHTIQCVIKEWVQLLV

SEQ ID NO: 181885 - protein, 1066 aa, Zea Mays
MLLVLPIEECPLPLVNGTHRKWRKLVKDLNIPRRFNMQNLAVFMINLIDELHIEELRQSLHGNKLKELRNASVQPELIPEWNRWKQELIKQYFSLHPAGNVGNFEKNNCYDDPALDQQGSRKRPKLEVRRGEIQISHMGEADYRTPTEDPNQNNLPGNSVMHENVGALGSTDQNNSVTLPGSFGTNENTISSSANAALQNARLDLDSFKSSRQCSAHIEAKGRQCGRWANDGDIYCCVHQSMHFLDHSSREDKALTIEAPLCSGMTNMGRKCKHRAQYGSTFCKKHRLQTNLDAMHPENLLDPSEVLHMGEEPPNKWVEEISKSQAMYSIDLETDKKVQDAVKVKLMTIVSIENSGEKGAMEKADMCVASTSITNTDDTSLCIGIHSHDSIVECQDYAMQHTLYCEKHLPRFLKRARNGKSRLVSKDIFVNLLKGCTSRKDKICLHQACEFLYWFLRNNLSHQHTSLASEHMPQILAEVSKNPDVGEFLLKLISTEREKLANIWGFDTNRSKQIYSENKEGSLVLHKEGTNLSSGPKCKICAHQFSDDEALGLHWTTVHKKEARWLFREGTNGLSLYDSHNIEDANGSQKFICRLCGLKFDLQPDLGRHHKVAHMDSDVVGHSSLGRGKYQLNRGRHYYSAFKKSLRPTSTLKKRSSSGIEKNFKFQSSALTSQIIQSETSSFGKLQDFQCSDVAQTLFSKIQKTRPHPSNLDILSVARTVCCKTSLAAALEVKYGSLPENIFVKAAKLCSDNGIQIDWHQEVFICPKGCKSRYNSNALLPMQLTAVDFPEAPSVDPLNDDEMWAMEEYHYVLDSKHFGWKPKNESVVLYEDISFGREKVPIVCVIDMDAKDSLGMKPEELLSHGSSVPWQGFHYITKRLMDSSLINSENSMPGCACSHPECSPEKCGHVSLFDGVYASLVDINGTPIHGRFAYDENSKIILQEGYPIYECNSSCTCDSSCRNKVLQKGLLVKLELFRTENKGWAIRAAEPIPQGTFVCEYIGEVVKADKTMKNAESVSSKSGCNYLFDIASQIDRERLRTVGAIEYLIDATRSGNVSRYINHRLP

SEQ ID NO: 181886 - protein, 1418 aa, Zea Mays
MLMDPPVMQMDCKLKNDVDKTSSIDYDRKVTISHDDYGWAGSDVKPKDDIVCNPVEGAELRNKNGDSSYSNVKLQLNSSAGNNNGLQTDDDNFTKQYFGKKDMHHRQEEMHPSSNTVSLPTSCRLNGDATPSEEEKIAEDRVKVDGNVDAVIKEVETDLVGCHAHQKEFQCTLQDLSEIACSIDLVHNTSSPQGENKKPVSPLNGMGHYVDNNSCNGDTNYKGEELNMGDAGDEDHAIALWVKWRGKWQTGIRCCRVDCPLPTLRAKPTHDRKSYVVVFFPRTKTYSWVDMLLVLPIEECPLPLVNGTHRKWRKLVKDLNIPRRFNMQNLAVFMINLIDELHIEELRQSLHGNKLKELRNASVQPELIPEWNRWKQELIKQYFSLHPAGNVGNFEKNNCYDDPALDQQGSRKRPKLEVRRGEIQISHMGEADYRTPTEDPNQNNLPGNSVMHENVGALGSTDQNNSVTLPGSFGTNENTISSSANAALQNARLDLDSFKSSRQCSAHIEAKGRQCGRWANDGDIYCCVHQSMHFLDHSSREDKALTIEAPLCSGMTNMGRKCKHRAQYGSTFCKKHRLQTNLDAMHPENLLDPSEVLHMGEEPPNKWVEEISKSQAMYSIDLETDKKVQDAVKVKLMTIVSIENSGEKGAMEKADMCVASTSITNTDDTSLCIGIHSHDSIVECQDYAMQHTLYCEKHLPRFLKRARNGKSRLVSKDIFVNLLKGCTSRKDKICLHQACEFLYWFLRNNLSHQHTSLASEHMPQILAEVSKNPDVGEFLLKLISTEREKLANIWGFDTNRSKQIYSENKEGSLVLHKEGTNLSSGPKCKICAHQFSDDEALGLHWTTVHKKEARWLFREGTNGLSLYDSHNIEDANGSQKFICRLCGLKFDLQPDLGRHHKVAHMDSDVVGHSSLGRGKYQLNRGRHYYSAFKKSLRPTSTLKKRSSSGIEKNFKFQSSALTSQIIQSETSSFGKLQDFQCSDVAQTLFSKIQKTRPHPSNLDILSVARTVCCKTSLAAALEVKYGSLPENIFVKAAKLCSDNGIQIDWHQEVFICPKGCKSRYNSNALLPMQLTAVDFPEAPSVDPLNDDEMWAMEEYHYVLDSKHFGWKPKNESVVLYEDISFGREKVPIVCVIDMDAKDSLGMKPEELLSHGSSVPWQGFHYITKRLMDSSLINSENSMPGCACSHPECSPEKCGHVSLFDGVYASLVDINGTPIHGRFAYDENSKIILQEGYPIYECNSSCTCDSSCRNKVLQKGLLVKLELFRTENKGWAIRAAEPIPQGTFVCEYIGEVVKADKTMKNAESVSSKSGCNYLFDIASQIDRERLRTVGAIEYLIDATRSGNVSRYINHSCSPNLSTRLVLVESKDCQLAHIGLFANQDIAVGEELAYDYRQKLVAGDGCFCHCGGTNCRGRVY

SEQ ID NO: 181887 - protein, 1142 aa, Zea Mays
MLLVLPIEECPLPLVNGTHRKWRKLVKDLNIPRRFNMQNLAVFMINLIDELHIEELRQSLHGNKLKELRNASVQPELIPEWNRWKQELIKQYFSLHPAGNVGNFEKNNCYDDPALDQQGSRKRPKLEVRRGEIQISHMGEADYRTPTEDPNQNNLPGNSVMHENVGALGSTDQNNSVTLPGSFGTNENTISSSANAALQNARLDLDSFKSSRQCSAHIEAKGRQCGRWANDGDIYCCVHQSMHFLDHSSREDKALTIEAPLCSGMTNMGRKCKHRAQYGSTFCKKHRLQTNLDAMHPENLLDPSEVLHMGEEPPNKWVEEISKSQAMYSIDLETDKKVQDAVKVKLMTIVSIENSGEKGAMEKADMCVASTSITNTDDTSLCIGIHSHDSIVECQDYAMQHTLYCEKHLPRFLKRARNGKSRLVSKDIFVNLLKGCTSRKDKICLHQACEFLYWFLRNNLSHQHTSLASEHMPQILAEVSKNPDVGEFLLKLISTEREKLANIWGFDTNRSKQIYSENKEGSLVLHKEGTNLSSGPKCKICAHQFSDDEALGLHWTTVHKKEARWLFREGTNGLSLYDSHNIEDANGSQKFICRLCGLKFDLQPDLGRHHKVAHMDSDVVGHSSLGRGKYQLNRGRHYYSAFKKSLRPTSTLKKRSSSGIEKNFKFQSSALTSQIIQSETSSFGKLQDFQCSDVAQTLFSKIQKTRPHPSNLDILSVARTVCCKTSLAAALEVKYGSLPENIFVKAAKLCSDNGIQIDWHQEVFICPKGCKSRYNSNALLPMQLTAVDFPEAPSVDPLNDDEMWAMEEYHYVLDSKHFGWKPKNESVVLYEDISFGREKVPIVCVIDMDAKDSLGMKPEELLSHGSSVPWQGFHYITKRLMDSSLINSENSMPGCACSHPECSPEKCGHVSLFDGVYASLVDINGTPIHGRFAYDENSKIILQEGYPIYECNSSCTCDSSCRNKVLQKGLLVKLELFRTENKVKYSVLPMMDFRTPGWAIRAAEPIPQGTFVCEYIGEVVKADKTMKNAESVSSKSGCNYLFDIASQIDRERLRTVGAIEYLIDATRSGNVSRYINHSCSPNLSTRLVLVESKDCQLAHIGLFANQDIAVGEELAYDYRQKLVAGDGCFCHCGGTNCRGRVY

SEQ ID NO: 181888 - protein, 1039 aa, Zea Mays
MLLVLPIEECPLPLVNGTHRKWRKLVKDLNIPRRFNMQNLAVFMINLIDELHIEELRQSLHGNKLKELRNASVQPELIPEWNRWKQELIKQYFSLHPAGNVGNFEKNNCYDDPALDQQGSRKRPKLEVRRGEIQISHMGEADYRTPTEDPNQNNLPGNSVMHENVGALGSTDQNNSVTLPGSFGTNENTISSSANAALQNARLDLDSFKSSRQCSAHIEAKGRQCGRWANDGDIYCCVHQSMHFLDHSSREDKALTIEAPLCSGMTNMGRKCKHRAQYGSTFCKKHRLQTNLDAMHPENLLDPSEVLHMGEEPPNKWVEEISKSQAMYSIDLETDKKVQDAVKVKLMTIVSIENSGEKGAMEKADMCVASTSITNTDDTSLCIGIHSHDSIVECQDYAMQHTLYCEKHLPRFLKRARNGKSRLVSKDIFVNLLKGCTSRKDKICLHQACEFLYWFLRNNLSHQHTSLASEHMPQILAEVSKNPDVGEFLLKLISTEREKLANIWGFDTNRSKQIYSENKEGSLVLHKEGTNLSSGPKCKICAHQFSDDEALGLHWTTVHKKEARWLFREGTNGLSLYDSHNIEDANGSQKFICRLCGLKFDLQPDLGRHHKVAHMDSDVVGHSSLGRGKYQLNRGRHYYSAFKKSLRPTSTLKKRSSSGIEKNFKFQSSALTSQIIQSETSSFGKLQDFQCSDVAQTLFSKIQKTRPHPSNLDILSVARTVCCKTSLAAALEVKYGSLPENIFVKAAKLCSDNGIQIDWHQEVFICPKGCKSRYNSNALLPMQLTAVDFPEAPSVDPLNDDEMWAMEEYHYVLDSKHFGWKPKNESVVLYEDISFGREKVPIVCVIDMDAKDSLGMKPEELLSHGSSVPWQGFHYITKRLMDSSLINSENSMPGCACSHPECSPEKCGHVSLFDGVYASLVDINGTPIHGRFAYDENSKIILQEGYPIYECNSSCTCDSSCRNKVLQKGLLVKLELFRTENKVKYSVLPMMDFRTPGWAIRAAEPIPQGTFVCEYIGEVVKADKTMKNAERLIGKDFGL

SEQ ID NO: 181889 - protein, 430 aa, Zea Mays
MSFTGSAPVVRIISLEFRRGRARRMVSKMRFRNALGSRPFQCCSRENHTYVRKLLDRVSERSKLLKKVSVLVGYSNPQDLVEKQRAPGESSAELISALKEIDFPEITAKFPCIKVGDASPVELYEDSTNMKFKEAALSEKLTNFIQGSARNLESAYEFHNDCHPLNQTPTTAGDLSISEEIPLIEPIVDTKSPESLSDAITSDNSILDKSIRCLPGTTSRQYRQLEDGGFHTVRKLLQHFPRTYADLQNPQGPIEYGQYIMLSGTVISSRGIKVKSTLGLLEVVVGCSIIESELSSSVESSHSGAEQKRIHLHLNRFFSGARFSSQHFLNLMSAKHKEGDLVYVSGKIKKVLANGHYELKEYTIDAIEGEGEHSTMLARKPHPIYPSKAGLKPSLLGLSISRALKILSPDVDPVPPDVLVEFNLPNLFDQ

SEQ ID NO: 181890 - protein, 564 aa, Zea Mays
MLVVRALKILSPDVDPVPPDVLVEFNLPNLFDAYMGIHKPKDRSEADFARRRLIFDDFFYLQLGRLFQMLEAVGTRVEKEELLYKCKSHELNTVGVDDWSPLTKKLLRALPYWLTPSQLDAVQEIIWDLRRPVPMNRLLQGDVGCGKTIVAFLACMEVVNSGFQAAFMVPTEVLAVQHYEHLTSLLEKFDGDEKPNIALLTGSTSTRESRIIRDGLKTGEIGMVIGTHCLIADKTEFSALRISVIDEQQRFGVVQRGRFNSKLYTSSSKLSGENTSSDEASDSETFMAPHVLAMSATPIPRTLALALYGDMSLTQITDLPPGRQPIKTLALEGNDVGFEAVFQMMRDELIDGGKVYLVYPIIDESEHLPQLRAATAGFDSIKQKFEGYPCGLLHGRMRSDEKEETLNSFRSGETRILLSTQVIEIGVDVPDASMMVVMNAERFGISQLHQLRGRVGRGERKSRCIFLASTSSTLPRLKVLEKSSDGFYLANADLLLRGPGNLLGKKQSGHLPEFPIARLEVDGGILQEAHLAALKVLVASNDLALYPRLKVELSMRQPLCILGD

SEQ ID NO: 181891 - protein, 961 aa, Zea Mays
MSFTGSAPVVRIISLEFRRGRARRMVSKMRFRNALGSRPFQCCSRENHTYVRKLLDRVSERSKLLKKVSVLVGYSNPQDLVEKQRAPGESSAELISALKEIDFPEITAKFPCIKVGDASPVELYEDSTNMKFKEAALSEKLTNFIQGSARNLESAYEFHNDCHPLNQTPTTAGDLSISEEIPLIEPIVDTKSPESLSDAITSDNSILDKSIRCLPGTTSRQYRQLEDGGFHTVRKLLQHFPRTYADLQNPQGPIEYGQYIMLSGTVISSRGIKVKSTLGLLEVVVGCSIIESELSSSVESSHSGAEQKRIHLHLNRFFSGARFSSQHFLNLMSAKHKEGDLVYVSGKIKKVLANGHYELKEYTIDAIEGEGEHSTMLARKPHPIYPSKAGLKPSLLGLSISRALKILSPDVDPVPPDVLVEFNLPNLFDAYMGIHKPKDRSEADFARRRLIFDDFFYLQLGRLFQMLEAVGTRVEKEELLYKCKSHELNTVGVDDWSPLTKKLLRALPYWLTPSQLDAVQEIIWDLRRPVPMNRLLQGDVGCGKTIVAFLACMEVVNSGFQAAFMVPTEVLAVQHYEHLTSLLEKFDGDEKPNIALLTGSTSTRESRIIRDGLKTGEIGMVIGTHCLIADKTEFSALRISVIDEQQRFGVVQRGRFNSKLYTSSSKLSGENTSSDEASDSETFMAPHVLAMSATPIPRTLALALYGDMSLTQITDLPPGRQPIKTLALEGNDVGFEAVFQMMRDELIDGGKVYLVYPIIDESEHLPQLRAATAGFDSIKQKFEGYPCGLLHGRMRSDEKEETLNSFRSGETRILLSTQVIEIGVDVPDASMMVVMNAERFGISQLHQLRGRVGRGERKSRCIFLASTSSTLPRLKVLEKSSDGFYLANADLLLRGPGNLLGKKQSGHLPEFPIARLEVDGGILQEAHLAALKVLVASNDLALYPRLKVELSMRQPLCILGD

SEQ ID NO: 181892 - protein, 753 aa, Zea Mays
MSQPRSYGILVAVLVAAAVAVPPATAAVASIDLGSEWLKVAAVHLAPGRAPIAVAINEMSKRKSPALASLADGNRLSGEEAAGITARHPSKVFARARDLLAKPLSYVQSVTDSLFLPYDLVPDARGAAAVRADDGQVYSLEEIVAMVLHYAAGLADAHVGAPVRDAVIAVPPYFGQAERRALTQAAQLAGINVLSLINEHAGAALQYGIDKDFSNASRHVIFYDMGAGSTYAALVYYSAYNAKEFGKTVSVNQFQVKDVRWNSELGGVQMEMRLVNYFAAQFNKQLGDGVDIRQSPKAMAKLKKQVKRTKEILSANTAAPISVESLYNDVDFRSTITREKFEELCEDLWEQALTPVKEVLTHSGMKIDDIYAVELIGGATRVPKLQAKLQEFLGRRGLDKHLDADEAIVLGASLHAANLSDGIKLNRKLGMIDGSTYAFVLEIDGLDYVKDESIDQILVPRMKKMPIKMFRSIRHTKDFDVSLNYDKAYELPPGIPSHKFAEYSVSGLTDASEKYANRNLSAPIKANLHFSLSRSGIIALDRAEAVIEITEWVEVPKKILTLESNITNQNSSSEVGAANSTTDSKENLSSGSNTNSSTPIDESNAQEIITEKVLKKRTFRVPLKVVEKTTGAGTILSKELYSEAKNRLEALDKKDAERRKTAELKNNLESYIYSMKEKLEESADILTVSTEQERESFAEKLSEVQDWLYMDGEDAQANEFKERLDQLKAIGDPILFRLLRTGRQTNHGSPKRE

SEQ ID NO: 181893 - protein, 503 aa, Zea Mays
MAILDVKDVRWNSELGGVQMEMRLVNYFAAQFNKQLGDGVDIRQSPKAMAKLKKQVKRTKEILSANTAAPISVESLYNDVDFRSTITREKFEELCEDLWEQALTPVKEVLTHSGMKIDDIYAVELIGGATRVPKLQAKLQEFLGRRGLDKHLDADEAIVLGASLHAANLSDGIKLNRKLGMIDGSTYAFVLEIDGLDYVKDESIDQILVPRMKKMPIKMFRSIRHTKDFDVSLNYDKAYELPPGIPSHKFAEYSVSGLTDASEKYANRNLSAPIKANLHFSLSRSGIIALDRAEAVIEITEWVEVPKKILTLESNITNQNSSSEVGAANSTTDSKENLSSGSNTNSSTPIDESNAQEIITEKVLKKRTFRVPLKVVEKTTGAGTILSKELYSEAKNRLEALDKKDAERRKTAELKNNLESYIYSMKEKLEESADILTVSTEQERESFAEKLSEVQDWLYMDGEDAQANEFKERLDQLKAIGDPILFRLLRTGRQTNHGSPKRE

SEQ ID NO: 181894 - protein, 237 aa, Zea Mays
MVLLTWRSLITNIKEYYMLEESADILTVSTEQERESFAEKLSEVQDWLYMDGEDAQANEFKERLDQLKAIGDPILFRLNELKTRPTACENARLYLDELQKIVKNWETNKPWLPQKRVDEVVSEAEKVKAWLKEKENLQKNTPVFNPPVFTSEEVSEKVLDLQDKVSSVNRIPKPKPKVEKKTAKEEEPASKEKTTYTESAPDEGEYTETSQKSKAQEEDQSASANTSDSEPEPHDEL

SEQ ID NO: 181895 - protein, 284 aa, Zea Mays
MDSICLVLALQKLLNFFSSGRSNSQSEFDVIVYDCNNTEEILRLIGAADRARSYLRYVRDLAEKTDIGRLASPSLLKLIYDSARPNGKISEGRLSTEIWNEIEQLLEKISVWFADPSKLACFLIMDPRTSISVSSALRYWGCTTQAGGQICGAFGYTEDPSEMHREVAQKFVPLSLSFLPFLPNDSSVDWSRALSSLSQNTKEQLRNASTWVYPSVSFDSVQKSVTLFMPGFDKSEIKLYQYRGGSELLIEAGDQRRVIKLPLTMQGKVQGAKFVDRNLVVSIR

SEQ ID NO: 181896 - protein, 222 aa, Zea Mays
MLSRASVPRHAIIKKLAGEDIAHLDDLIAVLSKLSRGTRVPLEYVKYPDRHRNKSVLVTIDQHEWYASPQLYTRNDATGLWTGKPAIPPESPFLALAHHASHVDTNSNAVSSLSESSPMDLKCQYDSENLADGCIKMQTDDEIVVDGSHSNEDSVIEKKRRRVVEEIAADGTLPSYGDLEDVKGGSLRHPSNADGSELARTISSNASLAEQVIEPALVMFEV

SEQ ID NO: 181897 - protein, 82 aa, Zea Mays
MAMQQHAASASSSSLGLHLLASPSSIREATHTKVFVGGLAWETSSDRLRRFYERFGDILEAVVITDRHSGRSKGYGFVGDIP

SEQ ID NO: 181898 - protein, 615 aa, Zea Mays
MEDYPEELRTPPVSLVSIVGCPELHPSISTALSSQQPPMNTLALPDFAKASILARSVKPRDPLAPPQPPAGILKKDWLLKHRTRVPAAVAALFRADQVSGDPAQWLQACSDLENLKSAIQGKNTKSVVVLVQAQANDELSEDVIVALRKRAEIDSKHLVVLVEHDEAEWNRSLNKLKNVFVELCAAFYKEEGRRIKARIEKKNFASVELSIRYCFKVAIYAEFRRDWPEALKFYEEGVRVLREMIGTSTRLPPTQRLVEIKAVAEQFHFKISTLLLHAGKVVEAITWFRKHIKSYERVVGTPEVAFLHWEWFSRQFLVFGELIETTSTTIPDTLSPRFGTADNTLTEWEFQPAYYYQLAATYLREKRYAIECSSSMANLTTEVNGVPESVMPSVYVGQYVRLFEQGDTVSLLPYALSEAERFQDSYEIIALFRKAYESFQSLGATRMASACSSGMAIEYYAAADFSNAKQLFDSVAGLYRQEGWTSLLWENLGYLRECSMKLNSPKDFISYSLEMAALPLFSGSGEENRENKIKSGPAGSPTISRRENIQQEVINVLERKQSSEGTYDGFNNAIEEVTHLDIDQRKTHSLHIQICMAKLFKILLLLLSSPIDGCG

SEQ ID NO: 181899 - protein, 267 aa, Zea Mays
MEPKLAVAVFVLFLAFAACSANHHRDPSVVGYSQEDLALPSSLFRSWSVKHGKLYASPTEKLERYEIFKQNLMHIAETNRKNGSYWLGLNQFADVAHEEFKASYLGLKRALPRAGAPQTRTPTAFRYAAAAAGSLPWSVDWRYKGAVTPVKNQGKCGSCWAFSSVAAVEGINQIVTGKLVSLSEQELVDCDTTLDHGCEGGTMDLAFAYMMGSQGIHAEDDYPYLMEEGYCKEKQRDQPAESAGPSACQRRHSCREQGLPVLQRGGV

SEQ ID NO: 181900 - protein, 369 aa, Zea Mays
MEPKLAVAVFVLFLAFAACSANHHRDPSVVGYSQEDLALPSSLFRSWSVKHGKLYASPTEKLERYEIFKQNLMHIAETNRKNGSYWLGLNQFADVAHEEFKASYLGLKRALPRAGAPQTRTPTAFRYAAAAAGSLPWSVDWRYKGAVTPVKNQGKCGSCWAFSSVAAVEGINQIVTGKLVSLSEQELVDCDTTLDHGCEGGTMDLAFAYMMGSQGIHAEDDYPYLMEEGYCKEKQPCVLGITEQDLTGFEDVPENSEISLLKALAHQPVSVGIAAGSRDFQFYRGGVFDGACSVELDHALTAVGYGSSYGQNYITMKNSWGKNWGEQGYVRIKMGTGKPEGVCGIYTMASYPVKNATRWGVNQVLLTKD

SEQ ID NO: 181901 - protein, 478 aa, Zea Mays
MHLSANEGIEGLRFAVTGGQGFVGAALSLELLRRGAREVRSLDLRASSSWSQQLLDAGVRIIQGDIRKKDDVRRAFRGVDCVFHLASYGMSGKEMVQTARSDEVNINGTCNVLDACHEQGVRRLVYVSTYNVVFGGKPIVNGNEALPYFPIEDHVDAYGRSKSVAEQLVLKSNGRPANDKSSRLYTCAIRPAAIYGPGEERHFPRILSLAKLGLAFFKIGDPGVKTDWVYIDNLVLALILASMGLLDDIPDRKGTPVAAGQAYFICDGSPCNTFEFIIKPLFQSLGYSVPQVVLDTSVALAVSRIFLFISTLFYPWLDSKWMPQPLILPAEVYKVGVTHYFSFLKAREELGYVPIVRPHEGLAATISYWQERKRMELDGPTIFTWLAVTIGMLAVFSAACLPPVGPLKWVLDVHMFVFRSMLVIRLVLAVAIALHAGEAVYAWFLARRVDPRNAAGWFWQTFALGYFSLRYLLKRGRA

SEQ ID NO: 181902 - protein, 401 aa, Zea Mays
MHLSANEGIEGLRFAVTGGQGFVGAALSLELLRRGAREVRSLDLRASSSWSQQLLDAGVRIIQGDIRKKDDVRRAFRGVDCVFHLASYGMSGKEMVQTARSDEVNINGTCNVLDACHEQGVRRLVYVSTYNVVFGGKPIVNGNEALPYFPIEDHVDAYGRSKSVAEQLVLKSNGRPAKSDKSSRLYTCAIRPAAIYGPGEERHFPRILSLAKLGLAFFKIGDPGVKTDWVYIDNLVLALILASMGLLDDIPDRKGTPVAAGQAYFICDAREELGYVPIVRPHEGLAATISYWQERKRMELDGPTIFTWLAVTIGMLAVFSAACLPPVGPLKWVLDVHMFVFRSMLVIRLVLAVAIALHAGEAVYAWFLARRVDPRNAAGWFWQTFALGYFSLRYLLKRGRA

SEQ ID NO: 181903 - protein, 264 aa, Zea Mays
MVASSQLCERRRLELLVVPEDALAVLGLDVDALPGLAPGRLGNRGRVEVVVVPEDGPDRLGGLHGVVVRHGGEEVVRDVRVRDVVEHAVEDAVVAVHGGQRAAQPVPLARVVVGERRVGVLQVGDEHQPRVHDQQRHGVHAHHPPDPERRRQLVQPERHGHDAGVRDEDLGALPVVVDGAVGVEVAGEARVRPPRRVGRQVQRPPEGELHHDVHHPADRGCCTRTGCTTAAPPSSWARTPRRAPGTPCWSGGAGGCTSTRSRAP

SEQ ID NO: 181904 - protein, 218 aa, Zea Mays
MEWTTVETRDGAKLSVRLFKPPASGTGLEPEPREDVAVVLVHPYTILGGVQGLLRGMAEGVARRGYTAVTFDMRGAGRSTGRASLTGSTEVGDVVAVCRWVAENIKPRGILLVGSSAVDKVDEVIGYVSIGYPFGLMASVLFGRHNDAILKSEKPKLFIMGTKDGFTSVKQLQNKLKSAAGRADTHLIEGAGHFQMEGPAFDAQMVEIIIKFINSLPK

SEQ ID NO: 181905 - protein, 616 aa, Zea Mays
MDLEVSEGSGTNATSDDQSVQTLPRRAKLLEYFQPELVEVNGVMKAICKYCGAMLRSSSTNSLRNHVADTCPKISVEDRKQFIATMEKGPAEASFVFDSQKARECMVKWCISAEVAFNKFDDPFFAQWMESMQPSFSGVGRQTMQNDCITRFKMMRQELRNELQSLNSRICLTTNLWTSNQKLGYLCLTAHYINADFILKKKIIAFKYLKYPHTGLAIKEGITECLKEWGIKEKMFTITLDNVSNNLSVRDLRESGLFGGDLRIVQCCAHILILLVQDGMAIAHGAIYKIRELVRHINSSPSRIQAFNGIAERSGLPSKDRLILDVPNRWNSTHDMIMEAIEYKVVLKRYAEEQLEPSPNDEEWTNSEAIGEFLEAFEKATKAFSTHRSPTSHLFLHNVLCIHRTLRNTNWQINCVLKDSARAMDAKFDKYWEKGKYNMTLVLATILDPSKKMDFLDFFYEKMSQYFVDIQINVVLVKQCLTKLFEKYATLVQIDNKSSPFIDIRTSNLGSTVLGKRRLDEEFSQWSQIRGRRFPKSELDTYLEEELVRIDERFEILNWWRTNANKYPVLSAMARDILAIPLSTVPSEFAFSAGGRILDDNRSTMTPETLECFVCS

SEQ ID NO: 181906 - protein, 74 aa, Zea Mays
MWFMSFNLCLALLVYADIAAFFSLHQGGETLMLLTVASLTLQGQGAVAASSRGVAAGPVEWLVLGLRAGRPFSA

SEQ ID NO: 181907 - protein, 320 aa, Zea Mays
MSGFVGVVVSDPSLQGQFTQVELRSLKAKFVSLKRDSGHVTTKNLPGLMKKLRGLNEVVSEEEIAAFLSESYPDSDHEIEFESFLREYLNLQAQVSAKEGGAGGGRGGKPSFLKSSITTLLHNLNQAEKSSYVAHINTYLREDPFLKKYLPIEPSGNQLFDLIRDGVLLCKLINVAVPGTIDERAINKKRVLNPWERNENHTLCLNSAKAIGCTVVNIGTQDLVEGRPHLVLGLISQIIKIQLLADLNLKKTPQLVELFDDSKDIDEVLSLSPEKMLLRWMNHHLKKAGYKKTVNNFSSDVKSIPLKLHWTPRIRTKGQN

SEQ ID NO: 181908 - protein, 656 aa, Zea Mays
MKKLRGLNEVVSEEEIAAFLSESYPDSDHEIEFESFLREYLNLQAQVSAKEGGAGGGRGGKPSFLKSSITTLLHNLNQAEKSSYVAHINTYLREDPFLKKYLPIEPSGNQLFDLIRDGVLLCKLINVAVPGTIDERAINKKRVLNPWERNENHTLCLNSAKAIGCTVVNIGTQDLVEGRPHLVLGLISQIIKIQLLADLNLKKTPQLVELFDDSKDIDEVLSLSPEKMLLRWMNHHLKKAGYKKTVNNFSSDVKDGEAYAYLLKALAPEHSPETTLDTKDPNERAKLVLEQAEKLDCKRYLTPKDITEGSANLNLAFVAQIFQHRNGLTSDTKQVTLTQTATHDDVLLSREERAFRMWINSLGVESYVNNVFEDVRNGWVLLEVLDKVSHGSVNWKLASKPPIKLPFRKLENCNQVVKIGKQLKFSLVNLAGNDIVQGNKKLIVALLWQLMRFNILQLLNKLRFHSQGSEGKEISDADILNWANCKVKASGRTSRIESFKDKSLSNGMFFLDLLSTVQPRVVNWKVVTKGETDEDKKLNATYIISVARKIGCSVFLLPEDIIEVNQKMILTLTASIMYWSLQKQPQSQSELTEQSEPSSMTSDAASEVASEDGASTTAPSESEEVNSLSDSISNLTTDDATSNAPSAENGNGVAGS

SEQ ID NO: 181909 - protein, 257 aa, Zea Mays
MRKRERENPCGICGHYHKYEEGEVCGVCGHRWKPSDGEGAPSRHESAFPTEVLKDFLFLGSYDNASRSETVPDCHNLYKNSFTYHSLQRDRPLDFDEANQYLEKCERDKSRVLVHCMTGKNRSAAIVAAFLMKSRGWRLAQSFQWVKDRRPQVQLTDASQKELLEYELKLFGPSTQTLVPTESFASLGFGYTKPAGDMQTPVFNQTTMPSIFERFNPNDRPTNFTFGVERKAEANPRDNNSDGRVNPTSTENLMDSS

SEQ ID NO: 181910 - protein, 174 aa, Zea Mays
MRKRERENPCGICGHYHKYEEGEVCGVCGHRWKPSDGEGAPSRHESAFPTEVLKDFLFLGSYDNASRSEVLRTLSISHILNTVPDCHNLYKNSFTYHSLQRDRPLDFDEANQYLEKCERDKSRVLVHCMTGKNRSAAIVAAFLMKSRGWRLAQSFQWVKDRRPQLLRRSFWSMS

SEQ ID NO: 181911 - protein, 494 aa, Zea Mays
MARCGDRDIVTAAMARQPWRRRHGWQLPLHPLQLVAAAVFALLVAAFYVVLGPYIGNTLAGNILLITFSFSAAATAALYVRCTAVDPSDRTDAKKTKRRRQLARGGGGTAKLPRLRYGYILWRYAVRLLRRVEARVTNRWVRRSYLEQWNTSVQLDPMLPFAFTSLDDIVSPCATADGHDISFCPICDCEWLNNCIGRRNYATFILLMFFVLLMLVIEGGTAIAIFIRCFVDSKGVKMEMEHRLHLRLPKGAHAALSVVFVIFTIYSTAALGQLFFFHMVLIRKGMRTYDYILAMREAGAAFDPFEDSDSDESIDFDSPEKPSFFSRVFCRKDEVNESARKLSIRVESDQMDASGRKDDIQINPWTLIKMSKEKAMAAAERARERIRQKLPTSPMKPLPVETKRGPLNPERKHITTGKEIVPVFTKSWLSVSPTARISSPRRRFSGSSSPKPQRYRSNFDLRLAEVSRDLETHISKQVLCSVVMKGVEDEGYSS

SEQ ID NO: 181912 - protein, 159 aa, Zea Mays
MAPSHEEVVREEASRLAAEAAIARQVAEAELVRLLTEADRLATEVACARQEANRARRALVGQDPLYPQPTTRWPRSSLPSHKLWLSPSMPRPSPSSISRLSYRSSSTTFRRTTLDGRPSSTTPTSTSFPTTSWKTSARRSLLIPEREIGLHLFLIDFGG

SEQ ID NO: 181913 - protein, 66 aa, Zea Mays
MGGHTQCCRLPALCGVWGRVSLSAKPYPHNMQRLGLEPETFRLQTVGSTAASGPPFTNSTMEINFF

SEQ ID NO: 181914 - protein, 341 aa, Zea Mays
MHTYQQGEVIRAKVNSLTSIETELPFSYYSLPYCRPRDGVKKSAENLGELLMGDQIDNSPYRFRVNVNESLYLCTTTPLDEANVKLLKQRSHDLYQVNMILDNLPVRRFTEQNGITIQWTGYPVGYIPEGTSDVYIINHLKFKVLVHKYEGGEVKVVGTGEGMEVISETDKDANSGYEIVGFEVVPCSVKRDPESILKLNMYDKVDPVNCPVELEKSQLVREKEKITFTYEVEFVNSDIRWPSRWDAYLKMEGSKIHWFSIMNSLMVILFLAGIVFVIFLRTVRRDLTRYEELDKEAQAQMNEELSGWKLVVGDVFREPTSPKLLCVMIGDGVQILGSGGL

SEQ ID NO: 181915 - protein, 428 aa, Zea Mays
MRSLSSLHPCVCIYTNSFVRKYYLFSLPCFSFTFSLVTKIYFFSAMYINCVFFDSRQQISCGSRAREEETVRLGDIRSTRVSPELAPTPITNRLCSKLLAPPALHWAIRKANCYHREGHDAPCSVGGDGYYMLLFGLAQVLLSQIPNFHEMAGLSIFAAVMSCFYAFVGVGLGVAKVIANGVIMGGIGGIPLVSTTQKVWRVSQALGDILFAYPFSLVLLEIEDTLRSPPPESETMKKATRASIAITTLFYLCCGCFGYASFGDGTPGNLLTGFGFYEPYWLIDLANLAIVLHLLGGYQVYTQPVFAFADRKFGGGATVVEAPLLPVPGARRVNANVFRLCFRTAYVAATTALAVWFPYFNQIIGLLGSFTFWPLAVYFPVEMYLTRNKVAPWTNQWLAIHAFSLVCLLISAFASVGSAVGVFGSETS

SEQ ID NO: 181916 - protein, 258 aa, Zea Mays
MSSGRYMAYSPSPSTTPHSPRIAGLRAPSAAVAEQEKYLAELLAERQKLGPFVPVIPHSVRLLNQGGLYSNGAATDMNVWTSAFQPESSPAYSWLGGSQGSSSGLIVKKTMKVDIPVDKYPTFNFVGRILGPRGNSLKRVEANTDCRVLIRGRGSIKDPAREEMMRGKPGYEHLNEPLHILVEAELPVEIIDARLMQAREILEDLLKPVDESQDYFKKQQLRELAMLNGTLREEGMQRSGSASPFHNSLGMKRAKTRG

SEQ ID NO: 181917 - protein, 182 aa, Zea Mays
MNVWTSAFQPESSPAYSWLGGSQGSSSGLIVKKTMKVDIPVDKYPTFNFVGRILGPRGNSLKRVEANTDCRVLIRGRGSIKDPAREEMMRGKPGYEHLNEPLHILVEAELPVEIIDARLMQAREILEDLLKPVDESQDYFKKQQLRELAMLNGTLREEGMQRSGSASPFHNSLGMKRAKTRG

SEQ ID NO: 181918 - protein, 406 aa, Zea Mays
MASLCDFCGKQRSMIYCRSDAASLCLSCDRNVHSANALSRRHTRTLLCDRCGSQPASVRCLEDNASLCQNCDWNGHDAESGASGHKRQAINCYSGCPSSAELSRIWSFITDIPTVAAEPDYEDGLSMMTIDGSDVTNRHDTSDDKRLLEIANTTLMSDPPSADKLKSPTGSSSGDGFDVMTLATDQPAGPVSATPKVPNARDDDKFNDGMYEDLCVDDADLTFEDYEELFGTSHIRTEELFDDAGIDGYFELKETPPFYFNEPKAMQIECGNVVSADCAMSNPGARADSSLCIPVRQVRSSISHSLSGLTGESSAGDHHDCGVSPMLLMGEPPWHSPGGPEGSVAGGSRDSALTRYKEKKKRRKFDKKIRYASRKARADVRKRVKGRFIKAGEAYDYDPLSQTRSY

SEQ ID NO: 181919 - protein, 371 aa, Zea Mays
MASLCDFCGKQRSMIYCRSDAASLCLSCDRNVHSANALSRRHTRTLLCDRCGSQPASVRCLEDNASLCQNCDWNGHDAESGASGHKRQAINCYSGCPSSAELSRIWSFITDIPTVAAEPDYEDGLSMMTIDGSDVTNRHDTSDDKRLLEIANTTLMSDPPSADKLKSPTGSSSGDGFDVMTLATDQPAGPVSATPKVPNARDDDKFNDGMYEDLCVDDADLTFEDYEELFGTSHIRTEELFDDAGIDGYFELKETPPFYFNEVRSSISHSLSGLTGESSAGDHHDCGVSPMLLMGEPPWHSPGGPEGSVAGGSRDSALTRYKEKKKRRKFDKKIRYASRKARADVRKRVKGRFIKAGEAYDYDPLSQTRSY

SEQ ID NO: 181920 - protein, 344 aa, Zea Mays
MHSAEGAKRQQQRFCGPSVALTFNFAVAVGIIMANKMVMGTVGFKFPIALSLIHYAVAFVLMATLKTLSLLPVAPPSKSTPFSSIFALGAVMSLSTGLANVSLKHNSVGFYQMAKIAVTPTIVVAEFMLFQKKVSSKKAVTLAVVSFGVAVATVTDLEFNFFGACVALAWIVPSAVNKILWSSLQQSGNWTALALMWKTTPITIFFLLTLMPLLDPPGLLLFNWNFRNSCAVIISALFGFLLQWSGALALGATSALSHVVLGQFKTIVIMLSGYLIFGSDPGITSVCGAVLALGGMSFYTYLGLKKDPATSGKKAPSRQNSFMARPKVAADDSDDADSEQDDTV

SEQ ID NO: 181921 - protein, 149 aa, Zea Mays
MWKTTPITIFFLLTLMPLLDPPGLLLFNWNFRNSCAVIISALFGFLLQWSGALALGATSALSHVVLGQFKTIVIMLSGYLIFGSDPGITSVCGAVLALGGMSFYTYLGLKKDPATSGKKAPSRQNSFMARPKVAADDSDDADSEQDDTV

SEQ ID NO: 181922 - protein, 56 aa, Zea Mays
MVNWQGLLLPWSSKIRPYSNPSFSYLREACNKIDHSQKSRRKRIYTIYIRRMGLND

SEQ ID NO: 181923 - protein, 137 aa, Zea Mays
MAKKGAKRKQQPPPAAPTAKKGSKAVPPPKAAKRAPKKQELLESSDDSDTEQQLLEEASHLDVPSDSDAEELSGSDAEADELSGSDADSDGSSSSGDDVEDEEEEEEGDGSDDDPLADDFLAGSDEGSVSVFPKPLL

SEQ ID NO: 181924 - protein, 459 aa, Zea Mays
MAKKGAKRKQQPPPAAPTAKKGSKAVPPPKAAKRAPKKQELLESSDDSDTEQQLLEEASHLDVPSDSDAEELSGSDAEADELSGSDADSDGSSSSGDDVEDEEEEEEGDGSDDDPLADDFLAGSDEGSEGGDSGLESDESDDLEAKSRAIDEQKIKAEEDAEEELQTNIRSESDEFRLPTAEELEEEAHRPPNLPNLKRRISEIVRVLSNFSKLRQKDVPRKDYIEQLKTDIISYYGYNDFLVEALIEMFPAVELVELLEAFEKRPPECLRTNTLKTRRRDLAAALIPRGFNLDPIGKWSKVGLVVYDSTISAGATTEYMAGHYMKQGASSFLPVMALAPQEKERIVDMAAAPGGKTTYIGALMKNTGIIYANEFNEKRLHGLLGNIHRMGVTNTIVCNYDGKELPKVLGMNSVDRVLLDAPCTGTGTIWKDLQIKTSKDIEDIRSCAFVQKPVHAHGE

SEQ ID NO: 181925 - protein, 715 aa, Zea Mays
MAKKGAKRKQQPPPAAPTAKKGSKAVPPPKAAKRAPKKQELLESSDDSDTEQQLLEEASHLDVPSDSDAEELSGSDAEADELSGSDADSDGSSSSGDDVEDEEEEEEGDGSDDDPLADDFLAGSDEGSEGGDSGLESDESDDLEAKSRAIDEQKIKAEEDAEEELQTNIRSESDEFRLPTAEVLEEEAHRPPNLPNLKRRISEIVRVLSNFSKLRQKDVPRKDYIEQLKTDIISYYGYNDFLVEALIEMFPAVELVELLEAFEKRPPECLRTNTLKTRRRDLAAALIPRGFNLDPIGKWSKVGLVVYDSTISAGATTEYMAGHYMKQGASSFLPVMALAPQEKERIVDMAAAPGGKTTYIGALMKNTGIIYANEFNEKRLHGLLGNIHRMGVTNTIVCNYDGKELPKVLGMNSVDRVLLDAPCTGTGTIWKDLQIKTSKDIEDIRSCAFVQKQLLLAAIDLVDANSKTGGYIVYSTCSIMIPENEAVIDYALKKRNVKLVPCGLDFGRPGFIRYREHRFHTSLEKTRRFYPHVNNMDGFFVAKLKKLSNTIPVTSEPSKASEEAAKADGEDEKAISNEQETGVPDKDEKTVEIKNHKNVTNKRTSVTKETGSHKRESNKPGKHLKINKNNATKEIDGPESSETNRDGKEEHRVQTKKMSHKRKFASDRSKKSGPESFSGVKEKRQVSDKKRKKKWQFKLRRDWEAEKKGDKRRKV

SEQ ID NO: 181926 - protein, 467 aa, Zea Mays
MFPAVELVELLEAFEKRPPECLRTNTLKTRRRDLAAALIPRGFNLDPIGKWSKVGLVVYDSTISAGATTEYMAGHYMKQGASSFLPVMALAPQEKERIVDMAAAPGGKTTYIGALMKNTGIIYANEFNEKRLHGLLGNIHRMGVTNTIVCNYDGKELPKVLGMNSVDRVLLDAPCTGTGTIWKDLQIKTSKDIEDIRSCAFVQKQLLLAAIDLVDANSKTGGYIVYSTCSIMIPENEAVIDYALKKRNVKLVPCGLDFGRPGFIRYREHRFHTSLEKTRRFYPHVNNMDGFFVAKLKKLSNTIPVTSEPSKASEEAAKADGEDEKAISNEQETGVPDKDEKTVEIKNHKNVTNKRTSVTKETGSHKRESNKPGKHLKINKNNATKEIDGPESSETNRDGKEEHRVQTKKMSHKRKFASDRSKKSGPESFSGVKEKRQVSDKKRKKKWQFKLRRDWEAEKKGDKRRKV

SEQ ID NO: 181927 - protein, 270 aa, Zea Mays
MPQRSEAGTAGEGDEEQRLRAALRHLQAEAGVLERLVYKHRNQHRGAAYFQYLLKVRRDLKLLLGAGLAEVLNAVFPVLACRKPANTILVPNKQSKKKPVANHSHHQRLLGVARLLSQMSEPVMKAAIQITFLLARSFFVDLCTAVLSLLARVRVLIQQMLLDVVSIYNKVTDLTERKQAVKISISGVQAFREYYPSMNDACTVLECVWIKDKFVLHEKVKDISQETQVENQKCCGPESTVQYETIALISEDCATRTSTGIRGQTTPEEG

SEQ ID NO: 181928 - protein, 252 aa, Zea Mays
MPQRSEAGTAGEGDEEQRLRAALRHLQAEAGVLERLVYKHRNQHRGAAYFQYLLKVRRDLKLLLGAGLAEVLNAVFPVLACRKPANTILVPNKQSKKKPVANHSHHQRLLGVARLLSQMSEPVMKAAIQITFLLARSFFVDLCTAVLSLLARVRVLIQQMLLDVVSIYNKVTDLTERKQAVKISISGVQAFREYYPSMNDACTVLECVWIKDKFVLHEKVKDISQETQVENQKCCGPESTVQYETIALISEG

SEQ ID NO: 181929 - protein, 171 aa, Zea Mays
MPQAGQHDPRPQQSKKKPVANHSHHQRLLGVARLLSQMSEPVMKAAIQITFLLARSFFVDLCTAVLSLLARVRVLIQQMLLDVVSIYNKVTDLTERKQAVKISISGVQAFREYYPSMNDACTVLECVWIKDKFVLHEKVKDISQETQVENQKCCGPESTVQYETIALISEG

SEQ ID NO: 181930 - protein, 122 aa, Zea Mays
MPQRSEAGTAGEGDEEQRLRAALRHLQAEAGVLERLVYKHRNQHRGAAYFQYLLKVRRDLKLLLGAGLAEVLNAVFPVLACRKPANTILVPNKQSKKKPVANHSHHQRLLGVARLLSQIILR

SEQ ID NO: 181931 - protein, 156 aa, Zea Mays
MPQRSEAGTAGEGDEEQRLRAALRHLQAEAGVLERLVYKHRNQHRGAAYFQYLLKVRRDLKLLLGAGLAEVLNAVFPVLACRKPANTILVPNKQSKKKPVANHSHHQRLLGVARLLSQMSEPVMKAAIQITFLLARSFFVDLCTAVLSLLARVNVT

SEQ ID NO: 181932 - protein, 263 aa, Zea Mays
MPQRSEAGTAGEGDEEQRLRAALRHLQAEAGVLERLVYKHRNQHRGAAYFQYLLKVRRDLKLLLGAGLAEVLNAVFPVLACRKPANTILVPNKQSKKKPVANHSHHQRLLGVARLLSQMSEPVMKAAIQITFLLARSFFVDLCTAVLSLLARVRVLIQQMLLDVVSIYNKVTDLTERKQAVKISISGVQAFREYYPSMNDACTVLECVWIKDKFVLHEKVKDISQETQVENQKCCGPESTVQYETIALISEAGATLVYPTPKP

SEQ ID NO: 181933 - protein, 98 aa, Zea Mays
MRSPNRCYLMLCLYTIRSLILLKGSRLLRLASVECREYYPSMNDACTVLECVWIKDKFVLHEKVKDISQETQVENQKCCGPESTVQYETIALISEDST

SEQ ID NO: 181934 - protein, 219 aa, Zea Mays
MQEFQSIPGLAGRLFGGAAAPGDLRRAQAAQHGPGGARCGGASPAAPEAVKCPRCESTNTKFCYYNNYNLSQPRHFCKSCRRYWTKGGVLRNVPVGGGCRKAKRASPSASASASSPASSSAPSTPASADAAKNPRRASASPRSNSGSASPTAAAATTPTPTDPSTSAAPSSSVSEDIMAPFASLDAAGIFELGDAASAAAYWSAGSCWADVQDPSLYLP

SEQ ID NO: 181935 - protein, 75 aa, Zea Mays
MISVEGCQIKRLTQAEQEERRRKGLCYNCDEKYTRGHNRVCQRLFLLEGIEEDDVDDITKEPAAEGQNLAGEDRS

SEQ ID NO: 181936 - protein, 372 aa, Zea Mays
MAVQSNARATDEQRRPVVGVAWALRGGALVRLLLGADAVRAVEPRLPPRLPGPALAKEMHKDLAARVNSVVNSGKIPEVSKCKLMGFSRWSENASFRDHPSIVQILIDGNKRKATDVDGKVLPTLVYMAREKRPQEHHHFKAGSLNALIRVSSVISNSPVIMNVDCDMYSNNSGSIRDALCFFQDEQLGQDIAFVQYPQNFENVVQNDIYGNPINTVNELDHPCLDGWGGMCYYGTGCFHRREALCGRIYSPDYKEDWTRVARKTEDVIDLEGMAESLVTCTYEHNTLWGVEVDLYTENSENAGTVIEVTLCYFKITEIYHFMYGPYLIEFELLNYRRELYMVAHWRMSLQDCRSSAVGGDQFTTTRQERGF

SEQ ID NO: 181937 - protein, 199 aa, Zea Mays
MADTDSAETEKEKMVADDGGKPAELSKSARKKLQKQERQAERKAARKAAEKERRRADIERRRREWEDALAAAPSDEARAEMVAARRETRRERVGRRAEERGARADRLRRAAEGAGQKVVLDLEFADLMRPNEIHSLTQQIMYCYAVNGRSANPAHLWLTGCSGEMATHLQRIPGHVENIHHRRPGGSKQMERHNTEEVS

SEQ ID NO: 181938 - protein, 220 aa, Zea Mays
MATHLQRIPGYDKWIIERAARPYIEAFEDRKENLVYLTADAETVLDDLDMSKIYIIGGLVDRNRWKGITLKKSAEQGIQSAKLPIGNYLKMSSSQVLTVNQVFEIMLKFVETRDWKTAFFHVIPQRKRGEAETRDDVEKGGLDDNDGAAEGAADGDHSEEDLNKGFGEEEDDDGDEELEEEEADVSNKRQCVRVENGEAGDATVAEVEPNNGGGGGGGDR

SEQ ID NO: 181939 - protein, 175 aa, Zea Mays
MADTDSAETEKEKMVADDGGKPAELSKSARKKLQKQERQAERKAARKAAEKERRRADIERRRREWEDALAAAPSDEARAEMVAARRETRRERVGRRAEERGARADRLRRAAEGAGQKVVLDLEFADLMRPNEIHSLTQQIMYCYAVNGRSANPAHLWLTGCSGEMATHLQRIPGC

SEQ ID NO: 181940 - protein, 584 aa, Zea Mays
MASSSSIGINFIQVLEHQTRALFSELDKRLQARDDKWEFRVAVLESRAADSERQLDNVSSDLRTDVAAQISVVEALESIVVDSTQHMDSVSSSIRADPEVRQAAVDATAEDRRHHFEAATSSHITELESTTQVFELWHPRIDSAINHLHPSMVKVRAAIDTRDLQWSPDAHGGGSGGLLGEPGGEPTEISGAAHAGGLPRPHQHPHRHPAIQSVRRRGALGLPRDGRDRPASTTGDEPDQGILPLPEHELLRPRRLHHRQELLPQQLRRRLLPQVRARADLHGPLCSNRARRATGAQHCQLRPGRAAGVPDIWHPTELSFPFLASYLLQLVIREEEGEVPSTLPTQCLMNWFSCSCASVLYDVTKLIKPLPTLAMGVSSIPPPAPLGIQLVLDAMPRGPLLGDVHDKGPWPPPIQFGMHATQRRPIPWPSFSGIIIRRHLLQSLPLVPHCSVNMRKSMFTHCQLSVIHWKHCFEFLDNALSVDCFQSGAPKWDQSSDTHKVSSAEDKLVALCRFRRARGLWEKCDEKWSHAYKCIVDAHLHALEEVWELLVPDPTKTEGQSPEDSSTEQLFMLVSLAAWGGSRG

SEQ ID NO: 181941 - protein, 242 aa, Zea Mays
MLRQNGPFLVIHLRYEMDMLAFSGCTQGCTPKETEELTRMRYAYPWWKEKVINSFVKRKDGLCPLTPEEVAIVLRALDIDKSMQIYIAAGEIYGGKRRMASLTLAYPNVVRKETLLEPSDLMFFQNHSSQMAALDYLVSLESDIFVPTYDGNMAKVVEGHRRYLGFKKTIMLDRKLIVELVDQYTSGSLRWDEFASLIKAVHSNRMGSAATRAAIPDRPKEEDYFYANPQECLQGPNMLQTL

SEQ ID NO: 181942 - protein, 226 aa, Zea Mays
MYFLSGELLALSVTYNEPWFTTTRNFWVGPGDQIWPDQKIKLKLKTVYMYVAGFYTYSIFALLFWEIRRSDFGISMTHHVATVCLIALSYIFRFARVGSVVLAIHDATDVFLELGKISKYSGHELFADVSFLVFVSSWVLLRLIYYPFWILWSTSYEVVLTLDKEKHKVDGPIYYYVFNSLLFSLLVLHIYWWVLMYRMLVKQIQSRGHVGDDIRSDSEGEEEHED

SEQ ID NO: 181943 - protein, 183 aa, Zea Mays
MYFLSGELLALSVTYNEPWFTTTRNFWVGPGDQIWPDQKIKLKLKTVYMYVAGFYTYSIFALLFWEIRRSDFGISMTHHVATVCLIALSYIFSSWVLLRLIYYPFWILWSTSYEVVLTLDKEKHKVDGPIYYYVFNSLLFSLLVLHIYWWVLMYRMLVKQIQSRGHVGDDIRSDSEGEEEHED

SEQ ID NO: 181944 - protein, 254 aa, Zea Mays
MAFSPPLIDWEAESYPAYPDFAAIPLFVVFFLVVRFFLDRFVFEWLARKLIFKEEDEKKLGPTTYAGKRKIRKFKESAWKCMYFLSGELLALSVTYNEPWFTTTRNFWVGPGDQIWPDQKIKLKLKTVYMYVAGFYTYSIFALLFWEIRRSDFGISMTHHVATVCLIALSYIFRFARVGSVVLAIHDATDVFLELGKISKYSGHELFADVSFLVFVSSWVLLRLIYYPFWILWSTRLTVTHLHVDSEGEEEHED

SEQ ID NO: 181945 - protein, 78 aa, Zea Mays
MTIDRSQATLNPYDNEKKMQFSYDNENLAEIDNYWIMISQNHWLNKAWVPKICGADAKSVEPLVEPMPNSSQSGGMRN

SEQ ID NO: 181946 - protein, 124 aa, Zea Mays
MVAPSMRQELHYLQESHKIHCKIILVAFLQVVQLLPQACCLPLPELSVKQEVPRKENRDLERKFINKPESEGCLGSGIQSIISGVVYSQCIVSICVCVLCFPCTLFLSRGTLCQVPEIWFSFRQ

SEQ ID NO: 181947 - protein, 80 aa, Zea Mays
MVAPSMRQELHYLQESHKIHCKIILVAFLQVVQLLPQACCLPLPELSVPRKENRDLERKFINKPESEGCLGSGYSLCSRL

SEQ ID NO: 181948 - protein, 109 aa, Zea Mays
MPRTTMPTPTTVAAKAVRASAALTPVEVTHTVVSRLTTTVRTGGVLAASDAQDGQRAGQRERHATTTSEERGILTMVPAAGAAKEKFVKMGRSTLPLSKIGYVLLHLSK

SEQ ID NO: 181949 - protein, 107 aa, Zea Mays
MSETAAPIGLSWAPKLPSFATTSGGSKIDHAPDPSTAQGSLWKRTSELVDGLFVPPRDPRQLNKLARKNVKDTAGKGWFDMPAPTITPELKKDLEILQLPLDQCVGD

SEQ ID NO: 181950 - protein, 142 aa, Zea Mays
MDGRRRRQWPRSRSGAAAARLLLLLLLAVSLEGGHGDHGAAAAGVAPAGGNGMTELQKHVAFFDRNHDGIITFDETYQGQFQLLAHGYLRREHSEGQTWKRHRRLRRSRKVRSREAGRDVHQARQDRTERPDERRARRDAQG

SEQ ID NO: 181951 - protein, 451 aa, Zea Mays
MLGEDDSKRLFFRRIFGSEDKCPHHLKEVSVEIIKKCGGLPLAIITMASLLTTKSYTRADWLKVSNSIGSGLEKNCDVEEMNMILSLSYNHLPHHLKTCLLYLSMFPEDYVIKRDYLVRRWVAEGFVSAHGRRNLDDEGECYFNELINRSLIQPVDFQYDGRVYACRVHDMILDLITCKAVEENFITVVTNRKQMLPSHGKVHRLSLEYHGLETLRTNPIFTTHVRSLNIFRYSEEMLPLSGLHSLRVLDLDGNENLESCYLEDIGKLYQLRYLRIKASNITLLERIEELQCLVILDLLNCPNLGELPRSIVQLRNLKWLTVHRANLPDGVGNMQALEFLSLVVVDYTTSTNLLEELGSLTKLRTLRLDWRINPLHRDKKTYEGNFVSSLGKLGSSNLSIPNTHQSMVTRLPVGTLVPNSTFPSGVSDQRMASQQYSSLDGLANQPHLPGR

SEQ ID NO: 181952 - protein, 280 aa, Zea Mays
MDGFMASAATGVMSSLLAKLAELLGEDYKMQRGMRREIAFLKDELGSMNALLERLAGSEALDPQTKEWRDQVREMSYDIEDCVDGYMRQLQHEPQRNSGITGFFLGYVQKVKDLVTRHEIAEQIQELKARIVEASHRRKRYKIDDTANSGAANVIPVDRRLPALYAELGSLVGSDVPRDEIIKLLDDGALAVKVVSIVGCGGLGKTTVVNQVYINIAEKFDCQASVSLSQNPDMVNIFRSILSQVKKDECGSTSSCDKELLINELRDFLKDKRLALPKSA

SEQ ID NO: 181953 - protein, 319 aa, Zea Mays
MLKPLVLSSHSQSHRLPAARFARLVAFSNSPANLTLKPAREDMAMATPTRVTAAAVVLRVLSLLILLRTGTCADDYSAFVYAGCSQGRYSADSQYASGVDSVLTSVASSAPYAPYDNFTSPTDSSVVGLYQCRSDLPASVCSGCVRSAISRLSSLCAWAVGGAVQLRACFVRYGNDSFLGKQDTAVLFKKCGGTPGDAGGVAMRDSALGALVAAAAPAGGGFRTGGSGAVQAMSQCVGDLGAKPCSDCVSAAAAQLKAGCGYATAGEVYLGKCYARFWANGGGGFSSSSSSAGRHGFRLVHVVAAGLFFPSLAYASLAI

SEQ ID NO: 181954 - protein, 385 aa, Zea Mays
MNCLKNSRSVLSRLLRHRPHVAAPPPPTPATAPQSPASRYYYYASRVKPAVSRPPPPPQLPRSRHYYTSPRRQQVVHFNRRRGGSRWYHDQRKLTAAVLISGGGAVAFYFGHLETVPYTNRSHLVVLSPKFERQLGESQFAQLKKEFGPKILPPLHPDSIRVRLIASEIVRAVHRGISVQQRHDAFYGEDASYGYGGIADDLSIKNRDADAAAALLGASPGKNASAAVAAQRDDELLDDRADAEVATVVGHEVGHAIARHSAEQITKNLWVAILQIVILQFIYMPDLINTVSTLLLRLPFSRRMEIEADHIGLLLLASAGYDPRVAPSVYEKLGKIGGDSALNNYLSTHPSSKKRAQLLSQASVMNEALKLYREVSAGQGTEGFL

SEQ ID NO: 181955 - protein, 363 aa, Zea Mays
MNCLKNSRSVLSRLLRHRPHVAAPPPPTPATAPQSPASRYYYYASRVKPAVSRPPPPPQLPRSRHYYTSPRRQQVVHFNRRRGGSRWYHDQRKLTAAVLISGGGAVAFYFGHLETVPYTNRSHLVVLSPKFERQLGESQFAQLKKEFGPKILPPLHPDSIRVRLIASEIVRAVHRGISVQQRHDAFYGEDASYGYGGIADDLSIKNRDADAAAALLGASPGKNASAAVAAQRDDELLDDRWVTESRSRGKARGAQPQTGHLDGVNWEVIVVKDDLVNAFCLPGGKIVVFTGLLNNFRADAEVATVVGHEVGHAIARHSAEQITKNLWVAILQIVILQFIYMPDLINTVSTLLLRLPFSRRHWT

SEQ ID NO: 181956 - protein, 360 aa, Zea Mays
MNCLKNSRSVLSRLLRHRPHVAAPPPPTPATAPQSPASRYYYYASRVKPAVSRPPPPPQLPRSRHYYTSPRRQQVVHFNRRRGGSRWYHDQRKLTAAVLISGGGAVAFYFGHLETVPYTNRSHLVVLSPKFERQLGESQFAQLKKEFGPKILPPLHPDSIRVRLIASEIVRAVHRGISVQQRHDAFYGEDASYGYGGIADDLSIKNRDADAAAALLGASPGKNASAAVAAQRDDELLDDRWVTESRSRGKARGAQPQTGHLDGVNWEVIVVKDDLVNAFCLPGGKIVVFTGLLNNFRADAEVATVVGHEVGHAIARHSAEQITKNLWVAILQIVILQFIYMPDLINTVSTLLLRLPFSRR

SEQ ID NO: 181957 - protein, 394 aa, Zea Mays
MDLPPLSHQALFAAVRSADAAAVRALLADAEASGTSLAALAAAQTDAGETALYVAAEAGSEETVSLLLPLYDLEAATVRSRLDLDAFHVAAKQGHTGVVKEFLGRWPGLCSVCDSSNTSPLYSAAVKDHLDVVNAILDTDDSCIRIVRKNGKTSLHTAARIGYHRIVKALIERDPGIVPIKDRKGQTALHMAVKGKNTDVVEELLMADVSILNVRDKKGNTALHIATRKWRPQMVQLLLSYESLEINAINIQNETAMDLADKVPYGESKTEIIEWLTEAGAKNARNVGKIDEASELRRTVSDIKHNVQAQLSENAKTNKRVTGIRKELQKLHREAIQNTINSVTMVATLIASIAFVAIFNLPGQYFQDVNSGGDIDHLGCLGNWCPEASYQDRK

SEQ ID NO: 181958 - protein, 275 aa, Zea Mays
MEAPAMDLADKVPYGESKTEIIEWLTEAGAKNARNVGKIDEASELRRTVSDIKHNVQAQLSENAKTNKRVTGIRKELQKLHREAIQNTINSVTMVATLIASIAFVAIFNLPGQYFQDVNSGGDIGEAQIAKLTGFRVFCLLNATALFISLAVVVVQITLVAWETGAQKQVIKIVNKLMWTACLSTGAAFISLAYVVVGPQHAWMAFTVSAIGGPIMIGTLLFLAYLLLRPRFKFGEDRQRRIKRASGSKSFSWSLHDGFSDLEAFSDHEKKIYAL

SEQ ID NO: 181959 - protein, 283 aa, Zea Mays
MPVKQWLEERRFLQGEMQQLRDKLAIAERTARSEAQLKEKYQLRLKVLEDGLRGTPSGSCRPSMEGKCISNGPPRRLSLGGADSISKISPNGVLMRRSPSFNSRSPLSTSSCLVLKHAGRTSKSFDGGTRSLDQGKVLGSGPHSLNRSTDAVRDCETADSWKANAEEKSNETANNDSADMVSGVLYDVLQKEVVSLRKACHEKDQTLKDKEDAMEMLAKKVDTLHKAKEVEAKKKRQEIAALEKKFAAVCLEQERLGNLRGPGTSQTVSGRTASRGGLTRNLQ

SEQ ID NO: 181960 - protein, 418 aa, Zea Mays
MAAQFAAEATLRRVHGAQKDDDMPPIEAILAPLEAELKLCRKEIAKLQDDNRALDRLTKQKEAALLEAERTVQIAMAKAAMVDDMQNKNQELMKQIEICQEEKKIRDRELARAKVTANRVAVVVANEWKDANDKVMPVKQWLEERRFLQGEMQQLRDKLAIAERTARSEAQLKEKYQLRLKVLEDGLRGTPSGSCRPSMEGKCISNGPPRRLSLGGADSISKISPNGVLMRRSPSFNSRSPLSTSSCLVLKHAGRTSKSFDGGTRSLDQGKVLGSGPHSLNRSTDAVRDCETADSWKANAEEKSNETANNDSADMVSGVLYDVLQKEVVSLRKACHEKDQTLKDKEDAMEMLAKKVDTLHKAKEVEAKKKRQEIAALEKKFAAVCLEQERLGNLRGPGTSQTVSGRTASRGGLTRNLQ

SEQ ID NO: 181961 - protein, 778 aa, Zea Mays
MTYLKSTCLNPTDWLSVQYSRIRKSRHASQKLSNISLDDGLVYVHRVQVTPAKVYFYGPEINVSNRVVRHFSADIDNFLRISFVDEDCEKLRSADLSPRSTSGNDARRTALYNRVLSVLSNGINIGDKHFEFLAFSSSQLRDNSAWMFASRQGLTASDIRKWMGDFRDIRNVAKYAARLGQSFSSSTETLKVHKSEVERIPDITNGTKYIFSDGVGKISANFAVEVAMKCKLKRFAPSVFQIRYGGYKGVVAVDTRSNHKLSLRKSMSKFQSENITLDVLAYSKYQPCFLNRQLITLLSTLGVSDNVFELKQKEALRQLNRMVTEPQAAREAVELMPMGEVTNVVKELLSCGYQPDHEPYLSMLLQTFRASKLLELKTKSRIFITQGRAMMGCLDETCTLKYGQVFVQASYSADDHRKVVVTGKVVVAKNPCLHPGDIRVLQAVDVPALHHLFDCVVFPQQGPRPHPNECSGSDLDGDIYFVSWDPHLIPSRLVDPMDYTPASAETLDHDVTIEEIQEYFTNYIVNESLGIIANAHVVFADQERMKAESPPCVQLAKLFSIAVDFPKTGVPALIPHELHVKEYPDFMEKLDKVTYESKGVIGKLYREIKKHTPHIKHFTREVARRSYDTDLIVDGYEDYITEAIEFKEEYDFRLGNLMDHYGIKSEAEIISGCILKMAKNFTKSSDADAIRMAVRSLRKEARSWFNEMSTGEDGQDAMEAKASAWYHVTYHQQYWGSYNEGYDRPHLISFPWCVYDKLVAIKQGRNLLTRMDRNLRFR

SEQ ID NO: 181962 - protein, 913 aa, Zea Mays
MFEDPFFNWFRDDTDEQWTRTIDFTPSASIGQSSILCLEVPQQCELPRIGDYFVYYKEQNLDFECRNGYSYSCGSNLVPIVKSPDYIEVPYEILFKINHLVQNGTLSGPTVDHSFFRHVSPKFEPIDHIKRALLKMTYLKSTCLNPTDWLSVQYSRIRKSRHASQKLSNISLDDGLVYVHRVQVTPAKVYFYGPEINVSNRVVRHFSADIDNFLRISFVDEDCEKLRSADLSPRSTSGNDARRTALYNRVLSVLSNGINIGDKHFEFLAFSSSQLRDNSAWMFASRQGLTASDIRKWMGDFRDIRNVAKYAARLGQSFSSSTETLKVHKSEVERIPDITNGTKYIFSDGVGKISANFAVEVAMKCKLKRFAPSVFQIRYGGYKGVVAVDTRSNHKLSLRKSMSKFQSENITLDVLAYSKYQPCFLNRQLITLLSTLGVSDNVFELKQKEALRQLNRMVTEPQAAREAVELMPMGEVTNVVKELLSCGYQPDHEPYLSMLLQTFRASKLLELKTKSRIFITQGRAMMGCLDETCTLKYGQVFVQASYSADDHRKVVVTGKVVVAKNPCLHPGDIRVLQAVDVPALHHLFDCVVFPQQGPRPHPNECSGSDLDGDIYFVSWDPHLIPSRLVDPMDYTPASAETLDHDVTIEEIQEYFTNYIVNESLGIIANAHVVFADQERMKAESPPCVQLAKLFSIAVDFPKTGVPALIPHELHVKEYPDFMEKLDKVTYESKGVIGKLYREIKKHTPHIKHFTREVARRSYDTDLIVDGYEDYITEAIEFKEEYDFRLGNLMDHYGIKSEAEIISGCILKMAKNFTKSSDADAIRMAVRSLRKEARSWFNEMSTGEDGQDAMEAKASAWYHVTYHQQYWGSYNEGYDRPHLISFPWCVYDKLVAIKQGRNLLTRMDRNLRFR

SEQ ID NO: 181963 - protein, 1109 aa, Zea Mays
MKDLVKAIECQPIMGFGAGIPEPETEEPSDDAHMLTNQKIQLSIPSCSGAELDLQGKELGQGQHSVQECINPPIVVPVSRLHEVEKARRDLPIIMMEQEIMEAIYENSVVILCGETGCGKTTQVPQFLYEAGFGTSDRADRKGMIGITQPRRVAVHATAKRVSYELGLKLGREVGFQVRHDRKGDFLLKRYSVIILDEAHERSLNTDILIGMLSRIIKIRKDLYAKQQEKLRSGFKIKPEDKISQLKVVLMSATLQLKDFISNRRLFGVIPPAVKVPVRQFPVSVHFSKRTHDDYLGLAYKKVMSIHKRLPPGGILVFVTGQREVEYLCKKLRRASKVQTAKNPGKTDGEDNGPCPKVDEKEIFEAYDIDRDEPEHRYDMFSSYDDDGMYDDDGMNVETNIDSSDNETESEMDTETDDEESVTIETTEEDVPVLAFLKDAESSSALKASFGALSGIPNVLESVEELSDAKCEEKTSTSLRCFSKCTEHKPVSHGRLRVLPLYAKLSASQQLQVFEDVPEGERLVVVATNVAETSLTIPGIKYVVDTGKEKVKNYDHATGMSSYDVQWISKASASQRAGRAGRTGPGHCYRLYSAAAYGKDDLFPEFAEPQIKKIPVEGVVLMLKFMSIDKVENFPFPTPPNKESLVEAERCLKTLEALHSDGKLTPMGKAMAQYPMSPRHSRLLLTVIKNLKNKQQGFARSNFILGYAAAAASGLNFTNPFLKQLDECDTYGESVENTNLEANGPWERKRQKKLKAVVREAREKFSNPSSDALTIARALQFFELSENPVEFCRANSLHLKTMEEMSKLRKQLLQLIFRHSKWCEEFAWNSGDSAEVERAWRNEPSILQLNEEELLGQGICAGWADRVARRIHTYLKPSEDDRKVRAVRYQSCALDDTIYLHRSSSVAQVAPELVVYSELLSTKRLYMHGVTTVKPGWLLKYASSLCTFSAPLEDPKPYYDPLNDQVYCYVSPVFSRHNWQLPLHSLPIKDGASRLQVFACALLKGDVLPCLRDAKDFLALSPSAVLGPARQRRVGDLLSRMKIGPKLVDSRAALRGVWNFDPGFLYPELKLWYQDRFHDQFDLVWEQMHQQVLLEGRKLFPKRSKKVKG

SEQ ID NO: 181964 - protein, 187 aa, Zea Mays
MCKPIRASTIASSIQQLLKVEIAERKDNQNRPSFLRSLLVGKNILVVDDNKVNLRVAAAALKKYGANVSCVESGKDAISLLQPPHRFDACFMDVQMPEMDGFEATGQIRQMELKANEERKNKLASIEGSTTAEYHLPVLAMTADVIQATYEECIKSGMDGYVSKPFDEEQLYQAVSRLVVGTTDSAV

SEQ ID NO: 181965 - protein, 371 aa, Zea Mays
MTTSRQAYKVDRDHPGSDVAGETAAAMAAASIVFRDSNPHYAHLLLHHAQQLFEFADKYRGKYDSSIAEVKSYYASVSGYKDELLWAALWLHRATGRADYLDYVVDNADSFGGTGWAINEFSWDVKYAGVQILAARLLLRGEHATRHRSTLERYRAKAERYVCACLGRNTEGGADANVERSPGGMLYVRQWNNMQYVTSAAFLLSAYSDYLAEAGVRTVSCAGGETVAAREVAALARAQVDYVLGTNPRGVSYLVGYGPKYPSRVHHRAASIVPYKHSKEFIGCTQGFDHWFGRRSSNPNVLVGAIVGGPDRRDRFRDNRENYMQTEACTYNTAPMVGMFAKLHRLARQEREQGPTPAPAPAPVTSAAADV

SEQ ID NO: 181966 - protein, 758 aa, Zea Mays
MTTEILRNMLYQSVGMTASEGRLFQVDVIVLDEVHYLSDISRGTVWEETVIYCPKEVQLICLSATVANPDELAGWISQIHGKTELVTSNKRPVPLTWHFSKKYSLQPLLDGKGKKMNRKLRMSNSQNLASPKSEFYYVKGKRRFRTNKIEQGNSRPLDISKQVQLSKHELSNMRRSQVPLIRDTLSQLWENGMLPAIWFIFSRRGCDAAVEYLEDCRLLHDCEASEVELELRRFKMQYPDAIRESAVKGLMRGVAAHHAGCLPLWKSFIEELFQRGLVKVVFATETLAAGINMPARTAVISSLSKRIDAGRQLLTPNELFQMAGRAGRRGIDTVGHAVLVQTPYEGPEECCDIIFAGLEPLVSQFTASYGMVLNLLAGSKVTHKQKESDDVKDKHSGRTLEEARKLVEQSFGNYVGSNVMVAAKEETERIRQEIQYLSSEITDESIDRKCREELSEEDYAEISLLQKRLKEEKQIRNELKKKMELERMAAWKNRLEEFESGHLPFMCLQYKDKDSIQHTIPAVFIGNLNSFADQKIMNMVEDDSLVSGKPKRDSGEQLYRPSYYVALSSDNSWYLFTEKWIKTVYKTGLPAVPSVEGGTLPRETLKQLLLREELVWDKVEKSEYGSLLSMEGSLDTWSWSLNVPVLNSLSEDNEVERFSQEHQDAVECYKQQRRKVSHLKKTIKATRGFKEFQKIIDMRNFTKEKIERLEARSRRLTRRIRQIEPTGWKEFLQISKVIQEARALDINTQFLGTRSSWI

SEQ ID NO: 181967 - protein, 681 aa, Zea Mays
MHCIAPRLLLLPLPTVSRHALSPTQTPPLPPLLPSRACKFHLASARSPSRAAASVSGDDEDEEVDVDDDEDDETTIRNVDDEYDDDFEDGDEGDEGDEEAVDEESGGEYEEEAGEDEDKREDTAARRRDSEEYKSRRVAKLVAEVREFGEDVIDYNELAGIYDFPIDKFQRLAIQAFLRGSSVVVSAPTSSGKTLIAEAAAVATVARGRRLFYTTPLKALSNQKFRDFRNTFGDHNVGLLTGDSAINKDAQILIMTTEILRNMLYQSVGMTASEGRLFQVDVIVLDEVHYLSDISRGTVWEETVIYCPKEVQLICLSATVANPDELAGWISQIHGKTELVTSNKRPVPLTWHFSKKYSLQPLLDGKGKKMNRKLRMSNSQNLASPKSEFYYVKGKRRFRTNKIEQGNSRPLDISKQVQLSKHELSNMRRSQVPLIRDTLSQLWENGMLPAIWFIFSRRGCDAAVEYLEDCRLLHDCEASEVELELRRFKMQYPDAIRESAVKGLMRGVAAHHAGCLPLWKSFIEELFQRGLVKVVFATETLAAGINMPARTAVISSLSKRIDAGRQLLTPNELFQMAGRAGRRGIDTVGHAVLVQTPYEGPEECCDIIFAGLEPLVSQFTASYGMVLNLLAGSKVTHKQKESDDVKDKHSGRTLEEARKLVEQSFGNYVGSNGRIIRRRLC

SEQ ID NO: 181968 - protein, 684 aa, Zea Mays
MHCIAPRLLLLPLPTVSRHALSPTQTPPLPPLLPSRACKFHLASARSPSRAAASVSGDDEDEEVDVDDDEDDETTIRNVDDEYDDDFEDGDEGDEGDEEAVDEESGGEYEEEAGEDEDKREDTAARRRDSEEYKSRRVAKLVAEVREFGEDVIDYNELAGIYDFPIDKFQRLAIQAFLRGSSVVVSAPTSSGKTLIAEAAAVATVARGRRLFYTTPLKALSNQKFRDFRNTFGDHNVGLLTGDSAINKDAQILIMTTEILRNMLYQSVGMTASEGRLFQVDVIVLDEVHYLSDISRGTVWEETVIYCPKEVQLICLSATVANPDELAGWISQIHGKTELVTSNKRPVPLTWHFSKKYSLQPLLDGKGKKMNRKLRMSNSQNLASPKSEFYYVKGKRRFRTNKIEQGNSRPLDISKQVQLSKHELSNMRRSQVPLIRDTLSQLWENGMLPAIWFIFSRRGCDAAVEYLEDCRLLHDCEASEVELELRRFKMQYPDAIRESAVKGLMRGVAAHHAGCLPLWKSFIEELFQRGLVKVVFATETLAAGINMPARTAVISSLSKRIDAGRQLLTPNELFQMAGRAGRRGIDTVGHAVLVQTPYEGPEECCDIIFAGLEPLVSQFTASYGMVLNLLAVCIYIFFLFLSIHMFLLSPGPNLMDWNMFSRVQKLHINRKNRMMLRTSILEEP

SEQ ID NO: 181969 - protein, 800 aa, Zea Mays
MSNSQNLASPKSEFYYVKGKRRFRTNKIEQGNSRPLDISKQVQLSKHELSNMRRSQVPLIRDTLSQLWENGMLPAIWFIFSRRGCDAAVEYLEDCRLLHDCEASEVELELRRFKMQYPDAIRESAVKGLMRGVAAHHAGCLPLWKSFIEELFQRGLVKVVFATETLAAGINMPARTAVISSLSKRIDAGRQLLTPNELFQMAGRAGRRGIDTVGHAVLVQTPYEGPEECCDIIFAGLEPLVSQFTASYGMVLNLLAGSKVTHKQKESDDVKDKHSGRTLEEARKLVEQSFGNYVGSNVMVAAKEETERIRQEIQYLSSEITDESIDRKCREELSEEDYAEISLLQKRLKEEKQIRNELKKKMELERMAAWKNRLEEFESGHLPFMCLQYKDKDSIQHTIPAVFIGNLNSFADQKIMNMVEDDSLVSGKPKRDSGEQLYRPSYYVALSSDNSWYLFTEKWIKTVYKTGLPAVPSVEGGTLPRETLKQLLLREELVWDKVEKSEYGSLLSMEGSLDTWSWSLNVPVLNSLSEDNEVERFSQEHQDAVECYKQQRRKVSHLKKTIKATRGFKEFQKIIDMRNFTKEKIERLEARSRRLTRRIRQIEPTGWKEFLQISKVIQEARALDINTQVIYPLGETAAAIRGENELWLAMVLRNKVLLDLKPSQLAAVCGSLVSEGIKLRPWKNSSYVYEPSSVVTGVISYLEEQRNSLIDLQERHSVKIPCEIDAQFAGMVEAWASGLTWREIMMDSAMDDGDLARLLRRSIDLLAQIPKLPDIDPVLQKNAQIACSVMDRVPISELAG

SEQ ID NO: 181970 - protein, 469 aa, Zea Mays
MSNSQNLASPKSEFYYVKGKRRFRTNKIEQGNSRPLDISKQVQLSKHELSNMRRSQVPLIRDTLSQLWENGMLPAIWFIFSRRGCDAAVEYLEDCRLLHDCEASEVELELRRFKMQYPDAIRESAVKGLMRGVAAHHAGCLPLWKSFIEELFQRGLVKVVFATETLAAGINMPARTAVISSLSKRIDAGRQLLTPNELFQMAGRAGRRGIDTVGHAVLVQTPYEGPEECCDIIFAGLEPLVSQFTASYGMVLNLLAGSKVTHKQKESDDVKDKHSGRTLEEARKLVEQSFGNYVGSNVMVAAKEETERIRQEIQYLSSEITDESIDRKCREELSEEDYAEISLLQKRLKEEKQIRNELKKKMELERMAAWKNRLEEFESGHLPFMCLQYKDKDSIQHTIPAVFIGNLNSFADQKIMNMVRYFFKRVSIAEGKLKHAYSLFTYCRWKMIHLFLASRNVIVGNNFIAHLTM

SEQ ID NO: 181971 - protein, 423 aa, Zea Mays
MAGPKFGSFKAEKGDSAAAAGAAAQRRDPYEVLGVGRNATEQEIKSAFRRMALKYHPDKNSDDPVASEKFQEATFSYNILSDPDKRRQYDASGFEAIEADSQELELDLSSLNTVNTVFAALFSKLGVPIKTTVSATVLEEALNGSVEISQLQLGKSLCRKVEKQSAHFYSVDITDKEAKMGLVCRVHSTSKSKFKLLYFELEDNGGLSLALQEDSAKTGKVTSAGMFFLGFPVYRFEQNNSAAAAKDPDSAFFKRLDGFQPCEVNELKAGSHYFAVYGDNFFKSASYTIEVVSAEPFSAQKEKLRSVEAKIIAKRSELSKFESEYREIDDLLKERNAIHASYTNNPTLQRSSSSSKGKSPSKGSRSEDDQTVKKEKKSKSQPMEGSKSDDEGPENKKEETPKDRIRRKKWFNIHLKVDKRRPC

SEQ ID NO: 181972 - protein, 604 aa, Zea Mays
MRSPGRRLPAPARLVAAALLLAALTGGAVGADGYGRARRVYMKNKVLEMFYHAYDNYMTYAFPHDELKPLTKSFTDSLSELGNLNLEHLPQDYSGSALTLVESLSSLVVLGNLTEFERGVLWLSENLTFDVDARINLFECNIRLLGGLISAHILAKDYSSQFKHGLYQDQLLRLAESLGNRFLPAFETPTGLPYSWINLKYGVMENETTETSTSGCGSLILEMGVLSRLTGDSRYEAAALRALRKLWSMRSSLNLVGTTLDVFTGKWIQYSSGIGAGVDSFYEYLIKAYILFGSDEYWDMFHSAYLAVQKYFRHGPWYHEADMRTGEATHWQLTSLQAFWPGLQTLLGDVTAANLSHREFYNIWQRFGVLPERYLLDYGMLHPTEKYYPLRPEFAESTFYLYQATKDPWYLEVGETIVRSLNYYTKVDGGFASIRDVSTMKLEDHQHSFFLSETCKYLFLLYDDSFLRNQNYIFTTEGHPLPIRSTWHEKFPAAYVPSNWTSVKDEIQPIRASALSSQVCPETIFGRSVGTPWESACHVPDAHASHRCRTDDDCGIEAITCKKRTCSMAGYCGLFFYNGNKSSGFSMIMRTANTSRLLQLRTAA

SEQ ID NO: 181973 - protein, 203 aa, Zea Mays
MRSPGRRLPAPARLVAAALLLAALTGGAVGADGYGRARRVYMKNKVLEMFYHAYDNYMTYAFPHDELKPLTKSFTDSLSELGNLNLEHLPQDYSGSALTLVESLSSLVVLGNLTEFERGVLWLSENLTFDVDARINLFECNIRLLGGLISAHILAKDYSSQFKHGLYQDQLLRLAESLGNRFLPAFETPTGLPYSWINLKRSN

SEQ ID NO: 181974 - protein, 356 aa, Zea Mays
MRSSLNLVGTTLDVFTGKWIQYSSGIGAGVDSFYEYLIKAYILFGSDEYWDMFHSAYLAVQKYFRHGPWYHEADMRTGEATHWQLTSLQAFWPGLQTLLGDVTAANLSHREFYNIWQRFGVLPERYLLDYGMLHPTEKYYPLRPEFAESTFYLYQATKDPWYLEVGETIVRSLNYYTKVDGGFASIRDVSTMKLEDHQHSFFLSETCKYLFLLYDDSFLRNQNYIFTTEGHPLPIRSTWHEKFPAAYVPSNWTSVKDEIQPIRASALSSQVCPETIFGRSVGTPWESACHVPDAHASHRCRTDDDCGIEAITCKKRTCSMAGYCGLFFYNGNKSSGFSMIMRTANTSRLLQLRTAA

SEQ ID NO: 181975 - protein, 177 aa, Zea Mays
MENETTETSTSGCGSLILEMGVLSRLTGDSRYEAAALRALRKLWSMRSSLNLVGTTLDVFTGKWIQYSSGIGAGVDSFYEYLIKAYILFGSDEYWDMFHSAYLAVQKYFRHGPWYHEADMRTGEATHWQLTSLQAFWPGLQTLLGDVTAANLSHREFYNIWQRFGVLPERSLVPRSG

SEQ ID NO: 181976 - protein, 331 aa, Zea Mays
MVAGVDSFYEYLIKAYILFGSDEYWDMFHSAYLAVQKYFRHGPWYHEADMRTGEATHWQLTSLQAFWPGLQTLLGDVTAANLSHREFYNIWQRFGVLPERYLLDYGMLHPTEKYYPLRPEFAESTFYLYQATKDPWYLEVGETIVRSLNYYTKVDGGFASIRDVSTMKLEDHQHSFFLSETCKYLFLLYDDSFLRNQNYIFTTEGHPLPIRSTWHEKFPAAYVPSNWTSVKDEIQPIRASALSSQVCPETIFGRSVGTPWESACHVPDAHASHRCRTDDDCGIEAITCKKRTCSMAGYCGLFFYNGNKSSGFSMIMRTANTSRLLQLRTAA

SEQ ID NO: 181977 - protein, 226 aa, Zea Mays
MFLCGCCLVIYMLTGSLILEMGVLSRLTGDSRYEAAALRALRKLWSMRSSLNLVGTTLDVFTGKWIQYSSGIGAGVDSFYEYLIKAYILFGSDEYWDMFHSAYLAVQKYFRHGPWYHEADMRTGEATHWQLTSLQAFWPGLQTLLGDVTAANLSHREFYNIWQRFGVLPERYLLDYGMLHPTEKYYPLRPEFAESTFYLYQATKGAPNTHQKDIFVLSSSSSHVFI

SEQ ID NO: 181978 - protein, 198 aa, Zea Mays
MENETTETSTSGCGSLILEMGVLSRLTGDSRYEAAALRALRKLWSMRSSLNLVGTTLDVFTGKWIQYSSGIGAGVDSFYEYLIKAYILFGSDEYWDMFHSAYLAVQKYFRHGPWYHEADMRTGEATHWQLTSLQAFWPGLQFYCTEQTLLGDVTAANLSHREFYNIWQRFGVLPERYTVFNQVFVNGEQKYTRLVRQN

SEQ ID NO: 181979 - protein, 371 aa, Zea Mays
MTYAFPHDELKPLTKSFTDSLSELGNLNLEHLPQDYSGSALTLVESLSSLVVLGNLTEFERGVLWLSENLTFDVDARINLFECNIRLLGGLISAHILAKDYSSQFKHGLYQDQLLRLAESLGNRFLPAFETPTGLPYSWINLKYGVMENETTETSTSGCGSLILEMGVLSRLTGDSRYEAAALRALRKLWSMRSSLNLVGTTLDVFTGKWIQYSSGIGAGVDSFYEYLIKAYILFGSDEYWDMFHSAYLAVQKYFRHGPWYHEADMRTGEATHWQLTSLQAFWPGLQTLLGDVTAANLSHREFYNIWQRFGVLPERYLLDYGMLHPTEKYYPLRPEFAESTFYLYQATKGAPNTHQKDIFVLSSSSSHVFI

SEQ ID NO: 181980 - protein, 218 aa, Zea Mays
MEEQLSPLAVTHLLQHTLRSLCGHDDAQWVYAVFWRILPRNYPPPKWDLQGGIYDRTRGNRRNWILAWEDGFCNFAASACDHEGAAAPAAAAASSSYTAECAAAGQEAAKGLQPELFFKMSHDIYNYGEGLIGKVAADHSHKWVFQEAQEHEINLISSWSNPADSHPRTWEAQFKSGIKTIALIAVREGVVQLGSMKKVHPADTVLRPLHSATALQLA

SEQ ID NO: 181981 - protein, 361 aa, Zea Mays
MNYLFQLASSARSQVLDKEVICNEKEHTITELKEKVVVLNGGIRQLETQVRDLRSQNTQLFTALNNAKKSARSNGTGFAQRKSVRASQHFGYSKDNFNWVDDMDISDSEHSDELENMSDGSDSDWVQSTRKAKKHQRRVSSHSNPNLDCQNTQGNAEPEKPSDEKCILPKYISSDGCSCSKSSSCKTNKCECRGSGAQCGAGCGCKDSKCSNRDSSIEKANQGAMLLQNAFSEKDSQDAKPRKPLINIGNNMVNQTAETKKPRKNWRKSTIQLVPGPLLPSEPVATEAAPRDRADIPLKLPRAMSSVTPVESNPPPLTDRNAAKPDESVSTGSKNSTGAAVTRAPSQLRKNATTEKENQLR

SEQ ID NO: 181982 - protein, 96 aa, Zea Mays
MSADLLCDPLAAAVSFLPSLANNVSFSPSPLPHMRFQQPVPREATPALSPLTGRPRLFLANHAVVSVRCDKGNCHDGTAAEADQTLIRWRHERASQ

SEQ ID NO: 181983 - protein, 270 aa, Zea Mays
MPGPITRRRTNTTPHGLADADGEQPIRARRWRASFGEAGGRTRWLTSTSTTPPPTAAATTSPSPSGVRCRPPRRPATRSPPPPRTTVRSSTEAGGPGPRSPTAQLQGTVEAAAGTRGRGGLISFIRRRRPTATGGRGDTTTTTSSRRTESRSPRTGTGTATTTTRRTGSRSRRTGTRGPAPAGRRRMTTTMTLMTTARGSHVTKRKTTTTRMTMTGRSATRRTTAAAATTMTIELYACSLVYTHVLESRVMQCIIPIASPTSSTVVNKRS

SEQ ID NO: 181984 - protein, 147 aa, Zea Mays
MISQGVRPLKPTAFCTLSPGLAAACNLTLLSGRASRLQLPSCPSTPRRPRRQKQTLRQYVVRELVTAALLATSSSRRSSPRRRRWSSDGGGHRRGGGQGFRQRRRSAGSWAGGGRRSRPLHRGSRGFSRLLVLGPAAAGLARRVVHG

SEQ ID NO: 181985 - protein, 724 aa, Zea Mays
MITGTDFYHVMTAVVPLYVAMILAYGSVRWWRIFSPDQCSGINRFVALFAVPLLSFHFISTNNPYTMNLRFIAADTLQKLMVLAMLTAWSHLSRRGSLEWTITLFSLSTLPNTLVMGIPLLKGMYGDFSGSLMVQIVVLQCIIWYTLMLFMFEYRGARMLITEQFPDNAGAIASIVVDPDVVSLDGRRDAIETEAEVKEDGRIHVTVRRSNASRSDIYSRRSMGFSSTTPRPSNLTNAEIYSLQSSRNPTPRGSSFNHNDFYSMVGRSSNFGAADAFGIRTGATPRPSNYEDDASKPKYPLPVVNATSGAGAAHYPAPNPAVAAAPKGARKAATNGQAKGEDLHMFVWSSSASPVSDVFGGGAPDYNEAAAAKSPRKMDGGKDRDDYVERDEFSFGNRGAMDRDAEAGDGKAAAAGGDPSTVAAPTAMPPTSVMTRLILIMVWRKLIRNPNTYSSLIGVIWSLVCFRWNFQMPAIVLQSISILSDAGLGMAMFSLGLFMALQPRIIACGNKVATFAMAVRFLTGPAVMAAASFAVGLRGTLLHVAIVQVLLTSEGGEGKTDRFHNIPRRHARLQQQESSLRCFLSRSPSSLVLASLSHLSRRGLLRSADSTKVTLFFSLCFWFFASPNGGTSRQLCLRALSPSSSQRSTTCTLTFSAPQSFLACSSPCRSRSSTTSCSACDRPVGDGNGMPRIAVTVKTAAATFRSREASEETVCYDICLALQK

SEQ ID NO: 181986 - protein, 272 aa, Zea Mays
MALRQAVLLAVVLAALLPLALSRGLGLVHGHVRPHTHGLGLGHHHAQPHPHPHGHAPLVGGAWSSAHATFYGGGDASGTMGGACGYGNLYSQGYGTNTAALSTALFNNGHSCLPGSVVVTATNFCPPNNALPSDDGGWCNPPRAHFDMSQPVFQRIALYRAGIVPVSYRRVACNKKGGIRFTINGHSYFNLVLVTNVGGAGDVHAVAVKAERSPGWQALSRNWGQNWQSNTLLDGQALSFRVTTSDGRSVLSNNAAPRGWSFGQTFSGAQFN

SEQ ID NO: 181987 - protein, 193 aa, Zea Mays
MKGVGVTHLPLVLGLDEHVLIQHGGVVPAEVLRHAARLQAAPALLVVPERVEAVRERVDHPIRLRAVERPPQPGVVERVERRHRVPEPAHGVHHGHGPVRHRVELVQPARLEPRRHQQDVRARRDAVRQGHREPHPRAHLVAVLRLAPPQHVLQVGAPRAQHHKLHVLSRDPVDRVGDDVHALLVVQPPDEPD

SEQ ID NO: 181988 - protein, 399 aa, Zea Mays
MKREVCPKRILGSWENQRSDDIEKQDEVMLPGFRFHPTDEELVRFYLKRKIQQKSLPIELIRQLDIYKYDPWDLPKLASTGEKEWYFYCPRDRKYRNSTRPNRVTGAGFWKATGTDRPIYSSDGSKCIGLKKSLVFYKGRAAKGVKTDWMMHEFRLPSLTDPTLLQKKPLEKTIPPNDSWAICRIFKKTNSTAQRALSHSWVSPPLSSTNENYIRLSSQATQRSYHSSENTSSTMTDIISSIQFTGSSYMPSIVSSCRNPLSIIDSSSRPAASLMLPSSGAEHHAMSILSAIPHDLPAGMDIASMVLNASPTTLQNLDRIPTNIEFGQPHHPSNSSMANRCTADLLDIGNSVTGAPRSINFPFNLQGALPDDWRMTLPWDSLPCTTEVSTNYKSTKYYT

SEQ ID NO: 181989 - protein, 384 aa, Zea Mays
MDAIRSDDIEKQDEVMLPGFRFHPTDEELVRFYLKRKIQQKSLPIELIRQLDIYKYDPWDLPKLASTGEKEWYFYCPRDRKYRNSTRPNRVTGAGFWKATGTDRPIYSSDGSKCIGLKKSLVFYKGRAAKGVKTDWMMHEFRLPSLTDPTLLQKKPLEKTIPPNDSWAICRIFKKTNSTAQRALSHSWVSPPLSSTNENYIRLSSQATQRSYHSSENTSSTMTDIISSIQFTGSSYMPSIVSSCRNPLSIIDSSSRPAASLMLPSSGAEHHAMSILSAIPHDLPAGMDIASMVLNASPTTLQNLDRIPTNIEFGQPHHPSNSSMANRCTADLLDIGNSVTGAPRSINFPFNLQGALPDDWRMTLPWDSLPCTTEFYALKLCPTK

SEQ ID NO: 181990 - protein, 385 aa, Zea Mays
MVKRLRRKGDVSSAPPPKAAASRSTNPDKFKKKGVKTDPEKLKAACTESANIAEASASAQTPTPKPVKTSPAAAAAAEIADDRVAQSKTEDGKFSRKETMKGREEQKGEGASDGVTQTKTEDMNVTRKETMKGGERKGDGSRKEMMKGREERVKTEEKTGKEKEEEKSGSGFIFMCSARTKPECYQNGVFGLPRGKMDVVEKIQRGTKLFLYDFDLKLLYGVYKADTRGGLDLVRHAFDGKFPAQVKFSVFKDCLPIPESSFKHAIKENYSSKGRLLALFKPISLSKPAPQHIEDIRKPSDYEERRQLQHIEERAAPINVHAHPLEDRYKMTRSLHPPLFDEPRRGLVLNPYHMQEPQHVPLNYYHQVATRSPYHQPHMDIMHES

SEQ ID NO: 181991 - protein, 397 aa, Zea Mays
MVKRLRRKGDVSSAPPPKAAASRSTNPDKFKKKGVKTDPEKLKAACTESANIAEASASAQTPTPKPVKTSPAAAAAAEIADDRVAQSKTEDGKFSRKETMKGREEQKGEGASDGVTQTKTEDMNVTRKETMKGGERKGDGSRKEMMKGREERVKTEEKTGKEKEEEKSGSGFIFMCSARTKPECYQNGVFGLPRGKMDVVEKIQRGTKLFLYDFDLKLLYGVYKADTRGGLDLVRHAFDGKFPAQVKFSVFKDCLPIPESSFKHAIKENYSSKGRFTQELNTKQVQRLLALFKPISLSKPAPQHIEDIRKPSDYEERRQLQHIEERAAPINVHAHPLEDRYKMTRSLHPPLFDEPRRGLVLNPYHMQEPQHVPLNYYHQVATRSPYHQPHMDIMHES

SEQ ID NO: 181992 - protein, 143 aa, Zea Mays
MTRSLHPPLFDEPRRGLVLNPYHMQEPQHVPLNYYHQVATRSPYHQPHMDIMHERTAAEVTVRDHQALPGELAARSERVDELYRSYKLSTRAMDLSPGASYLTTYEHPTSVYGEGIQRPALTRVSGPSVPVSTRYSFAGPPAY

SEQ ID NO: 181993 - protein, 289 aa, Zea Mays
MDVVEKIQRGTKLFLYDFDLKLLYGVYKADTRGGLDLVRHAFDGKFPAQVKFSVFKDCLPIPESSFKHAIKENYSSKGRFTQELNTKQVQRLLALFKPISLSKPAPQHIEDIRKPSDYEERRQLQHIEERAAPINVHAHPLEDRYKMTRSLHPPLFDEPRRGLVLNPYHMQEPQHVPLNYYHQVATRSPYHQPHMDIMHERTAAEVTVRDHQALPGELAARSERVDELYRSYKLSTRAMDLSPGASYLTTYEHPTSVYGEGIQRPALTRVSGPSVPVSTRYSFAGPPAY

SEQ ID NO: 181994 - protein, 249 aa, Zea Mays
MGIGAVSDELLGTFVPIAVYWLYSGLYVALDGVGRLDGYRLHTREEAATKNVVSKAAVVRGVLVQQVFQVIGDESSTGQKQPPVLVIVLQFITAMVVMDTWQYFMHRYMHINKFLYKHIHSKHHTLVVPYSFGALYNHPLEGLILDTIGGALSFLVSGMTPRTSIFFFSFATIKTVDDHCGLWLPGNILQALFSNNSAYHDIHHQLYGNKYNFSQPFFVMWDKILGTYMPYSIEQRKGGGIESKPAKLD

SEQ ID NO: 181995 - protein, 230 aa, Zea Mays
MPELRLPINAPAAAGCRRHSRRLRRRCRLIFLPLLSLALLSLAYLSFSSHANLPIHAMHYGLSNRENISKWNGHEYSPDVTNISMTKVELEAPKSRKKLHKRYAPCQIQFLPSVDDLVEPAHYGNFTQFSLSYILKEEVLLHNDFFEPLFGGYQSLRDREETYHAKDQTLHCGFVRWPDDYPSTGFDLDENDRRYMDTCHVAVSSCIFGSSDYLRRPTKSRDMCLMEMDS

SEQ ID NO: 181996 - protein, 245 aa, Zea Mays
MFMDELTLATLSSEGHVPDGNGFIGLWRSVVVKNLPYKDMRRAGKVPKFLAHRLFPSATYSIWLDSKLRLHADPMLIIEYFLWRKKAEYAISMHYDRSCVWEEVVQNKRLNKYNHTAIDEQFHFYQSDGLVKFNDSGQLPVLPSYVPEGSFIVRAHTPMSNLFSCLWFNEVNRFTSRDQLSFTYTYLKLRRTNPGKPFHLNMFKDCERRAIVKLFHHRTNETTDPPPANLRLDTIRHPYRTEAAI

SEQ ID NO: 181997 - protein, 283 aa, Zea Mays
MDTCHVAVSSCIFGSSDYLRRPTKSRIGSYAKKNVCFVMFMDELTLATLSSEGHVPDGNGFIGLWRSVVVKNLPYKDMRRAGKVPKFLAHRLFPSATYSIWLDSKLRLHADPMLIIEYFLWRKKAEYAISMHYDRSCVWEEVVQNKRLNKYNHTAIDEQFHFYQSDGLVKFNDSGQLPVLPSYVPEGSFIVRAHTPMSNLFSCLWFNEVNRFTSRDQLSFTYTYLKLRRTNPGKPFHLNMFKDCERRAIVKLFHHRTNETTDPPPANLRLDTIRHPYRTEAAI

SEQ ID NO: 181998 - protein, 149 aa, Zea Mays
MPPPDAPLPPSISPQGTRRASRCPLAPVCLAVMRAARLAMPSRPCPCSPLLRPIPLCLARYPPLPTSSSPSHPPIVRQPIHASRPRPCHAGGEAKLTYRTRISFQTRRRRSGTGATFHGRRDPRPTRDAPPCQPLPFVTSRSDEGEGRT

SEQ ID NO: 181999 - protein, 162 aa, Zea Mays
MVGIFIGIIQLFSVDVYKKIVSKNKMLLFHEGVIETETVGTRVKESEAVLVEKEVELIDEPQIQESPPVPALLDDEQPYYLNQLAHVLKVVLVPLLWLVVEWPEQSYETAKTLLQSTQIEFLLSCRSRSSCRRLCLAGCRAPALGLFSSSVLLAPVWFPFCA

SEQ ID NO: 182000 - protein, 203 aa, Zea Mays
MPPPDAPLPPSISPQGTRRASRCPLAPVCLAVMRAARLAMPSRPCPCSPLLRPIPLCLARYPPLPTSSSPSHPPIVRQPIHASRPRPCHAGGEAKLTYRTRISFQTRRRRSGTGATFHAACGVGTMRQQDSRSRMMNNNSGVDAGGPGSGMGLGVPDVPLGSIIKTKGVTMTALLAKATATALLQHPMVNLQLQGWKELHIQK

SEQ ID NO: 182001 - protein, 177 aa, Zea Mays
MPPPDAPLPPSISPQGTRRASRCPLAPVCLAVMRAARLAMPSRPCPCSPLLRPIPLCLARYPPLPTSSSPSHPPIVRQPIHASRPRPCHAGGEAKLTYRTRISFQTRRRRSGTGATFHAACGVGTMRQQDSRSRMMNNNSGVDAGGPGSGMGLGVPDVPLGSIVIHDNAGLRQKGSQ

SEQ ID NO: 182002 - protein, 202 aa, Zea Mays
MECQTSISGDASSGQYSSKSTYDMLFLGSTSFGAFERVWKSWAPSKCSFFLWLAMHSRCWTADRLAKRGLPHPIACPLCDQEEETIQHLLISCVFARQFWYLLLRRSGLPNLSPDNALCSLKDWWSRAVEKVPRDLQSGFNSLVILGAWSLWRHRNDCVFNGRSPSLASVLTLAGDELRMWCLAGAKRLNLLSAVVFVFDPG

SEQ ID NO: 182003 - protein, 214 aa, Zea Mays
MIVNQQVVNIWYIPKKDESSRPDDVISAAQSGHLMTRAGRAIQVQYVLMATVMYHAVALDLPKWAIKAIDKIRHGFLWKGRKDVLGGHCLVAWGKVTRTKELGGLGISDLQKLNWALRVRWLWLEKTDPSKSWADLPLQSSSMLKSILSTTMITEVGDGRNTLFWRDRWLMGQRIEDLAPHIFALVPTRIANRRTVAEGLVEMAWIRDLRGTIT

SEQ ID NO: 182004 - protein, 84 aa, Zea Mays
MSNSLRISSHMRILCDHIPLCILPANCRVKCVVVRVATRSLLCRRGCALSCSRHYKWAFFVAQMSAMAHALSHSATTGHNLSLQ

SEQ ID NO: 182005 - protein, 140 aa, Zea Mays
MLGDGHTVTVINVQSKLSPPYMHSKDPGDAERLSTPGENNKESSFYHNCERHCYQPILPWINGDGSTNSTLYEGLSRRVIGYVMHYPGLSEEDVIRRMDVLNPQTCRTLLEKLTLDGNLHVRVFEEPVPMAPTTLQDPDL

SEQ ID NO: 182006 - protein, 719 aa, Zea Mays
MLKKKKFVLKVELHKWLERLEKKDGKIMDRKTLTRTLNKLQQEGSCKCIKVSAPLVTNYARSRLFDVILHSSVRDVSPELVEQFRTRQRNFDTESRAGAAAKVKQNQHMTAIPGLRISRRVKVYKPLLLEAMYANGFIGAKMIRAKLFHKFLWAYVNSLPNWCNAFGCTKAGQYDKSLNQSCLLFSMEAAMKEMPLELFLQIVGSAKKIDNMITLCRLGKTLSEIPTEEYNQILDTHANGRLSRLVNILDKLKLVQLAKEFLEDAGVSSNAMYTHSMELRPYIEEPMPRILPSSQLNNHRKIRHDFVLSKKEFVDSYWETLECCYLTAGLADPLSAFPGSSIPEVSHRRSWCSLRVMTTEQRLELQQRIMDVGEKGKIPFKDCVRIARELNLSVEQVLRLSYERQSRLHEQPSFTSKQKQQRVGSGLTPVRRKRRADGTSLKLLKRTVQASGSAEQILEQPIVDEEVPMISRYAILRKSCMRSKRFFWTCESDRKLLMAYIRVRAVLGARYYRVPWKSLSDLPAPPHTCLRRMALLLKTNGKIRGAVMCLCNLLGERYVRYLEKERSLKRRRLFPQISNRSQENSLDSDCEQFNWDDFEVPEIKSALNEVLELIQTEKIDQAKRIGPVNQKNINNDNDVTKDTICSQELPNNQAILGETKTSAVSESGFCDPEKSCRHSNAESENMEVFCKPQEKIIKDHRNKIIERGIWKSSANLKKK

SEQ ID NO: 182007 - protein, 230 aa, Zea Mays
MTSQQRIEITKPELLGSNEEANVDAFRVDGAFDVNSKNDISIHDYLPAMKAICDKLEEASGKVDCSHIFPIKAMLALVVSDIKVDLDYRMAYGHRAWRNVVIRELIPFLILSKVLHRLIDARLVEIFDVEDDDKVVRCLRLLKNFDPNEFQPKSIASNFKFVKKGQATDQILELPLENCIYDMISSQGTKGITLVEICRGLVVGSMVILDHGHIAQAQIFCKTTLHNSKL

SEQ ID NO: 182008 - protein, 114 aa, Zea Mays
MREKSKKDFVTSGRRRKTRRFRSFAGGNYGMGGGSGSFLKVLVNNMDVLAGPLVSLAYPLYASVRAIETKSAVDDQQWLTYWVLYSFITLFELTFAPVLEWLPFWSYAKLFFNC

SEQ ID NO: 182009 - protein, 88 aa, Zea Mays
MYCESYSSQLHPLMQVAAPPKLSAENISSVHHINQKKGTSGSSITSLMSSGAASVSAGAFVFSSSLTSVTGAYGKDSTASCKGRRCEN

SEQ ID NO: 182010 - protein, 77 aa, Zea Mays
MVFSPYCLCGRRLLWVTLIASMPLQANRCVRRFCHAYQICKKTLLPVAQLLDPVVPNLNQHCSGCCQPYSAIAATHD

SEQ ID NO: 182011 - protein, 378 aa, Zea Mays
MQDRDLGIYKPAESTTSRHLPCSHELCQPGSGCTNPKQPCTYNIDYFSENTTSSGLLIEDSLHLNSREGHAPVNASVIIGCGRKQSGDYLDGIAPDGLLGLGMADISVPSFLARAGLVRNSFSMCFKEDSSGRIFFGDQGVSSQQSTPFVPLYGKLQTYAVNVDKSCIGHKCLEGSSFQALVDSGTSFTSLPPDVYKAFTTEFDKQINASRVPYEDSTWKYCYSASPLEMPDVPTIILAFAANKSFQAVNPILPFNDEQGALARFCLAVLPSTEPIGIIGQNFLVGYHVVFDRESMKLGWYRSECRDVDNSTTVPLGPSQHGSSEDPLPSNEQQTSPPVTPATTGTAPPSSATTNRQMLFASSYPLLFLTMSTVFFIS

SEQ ID NO: 182012 - protein, 426 aa, Zea Mays
MLGRLLPPFWLHWILEVTCSGYPVTVFSVPLCLATVEIWCSVVNGASIMQDRDLGIYKPAESTTSRHLPCSHELCQPGSGCTNPKQPCTYNIDYFSENTTSSGLLIEDSLHLNSREGHAPVNASVIIGCGRKQSGDYLDGIAPDGLLGLGMADISVPSFLARAGLVRNSFSMCFKEDSSGRIFFGDQGVSSQQSTPFVPLYGKLQTYAVNVDKSCIGHKCLEGSSFQALVDSGTSFTSLPPDVYKAFTTEFDKQINASRVPYEDSTWKYCYSASPLEMPDVPTIILAFAANKSFQAVNPILPFNDEQGALARFCLAVLPSTEPIGIIGQNFLVGYHVVFDRESMKLGWYRSECRDVDNSTTVPLGPSQHGSSEDPLPSNEQQTSPPVTPATTGTAPPSSATTNRQMLFASSYPLLFLTMSTVFFIS

SEQ ID NO: 182013 - protein, 416 aa, Zea Mays
MLLQGHGMLGAEGCLGTRGSSGVLPTGGRRTVPVPALQLQDDRNNKGEDMFFSDWPELASFDDLEASLRNFDPTFEIGSSYFDDMLWPSNCSPGAQLARNGYSDDIDFSIDQKDSNSTPKVNTTKTKQQSRRNGASGGSSGTASNHEAHASSSSGLSDAELFLHPFDDTTALASQTWEEDLQAILCSIPETRAVVPAASTAMCADGSSTCCSGPDIVAAHHVPRSATATTKDAAFSGSPDTILEEMAENPLDMYFPPLPTTSGQSGTMMMSDTTWAPEHRFREEFAGSCALGCAELRFCSEDVASAGVFHKQPGSATAVVLDAVPVKDLSFQKLQHGMNQLDLATRGRIRDSLYRLANRLEQTHCVARTSGRMGSNRFESDGWGETQTTSPMDRLVAQLLLQKPSRRKTTPPHRVT

SEQ ID NO: 182014 - protein, 91 aa, Zea Mays
MVGTADCALSDLALLGEEPGARGGSPLIILTLAPNTQCRILRAPAPPSPRQRSSSAHPPTQWNAKRSTREPVDWFLPLLVSHSWSVFDWTD

SEQ ID NO: 182015 - protein, 91 aa, Zea Mays
MLHAPSTIFRFYFTMSHRHCISTGPSPIYSNSNSIQIFTIKIILTRKQCQPSSSHLLQKKQVLTHLLQKKIVVSPFAFAFLLIYDYCPLYL

SEQ ID NO: 182016 - protein, 547 aa, Zea Mays
MASSSQSGGAGGGGTVASNPRVWIVASIAVAGVLVLAEVARRRRRWLRGMSGTAPDAGSFCDRFELHPPAQPPPPAARHILSGLTFAASDNFEIEGYVAGFGNPDWKKTHETARHTAVAVTMLRKQGATCVGRTIMDELGFGVTGENLHHGTPANPVSSSLVPGGSCSGSAVAVAAQLIDFAIGTDTIGDVRIPASFCGLLCFRPSYGVISTLGTIANSQSLDTIGWFARDPCILHRVGEVLLPAAVGGLKQTRQFVFADDCFQLLKVSNQKTVHAIKNAVQALRGYQPPKHINIGQYIYSNVPSLKEFCEPATKLEEGTSALKAISTVMLLLQRYEFKANHEEWVNTVKPKLGLDISTRVLQAVNFARENIKSLYAIRNELRVALKNLLKDTGILVLPTTAGYPLKRNSKERLSSGFEDRMYKFVGVAALSGCCEVTIPMENLDHHVSLSFVAAHGSDKFLLRNILDTYSLIQDQVVLASKLETAPVTNVDVDVNASELLKEKGNSAFKRRQWIKAIEFYSEAISLSDTNATYYCNRAAAYLELGR

SEQ ID NO: 182017 - protein, 285 aa, Zea Mays
MLLLQRYEFKANHEEWVNTVKPKLGLDISTRVLQAVNFARENIKSLYAIRNELRVALKNLLKDTGILVLPTTAGYPLKRNSKERLSSGFEDRMYKFVGVAALSGCCEVTIPMENLDHHVSLSFVAAHGSDKFLLRNILDTYSLIQDQVVLASKLETAPVTNVDVDVNASELLKEKGNSAFKRRQWIKAIEFYSEAISLSDTNATYYCNRAAAYLELGRFKQAEADCDRALLLDRKNVKAYLRRGFAREVTLNYKEALQDFRHALALEPQNKTALAAERRLQKLLK

SEQ ID NO: 182018 - protein, 166 aa, Zea Mays
MYKFVGVAALSGCCEVTIPMENLDHHVSLSFVAAHGSDKFLLRNILDTYSLIQDQVVLASKLETAPVTNVDVDVNASELLKEKGNSAFKRRQWIKAIEFYSEAISLSDTNATYYCNRAAAYLELGRFKQAEADCDRALLLDRKVIDFCRCNIPVLLRVTCLKHCLP

SEQ ID NO: 182019 - protein, 171 aa, Zea Mays
MKQAAMGSEEHTTDARRRTWLAGWSPVVSLSRRPESGAECMRAPGLARRRSKSSSASGVVQAAVAAAFPPQRLVVGVAREAGRHRHRVVVDVGGAGAAAEPGHGGHLDGHAGVAGAAPVAAARRRRPQPRLVLRQVLLLRLTETRHPTRCQSQSVSGLRRRGGRVVRTVRT

SEQ ID NO: 182020 - protein, 179 aa, Zea Mays
MFIWRSPYLTFCLLMISASDVIFPAGQMFLGCVRCTSIEQKATFPSELAILRTGTHLIIHTNRHCTILKCYNITTLRCMVQPLLQDQPTNTWAICLVAQVQGLDSRRCSNQCDNPSFSSQRHRWMVLSHQSLRFHLISDSSCPLVQSQGNLMMHLAPSQPSQFLQLLLQPQTTRKIRGL

SEQ ID NO: 182021 - protein, 237 aa, Zea Mays
MACYNTASLAATLLAFALTFQAPDGEGPAQARRQGSPEPRHQPGAHGRRRGRGRVLRVPVRHARRVPAVPLRPVRVRVGRQPGVAVPRAVRVAVPPARVRPAGGAAHPAQRRRWGRRHGHLAGVHARRHGHQPVRQRVLLPGGLGRRAAGGRHGVRRRVRQGRVPRLRGLAAGRPGQRGQLQCQRGPREEVPGPGARRPGHVVVRHLGLDFAGRNQCFVVAGAVRGECSTRLTILVV

SEQ ID NO: 182022 - protein, 208 aa, Zea Mays
MVESVAPRLPNVTFLDISSCTKMGARGLEAFGKHCKSLAGLRRVMHPIDLADRACQHDEAHAIACSMPRLRHLEMGYMLVATEAVAEILGRCRELRFLDLRGCWAVDDKLLPRDRHPGLRVLGPRVDDCYENSYWEECSDDYSDDSSIYSWELMDDVDDDYDYAAGSDDDDDEAVWDDDGQGLENLEVRFYGGGFGETFAGFDWPPSP

SEQ ID NO: 182023 - protein, 652 aa, Zea Mays
MTYRAVVPTIQGYEDAGDFTVKERLKTSIHMNLLFYSIVGAIGLIGLILLLIMHKAWDGGIVGFAMACSNTFGLVTGAFLLGFGLSEIPRNIWKNADWSHRQKVLSHRVAKMAVKLDNAHQEYSNAIVVAQATSNQMSKRDILRPYMDIIDNMLSQMLREDPAFKPSGGRLGENDMDYDTDDKSMATLRRQLRRAHEEYYRCKSEYMTCVMEALKLEDTIKNYERRDANGWKYVSSFSESRSGTLGSILDTIEFIWCCILRKQLQKAFAVILGCMSAAILLAEATLLPSGVDLSLFSILIKAVGKQEVLVQVAAFVPLMYMCICTYYSLFKIGMLMFYSLTPRQTSSVSLLMICSMVARYAPPISYNFLNLIRLGGNAKTTFEKRMGNIDDAVPFFGRGFNKIYPLIMVVYTLLVASNFFVRVIDFLGRWKRFKFQREEENIDGLDPSGMIILQKERSWIEQGCKVGEQVIPLARNFNGVNADIESQNVPLVENTVEMKVGATSSRNDGRAGQLKYANNRETIASKYTSIREQNRQSGKVVRKEISPNSISLLEERNSEQGSNAGVPPTGVSATWASMKIGFQNFKANMGSKKFLPLRQDPGFVPNLNVSSPESLDDIFQRLKRRPANVPVDYLDDDDDDNIGDTDLHFQDQ

SEQ ID NO: 182024 - protein, 597 aa, Zea Mays
MNLLFYSIVGAIGLIGLILLLIMHKAWDGGIVGFAMACSNTFGLVTGAFLLGFGLSEIPRNIWKNADWSHRQKVAQATSNQMSKRDILRPYMDIIDNMLSQMLREDPAFKPSGGRLGENDMDYDTDDKSMATLRRQLRRAHEEYYRCKSEYMTCVMEALKLEDTIKNYERRDANGWKYVSSFSESRSGTLGSILDTIEFIWCCILRKQLQKAFAVILGCMSAAILLAEATLLPSGVDLSLFSILIKAVGKQEVLVQVAAFVPLMYMCICTYYSLFKIGMLMFYSLTPRQTSSVSLLMICSMVARYAPPISYNFLNLIRLGGNAKTTFEKRMGNIDDAVPFFGRGFNKIYPLIMVVYTLLVASNFFVRVIDFLGRWKRFKFQREEENIDGLDPSGMIILQKERSWIEQGCKVGEQVIPLARNFNGVNADIESQNVPLVENTVEMKVGATSSRNDGRAGQLKYANNRETIASKYTSIREQNRQSGKVVRKEISPNSISLLEERNSEQGSNAGVPPTGVSATWASMKIGFQNFKANMGSKKFLPLRQDPGFVPNLNVSSPESLDDIFQRLKRRPANVPVDYLDDDDDDNIGDTDLHFQDQ

SEQ ID NO: 182025 - protein, 407 aa, Zea Mays
MAVKLDNAHQEYSNAIVVAQATSNQMSKRDILRPYMDIIDNMLSQMLREDPAFKPSGGRLGENDMDYDTDDKSMATLRRQLRRAHEEYYRCKSEYMTCVMEALKLEDTIKNYERRDANGWKYVSSFSESRSGTLGSILDTIEFIWCCILRKQLQKAFAVILGCMSAAILLAEATLLPSGVDLSLFSILIKAVGKQEVLVQVAAFVPLMYMCICTYYSLFKIGMLMFYSLTPRQTSSVSLLMICSMVARYAPPISYNFLNLIRLGGNAKTTFEKRMGNIDDAVPFFGRGFNKIYPLIMVVYTLLVASNFFVRVIDFLGRWKRFKFQREEENIDGLDPSGMIILQKERSWIEQGCKVGEQVIPLARNFNGVNADIESQNVPLVRRMVPSFTWEIKLRLFSFSLFETLSS

SEQ ID NO: 182026 - protein, 371 aa, Zea Mays
MNAVMLMDGNMYQVLVKVARAHLDQFWTLSVAAFVPLMYMCICTYYSLFKIGMLMFYSLTPRQTSSVSLLMICSMVARYAPPISYNFLNLIRLGGNAKTTFEKRMGNIDDAVPFFGRGFNKIYPLIMVVYTLLVASNFFVRVIDFLGRWKRFKFQREEENIDGLDPSGMIILQKERSWIEQGCKVGEQVIPLARNFNGVNADIESQNVPLVENTVEMKVGATSSRNDGRAGQLKYANNRETIASKYTSIREQNRQSGKVVRKEISPNSISLLEERNSEQGSNAGVPPTGVSATWASMKIGFQNFKANMGSKKFLPLRQDPGFVPNLNVSSPESLDDIFQRLKRRPANVPVDYLDDDDDDNIGDTDLHFQDQ

SEQ ID NO: 182027 - protein, 468 aa, Zea Mays
MAVKLDNAHQEYSNAIVVAQATSNQMSKRDILRPYMDIIDNMLSQMLREDPAFKPSGGRLGENDMDYDTDDKSMATLRRQLRRAHEEYYRCKSEYMTCVMEALKLEDTIKNYERRDANGWKYVSSFSESRSGTLGSILDTIEFIWCCILRKQLQKAFAVILGCMSAAILLAEATLLPSGVDLSLFSILIKAVGKQEVLVQRMGNIDDAVPFFGRGFNKIYPLIMVVYTLLVASNFFVRVIDFLGRWKRFKFQREEENIDGLDPSGMIILQKERSWIEQGCKVGEQVIPLARNFNGVNADIESQNVPLVENTVEMKVGATSSRNDGRAGQLKYANNRETIASKYTSIREQNRQSGKVVRKEISPNSISLLEERNSEQGSNAGVPPTGVSATWASMKIGFQNFKANMGSKKFLPLRQDPGFVPNLNVSSPESLDDIFQRLKRRPANVPVDYLDDDDDDNIGDTDLHFQDQ

SEQ ID NO: 182028 - protein, 541 aa, Zea Mays
MAVKLDNAHQEYSNAIVVAQATSNQMSKRDILRPYMDIIDNMLSQMLREDPAFKPSGGRLGENDMDYDTDDKSMATLRRQLRRAHEEYYRCKSEYMTCVMEALKLEDTIKNYERRDANGCAAFVKQVMPSDLTRGYIVTFPEFIWCCILRKQLQKAFAVILGCMSAAILLAEATLLPSGVDLSLFSILIKAVGKQEVLVQVAAFVPLMYMCICTYYSLFKIGMLMFYSLTPRQTSSVSLLMICSMVARYAPPISYNFLNLIRLGGNAKTTFEKRMGNIDDAVPFFGRGFNKIYPLIMVVYTLLVASNFFVRVIDFLGRWKRFKFQREEENIDGLDPSGMIILQKERSWIEQGCKVGEQVIPLARNFNGVNADIESQNVPLVENTVEMKVGATSSRNDGRAGQLKYANNRETIASKYTSIREQNRQSGKVVRKEISPNSISLLEERNSEQGSNAGVPPTGVSATWASMKIGFQNFKANMGSKKFLPLRQDPGFVPNLNVSSPESLDDIFQRLKRRPANVPVDYLDDDDDDNIGDTDLHFQDQ

SEQ ID NO: 182029 - protein, 170 aa, Zea Mays
MVGFNKIAQVENTVEMKVGATSSRNDGRAGQLKYANNRETIASKYTSIREQNRQSGKVVRKEISPNSISLLEERNSEQGSNAGVPPTGVSATWASMKIGFQNFKANMGSKKFLPLRQDPGFVPNLNVSSPESLDDIFQRLKRRPANVPVDYLDDDDDDNIGDTDLHFQDQ

SEQ ID NO: 182030 - protein, 161 aa, Zea Mays
MELCVSTPPSSVRATAAPISFAPPRRGASASTAVPPHRRIPTRVWRCASAAVPGPVPSEEPASASYAVVVTDKPDTPADDKAEELNIEVTPTLILTGFGAFIALWILSSVVAAVDSVPLLPKLLELIGTAYTIWFIARYLLFKESRDELFAKFEDLKQRII

SEQ ID NO: 182031 - protein, 217 aa, Zea Mays
MELCVSTPPSSVRATAAPISFAPPRRGASASTAVPPHRRIPTRVWRCASAAVPGPVPSEEPASASYAVVVTDKPDTPADDKAEEVSAAPSGSAEAPMAELVPSEASSSPDDGGLDEILSKLNIEVTPTLILTGFGAFIALWILSSVVAAVDSVPLELLTQFGSSHGISFSRKAEMNCLQSSKISNRGLFDLSSTFCHVFRLYSQLIIRFSPFRLKYF

SEQ ID NO: 182032 - protein, 1278 aa, Zea Mays
MFTEGLDRDALKWVREGQGAAALHSHDRMDALRAVRGAAGRGGLGMPTPEKFRSGHMPRGATVPLSRSSLRSDDGTAASGSDMDESSDNDEIEVCSGRYSVDSSPRRDDVTRRTAVPLYRYATMPGQQSYYSTDDGYSDLSSSRDTALPRAKAQPLGRPQARVVEYADEEYSVSPGTSEFSSQVEGQSNGVTSKGGYVSEYSHTGPARREANNLGPKNRAAAPARMRYQHDSHSAHVPAREDVKSTRKLVSFLCLFTKIFHSSTPLFFYVIAPSNGSSGDIPSAPPINDYDQDHQPVTHDDTRSCDNSNFTNGLSAKKDHREVNGGVNLADKNDRSTLNAGPTSKPSSSIPIRVPTFHASLQGPWYSVLAYDACVRLCLHAWARGCMEAPVFLENECTLLRNTFSLQNVLLQSEEELMSKRASELVSEGAASKPKKTIGKMKVQVRKVRMSVDMPSGCNLSSLPMVKLDSVRYRLSNVQSTLSSGWESVRRVRVLPQLPANSSFSKHSLAYMQASAQYIKQVSGLLKVGVTTLRSSSAYEAPQETYSCQLRLKSSPEDDVVPMQPGSGETHVFFPDSLGDDLIIDVSDSKGKSCGRVVAQVATMAEDHADKLRWWSIFREPEHELVGRIQLYIHYTTAADENNMKYGSVAETVAYDIVLEVAMKAQRIQQRNLVVHGSWKWLLTEFALYYGVSDAYTRLRYLSYIMDVATPTADWLNLVHGLLLPILMKSDGTATLSHQENRILGEVEEQIEQTLAMVCENYKSLDDSIPLGLAEDFRPPTGLAAAALEPAIKLYSLLHDVLSPEAQLRLCGYFQAAARKRTRRYMIETDEYVSGNSEGFRVDLVTVTTAYQKMKSLCNNLRSEIFTDIEIHNQHILPSFVDLPNLAASIYSVELSNRLRAFLVACPPAGPASPVADLVVATADFQKDLASWNICNIKAGVDAKELFHLYIVLWIEDKRRMLLENCRLDKVKWSGVRTQHMTTPFVDEMYDLLKKTLTEYEVIICRWPEYIFVLENAIADVEKAVIESLEKQYADVLAPLKDCIAPKKFGLKVVQKLTKRNSTVPYTVPEDLGILLNTLKRLLEVLRPRIESHLKSWSSCIPNGGNSAAIGEKLSEVTVTLRAKFRNYMQAVVEKLSENTRMQNTTKLKKIIQDSKELVIESDIRSRMQALKDQLIEAINHVHKVSEVHVFLAICRGFWDRMGQDVLSFLENRKENKAWYKGARVAISVLDDTFASQLQQLLGNTVPPKDLEPPRSIVEVRSILCKDAPRQKNSSFYY

SEQ ID NO: 182033 - protein, 1208 aa, Zea Mays
MFTEGLDRDALKWVREGQGAAALHSHDRMDALRAVRGAAGRGGLGMPTPEKFRSGHMPRGATVPLSRSSLRSDDGTAASGSDMDESSDNDEIEVCSGRYSVDSSPRRDDVTRRTAVPLYRYATMPGQQSYYSTDDGYSDLSSSRDTALPRAKAQPLGRPQARVVEYADEEYSVSPGTSEFSSQVEGQSNGVTSKGGYVSEYSHTGPARREANNLGPKNRAAAPARMRYQHDSHSAHVPAREDVKSTRKLNGSSGDIPSAPPINDYDQDHQPVTHDDTRSCDNSNFTNGLSAKKDHREVNGGVNLADKNDRSTLNAGPTSKPSSSIPIRVPTFHASLQNVLLQSEEELMSKRASELVSEGAASKPKKTIGKMKVQVRKVRMSVDMPSGCNLSSLPMVKLDSVRYRLSNVQSTLSSGWESVRRVRVLPQLPANSSFSKHSLAYMQASAQYIKQVSGLLKVGVTTLRSSSAYEAPQETYSCQLRLKSSPEDDVVPMQPGSGETHVFFPDSLGDDLIIDVSDSKGKSCGRVVAQVATMAEDHADKLRWWSIFREPEHELVGRIQLYIHYTTAADENNMKYGSVAETVAYDIVLEVAMKAQRIQQRNLVVHGSWKWLLTEFALYYGVSDAYTRLRYLSYIMDVATPTADWLNLVHGLLLPILMKSDGTATLSHQENRILGEVEEQIEQTLAMVCENYKSLDDSIPLGLAEDFRPPTGLAAAALEPAIKLYSLLHDVLSPEAQLRLCGYFQAAARKRTRRYMIETDEYVSGNSEGFRVDLVTVTTAYQKMKSLCNNLRSEIFTDIEIHNQHILPSFVDLPNLAASIYSVELSNRLRAFLVACPPAGPASPVADLVVATADFQKDLASWNICNIKAGVDAKELFHLYIVLWIEDKRRMLLENCRLDKVKWSGVRTQHMTTPFVDEMYDLLKKTLTEYEVIICRWPEYIFVLENAIADVEKAVIESLEKQYADVLAPLKDCIAPKKFGLKVVQKLTKRNSTVPYTVPEDLGILLNTLKRLLEVLRPRIESHLKSWSSCIPNGGNSAAIGEKLSEVTVTLRAKFRNYMQAVVEKLSENTRMQNTTKLKKIIQDSKELVIESDIRSRMQALKDQLIEAINHVHKVSEVHVFLAICRGFWDRMGQDVLSFLENRKENKAWYKGARVAISVLDDTFASQLQQLLGNTVPPKDLEPPRSIVEVRSILCKDAPRQKNSSFYY

SEQ ID NO: 182034 - protein, 89 aa, Zea Mays
MLTEFLESHILFVLIYHCRTARKMYLLYSIQCCNLSPANFPTVLARRKLCSSMLHVIFGSCGLLSAYILNGHRSIFSTASFSELYSEKK

SEQ ID NO: 182035 - protein, 209 aa, Zea Mays
MAEKSPAADVEAGLLAHLNSAGEVPDSRSFASSLGVSHLELEGVIKSLSAFRIVDSTDIIKETWVLTEEAKGYAAKGSPEAQLVAAISPEGASKDALKAILGDAFDVGMKAAARNKWIGFEKGNKDLVLRKVESVKDELQEQLRRLENGEVVSDKVIDDLKRRKLITKEKSIWYSLKKGSEFVVKRKTLATDVTTEHLRSCDILISERL

SEQ ID NO: 182036 - protein, 392 aa, Zea Mays
MAEKSPAADVEAGLLAHLNSAGEVPDSRSFASSLGVSHLELEGVIKSLSAFRIVDSTDIIKETWVLTEEAKGYAAKGSPEAQLVAAISPEGASKDALKAILGDAFDVGMKAAARNKWIGFEKGNKDLVLRKVESVKDELQEQLRRLENGEVVSDKVIDDLKRRKLITKEKSIWYSLKKGSEFVVKRKTLATDVTTEHLRSGDWKDLEFKDYNYGAQGQPIAKGYVQPLMEVREAIENIFIMMGFTEMPTNNFVESSFWNFDALFQPQQHPARDSHDTFFLKAPATTKQLPDDYLEKVKQVHQSGGYGSKGYGYDWKRDEAEKNLLRTHTTAVSTRMLYKLAQEKPFTPKRYYSIDRVFRNEAVDRTHLAEFHQIEGAQSYIGEHMHKLNLLP

SEQ ID NO: 182037 - protein, 201 aa, Zea Mays
MGKYMRKCRGAAGAEVAAVEVTQVVGVRTRSRSAAATGGVAKVVAPRRKRAPAGEPAASVGAGGDGGSCYIHLRSRMLFMAPPQPQPPSVPTPAEAADGAAGQQGAALAAGLSRCSSTASSVHVGGQRGSHTCRSDDAAEVQLRLRPWRAPRRRRPVRVGAGGQHLKRACVRCKVKLEREKMPPPTNITEKRKTKQLSSFI

SEQ ID NO: 182038 - protein, 94 aa, Zea Mays
MTSILNKWSSSIKFLKESSILPIPKIAKPFKRTSTATPNINRQVVGVGVEFSMRDLGCKANKKGIKSLQIIAETEDELNIQDENVPFKCTKDYQ

SEQ ID NO: 182039 - protein, 572 aa, Zea Mays
MVMGRPSNSHGGGGDEERLPLRGVLETSPSHHAAVQAKDKEADSSPQWVFDFEPPEEDDDQDIQDDMSDDLSPSPQIEYDRLLGGLLVEGFDDKSCRSRYRFARYHSSPSIPSPYLIERLRKQEALQKKCGPGTRAYREASKQLKSGQSMSINATDDCNYLFLIIHAGLGNRMLEITSAFLYALLTNRILLLDRYKEIADLFCEPFPGTSWLVPSDFPLNDDEFGQSSAESYGNMLQNKAFGGGTDRSLVGNRLPPYVYLHLDGNYGFHDKLFFCEDDQQFLRGVPWLVMRTDMYFVPSLFLVPAFQDELGRLFPEKDTVFHHLARYLFHPTNGVWYSVTRCFRSYLAKAEKRVGIQIRIYETKGILQRNGPFPHILNQILSCAQNEKLLPEISMAEGAADGTRNNRTAAGSGTRNNRTIAVLTTSLSAWYSEQIQEKYDEQSAVDGVSVRVFQPSHEEYQRSRNKGHNMKALAEIYLLSMTDVLITSGFSTFGYAAQGLAGLKPWIMLKSENHVTPDPPCVRAMSIEPCFHQAPFYDCKARKDTDLGKVVPYVRHCEDVSWGLKIVDQTHL

SEQ ID NO: 182040 - protein, 369 aa, Zea Mays
MDIKERIRRSPPSSPQAVGEAAASAPGHPRGRKARVAVLPLSVACGVTLLLLAGVSAARRGAQFSGADPTTLSGNDDRGGFEQAGPRDGEHATTVSSKVQRDKLIGGLLAPGFDEQSCLSRYQSALYRKESPHLVSTYLLERLREHEVLQKKCGPYTDSYKKAIEQLNSGQDIMVGDCNYLVWVSYSGLGNRILTIASAFLYAILTNRVLLVDGDKGTADLFCEPFPETSWVLPPDFPITKFKNFSIGSPESYGNMAKTEAIHSDGSFKGPKPAFLYLHLAHDYDDHDKLFFCEHSQQHLQKIPWLILRSDNYFVPSLFLISSYQEELTRLFPQKDVVFHHLGRYLFHPTNAVWGLITSMSWIRSFIAH

SEQ ID NO: 182041 - protein, 339 aa, Zea Mays
MVREEITGSTQTLEWKCVESRVDSKRLYYGRFILSPLRKGQADTVGIALRRALLGEIEGTCITRAKFGNVPHEYSTIVGIEESIQEILLNLKEIVLRSNLYGVRDASICVKGPRYITAQDIILPPSVEIVDTTQPIANLREPVDFCIELQIKRDRAYHTELRKNSQDGSYPIDAVFMPVRNVNYSIFSCGNGNEKHEILFLEIWMNGSLTPKEALYEASRNLIDLFLPFLHTEEEGTSFEENKNRLTPPLLTFQKRFTNLKKNKKGIPLNCIFIDQLELPSRTYNCLKRANIHTLLDLLSKTEEDLMQINSFRMEDGKLIWDTLEKHLPIDLPKNKFSL

SEQ ID NO: 182042 - protein, 512 aa, Zea Mays
MAAAPTADAMDVDAPARTLTTSPATKLRSPHDLLAETRASIEKVAARILAIKKDGAPKSELRELVTQMSLHLVTLRQVNREILMEEDKVKAETEAAKAPVDSTTLQLHNLLYEKNHYVKAIRACLDFQTKYPGIELVPEEEFQRSAPADILEKTLAADASHDLMLKRLNFELVQRKELCKLHEKLGQQRGSLLETIANQKKFLSSLPSHLKSLKKASLPVQQQLGMQHTKKLKQHHAAELLPTPLYIAYTQLLGQKEAFGENIEVEIAGSTKDAQIFAQQQAKKENTGTLSSGDNRMDDDVIDDEEDAQRRRSRSKKNVVKEANNPAVAYQLHPLKIILHVYDTEDSGSKRRKLITLRFEYLAKLNVVCVGIEDSEGLDSNILSNLFPDDTGLDLPHQQGYVLLLHLYLVSSWGLSFTSAEIVTCQFSQMAKIYVGEVPNFSDKDSRPYKWAQHLGGIDFLPEVPPSVGDDSSRALNTADLSSGLALYRQQNRAQTILQRIRLRKVAQMALM

SEQ ID NO: 182043 - protein, 207 aa, Zea Mays
MSSKKKRAAIDLSLEAERSGEGHSGGGGKGDRHRGKDNGEVDKKEEQFKEQREAPEEGTGEEKVVVEVVVDQGRDDTREIKYRTQQEEEMGNDKQPAEDAHGDDESDGGETRAQDKHVVEAAGNGDGDDSYTTMVQDEVSAMQEEMEKMKEENRMLRRVVDRTMRDYDELKKKVEACYQQQQADEPKEPEVFLSLGATAAGTGGGFA

SEQ ID NO: 182044 - protein, 254 aa, Zea Mays
MNDGCQWRKYGQKVAKGNPCPRAYYRCTVAPGCPVRKQVQRCLEDMSILVTTYEGTHNHPLPIGATAMASTTSAAATFMLLSSTSSSSATSEVRGGSAAPSYLSPPYLLNSTSHHPAASPLLGAQPSSSMPSAPAGVANGVQHLNMFGHSSMLAQQAPHFSSKYPWSSDPSQSQGIGGGLPAGSKRPFWSTGGDEKTATLPDNVGAVMADPSKFSVAIAAALNSYIGKDGQVVGGKDGESSSNKWGVVESLPPP

SEQ ID NO: 182045 - protein, 62 aa, Zea Mays
MALVACVWIAHCSGSMPAFTFRYVIQRIHGLRFNQWYQMRECDRDEYNGRFLAASKMARGGE

SEQ ID NO: 182046 - protein, 253 aa, Zea Mays
MAKWDAPVRLIWENRSVPFLILERKKATYELIRKAVAVKDHLAQLSDFHKYQRNVYLESGSGHQLRKPMRKYIQNLLKVNMEEPYGPEWLLEEKVKRREMVVPEARYIFVKQYSNGFITESSMKETEVEHMCAVCPESCLLGFVHYRFVVEEELPVLYVYELQMEPSAQGKGLGKFMMQLIEQIACKNQMGAVMLTVQKANTQAMAFYTKLRYVISSTSPSRVDPQIGLEKSYEILCKTFDSEAKSKLEDGDY

SEQ ID NO: 182047 - protein, 147 aa, Zea Mays
MRKYIQNLLKVNMEEPYGPEWLLEEKVKRREMVVPEARYIFVKQYSNGFITESSMKETEVEHMCAVCPESCLLGFVHYRFVVEEELPVLYVYELQMEPSAQGKGLGKFMMQLIEQIACKNQMGAVMLTVQKANTQAMAFYTKLRCDI

SEQ ID NO: 182048 - protein, 278 aa, Zea Mays
MAKWDAPVRLIWENRSVPFLTTGKRSWRRRRTRGPGSAVEQRRSQILERKKATYELIRKAVAVKDHLAQLSDFHKYQRNVYLESGSGHQLRKPMRKYIQNLLKVNMEEPYGPEWLLEEKVKRREMVVPEARYIFVKQYSNGFITESSMKETEVEHMCAVCPESCLLGFVHYRFVVEEELPVLYVYELQMEPSAQGKGLGKFMMQLIEQIACKNQMGAVMLTVQKANTQAMAFYTKLRYVISSTSPSRVDPQIGLEKSYEILCKTFDSEAKSKLEDGDY

SEQ ID NO: 182049 - protein, 228 aa, Zea Mays
MEEILDPSILSRQFMEEIRCALEEAREEPDRKLKTLQLPEEEEEGSRGDTVDEEDSDDEFKGFDENGDLCLPFVVSWDPPPVLVCTAGASFTMEEAEEIVDSVNERNDDLLSAWCEMVNNKVTPLPATPLHILPAITTFCVSGYECYHLRYWTEITSETDPDHPYFKPCEMMQVFSLGLSSPLTHPVNIYGYFSVRDNWEPLRNYLFKRSRADPAMISQASDACSCSE

SEQ ID NO: 182050 - protein, 136 aa, Zea Mays
MEEAEEIVDSVNERNDDLLSAWCEMVNNKVTPLPATPLHILPAITTFCVSGYECYHLRYWTEITSETDPDHPYFKPCEMMQVFSLGLSSPLTHPVNIYGYFSVRDNWEPLRNYLFKRSRADPAMISQASDACSCSE

SEQ ID NO: 182051 - protein, 726 aa, Zea Mays
MDFGDDVMDGGSDAQRRKKRYHRHTPRQIQQLEAMFKECPHPDENQRMQLSRELGLEPRQIKFWFQNRRTQMKAQHERQDNCFLRAENDKIRCENIAMQEALRNVICPTCGGPPVADDHFDEQKLRMENARLKEEASRFAFTIALAPGPASLDGPAILPRSSFTFTSGDLDRVSSLTSKYLGRPITQLPSAQALSMSSLDLSVGGLGGPSLDLDLLSGGSSGYPPFHLLPMAVSEMERPMMAEMATRAMDELIRMAQAGEHLWVKTGGREVLNVDTYDSIFAKPDGSFRGPDVHVEGSRETGLVFMSAIGLVDMFMDSSKWTELFPAIVSKARTVDVLVNGMGGRSESLLLMYEELHVMSPVVPTREFCFLRYCRQIEHGLWAIADISVDQQQRDARFGAPPSRSCRLPSGCLIADMADGSSKVTWVEHMEIEDRVPIHLLYRDLVLSGAAFGAHRWLAALQRACERCACLATAGIMPHRDIAAAGVTPEGKRSMMKLSQRMVNSFCASLSASQLHRWTTLSGPNDVGVRVMVHRSTDPGQPSGVVLSAATSIWLPVPCDRAFAFVRDEHTRSQWDVLSHGNPVQEVSRIPNGSHPGNCISLLRGLNASQNSMLILQESCTDASGSLVVYAPIDIPAANVVMSGEDPSAIPLLPSGFSILPDGRPGASSSRAGQAPSAGSLVTVAFQILVSSLPSAKLNAESVATVNSLISTTVEQIKAALNCASH

SEQ ID NO: 182052 - protein, 690 aa, Zea Mays
MDSKSSSLVQLEVGLVDIFVNLCRFEWQTGHRELATGLFQAQMEFSLFAPPLYLTTSSKQRLFEHFWNSGGARIGEDGALGWSEWLAKDEESRQKLSMQENSQETETGGWSGWFDPSLGNTETNDLSNKSLEPSLTDGNDAEDLDAEDSPAQDDVESLLKKLGIDVDAESNSEVKDAETWNRWASMELSRDNQQWMPLHENYGSIHCGDAPSGEDNDQLSRVILFEDVTEFLFSLSSEEARFSLMCQFIDFYGGKISRWTSTNSPSWLDRILSLENITDDILEDLGAVSDVVNKNQSSYSCKYKLESLLGSMCDLSQRPGLMKFLKNAILLLLGVFPRNHILEEAVLVTTQMFTPQENSSSIQTNASRALAKSMLKKDRQDFLLCGIYGRTEAMNGNIEQARKIFDMALLSTEATSEDLRKKVPILYLWLQVLRARQGFKEQIRSSRSAFSCGAINKESVALICSASLFESMTTGCYSGLEVIEETFPMTFSESNNLECEDLWVYYIKMLQKNLNQLNLSRVWPSISRGVHKYPYNPKSYSATLTLSYLYSVSNNLRLTLDKCSQRDPSVITLLFALSFEWGKAGSDNRIHSLFERALADDKLQKSVLLWRCYLAYEAEIVCNSSAARRVFFRAIHACPWSKRLWLDGFQKLGSVLTLKELSDLQEVMRDKELNIRTDIYEILLEEETNT

SEQ ID NO: 182053 - protein, 1107 aa, Zea Mays
MEPSSPATTATFPAAVEEHETYPPMVSSSLFPLFPFAASTSSAPPAESQWLSNPSFSFDASSLNIPATTSSSLPSPQSHSSDEDTPLQAAPAKYELVPSSPSSDEERGSRRKRSGRRKRKREKERYDGAATSRKAGIRAWAGLETKPAKDYYVDAKGDHDNLAFGSLYRMDVARYRSQNMMEAFGLNHLRFGSSHIDLDSDLDGMDNKVRAGGRYYSAKNAVSERNKGFKHLKIFKGNTSVMLAEDFVPFGTQSLPLKSTTVEQELEESWEDEILRRTREFNKMSRERPHDEKVWLAFAQFQDKVASTQPQKAARLQTTERKISILEKAVELNPDSEELLLCLLKSYGKRDNTETLLTKWEQILTKHPDSSTLWKQYLLLCQGEFSRFKVSEIRKSYVYAVQALSAACTKLCRQDNKSMDSKSSSLVQLEVGLVDIFVNLCRFEWQTGHRELATGLFQAQMEFSLFAPPLYLTTSSKQRLFEHFWNSGGARIGEDGALGWSEWLAKDEESRQKLSMQENSQETETGGWSGWFDPSLGNTETNDLSNKSLEPSLTDGNDAEDLDAEDSPAQDDVESLLKKLGIDVDAESNSEVKDAETWNRWASMELSRDNQQWMPLHENYGSIHCGDAPSGEDNDQLSRVILFEDVTEFLFSLSSEEARFSLMCQFIDFYGGKISRWTSTNSPSWLDRILSLENITDDILEDLGAVSDVVNKNQSSYSCKYKLESLLGSMCDLSQRPGLMKFLKNAILLLLGVFPRNHILEEAVLVTTQMFTPQENSSSIQTNASRALAKSMLKKDRQDFLLCGIYGRTEAMNGNIEQARKIFDMALLSTEATSEDLRKKVPILYLWYAEMEITVSASRNNSDSMHRAVYILSCLGSNLKYSPFVGPISRLQVLRARQGFKEQIRSSRSAFSCGAINKESVALICSASLFESMTTGCYSGLEVIEETFPMTFSESNNLECEDLWVYYIKMLQKNLNQLNLSRVWPSISRGVHKYPYNPKSYSATLTLSYLYSVSNNLRLTLDKCSQRDPSVITLLFALSFEWGKAGSDNRIHSLFERALADDKLQKSVLLWRCYLAYEAEIVCNSSAARRVFFRAIHACPCTSNFQV

SEQ ID NO: 182054 - protein, 845 aa, Zea Mays
MEPSSPATTATFPAAVEEHETYPPMVSSSLFPLFPFAASTSSAPPAESQWLSNPSFSFDASSLNIPATTSSSLPSPQSHSSDEDTPLQAAPAKYELVPSSPSSDEERGSRRKRSGRRKRKREKERYDGAATSRKAGIRAWAGLETKPAKDYYVDAKGDHDNLAFGSLYRMDVARYRSQNMMEAFGLNHLRFGSSHIDLDSDLDGMDNKVRAGGRYYSAKNAVSERNKGFKHLKIFKGNTSVMLAEDFVPFGTQSLPLKSTTVEQELEESWEDEILRRTREFNKMSRERPHDEKVWLAFAQFQDKVASTQPQKAARLQTTERKISILEKAVELNPDSEELLLCLLKSYGKRDNTETLLTKWEQILTKHPDSSTLWKQYLLLCQGEFSRFKVSEIRKSYVYAVQALSAACTKLCRQDNKSMDSKSSSLVQLEVGLVDIFVNLCRFEWQTGHRELATGLFQAQMEFSLFAPPLYLTTSSKQRLFEHFWNSGGARIGEDGALGWSEWLAKDEESRQKLSMQENSQETETGGWSGWFDPSLGNTETNDLSNKSLEPSLTDGNDAEDLDAEDSPAQDDVESLLKKLGIDVDAESNSEVKDAETWNRWASMELSRDNQQWMPLHENYGSIHCGDAPSGEDNDQLSRVILFEDVTEFLFSLSSEEARFSLMCQFIDFYGGKISRWTSTNSPSWLDRILSLENITDDILEDLGAVSDVVNKNQSSYSCKYKLESLLGSMCDLSQRPGLMKFLKNAILLLLGVFPRNHILEEAVLVTTQMFTPQENSSSIQTNASRALAKSMLKKDRQDFLLCGIYGRTEAMNGNIEQARKIFDMALLSTEATSEASGLEGSPRV

SEQ ID NO: 182055 - protein, 957 aa, Zea Mays
MEPSSPATTATFPAAVEEHETYPPMVSSSLFPLFPFAASTSSAPPAESQWLSNPSFSFDASSLNIPATTSSSLPSPQSHSSDEDTPLQAAPAKYELVPSSPSSDEERGSRRKRSGRRKRKREKERYDGAATSRKAGIRAWAGLETKPAKDYYVDAKGDHDNLAFGSLYRMDVARYRSQNMMEAFGLNHLRFGSSHIDLDSDLDGMDNKVRAGGRYYSAKNAVSERNKGFKHLKIFKGNTSVMLAEDFVPFGTQSLPLKSTTVEQELEESWEDEILRRTREFNKMSRERPHDEKVWLAFAQFQDKVASTQPQKAARLQTTERKISILEKAVELNPDSEELLLCLLKSYGKRDNTETLLTKWEQILTKHPDSSTLWKQYLLLCQGEFSRFKVSEIRKSYVYAVQALSAACTKLCRQDNKSMDSKSSSLVQLEVGLVDIFVNLCRFEWQTGHRELATGLFQAQMEFSLFAPPLYLTTSSKQRLFEHFWNSGGARIGEDGALGWSEWLAKDEESRQKLSMQENSQETETGGWSGWFDPSLGNTETNDLSNKSLEPSLTDGNDAEDLDAEDSPAQDDVESLLKKLGIDVDAESNSEVKDAETWNRWASMELSRDNQQWMPLHENYGSIHCGDAPSGEDNDQLSRVILFEDVTEFLFSLSSEEARFSLMCQFIDFYGGKISRWTSTNSPSWLDRILSLENITDDILEDLGAVSDVVNKNQSSYSCKYKLESLLGSMCDLSQRPGLMKFLKNAILLLLGVFPRNHILEEAVLVTTQMFTPQENSSSIQTNASRALAKSMLKKDRQDFLLCGIYGRTEAMNGNIEQARKIFDMALLSTEATSEDLRKKVPILYLWYAEMEITVSASRNNSDSMHRAVYILSCLGSNLKYSPFVGPISRLQVLRARQGFKEQIRSSRSAFSCGAINKESVALICSASLFESMTTGCYSGLEVIEETFPMTFSVREQ

SEQ ID NO: 182056 - protein, 273 aa, Zea Mays
MTDQERDDVPMLLRNVELPRFPLRSTSMCIPVRDDDYEEDTFVPHTGPLFVQPSTQTAPGISFTGRDTPDRLPKPSQGKQVSKPHAIMPEEIRGNKWSYSGQVPKNEHLMMSGPLGQCDNPDCVNCPPACKNRRHFQRGSNALDNKIHNILYGHSRGWKKKIEQIMACIPIMNPHAKPVQRWNQFFVISCLIAIFIDPLFFFLLSVRQDGNCIVLNWEIATALAVVRSVTDAIYFLHMLLQFRLAYVAPESRVVGAGDLVDEPKKVAIHYLRG

SEQ ID NO: 182057 - protein, 184 aa, Zea Mays
MFILAGHVVGSCWYLFGLQRVNQCLRDACSISTIPYCDSFIDCGRGIGSGLYRQQWFNDSGAEACFNTGNDATFQYGIYEQAVLLTTEDSAVKRYIYSLFWGFQQISTLAGNLVPSYFIWEVLFTMAIIGLGLLLFALLIGNMQNFLQALGRRRLEMQLRRRDVEKWMSHRRLPEDLRRSDYSP

SEQ ID NO: 182058 - protein, 51 aa, Zea Mays
MRLREAHAIGESLQERIEKLPQVERAFVHIDFESTHKPEHKVRSRLPSTDP

SEQ ID NO: 182059 - protein, 60 aa, Zea Mays
MRASASRYGAKKLCQPYRPYGTTPLTSATATTMTPRIPSSCAPFAIAASISYRAVVSSEH

SEQ ID NO: 182060 - protein, 325 aa, Zea Mays
MVSNPAPSSAPRYSAYSLPSTHLPGEDILFCIDADLEVHAKMKSAAVASSGSTSTASPQSVGADGAPAVGTRTVVAREPPTLRLTHPKPDKDGYPHIFDYFAVQTHDFLVPLWLPPDLAFARIDHRAAAVTYHGALPRRARRDDGGRVPEDGTDDRRAEEEARRWHCARTLRGDDAHGGEDGVPGRPAGACVHGAVRAKMEKYAAKKSAAQAKEKRAVWEWDYESFVDVSWRFRRLFPPTRWACEFNTALTVPFFRWLVGPSEVEVGGLRQRSEVRIEKCRYLESSGCVGMCVNMCKVPTQDFFTNEFGLPLTMDPNMSCEMIYG

SEQ ID NO: 182061 - protein, 232 aa, Zea Mays
MAPAAEALSLSRQHRAAAVTYHGALPRRARRDDGGRVPEDGTDDRRAEEEARRWHCARTLRGDDAHGGEDGVPGRPAGACVHGAVRAKMEKYAAKKSAAQAKEKRAVWEWDYESFVDVSWRFRRLFPPTRWACEFNTALTVPFFRWLVGPSEVEVGGLRQRSEVRIEKCRYLESSGCVGMCVNMCKVPTQDFFTNEFGLPLTMDPSTRFSKIRALVMSCAQQQQRLLQWGNS

SEQ ID NO: 182062 - protein, 332 aa, Zea Mays
MVSNPAPSSAPRYSAYSLPSTHLPGEDILFCIDADLEVHAKMKSAAVASSGSTSTASPQSVGADGAPAVGTRTVVAREPPTLRLTHPKPDKDGYPHIFDYFAVQTHDFLVPLWLPPDLAFARIDHRAAAVTYHGALPRRARRDDGGRVPEDGTDDRRAEEEARRWHCARTLRGDDAHGGEDGVPGRPAGACVHGAVRAKMEKYAAKKSAAQAKEKRAVWEWDYESFVDVSWRFRRLFPPTRWACEFNTALTVPFFRWLVGPSEVEVGGLRQRSEVRIEKCRYLESSGCVGMCVNMCKVPTQDFFTNEFGLPLTMDPSECSAWLYYSGVMNMD

SEQ ID NO: 182063 - protein, 290 aa, Zea Mays
MDGGLALAHRCLTGNETHDSTVKNSSPAKRPAHDELLMNPRVAPFNETGSLGTIYPTRKDTFGGFSVHVPYVSRMRRGRPRKDFISFAVTIYDKGPSVEPKGIQPSVEMILVKDGDKGNHLRKVPEVPLKVSSENEHAEAVDSKGVRNLQAKVCSAVSKPKIKHGLTRKHHRAWTLSEVVKLVDGVARYGAGKWSEIRKLSFASYSYRTSVDLKDKWRNLIRATQTQLPAQKDGACPRKTNPSIIPIPPSILLRVKELHELQSQGGGFTAPVKFSGQDGKVLQGKGSGFL

SEQ ID NO: 182064 - protein, 626 aa, Zea Mays
MKFDLSMEMDDSHGTMVNKSEENDFEKKGTSDPVVYQLVRVEGDGTLVPATEDDVLQFEHFLHNEKVDLPPIEDADHVEEFFNNDCMLLKKPDLEDGSSKLETVEAHTQKLGANLEENILQSLDDSLSPPSDFRIHSQHSDKLLTEQGANVTRQDNASTETTKSTVLNDSCCAEKYKADACSRSVCDTSTDPSVSGVNSSMPDFSILRGEVCLDDLTIRELQEAFRATFGRQTNVKDKIWLKRRITMGLTNSYDVPSSGCVVKDYKIVGKDAKNDMSDMDERAKTGLRATSVVIYPGNEGDSPSSSYYQSEDQEDSSKRVPIHNDEPQGNLLGEQCTDKRTRKPTKRYIEELSDIETHDSTVKNSSPAKRPAHDELLMNPRVAPFNETGSLGTIYPTRKDTFGGFSVHVPYVSRMRRGRPRKDFISFADKGPSVEPKGIQPSVEMILVKDGDKGNHLRKVPEVPLKVSSENEHAEAVDSKGVRNLQAKVCSAVSKPKIKHGLTRKHHRAWTLSEVVKLVDGVARYGAGKWSEIRKLSFASYSYRTSVDLKDKWRNLIRATQTQLPAQKDGACPRKTNPSIIPIPPSILLRVKELHELQSQGGGFTAPVKFSGQDGKVLQGKGSGFL

SEQ ID NO: 182065 - protein, 582 aa, Zea Mays
MEMDDSHGTMVNKSEENDFEKKGTSDPVVYQLVRVEGDGTLVPATEDDVLQFEHFLHNEKVDLPPIEDADHVEEFFNNDCMLLKKPDLEDGSSKLETVEAHTQKLGANLEDNASTETTKSTVLNDSCCAEKYKADACSRSVCDTSTDPSVSGVNSSMPDFSILRGEVCLDDLTIRELQEAFRATFGRQTNVKDKIWLKRRITMGLTNSYDVPSSGCVVKDYKIVGKDAKNDMSDMDERAKTGLRATSVVIYPGNEGDSPSSSYYQSEDQEDSSKRVPIHNDEPQGNLLGEQCTDKRTRKPTKRYIEELSDIETHDSTVKNSSPAKRPAHDELLMNPRVAPFNETGSLGTIYPTRKDTFGGFSVHVPYVSRMRRGRPRKDFISFADKGPSVEPKGIQPSVEMILVKDGDKGNHLRKVPEVPLKVSSENEHAEAVDSKGVRNLQAKVCSAVSKPKIKHGLTRKHHRAWTLSEVVKLVDGVARYGAGKWSEIRKLSFASYSYRTSVDLKDKWRNLIRATQTQLPAQKDGACPRKTNPSIIPIPPSILLRVKELHELQSQGGGFTAPVKFSGQDGKVLQGKGSGFL

SEQ ID NO: 182066 - protein, 270 aa, Zea Mays
MEMDDSHGTMVNKSEENDFEKKGTSDPVVYQLVRVEGDGTLVPATEDDVLQFEHFLHNEKVDLPPIEDADHVEEFFNNDCMLLKKPDLEDGSSKLETVEAHTQKLGANLEVSSENEHAEAVDSKGVRNLQAKVCSAVSKPKIKHGLTRKHHRAWTLSEVVKLVDGVARYGAGKWSEIRKLSFASYSYRTSVDLKDKWRNLIRATQTQLPAQKDGACPRKTNPSIIPIPPSILLRVKELHELQSQGGGFTAPVKFSGQDGKVLQGKGSGFL

SEQ ID NO: 182067 - protein, 308 aa, Zea Mays
MEMDDSHGTMVNKSEENDFEKKGTSDPVVYQLVRVEGDGTLVPATEDDVLQFEHFLHNEKVDLPPIEDADHVEEFFNNDCMLLKKPDLEDGSSKLETVEAHTQKLGANLEDKGPSVEPKGIQPSVEMILVKDGDKGNHLRKVPEVPLKVSSENEHAEAVDSKGVRNLQAKVCSAVSKPKIKHGLTRKHHRAWTLSEVVKLVDGVARYGAGKWSEIRKLSFASYSYRTSVDLKDKWRNLIRATQTQLPAQKDGACPRKTNPSIIPIPPSILLRVKELHELQSQGGGFTAPVKFSGQDGKVLQGKGSGFL

SEQ ID NO: 182068 - protein, 609 aa, Zea Mays
MKFDLSMEMDDSHGTMVNKSEENDFEKKGTSDPVVYQLVRFEHFLHNEKVDLPPIEDADHVEEFFNNDCMLLKKPDLEDGSSKLETVEAHTQKLGANLEENILQSLDDSLSPPSDFRIHSQHSDKLLTEQGANVTRQDNASTETTKSTVLNDSCCAEKYKADACSRSVCDTSTDPSVSGVNSSMPDFSILRGEVCLDDLTIRELQEAFRATFGRQTNVKDKIWLKRRITMGLTNSYDVPSSGCVVKDYKIVGKDAKNDMSDMDERAKTGLRATSVVIYPGNEGDSPSSSYYQSEDQEDSSKRVPIHNDEPQGNLLGEQCTDKRTRKPTKRYIEELSDIETHDSTVKNSSPAKRPAHDELLMNPRVAPFNETGSLGTIYPTRKDTFGGFSVHVPYVSRMRRGRPRKDFISFADKGPSVEPKGIQPSVEMILVKDGDKGNHLRKVPEVPLKVSSENEHAEAVDSKGVRNLQAKVCSAVSKPKIKHGLTRKHHRAWTLSEVVKLVDGVARYGAGKWSEIRKLSFASYSYRTSVDLKDKWRNLIRATQTQLPAQKDGACPRKTNPSIIPIPPSILLRVKELHELQSQGGGFTAPVKFSGQDGKVLQGKGSGFL

SEQ ID NO: 182069 - protein, 228 aa, Zea Mays
MLLKKPDLEDGSSKLETVEAHTQKLGANLEDKGPSVEPKGIQPSVEMILVKDGDKGNHLRKVPEVPLKVSSENEHAEAVDSKGVRNLQAKVCSAVSKPKIKHGLTRKHHRAWTLSEVVKLVDGVARYGAGKWSEIRKLSFASYSYRTSVDLKDKWRNLIRATQTQLPAQKDGACPRKTNPSIIPIPPSILLRVKELHELQSQGGGFTAPVKFSGQDGKVLQGKGSGFL

SEQ ID NO: 182070 - protein, 1004 aa, Zea Mays
MARLLRALAALLVLLLAAASVAVADDGETLLEIKKSFRDGGNALYDWSGDGASPGYCSWRGVLCDNVTFAVAALNLSGLNLEGEISAAIGSLQRLVSIDLKSNGLSGQIPDEIGDCSLLETLDLSSNNLEGDIPFSMSKLKHLENLILKNNKLVGVIPSTLSQLPNLKILDLAQNKLSGEIPNLIYWNEVLQYLGLRSNSLEGSLSPDMCQLTGLWYFDVKNNSLTGAIPETIGNCTSFQVLDLSNNHLTGEIPFNIGFLQVATLSLQGNKFSGPIPSVIGLMQALAVLDLSFNELSGPIPSILGNLTYTEKLYLQGNRLTGLIPPELGNMSTLHYLELNDNLLTGFIPPDLGKLTELFELNLANNNLIGPIPENLSSCANLISFNAYGNKLNGTIPRSFHKLESLTYLNLSSNHLSGALPIEVARMRNLDTLDLSCNMITGSIPSAIGKLEHLLRLNLSKNNVAGHIPAEFGNLRSIMEIDLSYNHLSGLIPQEVGMLQNLILLKLESNNITGDVSSLIYCLSLNILNVSYNHLYGTVPTDNNFSRFSPDSFLGNPGLCGYWLHSASCTQLSNAEQMKRSSSAKASMFAAIGVGAVLLVIMLVILVVICWPHNSPVLKDVSVNKPDNLASASNNIHPKLVILHMNMALYVYDDIMRMTENLSEKYIIGYGASSTVYRCDLKNCKPIAIKKLYAHYPQSLKEFETELETVGSIKHRNLVSLQGYSLSPSGNLLFYDYMENGSLWDILHAASSKKKKLDWEARLKIALGAAQGLAYLHHECSPRIIHRDVKSKNILLDKDYEAHLADFGIAKSLCVSKTHTSTYVMGTIGYIDPEYARTSRINEKSDVYSYGIVLLELLTGKKPVDDECNLHHLILSKAAENTVMETVDQDITDTCKDLGEVKKVFQLALLCSKRQPSDRPTMHEVARVLDSLVCPAGPPPKQAQAQAQAQASEKPSTTAPSYVSEYVGLRGGGGGSALSCTNSSSASDAELFMKFGEVISRSTE

SEQ ID NO: 182071 - protein, 128 aa, Zea Mays
MLYISICEFLLIYQLGLPLLLLRQSQFLALHLKATTFSRPGLKVQTTLMQMLALQQPKRTKRNLQQQERNIRWLFQSLGLSFLNQRNEHVFVVHRTSVNFSLSLGLCFWQREQNGLAPHRQASSLPLL

SEQ ID NO: 182072 - protein, 80 aa, Zea Mays
MQMLALQQPKRTKRNLQQQERNIRWLFQSLGLSFLNQRNEHVFVVHRTSVNFSLSLGLCFWQREQNGLAPHRQASSLPLL

SEQ ID NO: 182073 - protein, 79 aa, Zea Mays
MLYISICEFLLIYQLGLPLLLLRQSQFLALHLKATTFSRPGLKVQTTLMQCRCWRCNSPSGQKEIFNSKNETYGGCSKV

SEQ ID NO: 182074 - protein, 128 aa, Zea Mays
MDSTQLMEMQRQTRFTPPAPASVSVPSSASQGNNIFKTRIEGANNVDAVQMLALQQPKRTKRNLQQQERNIRWLFQSLGLSFLNQRNEHVFVVHRTSVNFSLSLGLCFWQREQNGLAPHRQASSLPLL

SEQ ID NO: 182075 - protein, 530 aa, Zea Mays
MALVKSDAEEEWSDSDFDDASDSEVAEALDWLDAVEGPDGSARPHVAFSASGGGAAARRPNAHGGVLSRPLQPLSNRTQKLASHISATPLEEWEGRMNVAMSNSVTTAIRDSIRDTAIGKIRNTEKADRATVEQAIDPRTRMVLFKMLNRGVFNNINGCISTGKEANVYHATKTDGQELAIKVYKTSVLVFKDRYVQGDYRFRHGYCKHNPRKMVKTWAEKEMRNLLRVRAAGIRCPAPLLLRLHVLVMEFIGKGGWAAPRLKDAALSDDKLHESYFEIITTMRTLYQTCKLVHGDLSEYNILYFEGHLYIIDVSQSVDLDHPSALDFLKEDCLHVSDFFKKRGVPVMTVTDLFNFVIDQSISDEDVDDYLEKAQQKILENGGAVPNDDEITPTVMVQTLDYVKQCEADIVNMSIMQRSSSGYEPTADKLYDQPLLGFVRTKNTNTEKEQGQPARNLVEVEEDESESCLSSDEDDSWHEDDPKVGPEERKAARKENKKKVKEEKREARKTKIPKAEKKKRKKMAKAKCKR

SEQ ID NO: 182076 - protein, 521 aa, Zea Mays
MALVKSDAEEEWSDSDFDDASDSEVAEALDWLDAVEGPDGSARPHVAFSASGGGAAARRPNAHGGVLSRPLQPLSNRTQKLASHISATPLEEWEGRMNVAMSNSVTTAIRDSIRDTAIGKIRNTEKADRATVEQAIDPRTRMVLFKMLNRGVFNNINGCISTGKEANVYHATKTDGQELAIKVYKTSVLVFKDRDRYVQGDYRFRHGYCKHNPRKMVKTWAEKEMRNLLRVRAAGIRCPAPLLLRLHVLVMEFIGKGGWAAPRLKDAALSDDKLHESYFEIITTMRTLYQTCKLVHGDLSEYNILYFEGHLYIIDVSQSVDLDHPSALDFLKEDCLHVSDFFKKRGVPVMTVTDLFNFVIDQSISDEDVDDYLEKAQQKILENGGAVPNDDEITPTVMVQTLDYVKQCEADIVNMSIMQRSSSGYEPTADKLYDQPLLGFVRTKNTNTEKEQGQPARNLVEVEEDESESCLSSDEDDSWHEDDPKENKKKVKEEKREARKTKIPKAEKKKRKKMAKAKCKR

SEQ ID NO: 182077 - protein, 712 aa, Zea Mays
MEAASCCRVFSTQRCRFPLRRLSAPPWPQPFCTESSGGLVTPSASKRRSRGPVMAAKKAAEGEKQEDGKYKHTVDLPKTTFGLRANSVQREPELQKLWDDNQVLKRVSERNTGTAFVLHDGPPYANGDLHMGHALNKILKDFINRYKLLQNHKVSFVPGWDCHGLPIELKVLKSMDKETLSALTPIKLRQKAAKFAKATVDAQMKSFKRYGVWADWDNPYLTLSPEYEAAQLEVFGQMVMKGYIYRGRKPVHWSPSSRTALAEAELEYSENHISRSIYAAFKITNPSKSGMLDDFFPNVSLVIWTTTPWTIPANAAVAVNPKLIYAVAEVQSVFESESTSGGKQRKVGNILSSEKGKLFVIVASDLITTLESKWGVKLVVHKSFPGSALEHCRYAHPVNSNECSVILGGDYITTESGTGLVHTAPGHGQEDYITGLKYGLPIISPVDDEGNFTAEAGQFGGLSVLGAGNAAVVKYLDEQYSLILEEPYKHKYPYDWRSKEPTIFRATEQWFASVDGFRDAAMDAIRRVTWVPSQAQNRIVAMTSSRSDWCISRQRTWGVPIPVFYHVDSQEPLITEETIEHIKAIVLKKGSDAWWYMTTEELLPDRYRDKASEYRKGTDTMDVWFDSGSSWAAVLAKRDGLNFPADIYLEGSDQHRGWFQSSLLTSIATTGICVFLVFRVIFLSLFSDSSMVISFPTINFHAFSIFCSSFFF

SEQ ID NO: 182078 - protein, 1037 aa, Zea Mays
MEAASCCRVFSTQRCRFPLRRLSAPPWPQPFCTESSGGLVTPSASKRRSRGPVMAAKKAAEGEKQEDGKYKHTVDLPKTTFGLRANSVQREPELQKLWDDNQVLKRVSERNTGTAFVLHDGPPYANGDLHMGHALNKILKDFINRYKLLQNHKVSFVPGWDCHGLPIELKVLKSMDKETLSALTPIKLRQKAAKFAKATVDAQMKSFKRYGVWADWDNPYLTLSPEYEAAQLEVFGQMVMKGYIYRGRKPVHWSPSSRTALAEAELEYSENHISRSIYAAFKITNPSKSGMLDDFFPNVSLVIWTTTPWTIPANAAVAVNPKLIYAVAEVQSVFESESTSGGKQRKVGNILSSEKGKLFVIVASDLITTLESKWGVKLVVHKSFPGSALEHCRYAHPVNSNECSVILGGDYITTESGTGLVHTAPGHGQEDYITGLKYGLPIISPVDDEGNFTAEAGQFGGLSVLGAGNAAVVKYLDEQYSLILEEPYKHKYPYDWRSKEPTIFRATEQWFASVDGFRDAAMDAIRRVTWVPSQAQNRIVAMTSSRSDWCISRQRTWGVPIPVFYHVDSQEPLITEETIEHIKDRYRDKASEYRKGTDTMDVWFDSGSSWAAVLAKRDGLNFPADIYLEGSDQHRGWFQSSLLTSIATTGKAPYSSVITHGFVLDEKGFKMSKSIGNVVDPEKIIVGGKNHREEPGYGADVLRLWVSSVDYTTDVLIGPQILRQMSDMYRKLRGTMRFLLSNLHDWKPDNSVPYNDLPKIDKYALFHLETVMTSMKDSYESYQFYKVYQILQRFATVGLSNFYLDVAKDRLYVGGRVSFTRKSCQTVLMAHLLYLVRAISPIMPHLAEDVWQNLPFQYTLQDGSLANFVFDLKWPEKNEEWLSAPKDDVDFLGVILELRSEVNKILENARTGKLIGSSLDAKVYLHTESSDTVLKLKELSSASNDADALHRLFITSQVDILPILNEEITSSVPYTGKFSNPRTGVIWIGVTRADGAKCERCWNYTQDVGSFHDHPTLCVRCYGVIELQTQPAAAAVS

SEQ ID NO: 182079 - protein, 865 aa, Zea Mays
MVYYNCKFCVMMISMFHRNQNLLQNKSHFVCLSILLFQLEVFGQMVMKGYIYRGRKPVHWSPSSRTALAEAELEYSENHISRSIYAAFKITNPSKSGMLDDFFPNVSLVIWTTTPWTIPANAAVAVNPKLIYAVAEVQSVFESESTSGGKQRKVGNILSSEKGKLFVIVASDLITTLESKWGVKLVVHKSFPGSALEHCRYAHPVNSNECSVILGGDYITTESGTGLVHTAPGHGQEDYITGLKYGLPIISPVDDEGNFTAEAGQFGGLSVLGAGNAAVVKYLDEQYSLILEEPYKHKYPYDWRSKEPTIFRATEQWFASVDGFRDAAMDAIRRVTWVPSQAQNRIVAMTSSRSDWCISRQRTWGVPIPVFYHVDSQEPLITEETIEHIKAIVLKKGSDAWWYMTTEELLPDRYRDKASEYRKGTDTMDVWFDSGSSWAAVLAKRDGLNFPADIYLEGSDQHRGWFQSSLLTSIATTGKAPYSSVITHGFVLDEKGFKMSKSIGNVVDPEKIIVGGKNHREEPGYGADVLRLWVSSVDYTTDVLIGPQILRQMSDMYRKLRGTMRFLLSNLHDWKPDNSVPYNDLPKIDKYALFHLETVMTSMKDSYESYQFYKVYQILQRFATVGLSNFYLDVAKDRLYVGGRVSFTRKSCQTVLMAHLLYLVRAISPIMPHLAEDVWQNLPFQYTLQDGSLANFVFDLKWPEKNEEWLSAPKDDVDFLGVILELRSEVNKILENARTGKLIGSSLDAKVYLHTESSDTVLKLKELSSASNDADALHRLFITSQVDILPILNEEITSSVPYTGKFSNPRTGVIWIGVTRADGAKCERCWNYTQDVGSFHDHPTLCVRCYGVIELQTQPAAAAVS

SEQ ID NO: 182080 - protein, 209 aa, Zea Mays
MAHLLYLVRAISPIMPHLAEDVWQNLPFQYTLQDGSLANFVFDLKWPEKNEEWLSAPKDDVDFLGVILELRSEVNKILENARTGKLIGSSLDAKVYLHTESSDTVLKLKELSSASNDADALHRLFITSQVDILPILNEEITSSVPYTGKFSNPRTGVIWIGVTRADGAKCERCWNYTQDVGSFHDHPTLCVRCYGVIELQTQPAAAAVS

SEQ ID NO: 182081 - protein, 164 aa, Zea Mays
MAHERGAAASAHPAAPTSEEDALFIDLLHEAPLSGHREPRSIVGGTLYCILLVGFAAVAISAPWIFLFAPDMISPLLCSSNAILLVLTGIFQQYWVHQVRKVRLQGYYDFSQKLKRIARLPFATIACGTALMLLIMVWQPLLQILSVSLLLRAHPQIQLFEWAA

SEQ ID NO: 182082 - protein, 239 aa, Zea Mays
MLAASMALRKDRGNIEPTEQSYSEENRPGCACVAVPRVLLPEDATEPTTGIKFPTVLEDNSNLTTEVLVGMGFRSMRIMRVKNLNLYAFGLYIQPDSVCKKLGPKYAYIPDAELKDHPDFYEDLLRENIDMTVRLVVSYNGLSIGTVRDAFEKSLGFRLQKTFGSCFSEDIRIPAGTKIDFRQTSDGQLITEIDGKQIGTVQSKDLCRAFFDMYIGDPPVSVETKQDIAQNVAGLIRRC

SEQ ID NO: 182083 - protein, 266 aa, Zea Mays
MKDWSIFSKLDHNGGYLPRFPMDSPISHDIGLRLVSQVGNLVECSFQHPRHICATGSGAVQEAFSCFNKFAGAFYFWFSRASNPKLFQRLSAAAGSSSRACRSHIKQVTSCLQHLPGLEFGSQLREDHAVQVLLARLASATFGRLWTEVEERHACNILMLAAATVIPPFENISPKMLAASMALRKDRGNIEPTEQSYSEENRPGCACVAVPRVLLPEDATEPTTGIKFPTVLEDNSNLTTEVLVGMGFRSMRIMRVKNLNLYAFGL

SEQ ID NO: 182084 - protein, 475 aa, Zea Mays
MRKPLYLLVSAIMLMTMSCLFLMGTVSYLFKGRSLSQADHHSESYLDQRWHLDEVLVLAGMFLYVISLGSSSFVEEEQYTWHFLTSTLYLIFLAKAVQSMLKGSNPTLGHKAEGNSFDRSSFFYATSYELTPGKRNGYKLCTILVVLVAGRVIRAWHQGGINWVHFPDISKLLAQADPSVVKSLQIISVLAVVVLFSISLTLLRARPEFVIGVWLTHISCGFLVLLHVWGNHIGTSLPINHTTASVARQFYVIASVSVSVTVLASPWVFPIFSREAKSPSSGSSPVKAIHGIRKSLVLTGMTYTAFWGLLQLLLQQPINAIPLFLILLQTVSSAVHFSLDKTLHKQWVQVVAMHFLGMAGHFGLGNTNSLASIDVAGAFIGISSYSTVLSGILMFMITYASPLMLYLGLVLHASVKDVDDASNLRQLKWSYILDKIVTLPSTVCTYVGVSIIAMTALYSCAVFKFRARSYRDKSL

SEQ ID NO: 182085 - protein, 504 aa, Zea Mays
MLMTMSCLFLMGTVSYLFKGRSLSQADHHSESYLDQRWHLDEVLVLAGMFLYVISLGSSSFVEEEQYTWHFLTSTLYLIFLAKAVQSMLKGSNPTLGHKAEGNSFDRSSFFYATSYELTPGKRNGYKLCTILVVLVAGRVIRAWHQGGINWVHFPDISKLLAQADPSVVKSLQIISVLAVVVLFSISLTLLRARPEFVIGVWLTHISCGFLVLLHVWGNHIGTSLPINHTTASVARQFYVIASVSVSVTVLASPWVFPIFSREAKSPSSGSSPVKAIHGIRKSLVLTGMTYTAFWGLLQLLLQQPINAIPLFLILLQTVSSAVHFSLDKTLHKQWVQVVAMHFLGMAGHFGLGNTNSLASIDVAGAFIGISSYSTVLSGILMFMITYASPLMLYLGLVLHASVKDVDDASNLRQLKWSYILDKIVTLPCLFPLLINSLALTSYTIVLLAMRNHLFVWSVFSPKYLYACAATVCTYVGVSIIAMTALYSCAVFKFRARSYRDKSL

SEQ ID NO: 182086 - protein, 487 aa, Zea Mays
MRGRSLSQADHHSESYLDQRWHLDEVLVLAGMFLYVISLGSSSFVEEEQYTWHFLTSTLYLIFLAKAVQSMLKGSNPTLGHKAEGNSFDRSSFFYATSYELTPGKRNGYKLCTILVVLVAGRVIRAWHQGGINWVHFPDISKLLAQADPSVVKSLQIISVLAVVVLFSISLTLLRARPEFVIGVWLTHISCGFLVLLHVWGNHIGTSLPINHTTASVARQFYVIASVSVSVTVLASPWVFPIFSREAKSPSSGSSPVKAIHGIRKSLVLTGMTYTAFWGLLQLLLQQPINAIPLFLILLQTVSSAVHFSLDKTLHKQWVQVVAMHFLGMAGHFGLGNTNSLASIDVAGAFIGISSYSTVLSGILMFMITYASPLMLYLGLVLHASVKDVDDASNLRQLKWSYILDKIVTLPCLFPLLINSLALTSYTIVLLAMRNHLFVWSVFSPKYLYACAATVCTYVGVSIIAMTALYSCAVFKFRARSYRDKSL

SEQ ID NO: 182087 - protein, 849 aa, Zea Mays
MGAAVAGWTVAAVLLQVAGLSLFLYGFFPVKPTLRGFSGAESYRVPSCGSVSAGEQEPALPPDQLRSLYRELSGIPPVYDRLVLMVIDGLPAEFVLGRGRKPPSKKMMESMPYTQSLLAGCKAAGYHAKAAPPTVTMPRLKAMVSGAIGGFLDVAFNFNTQAFLEDNLLDQLHMIGLKLVMLGDETWIKLFPTLFTRQDGVSSFYVKDTVEVDFNVSRHLEFELAAKDWSVLVLHYLGLDHVGHIGGRRSVLMTQKMKEMDDVIRRVHAASLQDNLDRTLLVVVSDHGMTDGGNHGGSSYEETDSLAFFIGHSVESPYCSPYDQNEALQVDLAPTLALLFGVPIPKNSFGVVLPKLLNSLTDDQKLRMLELNSWQILRLLQAQVSAFCLEDCINVESSIELDILPESIEQKLCFLLSKAISSHQSSRLHRGSDFKSVEAGYYGTAADNYHTFLRNASEWLSHRATDKPLYLLVSAIMLMTMSCLFLMGTVSYLFKGRSLSQADHHSESYLDQRWHLDEVLVLAGMFLYVISLGSSSFVEEEQYTWHFLTSTLYLIFLAKAVQSMLKGSNPTLGHKAEGNSFDRSSFFYATSYELTPGKRNGYKLCTILVVLVAGRVIRAWHQGGINWVHFPDISKLLAQADPSVVKSLQIISVLAVVVLFSISLTLLRARPEFVIGVWLTHISCGFLVLLHVWGNHIGTSLPINHTTASVARQFYVIASVSVSVTVLASPWVFPIFSREAKSPSSGSSPVKAIHGIRKSLVLTGMTYTAFWGLLQLLLQQPINAIPLFLILLQTVSSAVHFSLDKTLHKQWVQVVAMHFLGMAGHFGLGNTNSLASIDVAGAFIFFLVY

SEQ ID NO: 182088 - protein, 922 aa, Zea Mays
MGAAVAGWTVAAVLLQVAGLSLFLYGFFPVKPTLRGFSGAESYRVPSCGSVSAGEQEPALPPDQLRSLYRELSGIPPVYDRLVLMVIDGLPAEFVLGRGRKPPSKKMMESMPYTQSLLAGCKAAGYHAKAAPPTVTMPRLKAMVSGAIGGFLDVAFNFNTQAFLEDNLLDQLHMIGLKLVMLGDETWIKLFPTLFTRQDGVSSFYVKDTVEVDFNVSRHLEFELAAKDWSVLVLHYLGLDHVGHIGGRRSVLMTQKMKEMDDVIRRVHAASLQDNLDRTLLVVVSDHGMTDGGNHGGSSYEETDSLAFFIGHSVESPYCSPYDQNEALQVDLAPTLALLFGVPIPKNSFGVVLPKLLNSLTDDQKLRMLELNSWQILRLLQAQVSAFCLEDCINVESSIELDILPESIEQKLCFLLSKAISSHQSSRLHRGSDFKSVEAGYYGTAADNYHTFLRNASEWLSHRATDKPLYLLVSAIMLMTMSCLFLMGTVSYLFKGRSLSQADHHSESYLDQRWHLDEVLVLAGMFLYVISLGSSSFVEEEQYTWHFLTSTLYLIFLAKAVQSMLKGSNPTLGHKAEGNSFDRSSFFYATSYELTPGKRNGYKLCTILVVLVAGRVIRAWHQGGINWVHFPDISKLLAQADPSVVKSLQIISVLAVVVLFSISLTLLRARPEFVIGVWLTHISCGFLVLLHVWGNHIGTSLPINHTTASVARQFYVIASVSVSVTVLASPWVFPIFSREAKSPSSGSSPVKAIHGIRKSLVLTGMTYTAFWGLLQLLLQQPINAIPLFLILLQTVSSAVHFSLDKTLHKQWVQVVAMHFLGMAGHFGLGNTNSLASIDVAGAFIGISSYSTVLSGILMFMITYASPLMLYLGLVLHASVKDVDDASNLRQLKWSYILDKIVTLPCTSMPAQQQCAHMSEYPS

SEQ ID NO: 182089 - protein, 216 aa, Zea Mays
MPRAFDICGGQGELGGGRAFIHCDSAPQYRSPAKDILSSEFEEARFSSLEGFKGLIDNCIDETLVSQGIAQMKARHQGLKSDPTIIDKICAILEGLLDVRYSDVWDRSFHVISVAFDKLGEFSADLLPEAVRNLADMQNLSDDDFSFRKQLDACLGSAVAAMGPKNILEILQIQSISDENEWILPILEKHIVGASLQFFLRDILSMVGAIEKNIPK

SEQ ID NO: 182090 - protein, 246 aa, Zea Mays
MADVDMADLPQTPRSTAGDDDLSLLDGEGDLAAAILARLGGSPREDFQHLCATAAAMAQAVSDQGVPATPVAYFAAAAAALAPLARAGDAGADRHVAGALLAFLSAALPALPAAVVRARGREVADDVMRVLDFPSTPDSGVRAGLRCLAHLISAGDRANWEAVEPLYTVILRLSTDHRLKVRKQSHSCLHDVLLSFQRQTILIPASEAITRSFERFLLLAGGSSAVNTGVSEEGPKGAKEICINQF

SEQ ID NO: 182091 - protein, 446 aa, Zea Mays
MADVDMADLPQTPRSTAGDDDLSLLDGEGDLAAAILARLGGSPREDFQHLCATAAAMAQAVSDQGVPATPVAYFAAAAAALAPLARAGDAGADRHVAGALLAFLSAALPALPAAVVRARGREVADDVMRVLDFPSTPDSGVRAGLRCLAHLISAGDRANWEAVEPLYTVILRLSTDHRLKVRKQSHSCLHDVLLSFQRQTILIPASEAITRSFERFLLLAGGSSAVNTGVSEEGPKGAKEVLYILNALICCLPLMASKPSNTILKYFKPLLDLHQPILIRSLLDILHAVCESPTVQLKSDVLLDLLCSLGLSVSSERKSGDEMASIARLLHVGTKKIYKQNRDICVVKLPLIFTSLGDILSSEFEEARFSSLEGFKGLIDNCIDETLVSQGIAQMKARHQGLKSDPTIIDKICAILEGLLDVRYSDVWDRSFHVISVAFDKLGVFS

SEQ ID NO: 182092 - protein, 364 aa, Zea Mays
MADVDMADLPQTPRSTAGDDDLSLLDGEGDLAAAILARLGGSPREDFQHLCATAAAMAQAVSDQGVPATPVAYFAAAAAALAPLARAGDAGADRHVAGALLAFLSAALPALPAAVVRARGREVADDVMRVLDFPSTPDSGVRAGLRCLAHLISAGDRANWEAVEPLYTVILRLSTDHRLKVRKQSHSCLHDVLLSFQRQTILIPASEAITRSFERFLLLAGGSSAVNTGVSEEGPKGAKEVLYILNALICCLPLMASKPSNTILKYFKPLLDLHQPILIRSLLDILHAVCESPTVQLKSDVLLDLLCSLGLSVSSERKSGDEMASIARLLHVGTKKIYKQNRDICVVKLPLIFTSLGGYCSDEG

SEQ ID NO: 182093 - protein, 555 aa, Zea Mays
MEIEADSNKNSMKRALLLDFAASLMPGLAAKSINVLFSYVKPAIKDSDSLIQKRAYKVLSMLLKDAEFIEKNLDVLSELMISSLPCQFPSKRYRLECLYHLIVYILKDSSMVRKREIISSFITEILLALKEANKKTRNRAYDLLIEIARACENAGNDEGKEGLHQFFGMVAGGLAAGQTPYAISAVVTGLARLTYEFSELIGVAYNLLPQTFLLMQRNNREIVKANLGFVKALVAKSKADILHEHLTGVVEGLLSWQSDTKNSFKAKVKSLIEILVKKCGLDAVKAVMPEEHMKLLTNIRKINERKMRKAKSSEDGDAMSMASGATRQSRWNHTQMFSDFGSDDESDGPFSTQHTATSRSRTESKASTRLSRRRQGDKKLLDKFIDHSTGDPLDLLDQKTVRLALKSAAGKKRAAPDDDDDKFEVDPEGRIIVREEREKWKKKPAPRDDEEADGKSSVRSQSIKKRKTSGSGWAYTGHEYTSKKASGDLKKKDKMEPYAYWPLDRKLLNRRSDRKASARKGMSSVMKITKKLEGKSASAALSAKRSGKTKHKKNK

SEQ ID NO: 182094 - protein, 566 aa, Zea Mays
MSSNDAIGLLQPAISEIASISDKNVVGKFFLDAIRKLLDATKSINVLFSYVKPAIKDSDSLIQKRAYKVLSMLLKDAEFIEKNLDVLSELMISSLPCQFPSKRYRLECLYHLIVYILKDSSMVRKREIISSFITEILLALKEANKKTRNRAYDLLIEIARACENAGNDEGKEGLHQFFGMVAGGLAAGQTPYAISAVVTGLARLTYEFSELIGVAYNLLPQTFLLMQRNNREIVKANLGFVKALVAKSKADILHEHLTGVVEGLLSWQSDTKNSFKAKVKSLIEILVKKCGLDAVKAVMPEEHMKLLTNIRKINERKMRKAKSSEDGDAMSMASGATRQSRWNHTQMFSDFGSDDESDGPFSTQHTATSRSRTESKASTRLSRRRQGDKKLLDKFIDHSTGDPLDLLDQKTVRLALKSAAGKKRAAPDDDDDKFEVDPEGRIIVREEREKWKKKPAPRDDEEADGKSSVRSQSIKKRKTSGSGWAYTGHEYTSKKASGDLKKKDKMEPYAYWPLDRKLLNRRSDRKASARKGMSSVMKITKKLEGKSASAALSAKRSGKTKHKKNK

SEQ ID NO: 182095 - protein, 324 aa, Zea Mays
MQNNYEATELHFENLRARYGNPIIILNLIKTRERRESILRREFDKAIKIINKSLSEENHLRFLHWDLHQNSQGKPTNVLDVLLKVAFRALNLTEFFYCQVAPNSETSAQCPTLLNGLDQYLCDDNNSDDTECTEIVGDVSQEDISGSSDSSGNATTEDKFENSGLPPPKPPKFQKGVLRTNCIDCLDRTNVAQYAHGLAALGHQLHALGFIESPELGLEAPLAHHLMHFYEMMGDTLAVQYSGSAAHNKVFSAKRGHLKLFIQSQEFFRTLQRHYSNTCIDANKQAAINLFLGYFQPQQEKPALWELESSAGKHNNNLFDGHPR

SEQ ID NO: 182096 - protein, 533 aa, Zea Mays
MLIITEQKKIGEIFGHPVYQVTRTSMVELANSKTRSTFQNFKDENRYRKILNALDLRKDFFFSYSYHIMRSLQKNLADPQDGWTLYETIFVWNEYLTRRIRNCLRNTLWTVALVHGFFKQDKFSISGKDIMFTLIARRSRHYAGTRYLKRGVNEKGRVANDVETEQIVYEAVPGPTEVSSVVQNRGSIPLFWSQETSKLNLKPDIILHEMQNNYEATELHFENLRARYGNPIIILNLIKTRERRESILRREFDKAIKIINKSLSEENHLRFLHWDLHQNSQGKPTNVLDVLLKVAFRALNLTEFFYCQVAPNSETSAQCPTLLNGLDQYLCDDNNSDDTECTEIVGDVSQEDISGSSDSSGNATTEDKFENSGLPPPKPPKFQKGVLRTNCIDCLDRTNVAQYAHGLAALGHQLHALGFIESPELGLEAPLAHHLMHFYEMMGDTLAVQYSGSAAHNKVFSAKRGHLKLFIQSQEFFRTLQRHYSNTCIDANKQAAINLFLGYFQPQQEKPALWELESSAGKHNNNLFDGHPR

SEQ ID NO: 182097 - protein, 631 aa, Zea Mays
MEQDPERACLRSFELHESESSLYVLGTNSDRTLWRLLKIDRSEPSELVIDECSTVYTESEHPDLLKGLDDEHRSTGGVKFVTKFYGIIGFIKFLGPYYMLIITEQKKIGEIFGHPVYQVTRTSMVELANSKTRSTFQNFKDENRYRKILNALDLRKDFFFSYSYHIMRSLQKNLADPQDGWTLYETIFVWNEYLTRRIRNCLRNTLWTVALVHGFFKQDKFSISGKDIMFTLIARRSRHYAGTRYLKRGVNEKGRVANDVETEQIVYEAVPGPTEVSSVVQNRGSIPLFWSQETSKLNLKPDIILHEMQNNYEATELHFENLRARYGNPIIILNLIKTRERRESILRREFDKAIKIINKSLSEENHLRFLHWDLHQNSQGKPTNVLDVLLKVAFRALNLTEFFYCQVAPNSETSAQCPTLLNGLDQYLCDDNNSDDTECTEIVGDVSQEDISGSSDSSGNATTEDKFENSGLPPPKPPKFQKGVLRTNCIDCLDRTNVAQYAHGLAALGHQLHALGFIESPELGLEAPLAHHLMHFYEMMGDTLAVQYSGSAAHNKVFSAKRGHLKLFIQSQEFFRTLQRHYSNTCIDANKQAAINLFLGYFQPQQEKPALWELESSAGKHNNNLFDGHPS

SEQ ID NO: 182098 - protein, 262 aa, Zea Mays
MHFYEMMGDTLAVQYSGSAAHNKVFSAKRGHLKLFIQSQEFFRTLQRHYSNTCIDANKQAAINLFLGYFQPQQEKPALWELESSAGKHNNNLFDGHPSTLKRVKSDGTILHESNASISGSGRCHNEQLSASQPDVQNGFQFPTSESDSLHENDISSACGSGVAHLRYTPTASDVLHVPRAKVEYCHDSGDSNFLDLEWLSTSGNSSDERSIATSTPDANLSNENVISGITPDIMENHLAEMQYQKLPRNFVQWVNHGDTFWY

SEQ ID NO: 182099 - protein, 611 aa, Zea Mays
MATSTSGSTSSSSTDSHATHTDPIEGEQQQQSTASTTGSQLSGDPIGSAVAEPAGSASNSAVPAPAPAARPTTRSQHGITRPKQYTDGTVRWCMHSTLSADEPHSVGEALKSPQWSHAMENEHQALLRNGTWHLVPRPKGKNVIGCKWVYKVKRKADGSIERYKARLVAKGYKQRYGIDYEDTFSPVVKAATIRLVLSVAVSKGWTLRQLDVQNAFLHGILEEEVYMQQPPGYEDHRYPNYVCKLDKAIYGLKQAPRAWYARLCAKLVSLGFIPSKSDTSLFYFIQGNLSIFVLVYVDDIIVASSSSEAVGPLFKKLQNDFALKDLGELHFFLGIEVKKVQNGLVLNQERYARDILVRSGMNKCKAIDTPLSSSEKLSLEDGNPLSPEDCTRYRSMVGALQYLTLTRPDISFAVNKVCQFLHSPTTVHWSAVKRILRYVQGTLSLGLRFGKSKSMVVSAFSDADWAGCVDDRRSTGGFAVFLGSNLISWSSRKQATVSRSSTEAEYKSLANATAEMIWVQKLLSEMRIPHASTTLLWCDNLGATYLSANPVFHARTKHIEIDYHFVRERVASKLLDVRFVSSSDQVADGFTKALPRAKLLDFRNNLNLVRG

SEQ ID NO: 182100 - protein, 68 aa, Zea Mays
MGHTYCSWDLFTKVCNKSRIAYPRLSKSHELRGKQHDRYRDVLAHGRVAYLQHVKLPEPLQNPHLSLI

SEQ ID NO: 182101 - protein, 971 aa, Zea Mays
MQLLFIFSDSFKLGCSVCSSEKPTAVIDALVFDPASLRDNTNARPAPCCTGNSSIVHVELSVKLRLLVALYSGCRIALCTIGKKGLRQPGSIRVERWLDTDDAMCTSVASEQQILAVGCSRGVVELYDLAENTRHIRTISLYDWGYSVEDTGPVACISWTPDNCAFAVGWKFRGLTVWSVSGCRLMCTIRQTGSNSASSPMVKRCTLKFEPLMGGTSHIQWDDNGYKLFAVEENLSERVLAFSFAKCCLNRGLSGTTYSHQVLYGDDRILLVQPDDADELKILHLNVPISYISQNWPLLHVVASNDGMYLAVAGSHGLVLYDLRNKRWRFFGDVTQEQKIQCKGLLWLRKIVIVCNYVETSNTYELLFFPRYHLDYSSLLYRKPLLGRPIVMDVFQDYILVTYSPFDVHIFHVMISGELSPSSNPVLQLSTVRELSIMSPKSPPVSMRFIPEQNDKEVLKRDTNESYDLLSQQPSRCLILRTNGELSVLDMDDGHEHALTNSIELFWVTCSQFEEKGSLIKEVSWLDYGHQGMQVWYPSHGAGPFKQEDFLQLDPELEFDREVYPLGLLPNVGVVVGVSQRMSFSTAEFPCFEPSPQAQTILHCLLRHLLQRDKIDEALRLANLSAEKPHFSHCLEWLLFTVFDADISRPSASKNQASQKVDSPKNSLLEKTCDLLRNFPEYMDVVVSVARKTDGRHWADLFSTAGRSTEMFEECFQQRWYRTAACYILVIAKLEGPAVSQYCALRLLQATLDESLYELAGELVRFLLRSGRDFENATPDSEKLSPRFLGYFLFRSPYKRQSSDLRSNSMKELSPHIASVMNILERHASYLMSGKELSKLVAFVKGTQFDLVEYLQRERQGSARLENFASALELIGQKLQMDTLQSRLDAEFLLAHMCSVKFKEWIVVLATLLRRAEVLVDLFRHDLRLWKAYSITLQSHDVFTEYLDLLNILEEELSSVSDLTLQNGPLS

SEQ ID NO: 182102 - protein, 868 aa, Zea Mays
MCTSVASEQQILAVGCSRGVVELYDLAENTRHIRTISLYDWGYSVEDTGPVACISWTPDNCAFAVGWKFRGLTVWSVSGCRLMCTIRQTGSNSASSPMVKRCTLKFEPLMGGTSHIQWDDNGYKLFAVEENLSERVLAFSFAKCCLNRGLSGTTYSHQVLYGDDRILLVQPDDADELKILHLNVPISYISQNWPLLHVVASNDGMYLAVAGSHGLVLYDLRNKRWRFFGDVTQEQKIQCKGLLWLRKIVIVCNYVETSNTYELLFFPRYHLDYSSLLYRKPLLGRPIVMDVFQDYILVTYSPFDVHIFHVMISGELSPSSNPVLQLSTVRELSIMSPKSPPVSMRFIPEQNDKEVLKRDTNESYDLLSQQPSRCLILRTNGELSVLDMDDGHEHALTNSIELFWVTCSQFEEKGSLIKEVSWLDYGHQGMQVWYPSHGAGPFKQEDFLQLDPELEFDREVYPLGLLPNVGVVVGVSQRMSFSTAEFPCFEPSPQAQTILHCLLRHLLQRDKIDEALRLANLSAEKPHFSHCLEWLLFTVFDADISRPSASKNQASQKVDSPKNSLLEKTCDLLRNFPEYMDVVVSVARKTDGRHWADLFSTAGRSTEMFEECFQQRWYRTAACYILVIAKLEGPAVSQYCALRLLQATLDESLYELAGELVRFLLRSGRDFENATPDSEKLSPRFLGYFLFRSPYKRQSSDLRSNSMKELSPHIASVMNILERHASYLMSGKELSKLVAFVKGTQFDLVEYLQRERQGSARLENFASALELIGQKLQMDTLQSRLDAEFLLAHMCSVKFKEWIVVLATLLRRAEVLVDLFRHDLRLWKAYSITLQSHDVFTEYLDLLNILEEELSSVSDLTLQNGPLS

SEQ ID NO: 182103 - protein, 807 aa, Zea Mays
MCTSVASEQQILAVGCSRGVVELYDLAENTRHIRTISLYDWGYSVEDTGPVACISWTPDNCAFAVGWKFRGLTVWSVSGCRLMCTIRQTGSNSASSPMVKRCTLKFEPLMGGTSHIQWDDNGYKLFAVEENLSERVLAFSFAKCCLNRGLSGTTYSHQVLYGDDRILLVQPDDADELKILHLNVPISYISQNWPLLHVVASNDGMYLAVAGSHGLVLYDLRNKRWRFFGDVTQEQKIQCKGLLWLRKIVIVCNYVETSNTYELLFFPRYHLDYSSLLYRKPLLGRPIVMDVFQDYILVTYSPFDVHIFHVMISGELSPSSNPVLQLSTVRELSIMSPKSPPVSMRFIPEQNDKEVLKRDTNESYDLLSQQPSRCLILRTNGELSVLDMDDGHEHALTNSIELFWVTCSQFEEKGSLIKEVSWLDYGHQGMQVWYPSHGAGPFKQEDFLQLDPELEFDREVYPLGLLPNVGVVVGVSQRMSFSTAEFPCFEPSPQAQTILHCLLRHLLQRDKIDEALRLANLSAEKPHFSHCLEWLLFTVFDADISRPSASKNQASQKVDSPKNSLLEKTCDLLRNFPEYMDVVVSVARKTDGRHWADLFSTAGRSTEMFEECFQQRWYRTAACYILVIAKLEGPAVSQYCALRLLQATLDESLYELAGELVRFLLRSGRDFENATPDSEKLSPRFLGYFLFRSPYKRQSSDLRSNSMKELSPHIASVMNILERHASYLMSGKELSKLVAFVKGTQFDLVEYLQRERQGSARLENFASALELIGQKVLVNISQSFMVYSAYRCKFITSAPNGYTAKST

SEQ ID NO: 182104 - protein, 707 aa, Zea Mays
MCTSVASEQQILAVGCSRGVVELYDLAENTRHIRTISLYDWGYSVEDTGPVACISWTPDNCAFAVGWKFRGLTVWSVSGCRLMCTIRQTGSNSASSPMVKRCTLKFEPLMGGTSHIQWDDNGYKLFAVEENLSERVLAFSFAKCCLNRGLSGTTYSHQVLYGDDRILLVQPDDADELKILHLNVPISYISQNWPLLHVVASNDGMYLAVAGSHGLVLYDLRNKRWRFFGDVTQEQKIQCKGLLWLRKIVIVCNYVETSNTYELLFFPRYHLDYSSLLYRKPLLGRPIVMDVFQDYILVTYSPFDVHIFHVMISGELSPSSNPVLQLSTVRELSIMSPKSPPVSMRFIPEQNDKEVLKRDTNESYDLLSQQPSRCLILRTNGELSVLDMDDGHEHALTNSIELFWVTCSQFEEKGSLIKEVSWLDYGHQGMQVWYPSHGAGPFKQEDFLQLDPELEFDREVYPLGLLPNVGVVVGVSQRMSFSTAEFPCFEPSPQAQTILHCLLRHLLQRDKIDEALRLANLSAEKPHFSHCLEWLLFTVFDADISRPSASKNQASQKVDSPKNSLLEKTCDLLRNFPEYMDVVVSVARKTDGRHWADLFSTAGRSTEMFEECFQQRWYRTAACYILVIAKLEGPAVSQYCALRLLQATLDESLYELAGELVRFLLRSGRDFENATPDSEKLSPRFLGYFLFRSPYKRQSSDLRRASC

SEQ ID NO: 182105 - protein, 1063 aa, Zea Mays
MYLAYGWPQSIPLDPDNSDRVVLLRLLGRFLLAVCPASLHLWSAAQHRVRLARSDRSPESLSAHGYNAHAVWSPDAKTVAVLTSSFYLYVYKVQHLGKQLIVGGKQVPGLCLASISLIITEKVPLANGVAITSNFVCDNKSMLLGLSNGHVQVMSWNAEFSDSFKLGCSVCSSEKPTAVIDALVFDPASLRDNTNARPAPCCTGNSSIVHVELSVKLRLLVALYSGCRIALCTIGKKGLRQPGSIRVERWLDTDDAMCTSVASEQQILAVGCSRGVVELYDLAENTRHIRTISLYDWGYSVEDTGPVACISWTPDNCAFAVGWKFRGLTVWSVSGCRLMCTIRQTGSNSASSPMVKRCTLKFEPLMGGTSHIQWDDNGYKLFAVEENLSERVLAFSFAKCCLNRGLSGTTYSHQVLYGDDRILLVQPDDADELKILHLNVPISYISQNWPLLHVVASNDGMYLAVAGSHGLVLYDLRNKRWRFFGDVTQEQKIQCKGLLWLRKIVIVCNYVETSNTYELLFFPRYHLDYSSLLYRKPLLGRPIVMDVFQDYILVTYSPFDVHIFHVMISGELSPSSNPVLQLSTVRELSIMSPKSPPVSMRFIPEQNDKEVLKRDTNESYDLLSQQPSRCLILRTNGELSVLDMDDGHEHALTNSIELFWVTCSQFEEKGSLIKEVSWLDYGHQGMQVWYPSHGAGPFKQEDFLQLDPELEFDREVYPLGLLPNVGVVVGVSQRMSFSTAEFPCFEPSPQAQTILHCLLRHLLQRDKIDEALRLANLSAEKPHFSHCLEWLLFTVFDADISRPSASKNQASQKVDSPKNSLLEKTCDLLRNFPEYMDVVVSVARKTDGRHWADLFSTAGRSTEMFEECFQQRWYRTAACYILVIAKLEGPAVSQYCALRLLQATLDESLYELAGELVRFLLRSGRDFENATPDSEKLSPRFLGYFLFRSPYKRQSSDLRSNSMKELSPHIASVMNILERHASYLMSGKELSKLVAFVKGTQFDLVEYLQRERQGSARLENFASALELIGQKVLVNISQSFMVYSAYRCKFITSAPNGYTAKST

SEQ ID NO: 182106 - protein, 963 aa, Zea Mays
MYLAYGWPQSIPLDPDNSDRVVLLRLLGRFLLAVCPASLHLWSAAQHRVRLARSDRSPESLSAHGYNAHAVWSPDAKTVAVLTSSFYLYVYKVQHLGKQLIVGGKQVPGLCLASISLIITEKVPLANGVAITSNFVCDNKSMLLGLSNGHVQVMSWNAEFSDSFKLGCSVCSSEKPTAVIDALVFDPASLRDNTNARPAPCCTGNSSIVHVELSVKLRLLVALYSGCRIALCTIGKKGLRQPGSIRVERWLDTDDAMCTSVASEQQILAVGCSRGVVELYDLAENTRHIRTISLYDWGYSVEDTGPVACISWTPDNCAFAVGWKFRGLTVWSVSGCRLMCTIRQTGSNSASSPMVKRCTLKFEPLMGGTSHIQWDDNGYKLFAVEENLSERVLAFSFAKCCLNRGLSGTTYSHQVLYGDDRILLVQPDDADELKILHLNVPISYISQNWPLLHVVASNDGMYLAVAGSHGLVLYDLRNKRWRFFGDVTQEQKIQCKGLLWLRKIVIVCNYVETSNTYELLFFPRYHLDYSSLLYRKPLLGRPIVMDVFQDYILVTYSPFDVHIFHVMISGELSPSSNPVLQLSTVRELSIMSPKSPPVSMRFIPEQNDKEVLKRDTNESYDLLSQQPSRCLILRTNGELSVLDMDDGHEHALTNSIELFWVTCSQFEEKGSLIKEVSWLDYGHQGMQVWYPSHGAGPFKQEDFLQLDPELEFDREVYPLGLLPNVGVVVGVSQRMSFSTAEFPCFEPSPQAQTILHCLLRHLLQRDKIDEALRLANLSAEKPHFSHCLEWLLFTVFDADISRPSASKNQASQKVDSPKNSLLEKTCDLLRNFPEYMDVVVSVARKTDGRHWADLFSTAGRSTEMFEECFQQRWYRTAACYILVIAKLEGPAVSQYCALRLLQATLDESLYELAGELVRFLLRSGRDFENATPDSEKLSPRFLGYFLFRSPYKRQSSDLRRASC

SEQ ID NO: 182107 - protein, 1053 aa, Zea Mays
MAPSAAVPGGSEVEGSPRMAKFLCSFGGSILPRPLDGCLRYVGGETRIVMLPRDISYADLAARMRELYKDADIIKYQQPDEDLDALVSVVNDDDVVNMMEEYDKVIATGEAFTRLRIFLFSQHLDDDAASVDVHYNVDERETERRYVDALNSLGDVKSPSSPVSVEQLFGIGGNDSGIPDFAGLRHLNVPRPTHSQRYGEMDSPWSPAYVSPGQYGVHDPRDFPISPSSARFQVGAEDFDERTPDDFVRQSPKYRHYEAHSPSHMDNLVWLPPGAVIQQNAGFPGNLSRSNNFLDGSNGCDHCRSPFHKVQGSVNDPIYMNPRWTRPVQQHFDQPSMINDYPGHHANSCPDYCRPGDHYVGGQDVRLENGVYVKEQNGGHPPMFYNESHPHDRVWHVHTKQSHQRYEDPRLHHPANGRVIEPYIMDANKVYEVHSASLARSSHESPHYYHGSSEVINDTYHNQQVGGSGSYVQPAGFEESPSHHYNHSSAYGADSFYQMQQNLPPIQSLRRRANSPVHTASPYDSPHLPISNGTINTNFVRNTGDVSPRIPGLPGYDRMPNTWTPPNGSIPYRVVGHDVHAASMENTSAFGPRSNPTAAQYVQHFIAPESIQHQPGAPLREVHPERSYPEPMPSSYVDGKVAVSALPLTDQLSRLDTNTIKKPEGPDDVNSTQNVNETTPLHAVDEPSTLPHHVVVVHEVDTKQGKPTEHESRQKQHEAGATALQECGDISEDRLNFLPELIASVKKAALEDAAETRIAQSDANGAVSPVPDDDDDNEKKLDAAAAGTTDANQDPDLQGSIDRQKSSKIESTTAEAEALSKGLQIADFWKEALILSSLHHPNVVSFYGVVRDGPDGSLATVTEFMINGSLKQFLRKKDRTIDRRKRVILAMDAAFGMEYLHGKNIVHFDLKCENLLVNMRDPQRPICKIGDLGLSKVKQHTLVSGGVRGTLPWMAPELLSGKSNMVSDKIDVYSFGIVMWELLTGEEPYSGMRAAEIIGGIVNDSLRPQIPSWCDPEWKGLMESCWSSDPAERPSFTDISQRLRKMAAAMNVK

SEQ ID NO: 182108 - protein, 831 aa, Zea Mays
MAPSAAVPGGSEVEGSPRMAKFLCSFGGSILPRPLDGCLRYVGGETRIVMLPRDISYADLAARMRELYKDADIIKYQQPDEDLDALVSVVNDDDVVNMMEEYDKVIATGEAFTRLRIFLFSQHLDDDAASVDVHYNVDERETERRYVDALNSLGDVKSPSSPVSVEQLFGIGGNDSGIPDFAGLRHLNVPRPTHSQRYGEMDSPWSPAYVSPGQYGVHDPRDFPISPSSARFQVGAEDFDERTPDDFVRQSPKYRHYEAHSPSHMDNLVWLPPGAVIQQNAGFPGNLSRSNNFLDGSNGCDHCRSPFHKVQGSVNDPIYMNPRWTRPVQQHFDQPSMINDYPGHHANSCPDYCRPGDHYVGGQDVRLENGVYVKEQNGGHPPMFYNESHPHDRVWHVHTKQSHQRYEDPRLHHPANGRVIEPYIMDANKVYEVHSASLARSSHESPHYYHGSSEVINDTYHNQQVGGSGSYVQPAGFEESPSHHYNHSSAYGADSFYQMQQNLPPIQSLRRRANSPVHTASPYDSPHLPISNGTINTNFVRNTGDVSPRIPGLPGYDRMPNTWTPPNGSIPYRVVGHDVHAASMENTSAFGPRSNPTAAQYVQHFIAPESIQHQPGAPLREVHPERSYPEPMPSSYVDGKVAVSALPLTDQLSRLDTNTIKKPEGPDDVNSTQNVNETTPLHAVDEPSTLPHHVVVVHEVDTKQGKPTEHESRQKQHEAGATALQECGDISEDRLNFLPELIASVKKAALEDAAETRIAQSDANGAVSPVPDDDDDNEKKLDAAAAGTTDANQDPDLQGSIDRQKSSKIESTTAEAEALSKGLQVCYVISV

SEQ ID NO: 182109 - protein, 1067 aa, Zea Mays
MAPSAAVPGGSEVEGSPRMAKFLCSFGGSILPRPLDGCLRYVGGETRIVMLPRDISYADLAARMRELYKDADIIKYQQPDEDLDALVSVVNDDDVVNMMEEYDKVIATGEAFTRLRIFLFSQHLDDDAASVDVHYNVDERETERRYVDALNSLGDVKSPSSPVSVEQLFGIGGNDSGIPDFAGLRHLNVPRPTHSQRYGEMDSPWSPAYVSPGQYGVHDPRDFPISPSSARFQVGAEDFDERTPDDFVRQSPKYRHYEAHSPSHMDNLVWLPPGAVIQQNAGFPGNLSRSNNFLDGSNGCDHCRSPFHKVQGSVNDPIYMNPRWTRPVQQHFDQPSMINDYPGHHANSCPDYCRPGDHYVGGQDVRLENGVYVKEQNGGHPPMFYNESHPHDRVWHVHTKQSHQRYEDPRLHHPANGRVIEPYIMDANKVYEVHSASLARSSHESPHYYHGSSEVINDTYHNQQVGGSGSYVQPAGFEESPSHHYNHSSAYGADSFYQMQQNLPPIQSLRRRANSPVHTASPYDSPHLPISNGTINTNFVRNTGDVSPRIPGLPGYDRMPNTWTPPNGSIPYRVVGHDVHAASMENTSAFGPRSNPTAAQYVQHFIAPESIQHQPGAPLREVHPERSYPEPMPSSYVDGKVAVSALPLTDQLSRLDTNTIKKPEGPDDVNSTQNVNETTPLHAVDEPSTLPHHVVVVHEVDTKQGKPTEHESRQKQHEAGATALQECGDISEDRLNFLPELIASVKKAALEDAAETRIAQSDANGAVSPVPDDDDDNEKKLDAAAAGTIKNDDLEEIRELGSGTYGAVYHGKWRGCDVAVKRIKASCFVGRPSERERLIADFWKEALILSSLHHPNVVSFYGVVRDGPDGSLATVTEFMINGSLKQFLRKKDRTIDRRKRVILAMDAAFGMEYLHGKNIVHFDLKCENLLVNMRDPQRPICKIGDLGLSKVKQHTLVSGGVRGTLPWMAPELLSGKSNMVSDKIDVYSFGIVMWELLTGEEPYSGMRAAEIIGGIVNDSLRPQIPSWCDPEWKGLMESCWSSDPAERPSFTDISQRLRKMAAAMNVK

SEQ ID NO: 182110 - protein, 201 aa, Zea Mays
MLLSSQSNYSKLTYDGVDLMGERLAEEVRQVVQRRRNLRKISFVAHSLGGLVTRYAIGKLYEPAMDETSSCDIDKPSDEQNVRDVGKIAGLEPINFITSATPHLGSRLNKQLPFLFGVPLLEKTAAGTAHFIVGRTGKHLFLTDNDDGKPPLLLRMVEDCDDGKFMSALRCFKRRVAYANVTYDRIQLMLHIFYFLHHFMN

SEQ ID NO: 182111 - protein, 157 aa, Zea Mays
MHKAARQHLIFYSHCFYFVNSLTHVSVLVYSGDRSPRLELQEDQAWLWLLLCCLLLLDRREGGEKQLACRLLLRWSFILYGDSRIHLLQKHHKSCLGHYTRASHSATWHSQSEVLEERQIHLPAYLGSEVMLMCKHLHLEFCLARMNQVYFPILLHL

SEQ ID NO: 182112 - protein, 167 aa, Zea Mays
MSRILMALITLSGGDRSKLPPDYKEFLLLLESDTLTMEDEFLIVNNAALLPIKNRIVDYLGSTDKTKKKKKKRILSSLPYKEDWLDTAKANTKINQWVANVQNEYRATPHDLLRLNRNVRSHMHRYSDGDDIEEVLYCEWPELLMVMQKMLHLEGELEGTDIQNKFG

SEQ ID NO: 182113 - protein, 54 aa, Zea Mays
MKWIHVKEKLVVLKKNAEPYVQMDCLQNVVLVATTKRNNNGGDAIRVEVAMLVL

SEQ ID NO: 182114 - protein, 59 aa, Zea Mays
MEHGYHLGLRHNMLITRRLSQVTRINKGNLLCRMFCISSGIKKLAQAKKWAKAHIEILR

SEQ ID NO: 182115 - protein, 398 aa, Zea Mays
MDCDLFAAWWSSSTRLVSRIFRGSADAPGPSPARPAMPLHQKQAGLAASKLGVGTSKKHRAFVASDEQWYNKIFDPSSDFILTWNRIFLFSCFVALFIDPLYFYVPKISYGSPKFCIGTDTRFAVGVTFFRSIADLLYVLHIIIKFRTAYINPSSTLRVFGRGDLVTNPKEIAWKYIRSDLAVDVAAALPLPQIIVWFVIPAIKYSSAEHNNNILVLIVLAQYLPRLYLIFPLTYEIVKATGVVAKTAWEGAAYNMVLYLIASHVLGALWYLLSVDRQTFCWKTNCLNETGCDLKYLDCDTTPNATWANTTAVFSNCNASDTNISFDFGMFEPALSNQAPAQSFAMKYFYSLWWGLQNLSCYGQTLTVSTYLGETLYCIFLAVLGLVLFAHLIGNVQG

SEQ ID NO: 182116 - protein, 218 aa, Zea Mays
MDDQLLDAICERLVSSLCTKGTYIVREGDPVTEMLFIIRGKLESSTTNGGRTGFFNSITLKPGDFCGEELLGWALVPRPTTNLPSSTRTVKALIEVEAFALQAEDLKFVASQFRRLHSKKLQHTFRYYSHHWRTWASCFIQAAWRRYKRRKMAKDLSMRESFNSVRLDEVDNEDDDSPPKNSLALKFIARTRKVPQNMKELPKITKPDEPDFSAEPED

SEQ ID NO: 182117 - protein, 491 aa, Zea Mays
MAAAEEEEEWEDGRSVMPEEEDGDIEDVPPPPLLGRNFGSEDEDEDEAGSLNSQSQWWPRSFREATDTYTIAAPPGLRHLVVGDCNGLGSDLKLPLLSDKLDGRQDSSNNLLPVADPFGSVLSDGRFSDRVQQAPTTPGCNLTQTVFNGVNVLAGIGIFSAPYTIREAGWASLVVLAFFAVVCCYTGVLLKYCFESKDGVKTFPDIGELAFGRIGRFLISIVLYTELYSFCVEFVILEGDNLASIFTSTTFDWNGIHADGRHFFGILFALVVLPSVWLRDLRVISYLSVGGVFATLLVFLSVGVVGATGNVGFHLAGKAVKWDGIPFAIGIYGFCYAGHSVFPNIYQSMSDRTKFNKALYICFAICTTIYGAIAVIGYLMFGDKTLSQITLNLPKDSFVAKVALGTTVIIPFTKYSLVINPLARSIEELRPEGFLTDRLFAVMLRTAIVASTLCVAFLLPFFGLVMALIGSLLSILVVCRFSSVSLLIWSW

SEQ ID NO: 182118 - protein, 512 aa, Zea Mays
MAAAEEEEEWEDGRSVMPEEEDGDIEDVPPPPLLGRNFGSEDEDEDEAGSLNSQSQWWPRSFREATDTYTIAAPPGLRHLVVGDCNGLGSDLKLPLLSDKLDGRQDSSNNLLPVADPFGSVLSDGRFSDRVQQAPTTPGCNLTQTVFNGVNVLAGIGIFSAPYTIREAGWASLVVLAFFAVVCCYTGVLLKYCFESKDGVKTFPDIGELAFGRIGRFLISIVLYTELYSFCVEFVILEGDNLASIFTSTTFDWNGIHADGRHFFGILFALVVLPSVWLRDLRVISYLSVGATGNVGFHLAGKAVKWDGIPFAIGIYGFCYAGHSVFPNIYQSMSDRTKFNKALYICFAICTTIYGAIAVIGYLMFGDKTLSQITLNLPKDSFVAKVALGTTVIIPFTKYSLVINPLARSIEELRPEGFLTDRLFAVMLRTAIVASTLCVAFLLPFFGLVMALIGSLLSILVALIMPALCFLKIARNKATRLQVIASVATVVLGSVCAVLGTYNSIAKIAESY

SEQ ID NO: 182119 - protein, 122 aa, Zea Mays
MCMNHAHRLDVAVKQKMHRIRIDPIQSNPLHAWLGQSVSSAQIECESAWTIPVWPGKSTVFLIVPLPPPKATCHATEPSSICPQSQLGNSWDWRERGRAANGINNTRENISVLSCRASAKAW

SEQ ID NO: 182120 - protein, 82 aa, Zea Mays
MGAVLADAEALERADLILLRFGGDGPEEGDVIVGVEAAEVAVAGRGWEERSLKISAVGVVLEVDVNGEELFFVDKFTSARPC

SEQ ID NO: 182121 - protein, 78 aa, Zea Mays
MYDYDLCHFKFSSCSALNSLVCLCSSPYTAAAVMMSMLLVLVLYSFPDWQLAAHSLAVGSLFLDSLLSSRLFLVDTLP

SEQ ID NO: 182122 - protein, 83 aa, Zea Mays
MDTGKSCADGMGERSREWNDAYSPVTKFSSEQLTMVQLQGSTESWSQFLSTPWGSLSVFLIVIRACTAQHHTHSRLWGLDKHK

SEQ ID NO: 182123 - protein, 494 aa, Zea Mays
MAITAPTPDIRGERQSGQDVRTQNVMACGALSNIVKSSLGPVGLDKMLVDDIGDVTITNDGATILKMLEVEHPAAKVLVELAELQDREVGDGTTSVVIIAAELLKRANDLVKNKIHPTSIISGYRLAMREACKYVEEKLAVKVDKLGKDSLINSAKTSMSSKLINSDSDFFATLVVEAVQAVKITNAKGEVKYPIKSINILKAHGKSAKDSYLLNGYALNTGRAAQGMPTRVTPARIACLDFNLQKTKMQLGVQVLVTDPRELEKIRQRESDITKERIDKILKSGANVVLTTKGIDDMSLKYFVEAGAIAVRRVRKEDLRHVAKATGATMVSTFADMEGEETFDSSFLGHADEVVEERIADDDVILVKGTKNTSAVSIILRGANDFMLDEIDRSLHDALCIVKRTLESNMVVAGGGAVEAALSVYLENLATTLGSREQLAIAEFAESLLIIPKVLSVNAAKDATELVAKLRAYHHTAQTKADKQHYSRYHSQQP

SEQ ID NO: 182124 - protein, 516 aa, Zea Mays
MAITAPTPDIRGERQSGQDVRTQNVMACGALSNIVKSSLGPVGLDKMLVDDIGDVTITNDGATILKMLEVEHPAAKVLVELAELQDREVGDGTTSVVIIAAELLKRANDLVKNKIHPTSIISGYRLAMREACKYVEEKLAVKVDKLGKDSLINSAKTSMSSKLINSDSDFFATLVVEAVQAVKITNAKGEVKYPIKSINILKAHGKSAKDSYLLNGYALNTGRAAQGMPTRVTPARIACLDFNLQKTKMQLGVQVLVTDPRELEKIRQRESDITKERIDKILKSGANVVLTTKGIDDMSLKVSTFADMEGEETFDSSFLGHADEVVEERIADDDVILVKGTKNTSAVSIILRGANDFMLDEIDRSLHDALCIVKRTLESNMVVAGGGAVEAALSVYLENLATTLGSREQLAIAEFAESLLIIPKVLSVNAAKDATELVAKLRAYHHTAQTKADKQHYSSMGLDLSKGIIRNNLEYGVIEPSMSKVKIIQFATEAAITILRIDDMIKLTKEEGNEEE

SEQ ID NO: 182125 - protein, 390 aa, Zea Mays
MRVLEEDLFPSTPGKVKIERAGAMNRQLHRCFASTSTMFLWALFLVAMTASYLSFQSFVGTHCSLALRKRGDGVVGVDNFNAYYDPSLKKARRALLASHGVFIVEGDINDGRLLAKLFDVVPFTHVLHLAAQAGVRYAMQNPASYVHSNIAGLVTLLEACKDADPQPAIVWASSSSVYGLNDKVPFSERDRTDQPASLYAATKKAGEEITHTYNHIYGLSITGLRFFTVYGPWGRPDMAYFSFTRNILQGKPITVYRGKDRVDLARDFTYIDDIVKGCLGSLDTAGKSTGTGGKKRGPAPYRIFNLGNTAPVTVPNLVSILEKHLRVKAKKNVVEMPGNGDVPFTHANITLARQQLGYKPTTNLDVGLKKFVKWYQSYYGYTRGSKNSRQ

SEQ ID NO: 182126 - protein, 142 aa, Zea Mays
MYFGSCEWLQQSTGTNPARRHRRPVPPPPESDGDGADGGAAARVRRHRPVQAHLRLRPGQGLRRHLRPRLLRPRRRLRRLRGPRGQPRPRQDVQGRGRRLRGPLRAHRQGARRPRRLGDQVPGQVPRRRPTRRRRLNSSVSV

SEQ ID NO: 182127 - protein, 159 aa, Zea Mays
MLYSVWDANSRMCDSMVIKRNYVQQLRQEVKLGIVLKEQMDYLDHWAALQTEHSSSLSSATEALKASTLRLPVSGGAKADVLTVKNAVSSAVDIMQAMGSSVCHLLSKLQASHSLVTELSAVAAKESTLLNEYRELLATAAALQVQESSLRTQLIQETE

SEQ ID NO: 182128 - protein, 70 aa, Zea Mays
MQRMFWEPYIRSEDSYSKGTQCLLTSLSLVFTSIYTYRTSATLPTHEREDESDFVETLFASGGIDHHSSL

SEQ ID NO: 182129 - protein, 282 aa, Zea Mays
MSRFPQYRHRDFYIAGESYAGHYVPQLARKIVEYNEASPHPFINLKGILVGNAVTDNYYDNIGTVTYWWTHAMISDRTYKAILRWCNFSSSSISRPCNRAMSYAMNHEFGDIDQYSIYTPSCAAAARANATVLRFKNTLVRRRRSSGYDPCTETYAERYYNRMDVQRAMHANTTGIPYRWTACSDVLIKTWQDSEFSMLPTYKKLMKAGLRIWVFSGDTDSVVPVTATRFAISHLGLKIKTRWYPWYSAGQGMRCRCSSPGGRSGCSGRSWPGSHCPSPEGS

SEQ ID NO: 182130 - protein, 210 aa, Zea Mays
MQPSGREMQGGGGAQDDFFDQMLSTLPAAWSDLGSGKSPWELPAAAGAVTEDTAALDEPALLASRLRHHQIGGGEKPLMLHLSDLHGLGAGAGDDAGFMPLPLFTQHLARDDVDAAFKSPNAAGGDRELYNGFGAAGNMHTAAVHQPPPFGQGGSMPAAPQSFGGGGPAPAAGAASGGGAPPRQQRQRAKRGQATDPHSIAERVRYSPIL

SEQ ID NO: 182131 - protein, 344 aa, Zea Mays
MQPSGREMQGGGGAQDDFFDQMLSTLPAAWSDLGSGKSPWELPAAAGAVTEDTAALDEPALLASRLRHHQIGGGEKPLMLHLSDLHGLGAGAGDDAGFMPLPLFTQHLARDDVDAAFKSPNAAGGDRELYNGFGAAGNMHTAAVHQPPPFGQGGSMPAAPQSFGGGGPAPAAGAASGGGAPPRQQRQRAKRGQATDPHSIAERLRRERIAERMKALQELVPNANKGNGSGDGTSDSGKGNAANGENGGGGSLQVTEQQVARLMEEDMGTAMQYLQGKGLCLMPISLASAISSATWPSLLSRPSMGAMGDARGPLHDGGSPASPPLVNCGDDSSTVKDAGAGGKR

SEQ ID NO: 182132 - protein, 174 aa, Zea Mays
MSSLAQLALTTDKASMLDEIIDYVKFLQLQVKVLSMSRLGGATAVGTLVAGIASEGNGSGDGTSDSGKGNAANGENGGGGSLQVTEQQVARLMEEDMGTAMQYLQGKGLCLMPISLASAISSATWPSLLSRPSMGAMGDARGPLHDGGSPASPPLVNCGDDSSTVKDAGAGGKR

SEQ ID NO: 182133 - protein, 275 aa, Zea Mays
MNAKEDYGELSSIARQGSGSACRSIYGGFVKWCMGEKDDGSDSIAVQLADETHWNDLVIIIAVVSSKQKETSSTSGMRDSVETSPLLQYRAQTVVPGRVLKMEEAIKNRDFESFAKLTCADSNQFHAVCLDTSPPIFYMNDTSHRIISLVEKWNHSEGTPQVAYTFDAGPNAVLIAQNRKTAAHLLQKLLYYFPPQDNDLSSYLVGDKSILGVAGLHSMKDVEALPAPPETKIPDQKFKGDVSYFICSRLGAGPKVVSDEGQALIDSVTGLPKGV

SEQ ID NO: 182134 - protein, 241 aa, Zea Mays
MIADIEAAPEGSFVLLHGCAHNPTGIDPTPEQWEKIADVIQEKKHMPFFDVAYQGFASGSLDEDAFSVRLFVKRGMEVFVAQSYSKNLGLYSERVGAINVVCSAPEVADRVKSQLKRLARPMYSNPPIHGAKIVANVVGDPTMFGEWKQEMELMAGRIKNVRQKLYDSLSAKDKSGKDWSFILRQIGMFSYTGLNKAQSDNMTDKWHIYMTKDGRISLAGLSLAKCDYLADAIIDSFHNVN

SEQ ID NO: 182135 - protein, 93 aa, Zea Mays
MVIMAGMLPGVEFARRRRRASSLCLYAPSSKEWSSACMETTATATARAWTTLGLGSGAREAKERLDQKLRAQRQPVVLKSHAWKMHPTGSFCD

SEQ ID NO: 182136 - protein, 640 aa, Zea Mays
MDSSSATAATVAPVVTSAPPLEDCLRLLRGERDEQKLAGLLVAANVCRAGDADAVANVYRAVGPRFLRRLLNTGLGKVEGGKEEEREAYMRLAVTVLAGLARVPEVAADEGVVSTVPLVAEVVAKSTDPAITEECFELLSLIAIASEDGAYEFCEPGVIDMIFLQILSLTDGSKCVELAINLLQLLVHKLKVDTMSSEKLQGMTRMVTCLARIFAVLHTAVKFDALHMLTFLLSQKESPLHDFLRSIPASIWESHIRVGITAILQNRVVSSEKLHALLLAECMMSILGEDWLSEDFEVQDNQNVLSVDKFVLLVLESARVEVAVLLNELAYLKYESSKISQTDEAISQKQRNLAILFSLIERIIKMISNASSGEGAPIHTIRESTIMQAITGLNETINLVLDFLQDAKDHGQWKGDDLLAAARIVGSYLAEAPYACKEKTGNLLEFIFSIEGQDESSSFYSICFMLPMLSQITMEVDGCRTLASFGGHKAVIDCLVKMTEQGGMTIDNGSMFLACDTIINFMSNMKSVHIPVDYCFIRLLKALVTWADASSVTMTASCLCVMLLDMTSEKFLLSCSHFDANILGSLSEIIIRSLQQDIPDDDSEQFKQKQIIVSVCGAGYKRWADRFPRVKDVVEQHVSV

SEQ ID NO: 182137 - protein, 623 aa, Zea Mays
MDSSSATAATVAPVVTSAPPLEDCLRLLRGERDEQKLAGLLVAANVCRAGDADAVANVYRAVGPRFLRRLLNTGLGKVEGGKEEEREAYMRLAVTVLAGLARVPEVAADEGVVSTVPLVAEVVAKSTDPAITEECFELLSLIAIASEDGAYEFCEPGVIDMIFLQILSLTDGSKCVELAINLLQLLVHKLKVDTMSSEKLQGMTRMVTCLARIFAVLHTAVKFDALHMLTFLLSQKESPLHDFLRSIPASIWESHIRVGITAILQNRVVSSEKLHALLLAECMMSILGEDWLSEDFEVQDNQNVLSVDKFVLLVLESARVEVAVLLNELAYLKYESSKISQTDEAISQKQRNLAILFSLIERIIKMISNASSGEGAPIHTIRESTIMQAITGLNETINLVLDFLQDAKDHGQWKGDDLLAAARIVGSYLAEAPYACKEKTGNLLEFIFSIEGQDESSSFYSICFMLPMLSQITMEVDGCRTLASFGGHKAVIDCLVKMTEQGGMTIDNGSMFLACDTIINFMSNMKSVHIPVDYCFIRLLKALVTWADASSVTMTASCLCVMLLDMTSEKFLLSCSHFDANILGSLSEIIIRSLQQDIPDDDSEQFKQKQIIVSDVVEQHVSV

SEQ ID NO: 182138 - protein, 643 aa, Zea Mays
MDSSSATAATVAPVVTSAPPLEDCLRLLRGERDEQKLAGLLVAANVCRAGDADAVANVYRAVGPRFLRRLLNTGLGKVEGGKEEEREAYMRLAVTVLAGLARVPEVAADEGVVSTVPLVAEVVAKSTDPAITEECFELLSLIAIASEDGAYEFCEPGVIDMIFLQILSLTDGSKCVELAINLLQLLVHKLKVDTMSSEKLQGMTRMVTCLARIFAVLHTAVKFDALHMLTFLLSQKESPLHDFLRSIPASIWESHIRVGITAILQNRVVSSEKLHALLLAECMMSILGEDWLSEDFEVQDNQNVLSVDKFVLLVLESARVEVAVLLNELAYLKYESSKISQTDEAISQKQRNLAILFSLIERIIKMISNASSGEGAPIHTIRESTIMQAITGLNETINLVLDFLQDAKDHGQWKGDDLLAAARIVGSYLAEAPYACKEKTGNLLEFIFSIEGQDESSSFYSICFMLPMLSQITMEVDGCRTLASFGGHKAVIDCLVKMTEQGGMTIDNGSMFLACDTIINFMSNMKSVHIPVDYCFIRLLKALVTWAGTTDASSVTMTASCLCVMLLDMTSEKFLLSCSHFDANILGSLSEIIIRSLQQDIPDDDSEQFKQKQIIVSVCGAGYKRWADRFPRVKDVVEQHVSV

SEQ ID NO: 182139 - protein, 626 aa, Zea Mays
MDSSSATAATVAPVVTSAPPLEDCLRLLRGERDEQKLAGLLVAANVCRAGDADAVANVYRAVGPRFLRRLLNTGLGKVEGGKEEEREAYMRLAVTVLAGLARVPEVAADEGVVSTVPLVAEVVAKSTDPAITEECFELLSLIAIASEDGAYEFCEPGVIDMIFLQILSLTDGSKCVELAINLLQLLVHKLKVDTMSSEKLQGMTRMVTCLARIFAVLHTAVKFDALHMLTFLLSQKESPLHDFLRSIPASIWESHIRVGITAILQNRVVSSEKLHALLLAECMMSILGEDWLSEDFEVQDNQNVLSVDKVEVAVLLNELAYLKYESSKISQTDEAISQKQRNLAILFSLIERIIKMISNASSGEGAPIHTIRESTIMQAITGLNETINLVLDFLQDAKDHGQWKGDDLLAAARIVGSYLAEAPYACKEKTGNLLEFIFSIEGQDESSSFYSICFMLPMLSQITMEVDGCRTLASFGGHKAVIDCLVKMTEQGGMTIDNGSMFLACDTIINFMSNMKSVHIPVDYCFIRLLKALVTWADASSVTMTASCLCVMLLDMTSEKFLLSCSHFDANILGSLSEIIIRSLQQDIPDDDSEQFKQKQIIVSGYKRWADRFPRVKDVVEQHVSV

SEQ ID NO: 182140 - protein, 399 aa, Zea Mays
MALPAPPVRLALLLLVALPFCAAHPGPGAFNAPRHFQTPALHSDGFGLVARRSIAEAPADINVTTNSSFVLAADRTYRRDPLNGFRKYPGGWNISEVHYFASVGYTAIPLFAIALVWFVIFFLVMLGICCRHCCCPHHTYKYSRTAYALSLILLILFTCAAIAGCAMLYDGQGKFHKSTTTTLKFVVSQANYTVDNLRNLSDSLSAAKKVDIAQSFLLPPNVQNEINEIQGKLNSSATDLAIKTTDNAAKIKKVLNRVRLALVVIAAVMLLLAFVGFLLSIFGLEFLVSVLVIIGWILVTGTFILCGVFLLLHKYLRCNGRVGCSSDRTHSPGRGYPLRGACHGERIPVQKQAGDVRAGERGEPGDHQRVEQELPPAADAFVLQPVGATDASALQPLHA

SEQ ID NO: 182141 - protein, 340 aa, Zea Mays
MRMRAVVITCAGGPEVLEAREVEDHPALGEGEVLLEVAAAGVNRADTVQRMGRYPPPAGASPYPGLECSGTILALGPNVPSRWAVGDKVCALLSGGGYADKVVAPAGQLLPIPEGVSLTHAAGLPEVACTVWSTVFMTSHLSPGESFLIHGGSSGIGTFAIQIAKHLGIKVFVTAGSEEKLAACKALGADVCINYRTEDFVERIKQETNGKGTTSMLSFLAASVDVILDNIGGSYLQRNLNSLGVDGRLFIIGFQGGIAAEVNLQAVLARRLTIQAAGLRNRSLANKAEIVSEVEKNVWPAVAAGKVKPVIYKTFPLCEAAEAHRLMEASTHIGKILLLP

SEQ ID NO: 182142 - protein, 229 aa, Zea Mays
MRMRAVVITCAGGPEVLEAREVEDHPALGEGEVLLEVAAAGVNRADTVQRMGRYPPPAGASPYPGLECSGTILALGPNVPSRWAVGDKVCALLSGGGYADKVVAPAGQLLPIPEGVSLTHAAGLPEVACTVWSTVFMTSHLSPGESFLIHGGSSGIGTFAIQIAKHLGIKVFVTAGSEEKLAACKALGADVCINYRTEDFVERIKQETNGKASMYRALSSNSATSLTVI

SEQ ID NO: 182143 - protein, 248 aa, Zea Mays
MKFQRLLQLLYLAKSEKMFQRLNVEKVVPNVLSFYRFNKHASFLSSRSLCWSQQWRCGALRRARQDPPHGGPRSALPDLCAPGIYGGGRGLLWRRVLRGCSGSDAQRASLLLSTVIPCCGDVAHSRWSWRRSRRVTAPMARARAVATAEAACFDLGFWPNDVLEGILGEILSDGDACGCHLPLLRASHCSVFHGRKTGLSRTCDGGVLNVTPFLKASRLKFISASTLPAVDAFASWRLDCGWRWVFAT

SEQ ID NO: 182144 - protein, 187 aa, Zea Mays
METPRLVVGRRRGATPRFRRRRLPHPRGGAHCFPFARARPPVLITRCFYFPSSSCVRIPHPAPLRAATLSQLLRTRVRVCVAVPQLFRSSHSCFRVGNTAILEAPVTSGWTASKHIVIRYQVCLMSNVRVMLGSSLAWLNGVIHSSLALPNISCALTSSGLWPWGSRRNCRMKIICFSRKYEYYKQK

SEQ ID NO: 182145 - protein, 193 aa, Zea Mays
METPRLVVGRRRGATPRFRRRRLPHPRGGAHCFPFARARPPVLITRCFYFPSSSCVRIPHPAPLRAATLSQLLRTRVRVCVAVPQLFRSSHSCFRVGNTAILEAPVTSGAGDFVGWTASKHIVIRYQVCLMSNVRVMLGSSLAWLNGVIHSSLALPNISCALTSSGLWPWGSRRNCRMKIICFSRKYEYYKQK

SEQ ID NO: 182146 - protein, 177 aa, Zea Mays
METPRLVVGRRRGATPRFRRRRLPHPRGGAHCFPFARARPPVLITRCFYFPSSSCVRIPHPAPLRAATLSQLLRTRVRVCVAVPQLFRSSHSCFRVGNTAILEAPVTSGWTASKHIVIRYQVCLMSNVRVMLGSSLAWLNGISCALTSSGLWPWGSRRNCRMKIICFSRKYEYYKQK

SEQ ID NO: 182147 - protein, 355 aa, Zea Mays
MGTSPTLGPMRVSLVCNASPNHHRPRNSDISRQQKGGSSRGKGKSYQDKDDSENIDEFDSDIMFSKNGPPISLASNSRPQATSAPGEREKEIVELFKRVQAQLRARGKSREDKKPEHAKVQGERGSVDSLLQLLRKHSVDQRRKNGDDKEQNSDVLRRGNDSGNRQGSTVFGTKSDIQEEKKKPPPAPFIRPASNFRRRSPVPGVKFQPVINADLDTDDDRKSIGSNAVDAVQKAKTALDERTATDEPDSMSPYEADSVIEPGNISLNDLDDILHDDEEFDADEPDDEYPEPSLGISDVTDTDESHENDSTPTGSADLSSLKVAELRELAKSRGIKGYSKKKKNELVEVLSSSMD

SEQ ID NO: 182148 - protein, 69 aa, Zea Mays
MLVVDGSFTPRQVESCALEHPLWCWCGNGWESNLIENVQMAYTPLICNSVSAIFVPTSDFHLAGCMLDR

SEQ ID NO: 182149 - protein, 526 aa, Zea Mays
MDDVSRYAHSPAHLAVLRRDHAALRRLVAALPRLPRAGEVATEEESIAGEALADAVSAVVDRRDVPRRETPLHLAVRLRDPVAADVLMSAGADWSLQNADGWSALQEAVCTREEAIATIIARHYQPLAWAKWCRRLPRILASISRIRDFYMEITFHFESSVIPFISRIAPSDTYRIWKRGAALRADMTLAGFDGFRIQRSDQTFLFLGDGARPEDAGGKELHPGSLIVLAHKDKEITDALEGAGVQPTESEVAHEVALMSKTNMYRPGIDVTQAELVPHLNWRRQERAEAVGQWKAKGDDKPSKMGSKDETSDPGKQKEKGSGKKKKGGSPAESLKHESEYKKGLRPVLWLTPDFPLKTDELIPLLDVLANKVKAVRRLRELLTTKLPTGTFPVKIAIPIVPTIRVIVTFTKFEELQPLDEFATPPSSPTQFQDAKTKESEGSGSWYSWVKGGRGTQSSDSGDSRSWKDEVDPFHIPSDYTWVDATEKKRRMKAKKAKSRRGPARKQSSKNTAEGAHRPMMDGFEE

SEQ ID NO: 182150 - protein, 138 aa, Zea Mays
MLEPPSLIAIPIVPTIRVIVTFTKFEELQPLDEFATPPSSPTQFQDAKTKESEGSGSWYSWVKGGRGTQSSDSGDSRSWKDEVDPFHIPSDYTWVDATEKKRRMKAKKAKSRRGPARKQSSKNTAEGAHRPMMDGFEE

SEQ ID NO: 182151 - protein, 339 aa, Zea Mays
MSQKKSRSRGGGGGAAASGDGHEDLARPPPLQAVLLADSFTLKFRPITLERPKVLLPLVHMPMIEYTLTWLESAGVEEAFVFCCAHSHQVKEYLEKAGWSGKSGPGSMAVTAVESHDAISAGDALRVIYDRGVIHGDFVLISGDTVSNMSLKDALQEHMDRKKKDPLAVMTMVIKHSKPSILTHQTRLGNDEIVMAIDPETKELLYYEDRADNSHLHVTIDKDILTNNPTLQLHNDMEDCYIDICSPEVLSLFTDNFDYQHLRRHFVKGLLVDDIMGYKIYTHELRSGYAARIDNFRSYDTVSKDVIQRWTYPMVPDVVSSRDSSESRLHRQGIYKASV

SEQ ID NO: 182152 - protein, 281 aa, Zea Mays
MSQKKSRSRGGGGGAAASGDGHEDLARPPPLQAVLLADSFTLKFRPITLERPKVLLPLVHMPMIEYTLTWLESAGVEEAFVFCCAHSHQVKEYLEKAGWSGKSGPGSMAVTAVESHDAISAGDALRVIYDRGVIHGDFVLISGDTVSNMSLKDALQEHMDRKKKDPLAVMTMVIKHSKPSILTHQTRLGNDEIVMAIDPETKELLYYEDRADNSHLHVTIDKDILTNNPTLQLHNDMEDCYIDICSPEVLSLFTDNFDYQHLRRHFVKGLLVDDVRQFTTV

SEQ ID NO: 182153 - protein, 177 aa, Zea Mays
MSSGDYCFEAVWFSECAELQHVCWLEIRGKIPCDMLSRNTTYAAYMVFKMSDESYGLDYPLQEAEVSIGATRSTRQVCLGYVDDDEDGEEVPQNYRSFGAVGTVFRPRIGRRNRRQPPGVHVLHPQTRAGGWMEMEMGEFRNEEGEDGEVSVSLMETRGGNWKRGLTVQGIEIRVKK

SEQ ID NO: 182154 - protein, 157 aa, Zea Mays
MKNHRGYSQGVTRRALLMNPRIGPSHAGPLKSEQNAGTIEHLRRHVSKALSSITYNQFVAKIRKCQAEESGTEKTLWSRRGGPQEREGPPLASSKKSVHRRALLIYSEIQVAAAPDEVRPPARTRTSTKPRTRRRSSSMATTGGCAHPIFRACFSQS

SEQ ID NO: 182155 - protein, 141 aa, Zea Mays
MSSRRKWHREDIMESKGRTAGARGTAAGLLEEERPPEGLIDIFGDPSSSGAGRGAAAGEDKDVDETPHQTALLLHGHHRRVCPPHFPSLLLTILTSAGTTRKTILHLSLCTQNPIFMHFLFYHSFVWFAPRTDARKPEVLK

SEQ ID NO: 182156 - protein, 155 aa, Zea Mays
MAVSIAGSSIRLHVAPPSRRRVSVVSAAAAARLDRRSAALLLLSTAVPAASAATAPPASAAGIGLFGIRKKLERAEEAAVEAVREVEEAAAVGGEAVKGAVTEAEKEVASEGLQLVAGAELAGDGLVQAAVVAGAEALGVVVGLSVVNGILKPEA

SEQ ID NO: 182157 - protein, 192 aa, Zea Mays
MATAVLRRPFLAALLLPAAGGASGTSSWFRPRRRRSSPSVRAVSSDSPKPVASTSSPTGGDSPDEEPPVLPLLQELADCLILPPKLLAQLPSDLRLDLNDAAFDLSNGPVLDECGQEVGDLLLNLAKAWELADTSTSNSIAKQLPLMEPYLTRSAKSAFGKRLVSAGRRFQSMGQYNQGELKKRLNHRACAN

SEQ ID NO: 182158 - protein, 378 aa, Zea Mays
MASPTQGQVITCKAAVAYEPNKPLVIEDVQVAPPQAGEVRVKILFTALCHTDHYTWSGKDPEGLFPCILGHEAAGIVESVGEGVTDVQPGDHVIPCYQAECKECKFCKSGKTNLCGKVRSATGVGVMMNDMKSRFSVNGKPIYHFMGTSTFSQYTVVHDVSVAKINPQAPLDKVCLLGCGVPTGLGAVWNTAKVESGSVVAVFGLGTVGLAVAEGAKAAGASRVIGIDIDNKKFDVAKNFGVTEFVNPKEHDKPIQQVLVDLTDGGVDYSFECIGNVSVMRAALECCHKGWGTSVIVGVAASGQEIATRPFQLVTGRVWKGTAFGGFKSRTQVPWLVDKYMKKVDEYITHNMNLADINDAFHLLHEGGCLRCVLAMQI

SEQ ID NO: 182159 - protein, 208 aa, Zea Mays
MATCSRPLFVSDSAASASPSRASFRRLRTVAVVSIWEPLPHPPLRAAACRFARTKQCSRRSTECLASGPSVSRLTRPIRRMLSRYSSLMVTLHGNLSRCYKAMSALRPDGVSRHFMSAGGFERVVLGVVLVMSISGASYTAPSSSALTEENLLFLEAWRAVDRAYYDKSFNGQSWFRYRENALRNEPMNTREETCMILAYCPNFVFHN

SEQ ID NO: 182160 - protein, 243 aa, Zea Mays
MATCSRPLFVSDSAASASPSRASFRRLRTVAVVSIWEPLPHPPLRAAACRFARTKQCSRRSTECLASGPSVSRLTRPIRRMLSRYSSLMVTLHGNLSRCYKAMSALRPDGVSRHFMSAGGFERVVLGVVLVMSISGASYTAPSSSALTEENLLFLEAWRAVDRAYYDKSFNGQSWFRYRENALRNEPMNTREETYAAIKKMLSTLDDPFTRFLEPEKLKSLREVWYARRTHGCRFIDWLPNGN

SEQ ID NO: 182161 - protein, 1323 aa, Zea Mays
MAMPPAAVARLRELVPAPGTEEELELDVAGAAALVECCSGLLRPGGGGDGDAGAALEALEALCAAGGGGAMRRHADGLAPLVVARLGDGHAAVREAARRYLVLLMEMKEMNARTENTEPNSNVPNDQHVHYTTIEMESSNTSQARKNSKEKVSARDISLLAGEGDITRKLVEPIKVFSEKDLLREIGKVVSTLQPDNEWSIRITAMQRVEGLVLGGAADYSAFPMLLKQLMTPLITQLLDRRSSVVKQACHLLNFLSKELLRDFEPYAELLIPVLLKNVVITILVIAESADNCIKEMLRNCKVARILPRIIEFAKNDRSAVLRARCCEYATLMLEYWVDTPEIQRSADLYEDLIKCCIADATSEVRSSARACYRMFSRIWPDRSHQLYSSFEPPRQKMINDEDTETPQAHLPPVKISHLQPSSFVPAVIDKVVKVDSGISFSSGDLQTSDILYLQCDDIIAKGLDAGNNDDTLTIGSSFEDKITLRELETRDRDTEKNDSGNSTGVNSSARDQPTATPITIEAPSEMSLDDATVVTIVQDKAECKLNVEPINQQVQAQEDPSDLTCLSPAVNSKGAGNLLKENPVEVSSDAGSSGKVGTHKKSAVSKKPRGSYTPNFRRPLLSKQMTNWFYASTKSDIHEKQLILGEMVNNMDVPSSITEALSLGLNPRSDWMMKVYAFSFLRQCLLERGSKGTQEVAQNFEKVMRLVCRYLDDPHHKVAHAALSSLADIMPVFKKPFEHYLDKTLPHIFSRLNDPKESIKQQCLAILKHANESYPIDSLLPALLRSLDEQKSPKSKLAVLEFANASFVKCEVNSESYCSSSFLKPWFGKLAHLFNDKNKKLKEVTVVGFSSIYSHYDPTSMLSFLVTLSMEEQKRLKRAMKQLIPSIESDMEEFLQQKRHKQKTPSFDIFTAKSPLHPAFQSAKSPLHPAHRSSKSPLHPRFAESPGHSAYKYAKSPLHPSYQPANSPLHPSYQSNYVKADDCFSSALQCLPDTSLEVQEDRTGRIEIESPNKSYGHKAEMMDKKSCTVRSKNDLPRRSDFSVISNNIVQNASSRDSRSTKILDEPNDSELHINTRKNKVTRTRNDLQDHEYYLVCSLSATVTCYKCPMSLFLQILATDFTKLDTTSSCTRFQNLHQMSSSLLEMLDDPDMATRELALSLLAEILEKHQKAMENCVELLVVKLLHATKDGALKVVNQAHICLTTVVTQFDPLRCLGAIASQLASQDEKVLIVSINSLSKLVMRFSEDNLMAHLPTFLPALVDASKNRSPYVRKAAMVCVVDAYLKLGPALLPYLEGLDSAQLQLITTHASRLSQARLIASDG

SEQ ID NO: 182162 - protein, 1103 aa, Zea Mays
MAMPPAAVARLRELVPAPGTEEELELDVAGAAALVECCSGLLRPGGGGDGDAGAALEALEALCAAGGGGAMRRHADGLAPLVVARLGDGHAAVREAARRYLVLLMEMKEMNARTENTEPNSNVPNDQHVHYTTIEMESSNTSQARKNSKEKVSARDISLLAGEGDITRKLVEPIKVFSEKDLLREIGKVVSTLQPDNEWSIRITAMQRVEGLVLGGAADYSAFPMLLKQLMTPLITQLLDRRSSVVKQACHLLNFLSKELLRDFEPYAELLIPVLLKNVVITILVIAESADNCIKEMLRNCKVARILPRIIEFAKNDRSAVLRARCCEYATLMLEYWVDTPEIQRSADLYEDLIKCCIADATSEMINDEDTETPQAHLPPVKISHLQPSSFVPAVIDKVVKVDSGISFSSGDLQTSDILYLQCDDIIAKGLDAGNNDDTLTIGSSFEDKITLRELETRDRDTEKNDSGNSTGVNSSARDQPTATPITIEAPSEMSLDDATVVTIVQDKAECKLNVEPINQQVQAQEDPSDLTCLSPAVNSKGAGNLLKENPVEVSSDAGSSGKVGTHKKSAVSKKPRGSYTPNFRRPLLSKQMTNWFYASTKSDIHEKQLILGEMVNNMDVPSSITEALSLGLNPRSDWMMKVYAFSFLRQCLLERGSKGTQEVAQNFEKVMRLVCRYLDDPHHKVAHAALSSLADIMPVFKKPFEHYLDKTLPHIFSRLNDPKESIKQQCLAILKHANESYPIDSLLPALLRSLDEQKSPKSKLAVLEFANASFVKCEVNSESYCSSSFLKPWFGKLAHLFNDKNKKLKEVTVVGFSSIYSHYDPTSMLSFLVTLSMEEQKRLKRAMKQLIPSIESDMEEFLQQKRHKQKTPSFDIFTAKSPLHPAFQSAKSPLHPAHRSSKSPLHPRFAESPGHSAYKYAKSPLHPSYQPANSPLHPSYQSNYVKADDCFSSALQCLPDTSLEVQEDRTGRIEIESPNKSYGHKAEMMDKKSCTVRSKNDLPRRSDFSVISNNIVQNASSRDSRSTKILDEPNDSELHINTRKNKVTRTRNDLQDHENLHQMSSSLLEMLDDPDMATRELALSLLAEILEKHVSFFFSESR

SEQ ID NO: 182163 - protein, 1265 aa, Zea Mays
MAMPPAAVARLRELVPAPGTEEELELDVAGAAALVECCSGLLRPGGGGDGDAGAALEALEALCAAGGGGAMRRHADGLAPLVVARLGDGHAAVREAARRYLVLLMEMKEMNARTENTEPNSNVPNDQHVHYTTIEMESSNTSQARKNSKEKVSARDISLLAGEGDITRKLVEPIKVFSEKDLLREIGKVVSTLQPDNEWSIRITAMQRVEGLVLGGAADYSAFPMLLKQLMTPLITQLLDRRSSVVKQACHLLNFLSKELLRDFEPYAELLIPVLLKNVVITILVIAESADNCIKEMLRNCKVARILPRIIEFAKNDRSAVLRARCCEYATLMLEYWVDTPEIQRSADLYEDLIKCCIADATSEMINDEDTETPQAHLPPVKISHLQPSSFVPAVIDKVVKVDSGISFSSGDLQTSDILYLQCDDIIAKGLDAGNNDDTLTIGSSFEDKITLRELETRDRDTEKNDSGNSTGVNSSARDQPTATPITIEAPSEMSLDDATVVTIVQDKAECKLNVEPINQQVQAQEDPSDLTCLSPAVNSKGAGNLLKENPVEVSSDAGSSGKVGTHKKSAVSKKPRGSYTPNFRRPLLSKQMTNWFYASTKSDIHEKQLILGEMVNNMDVPSSITEALSLGLNPRSDWMMKVYAFSFLRQCLLERGSKGTQEVAQNFEKVMRLVCRYLDDPHHKVAHAALSSLADIMPVFKKPFEHYLDKTLPHIFSRLNDPKESIKQQCLAILKHANESYPIDSLLPALLRSLDEQKSPKSKLAVLEFANASFVKCEVNSESYCSSSFLKPWFGKLAHLFNDKNKKLKEVTVVGFSSIYSHYDPTSMLSFLVTLSMEEQKRLKRAMKQLIPSIESDMEEFLQQKRHKQKTPSFDIFTAKSPLHPAFQSAKSPLHPAHRSSKSPLHPRFAESPGHSAYKYAKSPLHPSYQPANSPLHPSYQSNYVKADDCFSSALQCLPDTSLEVQEDRTGRIEIESPNKSYGHKAEMMDKKSCTVRSKNDLPRRSDFSVISNNIVQNASSRDSRSTKILDEPNDSELHINTRKNKVTRTRNDLQDHEYYLVCSLSATVTCYKCPMSLFLQILATDFTKLDTTSSCTRFQNLHQMSSSLLEMLDDPDMATRELALSLLAEILEKHQKAMENCVELLVVKLLHATKDGALKVVNQAHICLTTVVTQFDPLRCLGAIASQLASQDEKVLIVSINSLSKLVMRFSEDNLMAHLPTFLPALVDASKNRSPYVRKVSPFREICFLFFFTSSRLLYMVKD

SEQ ID NO: 182164 - protein, 1223 aa, Zea Mays
MAMPPAAVARLRELVPAPGTEEELELDVAGAAALVECCSGLLRPGGGGDGDAGAALEALEALCAAGGGGAMRRHADGLAPLVVARLGDGHAAVREAARRYLVLLMEMKEMNARTENTEPNSNVPNDQHVHYTTIEMESSNTSQARKNSKEKVSARDISLLAGEGDITRKLVEPIKVFSEKDLLREIGKVVSTLQPDNEWSIRITAMQRVEGLVLGGAADYSAFPMLLKQLMTPLITQLLDRRSSVVKQACHLLNFLSKELLRDFEPYAELLIPVLLKNVVITILVIAESADNCIKEMLRNCKVARILPRIIEFAKNDRSAVLRARCCEYATLMLEYWVDTPEIQRSADLYEDLIKCCIADATSEMINDEDTETPQAHLPPVKISHLQPSSFVPAVIDKVVKVDSGISFSSGDLQTSDILYLQCDDIIAKGLDAGNNDDTLTIGSSFEDKITLRELETRDRDTEKNDSGNSTGVNSSARDQPTATPITIEAPSEMSLDDATVVTIVQDKAECKLNVEPINQQVQAQEDPSDLTCLSPAVNSKGAGNLLKENPVEVSSDAGSSGKVGTHKKSAVSKKPRGSYTPNFRRPLLSKQMTNWFYASTKSDIHEKQLILGEMVNNMDVPSSITEALSLGLNPRSDWMMKVYAFSFLRQCLLERGSKGTQEVAQNFEKVMRLVCRYLDDPHHKVAHAALSSLADIMPVFKKPFEHYLDKTLPHIFSRLNDPKESIKQQCLAILKHANESYPIDSLLPALLRSLDEQKSPKSKLAVLEFANASFVKCEVNSESYCSSSFLKPWFGKLAHLFNDKNKKLKEVTVVGFSSIYSHYDPTSMLSFLVTLSMEEQKRLKRAMKQLIPSIESDMEEFLQQKRHKQKTPSFDIFTAKSPLHPAFQSAKSPLHPAHRSSKSPLHPRFAESPGHSAYKYAKSPLHPSYQPANSPLHPSYQSNYVKADDCFSSALQCLPDTSLEVQEDRTGRIEIESPNKSYGHKAEMMDKKSCTVRSKNDLPRRSDFSVISNNIVQNASSRDSRSTKILDEPNDSELHINTRKNKVTRTRNDLQDHENLHQMSSSLLEMLDDPDMATRELALSLLAEILEKHQKAMENCVELLVVKLLHATKDGALKVVNQAHICLTTVVTQFDPLRCLGAIASQLASQDEKVLIVSINSLSKLVMRFSEDNLMAHLPTFLPALVDASKNRSPYVRKVSPFREICFLFFFTSSRLLYMVKD

SEQ ID NO: 182165 - protein, 931 aa, Zea Mays
MKGAQDKRHRKKQDLQVLGPFPGCLGRMINMLDLSNGVVATKMLTEKAHRDVSPAGKDRSNTFKMAINPPAQTEDKQRDSQTRRNFPTKRSNSPTKRTGAMPVKMLMEQDMWKERRPDEEPLNVVARLMGLHEPPGQQSNFPLGRQLDKKYQCGGFEENYWNLKSKKESKCHQNQKAGPRHQHTWNGSGDQPSRISSSQSMHQENETCEKRMSIVREKFAEAKRLATDEKLLHSKEFQDALQFLSSNRDLFLEFLDEPNPLLSSNRYEFQPVAPPSEVKQITILKPSEPAKRKDSIFVGRQLFSDGDGGESERNRYRRHQSSDVSPANSNLSEPTKIVVLKPGFPSSHDSRIARSSLSSAEDSEDESMMAVDETMCSRRLAKEITWQMRMRLKDRQDEESMLSCEYPDFYIGDDSFSKSEVEIPKEMCGETSGELEFGTPTSGRSWDFLSRSGSPFSASCSSQASHRREPSVVREGKKKILERLSMVSSTVNIEEEMEGRRSTGTLGDMLTISKVKDQEEIGAETLGSPAPELEPEEPFSCLPRSRSLPLSLSYGVAESNGITSGTHEAEKERIRKSSSFREKVSSLFSKNKKSTREKVDPSVSNRLKHGGAVTTGDVKEICNHLALDNLQKQHTCLNTDEKNTVQGLVTSSCETNSAADIPAKDISSISSLGVPGIFGGLQDEPSPVSVLDGPFICDNNRRLLYSSENFITSSPPLSRSPLIGSFSRSLSWEDPPLEVMSPNSLRLSRLFSKADEDLDSLTFIQKLVHSRGTGRESCILADPLDPSLLEKISDYEEDGIKFGKRRPKQRLLFDAVNEALIELASMAELAAYPWGRSCSSEHGDCKNGSSSNSAAEEIWRVIRNWSILEKYPPGEAIERNLLLEMILKREVAEAASADTTRLETFDLNTTVCAMVLDGLVEETVVDLTNYC

SEQ ID NO: 182166 - protein, 487 aa, Zea Mays
MGHGPQTGRSGRPQGPPNPTIPFSPSRRRRHLHLAPLIASSDDHRPPATRTATMQSAAWRRHLLDHHLSPSTSAAIAAFRSASQPGLAPQGLFGADGARCMSARAPAVKGSGHLVRKGTGGRSSVSGIVATVFGATGFLGRYLVQQLAKMGSQVLVPFRGCEDSPRHLKIMGDLGQIVPMKYHPRDVDSIKAVMAKSNVVINLIGREYETRNYSFEEVNHHMPEQLATIAKEHGGIIRFIQVSCLGASPSSESRMLRTKAAGEQSVFKEFPEATIMRPATMIGTEDRILNRWAQFAKNWGFLPLVGGGSTKIQPVYVIDVAAAIVNSLKDDGTSMGKIYELGGPEIYTVHELAELMYETIREWPRYVNVPLPVARAIASPREMLLNKVPFPLPTPSIFNLDQINAFAVDNLVSEDALTFEDLSIMPQKLKGYPVEYLVSYRKGGPSFGSTVSEKMRSSEICFRSALRRTEQKREACKLLWTVSQQPS

SEQ ID NO: 182167 - protein, 447 aa, Zea Mays
MGHGPQTGRSGRPQGPPNPTIPFSPSRRRRHLHLAPLIASSDDHRPPATRTATMQSAAWRRHLLDHHLSPSTSAAIAAFRSASQPGLAPQGLFGADGARCMSARAPAVKGSGHLVRKGTGGRSSVSGIVATVFGATGFLGRYLVQQLAKMGSQVLVPFRGCEDSPRHLKIMGDLGQIVPMKYHPRDVDSIKAVMAKSNVVINLIGREYETRNYSFEEVNHHMPEQLATVSCLGASPSSESRMLRTKAAGEQSVFKEFPEATIMRPATMIGTEDRILNRWAQFAKNWGFLPLVGGGSTKIQPVYVIDVAAAIVNSLKDDGTSMGKIYELGGPEIYTVHELAELMYETIREWPRYVNVPLPVARAIASPREMLLNKVPFPLPTPSIFNLDQINAFAVDNLVSEDALTFEDLSIMPQKLKGYPVEYLVSYRKGGPSFGSTVSEKMRSSEM

SEQ ID NO: 182168 - protein, 421 aa, Zea Mays
MGHGPQTGRSGRPQGPPNPTIPFSPSRRRRHLHLAPLIASSDDHRPPATRTATMQSAAWRRHLLDHHLSPSTSAAIAAFRSASQPGLAPQGLFGADGARCMSARAPAVKGSGHLVRKGTGGRSSVSGIVATVFGATGFLGRYLVQQLAKMGSQVLVPFRGCEDSPRHLKIMGDLGQIVPMKYHPRDVDSIKAVMAKSNVVINLIGREYETRNYSFEEVNHHMPEQLATIAKEHGGIIRFIQVSCLGASPSSESRMLRTKAAGEQSVFKEFPEATIMRPATMIGTEDRILNRWAQFAKNWGFLPLVGGGSTKIQPVYVIDVAAAIVNSLKDDGTSMGKIYELGGPEIYTVHELAELMYETIREWPRYVNVPLPVARAIASPREMLLNKVPFPLPTPSIFNLDQINAFAVDNLVSEDASCLRS

SEQ ID NO: 182169 - protein, 945 aa, Zea Mays
MEQEEYTKEEINWSYIEFIDNQDVLDLIEKKPGGIIALLDEACMLPRSTHETFAQKLYQTYKNHKRFAKPKLSRSDFTICHYAGDVTYQTELFLDKNKDYVVAEHQALLSASKCAFVSGLFPFLSEDSSKSSKFSSIGSRFKQQLQSLLETLSATEPHYIRCVKPNNLLKPAIFENQNVLQQLRCGGVMEAIRISCAGYPTRRTFYEFIDRFGILAPDVLSGSSDEVSAVRRLLDKIDLQGYQIGKTKVFLRAGQMAELDARRNEVLGRSASMIQRKVRSFLAQKNFIALRRSALQIQTVCRGELARRVYHNLQREAASLKIQTLYRMYTARKAYNELSASAVTIQSGLRGMCARKELHFRRQTRAAIIIQSRCRQFLARLHYSRTKKAAITTQCAWRGKAARKELRKLKMAARETGALQAAKNKLEKQVEELTWRLQLEKRMRADLEETKSQENAKLQAALQEVQQQYKETKEILVQEREAAKKAAEIAPVIKEVPVIDTELMNKLRDENDKLKTMVSSLEKKIDDTEKKYQETSKISEDRLKQAMDAETKIVDLNMAMLRLQEKISTMESEEKVQRQALLSTPVKSMSEHLSIPIAPKAHHLENGFHEVEGLKEPQSAPPAIKEYGNGDPKMKKSIVDRQLENVDALIECVGTNLGYCAGKPVAAITIYKCLLHWKSFEADKTSVFDRLIQLIGSAIENEDDNDNLAYWLSNTSSLLFLLQRSLKAAGAPGSVSRKKPPQPTSLFGRMAQGLRSASFANMHVEATDVVRQVEAKYPALLFKQQLTAYVEKIYGIVRDNIKKELSSLISLCIQAPRTMKASMLRVSGRLSSQSQSQSNHWQKIIESLDKLLKILQDNHVPPVLAQKIFTQIFSYINVQLFNSLLLRRECCSFSNGEYVKAGLAELELWCAKATTEHLHGMSSSISGRLLDFWLYSRSSEYLMMR

SEQ ID NO: 182170 - protein, 479 aa, Zea Mays
MSNQKMSLEDDVTPMSKFTGVQEVSGQDTPVEDFNRTSPNTIEVPKVIDLQGKGHCTGETTSLQSPRQKVDASWLKRTNKSVAEDVPESQGSTKNIPIILLDDDNDDRGKELENSEALDQGLHSQNKRTFGKIDLNCTELRQQGLLCLDDSTIQRLPDLDLAVNARKQMSRPIERLFFTEEKDTIRGKQEHHEESSTMHAPYSNFFDLGPPWNTGSLKGPKGLPSEVKFGIMDRAPEFSLDLRLDSFTDNNSVAALRSDKLFLGSTSSTSRKLTEKLGMYSYKRQSAPWSEEELDFLWIGVRRYGVNNWNAMLRDSRLRFSISRMPEDLAKQWDKEQKKLVGPAQGPKPKRTFHWANITLVELRALDAPSLHFSGPRRTFHWATSTFAVAVLQREATSIIYQQAWAWAASLGLLHRMEEVAAGAEGRPSRTTTRTSRLGSRSHHRTGCPSNPAAEWALRCGRASWWCHRQRQIHRGTTT

SEQ ID NO: 182171 - protein, 770 aa, Zea Mays
MSTAKVMITYKRKRAATHAHTEDDTVLDSSPAASSNVAVSSLQLKPEGPAETAVINEYNHITPKMQQSFSTFQQNIKEEREPEKGHDQLYESSPWKEQPEICSATIASTAEAHSNKSQCIDGTNSQTPVSSSLCGNMLADRMINQTKDSNISAPVEINSPTGMENAVAPGQCKSRFSPLLTFRRRVKKKTNLDEPAEEICSLDNDKQCSTLTCSPPRSSQDATSLLKHTAPNPLDIEDKVGRLKNTGPSTEAEHSPEQESSHVVKSSVQHVVPQIALDVNQNIILEDDVTPMSNQKMSLEDDVTPMSKFTGVQEVSGQDTPVEDFNRTSPNTIEVPKVIDLQGKGHCTGETTSLQSPRQKVDASWLKRTNKSVAEDVPESQGSTKNIPIILLDDDNDDRGKELENSEALDQGLHSQNKRTFGKIDLNCTELRQQGLLCLDDSTIQRLPDLDLAVNARKQMSRPIERLFFTEEKDTIRGKQEHHEESSTMHAPYSNFFDLGPPWNTGSLKGPKGLPSEVKFGIMDRAPEFSLDLRLDSFTDNNSVAALRSDKLFLGSTSSTSRKLTEKLGMYSYKRQSAPWSEEELDFLWIGVRRYGVNNWNAMLRDSRLRFSISRMPEDLAKQWDKEQKKLVGPAQGPKPKRTFHWANITLVELRALDAPSLHFSGPRRTFHWATSTFAVAVLQREATSIIYQQAWAWAASLGLLHRMEEVAAGAEGRPSRTTTRTSRLGSRSHHRTGCPSNPAAEWALRCGRASWWCHRQRQIHRGTTT

SEQ ID NO: 182172 - protein, 742 aa, Zea Mays
MSTAKVMITYKRKRAATHAHTEDDTVLDSSPAASSNVAVSSLQLKPEGPAETAVINEYNHITPKMQQSFSTFQQNIKEEREPEKGHDQLYESSPWKEQPEICSATIASTAEAHSNKSQCIDGTNSQTPVSSSLCGNMLADRMINQTKDSNISAPVEINSPTGMENAVAPGQCKSRFSPLLTFRRRVKKKTNLDEPAEEICSLDNDKQCSTLTCSPPRSSQDATSLLKHTAPNPLDIEDKVGRLKNTGPSTEAEHSPEQESSHVVKSSVQHVVPQIALDVNQNIILEDDVTPMSNQKMSLEDDVTPMSKFTGVQEGKGHCTGETTSLQSPRQKVDASWLKRTNKSVAEDVPESQGSTKNIPIILLDDDNDDRGKELENSEALDQGLHSQNKRTFGKIDLNCTELRQQGLLCLDDSTIQRLPDLDLAVNARKQMSRPIERLFFTEEKDTIRGKQEHHEESSTMHAPYSNFFDLGPPWNTGSLKGPKGLPSEVKFGIMDRAPEFSLDLRLDSFTDNNSVAALRSDKLFLGSTSSTSRKLTEKLGMYSYKRQSAPWSEEELDFLWIGVRRYGVNNWNAMLRDSRLRFSISRMPEDLAKQWDKEQKKLVGPAQGPKPKRTFHWANITLVELRALDAPSLHFSGPRRTFHWATSTFAVAVLQREATSIIYQQAWAWAASLGLLHRMEEVAAGAEGRPSRTTTRTSRLGSRSHHRTGCPSNPAAEWALRCGRASWWCHRQRQIHRGTTT

SEQ ID NO: 182173 - protein, 451 aa, Zea Mays
MSNQKMSLEDDVTPMSKFTGVQEGKGHCTGETTSLQSPRQKVDASWLKRTNKSVAEDVPESQGSTKNIPIILLDDDNDDRGKELENSEALDQGLHSQNKRTFGKIDLNCTELRQQGLLCLDDSTIQRLPDLDLAVNARKQMSRPIERLFFTEEKDTIRGKQEHHEESSTMHAPYSNFFDLGPPWNTGSLKGPKGLPSEVKFGIMDRAPEFSLDLRLDSFTDNNSVAALRSDKLFLGSTSSTSRKLTEKLGMYSYKRQSAPWSEEELDFLWIGVRRYGVNNWNAMLRDSRLRFSISRMPEDLAKQWDKEQKKLVGPAQGPKPKRTFHWANITLVELRALDAPSLHFSGPRRTFHWATSTFAVAVLQREATSIIYQQAWAWAASLGLLHRMEEVAAGAEGRPSRTTTRTSRLGSRSHHRTGCPSNPAAEWALRCGRASWWCHRQRQIHRGTTT

SEQ ID NO: 182174 - protein, 706 aa, Zea Mays
MQQSFSTFQQNIKEEREPEKGHDQLYESSPWKEQPEICSATIASTAEAHSNKSQCIDGTNSQTPVSSSLCGNMLADRMINQTKDSNISAPVEINSPTGMENAVAPGQCKSRFSPLLTFRRRVKKKTNLDEPAEEICSLDNDKQCSTLTCSPPRSSQDATSLLKHTAPNPLDIEDKVGRLKNTGPSTEAEHSPEQESSHVVKSSVQHVVPQIALDVNQNIILEDDVTPMSNQKMSLEDDVTPMSKFTGVQEVSGQDTPVEDFNRTSPNTIEVPKVIDLQGKGHCTGETTSLQSPRQKVDASWLKRTNKSVAEDVPESQGSTKNIPIILLDDDNDDRGKELENSEALDQGLHSQNKRTFGKIDLNCTELRQQGLLCLDDSTIQRLPDLDLAVNARKQMSRPIERLFFTEEKDTIRGKQEHHEESSTMHAPYSNFFDLGPPWNTGSLKGPKGLPSEVKFGIMDRAPEFSLDLRLDSFTDNNSVAALRSDKLFLGSTSSTSRKLTEKLGMYSYKRQSAPWSEEELDFLWIGVRRYGVNNWNAMLRDSRLRFSISRMPEDLAKQWDKEQKKLVGPAQGPKPKRTFHWANITLVELRALDAPSLHFSGPRRTFHWATSTFAVAVLQREATSIIYQQAWAWAASLGLLHRMEEVAAGAEGRPSRTTTRTSRLGSRSHHRTGCPSNPAAEWALRCGRASWWCHRQRQIHRGTTT

SEQ ID NO: 182175 - protein, 180 aa, Zea Mays
MGKGQCKAAGGSKTYVLKLDMHCQCNGCVKKMKDAVKEMMSLSQAEAEAGEVRVEVTGGIDMDPAKLCCLLQEATKKKRVRIAEEASVPSPGRQTTLSGQGQAEAAGGWRRDGAGTFPTTVPIPSAPPAPAPEEEAEAWSETTAPSERCRYRWAAPVSTFGVWAASDITGTLAMLYHHHL

SEQ ID NO: 182176 - protein, 677 aa, Zea Mays
MVRSIDDNPESDEGFNLEVGDKALKKPTGKEMHTRSQIFKYAYGQIEREKAMQQENHNMTFSGVISMAQDHDVSTRLSVEIAFKDLTLTLKGSKKKLLRSVTGKLSPGKVAAVMGPSGAGKTTFLSAIAGKATGCDTSGLVLINGRIEPIRGYKKIIGFVPQDDIVHGNLTVEENLWFNARCRLSAEMSKADKVLVVERVIESLGLQPVRDSLVGTVEQRGISGGQRKRVNVGLEMVMEPSVLILDEPTSGLDSASSLLLLRALRREALEGVNISMVVHQPSYTLYRMFDDLILLAKGGMTVYHGPVKKVEEYFTGLGIVVPERVNPPDYYIDILEGIVKPSLSSGGSVKDLPIRWMVHNGYDVPRDMLQSSSESESTSRGDAGHAPDEPSSVVSLLWGNLRDILGQKKDEYDYNKTSEDLSKRKTPGILRQYRYFLGRCGKQRLRDARIQGVDYLILCLAGICLGTLAKVSDETFGALGYTYTVIAVSLLCKIGALRSFTLDKINYWRERASGMSSLAYFLSKDSIDHFNTVVKPIVYLSMFYFFNNPRSSIWENYIVLLALVYCVTGIGYTFAVFFQPGSAQLWSALLPVVLTLIATQQKDTILADLCYTKWALEAFVIANAQNYSGVWLITRCGSLVRSGYDIEHEALCIAVLIANGVLFRCVAFFCMVTFQKN

SEQ ID NO: 182177 - protein, 1171 aa, Zea Mays
MQSTHHLCCCLPPVASSSPACFFSSPPKRPTAVRPPPPALLHLLRPSRRPSYRLGRTVPTDATMACWVAAAMHLLLLCNAAAAARAAVALFAATPMPPRLSLAEAAAAAGAGDYDDGGTGDKGSQALVGSPIVAGAMNNRLRALTSSFAAAIGKKLDYCIKDTETEWNQAFDFSKDTTFLTNCMKETKGDLQQRICTAAEMRFYFDSLMGGDDTAEANYVRPNVNCNRSSWIDGCEPGWACSAGADQKINLQDTKNMPYRPLKCQSCCPGFFCPHGLTCMIPCPLGAYCPRSSLNTSTGICDPYNYQPPPGNPNHTCGAADIWADVVTTDDIFCPAGFYCPSTIQKLPCSSGYYCRKGSTSQTRCYKKSSCPPNSATQDITIFGALLVVASCLVLLIIYNFSGQILTNREKRQAKSREAAARHARETAQARERWKSAKGVAKKAGVGLQSQLSRTFSRKKGGGGGGGQSSQLQAGASTKVGDDAGGKKHSNLADMVRSIDDNPESDEGFNLEVGDKALKKPTGKEMHTRSQIFKYAYGQIEREKAMQQENHNMTFSGVISMAQDHDVSTRLSVEIAFKDLTLTLKGSKKKLLRSVTGKLSPGKVAAVMGPSGAGKTTFLSAIAGKATGCDTSGLVLINGRIEPIRGYKKIIGFVPQDDIVHGNLTVEENLWFNARCRLSAEMSKADKVLVVERVIESLGLQPVRDSLVGTVEQRGISGGQRKRVNVGLEMVMEPSVLILDEPTSGLDSASSLLLLRALRREALEGVNISMVVHQPSYTLYRMFDDLILLAKGGMTVYHGPVKKVEEYFTGLGIVVPERVNPPDYYIDILEGIVKPSLSSGGSVKDLPIRWMVHNGYDVPRDMLQSSSESESTSRGDAGHAPDEPSSVVSLLWGNLRDILGQKKDEYDYNKTSEDLSKRKTPGILRQYRYFLGRCGKQRLRDARIQGVDYLILCLAGICLGTLAKVSDETFGALGYTYTVIAVSLLCKIGALRSFTLDKINYWRERASGMSSLAYFLSKDSIDHFNTVVKPIVYLSMFYFFNNPRSSIWENYIVLLALVYCVTGIGYTFAVFFQPGSAQLWSALLPVVLTLIATQQKDTILADLCYTKWALEAFVIANAQNYSGVWLITRCGSLVRSGYDIEHEALCIAVLIANGVLFRCVAFFCMVTFQKN

SEQ ID NO: 182178 - protein, 78 aa, Zea Mays
MNAIDLILKKLSLDVHYPANLSSPFPYAGLTFPSYPGVPVGYMIPQVPYNNAVNYGPNNGYGGRYQNNKYKLEVSNFK

SEQ ID NO: 182179 - protein, 146 aa, Zea Mays
MRSPASNEAQESLTIGIADEHIGAVVGRAGRNITEIIQASGARIKISDRGDFISGTSDRSYPDRGVHDHAEGVSQFGEAMIPDMFDGLWGPLLSPSSMFDASYYCLLRCANGLVEDIYVQRLNGFGNRAELYPVDATTRQAGAALC

SEQ ID NO: 182180 - protein, 117 aa, Zea Mays
MQVPYNNAVNYGPNNGYGGRYQNNKPSTPMRSPASNEAQESLTIGIADEHIGAVVGRAGRNITEIIQASGARIKISDRGDFISGTSDRKVTITGTSEAIRTAESMIMQRVSASSERL

SEQ ID NO: 182181 - protein, 88 aa, Zea Mays
MRSPASNEAQESLTIGIADEHIGAVVGRAGRNITEIIQASGARIKISDRGDFISGTSDRKVTITGTSEAIRTAESMIMQRVSASSERL

SEQ ID NO: 182182 - protein, 301 aa, Zea Mays
MAGKEERKRVLVVGGSGYLGQHLLAASSTVDRLDVAFTHHSPAPPQPLLETLPSVRAFRADLRSGDGFEAISASFGQPHVVVNCAAMSVPRACELDPPAAMATNVPSSLVNWLLSFGNEDSLLIQLSTDQVYEGVKSFYKEEDETMPVNMYGKSKVAAEKLIVEKCSNYAILRSSIIYGPQTISPVAKSLPIQWMDGVLSQGQQVEFFSDEFRCPVYVKDMVDVILSLTKTWFPDDGKKVQVLLNVGGPDRVSRLQMAESVAVVRGYNPSIIKSVSASSVLSCLWNIAFKHPYICQFSVST

SEQ ID NO: 182183 - protein, 222 aa, Zea Mays
MAPSRPLMRGIRPPRVFPTRGGRASPYTVALTALLLVSAALLALIAFGVFSLPVSAPNAAATTGTAAGGETESADVRPRARRDLGEGLGERGAQWTEVISWEPRAFVYHNFLSKDECEYLIGLAKPHMVKSTVVDSTTGKSKDSRVRTSSGMFLQRGRDKVIRAIEKRIADYTFIPVDHGEGLQVLHYEVGQKYEPHFDYFLDEFNTKNGGQRIATLLMYLC

SEQ ID NO: 182184 - protein, 180 aa, Zea Mays
MVKSTVVDSTTGKSKDSRVRTSSGMFLQRGRDKVIRAIEKRIADYTFIPVDHGEGLQVLHYEVGQKYEPHFDYFLDEFNTKNGGQRIATLLMYLSDVEEGGETIFPDANVNASSLPWYNELSDCAKRGLSVKPKMGDALLFWSMKPDATLDPLSLHGGCPVIKGNKWSSTKWMHIHEYKA

SEQ ID NO: 182185 - protein, 640 aa, Zea Mays
MDAGAGATAIRVPYRHLRDAEMELVSLNGGAPGGDTGPPPPPPKDQPRSRADRTKLVLACMVAAGVQFGWALQLSLLTPYIQTLGIDHAMASFIWLCGPITGFVVQPCVGVWSDKCRSKYGRRRPFILAGCIMICAAVTLIGFSADLGYILGDTTEHCRTYKGSRFRAAIVFILGFWMLDLANNTVQGPARALLADLSGPDQCNSANAIFCSWMAVGNILGFSAGASGEWHKWFPFLTTRACCEACGNLKAAFLVAVVFLLLCMSVTLYFAEESPLDPKDTQGLSDSAPLLNGSRDAAHASNEPNNERFPNGHVGLNNVSANNNTEEFTNVNSNTEKGGVFNDGPGAVLVNILTRMRHLPPGMHSVLLVMALTWLSWFPFFLFDTDWMGREVYHGDPNGDLSERKAYDNGVREGAFGLLLNSVVLGVGSFLVDPLCRMIGARLVWAISNFTVFICMMATTILSWISSDLYSSKLHHIIGANKTVKITALVVFSLLGLPLSITYSVPFSVTAELTAGTGGGQGLATGVLNLAIVVPQVHGTLCMEEGIPRRSSWLRSSPWQQVCSQFSSCQSCPTRTNLPGSMDLADAHAQNTPVCHVKHHTNTWPHFAIRLQRNDSFFLVQLQNNDSESRSLGEREREAR

SEQ ID NO: 182186 - protein, 674 aa, Zea Mays
MVWFPSPPSGGSQHGVLRQVWRSERCTVSWLVLLLTELTAHVAPGLAILVDMASEHQGLVPVIADFTNRLLACNSHRWAGERLLRTLDESLLPRLQPGYQLASYYPIFVKIAQNETVPQLRLIELLTEQMVSLTKKHGPDTELKSWSQGSKVVGICRVMLKHHHSSHIFLPLSHLLVLTIESFPDLEVRDHARICLRMLSCVPGKKLRHIMGVGEQPSGVTPSHPDSLFDIPSPCPALDLKSMPDLASYIHLERVGPLVVKQSWALTLPNFSVQSRPSGSILSIQDVSSVPSEQENPTGPTIERIGYRQETLRVMDAKGAETLQILRRYFACIPDYLHSSGFKIQIQCTFRFDTEPFNNAWGLDLPVSDSDGADELPALYAVTITFSSSAQFGKIPSCHIPFILGEPPGSGMDIVPVDNQNREESGYCASVMIELEPREPSPGLIDVSVEANTENCHVLSGPLKPITVGFEDMFLKASVPPDTPREGVAMYYQDLFQALWQACDSSTNTGRETFPLSGGKGSAAINGTRSVKLLEVTPKVLIGSVERYLASFVVSVSGVSLVTILRGNGIIKNVMWEENVADASVGADALVPYSPDRNLQLQIIEDDEIGGGAERYGHGSKREMGIMRVMIFLPPRYHLLFLMEVGSASTLVRIRTDHWPCLAYVDEYLEALIS

SEQ ID NO: 182187 - protein, 76 aa, Zea Mays
MGIYLMQTIFWCKLYTNLLKKVPKISEKEHECTSEVTSYIHKILWSNSSYSSRYKKKTKNLTNNNSSNAPKFVFFL

SEQ ID NO: 182188 - protein, 713 aa, Zea Mays
MGEPKPPRPTQSSRPATLTMPRRAGAAWPCFLLLHIIAHLHLAVNAADADALLTFKSSLDRSDRLPWRPDTAPAFCASWPGVRQCAPAGRVTKLVLEGLNLTGSLTAALLAPLAELRVLSLKSNALTGPIPEALPRALPNLKLLYLADNRLQGRVPATLAMLHRATVIVLSGNRLTGQIPPSLAALPRLTSLLLDRNLLTGAVPPLAQRTLRALNVSANRLSGEIPRSLAARFNASSFLPNAGLCGAPLAVRCVAGGPSPAPLTAATAAFAPLPPPRTKARRGKNAAVVAGATVAGVVVLAILVAAALMASRRGRNKRVAGDVDKGNAGTVAAEAEHQTAQAQQQHIHASSAAPAATTAGGVGGREFSWEREGIGKLVFCGGVAEMYSLEELLRASAETLGRGEVGSTYKAVMETGFIVTVKRMRDPSAGGVGAAEFGRRAEELGRVRHPNAVALRAYFQAKEERLLVYDYYPNGSLFSLVHGSRPSSKGKPLHWTSCMKIAEDVAAGLVHLHQWSIVHGNLKPSNVLLGPDFESCLTDYGLLPTLLPSNAELHSSSSLFYRAPEVRGAHATSLELFTPATDVYSFGVLLLELLTGRTPFQDLMELHGDDIPSWVRAVREEERETESVSAGGGGAEEKLTALINIAATCVAADPARRPTTAELLRMVREARAEAMSSSNSSDRSPARWSDAMLGVPLPRDQAAESFTDRERLD

SEQ ID NO: 182189 - protein, 131 aa, Zea Mays
MGYLFSILHFQLMIRLSENTLMAHLSTFLPALMDAKVVKKVQTKKAPAPKIAKQESSDDDTSDETSESDEEHAKKPAAKPLATVAKNGSKTVKQESSSDEDSSEDESDDNSDDEPAKKAAAKPWVPLLKMV

SEQ ID NO: 182190 - protein, 249 aa, Zea Mays
MHPFKGSDLWTSQQWRRSILPGISAGDWYCPSYESRIFPLNYGLARLKTSPTIGYLRIFHGLASSFVAVSQLEEYSETSGHLVHTKVAFFLMGYLFSILHFQLMIRLSENTLMAHLSTFLPALMDAKVVKKVQTKKAPAPKIAKQESSDDDTSDETSESDEEHAKKPAAKPLATVAKNGSKTVKQESSSDEDSSEDESDDNSDDEPAKKAAAKPWVPLLKMFYPSSAIEQKGKTEQKEPLRVKLSTSPK

SEQ ID NO: 182191 - protein, 133 aa, Zea Mays
MHPFKGSDLWTSQQWRRSILPGISAGDWYCPSYESRIFPLNYGLARLKTSPTIGYLRIFHGLASSFVAVSQLEEYSETSGHLVHTKVAFFLMGYLFSILHFQLMIRLSENTLMAHLSTFLPALMDAKVVEPSI

SEQ ID NO: 182192 - protein, 285 aa, Zea Mays
MASSSGGGGGRRMTPGGDSSASAGGRRIYRTQTAGNLGDSIFDSEVVPSSLVDIAPILRVANEVEASNPRVAYLCRFYAFEKAHRLDPTSSGRGVRQFKTALLQRLERENDPTLKGRVKQSDAREMQSFYQLYYKKYIQALQKVADKADRAQLTKAYQTAAVLFEVLRAVNVSQKIEVDKSILETHNQVEEKKKLYLPYNILPLDPDSANQPIMLYPEIQAAFHALRNTRGLPWPKEHEKKRDAPKEHEKKRDADLLAWLQAMFGFQITYPTKGSISYSCLPTCT

SEQ ID NO: 182193 - protein, 478 aa, Zea Mays
MASSSGGGGGRRMTPGGDSSASAGGRRIYRTQTAGNLGDSIFDSEVVPSSLVDIAPILRVANEVEASNPRVAYLCRFYAFEKAHRLDPTSSGRGVRQFKTALLQRLERENDPTLKGRVKQSDAREMQSFYQLYYKKYIQALQKVADKADRAQLTKAYQTAAVLFEVLRAVNVSQKIEVDKSILETHNQVEEKKKLYLPYNILPLDPDSANQPIMLYPEIQAAFHALRNTRGLPWPKEHEKKRDAPKEHEKKRDADLLAWLQAMFGFQKDNVSNQREHLILLLANVHIRQIPKSDQQPKLDDRALDTVMKKLFKNYKRWCKYLGRKSSLWLPTIQQEVQQRKLLYMGLYLLIWGEAANLRFMPECLCYIYHHMAFELYGMLAGNVSPTTGENVKPAYGGEEEAFLKRVVTPIYKVIEKEEVERSKTMKSKHSHWRNYDDLNEYFWSRDCFRLGWPMRSDADFFKTPNVPLHHVDGVCTL

SEQ ID NO: 182194 - protein, 765 aa, Zea Mays
MKAILDIILSWKARRNMSLVVKLRYILKLLSAASWVVILPVTYAYTWKNPTGLARAIKSWLGDGQNQPSLYILAVVIYLAPNLLSATLFLFPVIRRALERSNLKVVTFIMWWSQPRLFVGRGMHEGAFSLFKYTMFWVLLLATKLVVSFYVEIKPLVQPTKDIMKEPIRTFKWHEFFPHANNNIGVVIALWAPIILVYFMDTQIWYAIFSTLIGGVYGACRRLGEIRTLGMLRSRFESLPKAFNQCLIPSDTSKRRGFRAAFSKPSKTSEDTREQEKIAARFAQIWNLIITSFREEDLIDDREKDLLLVPYCKDRDMDIIQWPPFLLASKIPIALDMAADSGGKDRDLKKRMKSDPYFTYAIKECYASFKNIIYELVIDSRERGYIQKIFDAVDEHIAEETLIKELNMSNLPTLSKKFIELLDLLESNNKEDHDQIIILFQDMLEVVTRDIMVDQLSELLELIHGANNKRSEGMTSLDQQDQLFTKAIDFPVKKTQAWNEKIKRLRLLLTVKESAMDVPTNLDARRRISFFANSLFMSMPDAPKVRQMLPFSVLTPYYKEDVLFSSQALAEQNEDGVSILFYLQKIYPDEWKNFLERVHCESEDQLHETEHSEEQLRLWASYRGQTLTRTVRGMMYYRQALVLQASLDMARDDDLMEGFRAADLLSESDESPLLTQCKAIADMKFTYVVSCQQYGIQKRSGDPHAQDILRLMTTYPSLRVAYIDEVEEPSKDKNKKIEKVYYSALVKAAVTKPDDPGQKLDQGYI

SEQ ID NO: 182195 - protein, 638 aa, Zea Mays
MLGEGKPENQNHAIIFTRGEGLQTIDMNQEHYMEETLKMRNLLQEFLKKHDGVRYPSILGVREHIFTGSVSSLAWFMSNQETSFVTIGQRVLANPLRVRFHYGHPDIFDRLFHLTRGGVSKASKIINLSEDIFAGFNSTLREGNVTHHEYMQVGKGRDVGLNQISLFEAKIANGNGEQTLSRDVYRLGHRFDFFRMLSCYYTTIGFYFSTMITVWTVYVFLYGRLYLVLSGLDEALATGKRFIHNEPLQVALASQSFVQLGFLMALPMMMEIGLERGFRTALSDFVLMQLQLASVFFTFSLGTKTHYYGTTLLHGGAEYRATGRGFVVFHAKFAENYRLYSRSHFVKGIELMILLIVYEIFGQSYRGAIAYIFITFSMWFMVVTWLFAPFLFNPSGFEWQKIVDDWTDWNKWISNRGGIGVPPEKSWESWWEKEQEPLRHSGKRGTVLEIVLSLRFFIYQYGLVYHLNITTHTKSVLVYCISWVIIFVILLVMKTVSVGRRKFSAEFQLVFRLIKGLIFITFISIIIILIAIPHMTVQDIFVCILAFMPTGWGLLLIAQTMRSAISHMGLWGSVKALARGYEIIMGLLLFTPIAFLAWFPFVSEFQTRMLFNQAFSRGLQISRILGGHKKDRAARNKE

SEQ ID NO: 182196 - protein, 660 aa, Zea Mays
MSLVVKLRYILKLLSAASWVVILPVTYAYTWKNPTGLARAIKSWLGDGQNQPSLYILAVVIYLAPNLLSATLFLFPVIRRALERSNLKVVTFIMWWSQPRLFVGRGMHEGAFSLFKYTMFWVLLLATKLVVSFYVEIKPLVQPTKDIMKEPIRTFKWHEFFPHANNNIGVVIALWAPIILVYFMDTQIWYAIFSTLIGGVYGACRRLGETSEDTREQEKIAARFAQIWNLIITSFREEDLIDDREKDLLLVPYCKDRDMDIIQWPPFLLASKIPIALDMAADSGGKDRDLKKRMKSDPYFTYAIKECYASFKNIIYELVIDSRERGYIQKIFDAVDEHIAEETLIKELNMSNLPTLSKKFIELLDLLESNNKEDHDQIIILFQDMLEVVTRDIMVDQLSELLELIHGANNKRSEGMTSLDQQDQLFTKAIDFPVKKTQAWNEKIKRLRLLLTVKESAMDVPTNLDARRRISFFANSLFMSMPDAPKVRQMLPFSVLTPYYKEDVLFSSQALAEQNEDGVSILFYLQKIYPDEWKNFLERVHCESEDQLHETEHSEEQLRLWASYRGQTLTRTVRGMMYYRQALVLQASLDMARDDDLMEGFRAADLLSESDESPLLTQCKAIADMKFTYVVSCQQYGIQKRSGDPHAQDILRLMTTIYIG

SEQ ID NO: 182197 - protein, 626 aa, Zea Mays
MILARNLIRIKLPGNAMLGEGKPENQNHAIIFTRGEGLQTIDMNQEHYMEETLKMRNLLQEFLKKHDGVRYPSILGVREHIFTGRVRFHYGHPDIFDRLFHLTRGGVSKASKIINLSEDIFAGFNSTLREGNVTHHEYMQVGKGRDVGLNQISLFEAKIANGNGEQTLSRDVYRLGHRFDFFRMLSCYYTTIGFYFSTMITVWTVYVFLYGRLYLVLSGLDEALATGKRFIHNEPLQVALASQSFVQLGFLMALPMMMEIGLERGFRTALSDFVLMQLQLASVFFTFSLGTKTHYYGTTLLHGGAEYRATGRGFVVFHAKFAENYRLYSRSHFVKGIELMILLIVYEIFGQSYRGAIAYIFITFSMWFMVVTWLFAPFLFNPSGFEWQKIVDDWTDWNKWISNRGGIGVPPEKSWESWWEKEQEPLRHSGKRGTVLEIVLSLRFFIYQYGLVYHLNITTHTKSVLVYCISWVIIFVILLVMKTVSVGRRKFSAEFQLVFRLIKGLIFITFISIIIILIAIPHMTVQDIFVCILAFMPTGWGLLLIAQTMRSAISHMGLWGSVKALARGYEIIMGLLLFTPIAFLAWFPFVSEFQTRMLFNQAFSRGLQISRILGGHKKDRAARNKE

SEQ ID NO: 182198 - protein, 606 aa, Zea Mays
MEETLKMRNLLQEFLKKHDGVRYPSILGVREHIFTGSVSSLAWFMSNQETSFVTIGQRVLANPLRVRFHYGHPDIFDRLFHLTRGGVSKASKIINLSEDIFAGFNSTLREGNVTHHEYMQVGKGRDVGLNQISLFEAKIANGNGEQTLSRDVYRLGHRFDFFRMLSCYYTTIGFYFSTMITVWTVYVFLYGRLYLVLSGLDEALATGKRFIHNEPLQVALASQSFVQLGFLMALPMMMEIGLERGFRTALSDFVLMQLQLASVFFTFSLGTKTHYYGTTLLHGGAEYRATGRGFVVFHAKFAENYRLYSRSHFVKGIELMILLIVYEIFGQSYRGAIAYIFITFSMWFMVVTWLFAPFLFNPSGFEWQKIVDDWTDWNKWISNRGGIGVPPEKSWESWWEKEQEPLRHSGKRGTVLEIVLSLRFFIYQYGLVYHLNITTHTKSVLVYCISWVIIFVILLVMKTVSVGRRKFSAEFQLVFRLIKGLIFITFISIIIILIAIPHMTVQDIFVCILAFMPTGWGLLLIAQTMRSAISHMGLWGSVKALARGYEIIMGLLLFTPIAFLAWFPFVSEFQTRMLFNQAFSRGLQISRILGGHKKDRAARNKE

SEQ ID NO: 182199 - protein, 113 aa, Zea Mays
MTRRSLATVSSTSRSSPTWSHASLCTTSSHEATVWTRSRAAAPRCPSLRGGPHGCLQCRRLLGCSGHRIRRRRHHAIQLIVHLKPNLLRKSLLTGHEFLCIGTMLTLCECPRT

SEQ ID NO: 182200 - protein, 112 aa, Zea Mays
MVHMSWPGRGGVALHEGRSGALKQPWVWSMPLPPASRRKVELGLPLLKRRHQKKGPRRSKPAPTWVCSLPRITESAVADASASSGPSRSRWQPKRRPEMTSTVGSSTPQLAA

SEQ ID NO: 182201 - protein, 96 aa, Zea Mays
MILYIESSLTFCLLGVINGTAPNPVRLSELCERLGRIVGRPSWLPVPGFALKAVLGEGASVVLEGQKVVPAKAKDLGFSYRYPYVEDALKAIARDL

SEQ ID NO: 182202 - protein, 234 aa, Zea Mays
MGFPSTPNLKLEPRPRTRRLLRCALSSEPVPPMTVSITGATGFIGRRLVHKLLSDDHKVCILTRSASKAASVFPASTYPGLTIAQQGDWEACVRGSTAVVNLAGMPISTRWSPEIKQEIKQSRVNVTSKVCREWEATACQVNQEDVRLVLLRIGVVLGKDGGALGCCVSFNSFSPLLSFYFPSSREGPFQSTLLIHLVHLSICSKDDTPFYDVCWWSSGDGTPMVASLSCATDL

SEQ ID NO: 182203 - protein, 232 aa, Zea Mays
MGFPSTPNLKLEPRPRTRRLLRCALSSEPVQPPMTVSITGATGFIGRRLVHKLLSDDHKVCILTRSASKAASVFPASTYPGLTIAQQGDWEACVRGSTAVVNLAGMPISTRWSPEIKQEIKQSRVNVTSKVCREWEATACQVNQEDVRLVLLRIGVVLGKDGGALGCCVSFNSFSPLLSFYFPSSREGPFQSTLLIHLVHLSICSKDDTPFYDVCWWSSGDGTPMVFLDSSG

SEQ ID NO: 182204 - protein, 270 aa, Zea Mays
MGFPSTPNLKLEPRPRTRRLLRCALSSEPVPPMTVSITGATGFIGRRLVHKLLSDDHKVCILTRSASKAASVFPASTYPGLTIAQQGDWEACVRGSTAVVNLAGMPISTRWSPEIKQEIKQSRVNVTSKVVKYINHAGNADTRPSVFVSATAIGYYGTSEIHSFDESSPSGNDYLAEVCREWEATACQVNQEDVRLVLLRIGVVLGKDGGALAKMIPLFMMFAGGPLGTGRQWFSWIHLDDLVNLIYESLTNPTYKAMRTSGANRWAALL

SEQ ID NO: 182205 - protein, 209 aa, Zea Mays
MCLETGGFSVANMLHIKLTVDLRSTNYFWVPFQSSHLGREKDSVVVAHVNFEVKSIGPSTIQAPNYVTFSKMAAGRTRRSSLPAATNATASALTHQIRQTNKANETLAQHGLDGCGHSLLAPPPPPLRPLPSLVPGPVFRCAEPRRRGQGVCRPQPPASVPQQGPSHAHTVAREPAQLILLGAHGAARVEGGVRRPLASPHGRHRLRES

SEQ ID NO: 182206 - protein, 182 aa, Zea Mays
MCLETGGFSVANMLHIKLTVDLRSTNYFWVPFQSSHLGREKDSVVVAHVNFEVKSIGPSTIQAPNYVTFSKMAAGRTRRSSLPAATNATASALTHQIRQTNKANETLAQHGLDGCGHSLLAPPPPPLRPLPSLVPGPVFRCAEPRRRGQGVCRPQPPASVPQRLSSPFFSSSLPPVLFQSYH

SEQ ID NO: 182207 - protein, 313 aa, Zea Mays
MAWTAAGTVCWRLLRLPSVRCPLSSRARCSAAQSLDAVDKEYADLNLRPLYPNVCRHPSSLRPYPRCYSNLTTDSSMYAEGPSHAHTEPTGPPEWKEVFDDPLLPLMVDIGCGSGRFLIWHAKNSGKSQNYLGLEIRQKNFVLYKCPSKPFKCAFELHPLVERAQFWVNELELIYFMFANATMSFEKIISSYPGPLSLVSILCPDPHFKKRHHKRRVLQQPLVDSIINNLCLGGQVFIQSDVLEVAVDMRERFDGYSGILAHVNYVDQDLQCDNEGWLLDNPMGIRTEREIHAELEGATIYRRVYQKVRDASF

SEQ ID NO: 182208 - protein, 373 aa, Zea Mays
MQRYSFLEAYSKPIRCISRSRTVRPLGPTKRASSATANEIDMLSNGQGFVSTDKVNSRGHSVCLHTPMFPKIEGGMVEVVEAPKINKNARKVVVSKEAQNVIGTDSSTSNYDSFDSGSSWSGSEGDDGIETFSDAVVFRYCLDSTYDRSKFLRGASLTVNKDDLVKLADRVSLYSGCSHHRNQILMSKRLFREGADTWNMISKNNERALWSSAIPEIITKFTNIVHSVRRGLSEQDLEVLRGIAGCGEDIGRDEFDRLWCWLYLVVVSLSRERIKKLWDCTAPRWIEGLITTEEAENALRSSRELLKEAGTFVLRFPITRSWPHPDAGSLVVNYIGSDSSIHHRLLSLDSSDASAEKLQDLLLQEPELSQLGR

SEQ ID NO: 182209 - protein, 613 aa, Zea Mays
MAAPESECGGSDGYRDLRGVRVDLDTGAAGADGGGGFAVSFWLYLSVSARPSSVILHQITAGDDTKLPFLALGEGNKLLLFPLMRLHREAPAPASSYPWTDTTNLSSTSVCPLEKWFHIGCEVTENVMCLHVDGFLTAEAPLCSLFDEPDRQDDSNQISLVGNDGKLEGYIYNIEVSYVLGAIKEQYTKNPPFKLSIDYSCSDGIEEGDDGIWSIVGGKLSSKCDNKLFRIKFSTLHMQRYSFLEAYSKPIRCISRSRTVRPLGPTKRASSATANEIDMLSNGQGFVSTDKVNSRGHSVCLHTPMFPKIEGGMVEVVEAPKIASQNKNARKVVVSKEAQNVIGTDSSTSNYDSFDSGSSWSGSEGDDGIETFSDAVVFRYCLDSTYDRSKFLRGASLTVNKDDLVKLADRVSLYSGCSHHRNQILMSKRLFREGADTWNMISKNNERALWSSAIPEIITKFTNIVHSVRRGLSEQDLEVLRGIAGCGEDIGRDEFDRLWCWLYLVVVSLSRERIKKLWDCTAPRWIEGLITTEEAENALRSSRELLKEAGTFVLRFPITRSWPHPDAGSLVVNYIGSDSSIHHRLLSLDSSDASAEKLQDLLLQEPELSQLGR

SEQ ID NO: 182210 - protein, 620 aa, Zea Mays
MAAPESECGGSDGYRDLRGVRVDLDTGAAGADGGGGFAVSFWLYLSVSARPSSVILHQITAGDDTKLPFLALGEGNKLLLFPLMRLHREAPAPASSYPWTDTTNLSSTSVCPLEKWFHIGCEVTENVMCLHVDGFLTAEAPLCSLFDEPDRQDDSNQISLVGNDGKLEGYIYNIEVSYVLGAIKEQYTKNPPFKLSIDYSCSDGIEEGDDGIWSIVGGKLSSKCDNKLFRIKFSTLHMQRYSFLEAYSKPIRCISRSRTVRPLGPTKRASSATANEIDMLSNGQGFVSTDKVNSRGHSVCLHTPMFPKIEGGMVEVVEAPKINKNARKVVVSKEAQNVIGTDSSTSNYDSFDSGSSWSGSEGDDGIETFSDAVVFRYCLDSTYDRSKFLRGASLTVNKDDLVKLADRVSLYSGCSHHRNQILMSKRLFREGADTWNMISKNNERALWSSAIPEIITKFTNIVHSVRRGLSEQDLEVLRGIAGCGEDIGRDEFDRLWCWLYLVVVSLSRERIKKLWDCTAPRWIEGLITTEEAENALRSSRELLKEAGTFVLRFPITRSWPHPDAGSLVVNYIGSDSSIHHRLLSLDSSDASAEKLQDLLLQEPELSQLGRVDRVSITIRR

SEQ ID NO: 182211 - protein, 505 aa, Zea Mays
MKKKTSNVIKNLATLNFKNSEDTCYHEDSEMVPSPGRASPVVASVQSHKNFVDHADLEIVPSHENSVDLHSVYMAHVLERSRQSIVVDILDYNIPESTFADCLLPTGHMHTDVFYLQCQLLSKDWKDKVILSWKATQELIHQDIGVKELDKELTAEIFIPIIHAGHWSLVILSTAKQETYILDSYPRHSGVAKDVLTQLQKYLDNKHNFDMSNYTDHVPPVQHQKNNYDCGFHVLLYIEEFMKEKMYKINKKMVLKFRKQLCMNLLYHPLNRINLVEFRKKLGITLKRKLPGILDLTIEGERSESEAAVIIEIENRDDKTLEDEHISVEKEKLRKHKFTSDKINDEICKHILNYNERELLSVGQTTMTGGQLEKYVNEGDNGDKILRAFITCFTCDEKFNQGNITTVIPPHEVSEEGELSKVDAAQLVEEIKAVLKGTNVARVRKDTESTKDPKVKVFRNMRRTFIFFPFYKNEELFVFHVDTKRLPIIDALFCKMSSLSFEDRS

SEQ ID NO: 182212 - protein, 483 aa, Zea Mays
MDRAKVHENTDQIEINIREGVSIWITKAAVQKCFEFPPGTDKKLPIDPTTKTFDSLYRVLSVSEKKINVKKKKMKENMKEKQVEEEKIEMNMEEKKQNLVEDEGSQQEESEEEDGEDGEIGEEEGEDGAIGDAKVGGDGDKESAKRGGIKVAVRRNVLTPLNINLMLQNINNDEILKLLVKRNEDTDGTEPNLDIDLIVRCFFAVSSVAEFGKDKKKLISGCTTVLMVVFLDHLVENPLDPLTIPRINLYTSDFIADLIMVPKDSPGPEKKRRKFKNSEDTCYHEDSEMVPSPGRASPVVASVQSHKNFVDHADLEIVPSHENSVDLHSVYMAHVLERSRQSIVVDILDYNIPESTFADCLLPTGHMHTDVFYLQCQLLSKDWKDKVILSWKATQELIHQDIGVKELDKELTAEVMNKVDLVCALFYITVEFFQIDSRVCAFFRYLFLSFMPVTGPLLFFPLPNKRHISLTPTQGTVGWPRMF

SEQ ID NO: 182213 - protein, 665 aa, Zea Mays
MGGCWFSEDPRAKGVSLSCGIVLCSFICCVSGFHVDFLEDPWSVVRVTFRSLQCCVLNASVMFHNPCHFLESTVGLLLSVESDGRMLVLGGPTGERRSHVDFWQDPQSEARVTFRSLQCCVLNTSVMFHVPCHFLESTVALLLSVESDLRMLILGGPTANAGFPKRHGQFELALGMPPLCPSQTPWSIDGDVAGHEVAYQLVTRNTQAARRHVEITALTVPTFWGSGHCPEPLVILRKGSTVACYGYPRSHSSSMKRATNWPGKIWRRGDRMDGRQERAKKSWRLGEKMVALGAMGTEVRMVAAVENEATATSRLIVVVRGHGAEHLPEKSRLIRLKKGTASPILMSKVTWCRSAGVKKKANMPQGKSKKNVVKEKAKKIKKNAESRAKVHENTDQIEINIREGVSIWITKAAVQKCFEFPPGTDKKLPIDPTTKTFDSLYRVLSVSEKKINVKKKKMKENMKEKQVEEEKIEMNMEEKKQNLVEDEGSQQEESEEEDGEDGEIGEEEGEDGAIGDAKVGGDGDKESAKRGGIKVAVRRNVLTPLNINLMLQNINNDEILKLLVKRNEDTDGTEPNLDIDLIVRCFFAVSSVAEFGKDKKKLISGCTTVLMVVFLDHLVENPLDPLTIPRINLYTSDFIADLIMVPKDSPGPEKKRRKTQDEKED

SEQ ID NO: 182214 - protein, 539 aa, Zea Mays
MFHVPCHFLESTVALLLSVESDLRMLILGGPTANAGFPKRHGQFELALGMPPLCPSQTPWSIDGDVAGHEVAYQLVTRNTQAARRHVEITALTVPTFWGSGHCPEPLVILRKGSTVACYGYPRSHSSSMKRATNWPGKIWRRGDRMDGRQERAKKSWRLGEKMVALGAMGTEVRMVAAVENEATATSRLIVVVRGHGAEHLPEKSRLIRLKKGTASPILMSKVTWCRSAGVKKKANMPQGKSKKNVVKEKAKKIKKNAESRAKVHENTDQIEINIREGVSIWITKAAVQKCFEFPPGTDKKLPIDPTTKTFDSLYRVLSVSEKKINVKKKKMKENMKEKQVEEEKIEMNMEEKKQNLVEDEGSQQEESEEEDGEDGEIGEEEGEDGAIGDAKVGGDGDKESAKRGGIKVAVRRNVLTPLNINLMLQNINNDEILKLLVKRNEDTDGTEPNLDIDLIVRCFFAVSSVAEFGKDKKKLISGCTTVLMVVFLDHLVENPLDPLTIPRINLYTSDFIADLIMVPKDSPGPEKKRRKTQDEKED

SEQ ID NO: 182215 - protein, 369 aa, Zea Mays
MSKVTWCRSAGVKKKANMPQGKSKKNVVKEKAKKIKKNAESRAKVHENTDQIEINIREGVSIWITKAAVQKCFEFPPGTDKKLPIDPTTKTFDSLYRVLSVSEKKINVKKKKMKENMKEKQVEEEKIEMNMEEKKQNLVEDEGSQQEESEEEDGEDGEIGEEEGEDGAIGDAKVGGDGDKESAKRGGIKVAVRRNVLTPLNINLMLQNINNDEILKLLVKRNEDTDGTEPNLDIDLIVRCFFAVSSVAEFGKDKKKLISGCTTVLMVVFLDHLVENPLDPLTIPRINLYTSDFIADLIMVPKDSPGPEKKRRKFKNSEDTCYHEDSEMVPSPGRASPVVASIVCYLQVICTQMYFIYNANCCQRIGRIK

SEQ ID NO: 182216 - protein, 320 aa, Zea Mays
MSKVTWCRSAGVKKKANMPQGKSKKNVVKEKAKKIKKNAESRAKVHENTDQIEINIREGVSIWITKAAVQKCFEFPPGTDKKLPIDPTTKTFDSLYRVLSVSEKKINVKKKKMKENMKEKQVEEEKIEMNMEEKKQNLVEDEGSQQEESEEEDGEDGEIGEEEGEDGAIGDAKVGGDGDKESAKRGGIKVAVRRNVLTPLNINLMLQNINNDEILKLLVKRNEDTDGTEPNLDIDLIVRCFFAVSSVAEFGKDKKKLISGCTTVLMVVFLDHLVENPLDPLTIPRINLYTSDFIADLIMVPKDSPGPEKKRRKTQDEKED

SEQ ID NO: 182217 - protein, 411 aa, Zea Mays
MKRATNWPGKIWRRGDRMDGRQERAKKSWRLGEKMVALGAMGTEVRMVAAVENEATATSRLIVVVRGHGAEHLPEKSRLIRLKKGTASPILMSKVTWCRSAGVKKKANMPQGKSKKNVVKEKAKKIKKNAESRAKVHENTDQIEINIREGVSIWITKAAVQKCFEFPPGTDKKLPIDPTTKTFDSLYRVLSVSEKKINVKKKKMKENMKEKQVEEEKIEMNMEEKKQNLVEDEGSQQEESEEEDGEDGEIGEEEGEDGAIGDAKVGGDGDKESAKRGGIKVAVRRNVLTPLNINLMLQNINNDEILKLLVKRNEDTDGTEPNLDIDLIVRCFFAVSSVAEFGKDKKKLISGCTTVLMVVFLDHLVENPLDPLTIPRINLYTSDFIADLIMVPKDSPGPEKKRRKTQDEKED

SEQ ID NO: 182218 - protein, 395 aa, Zea Mays
MRYSVGFLIRVAFGYIELCSSNLCWVSGFHVDFWEDPRSEARVTFRSLQRCVLNASVMFHVPCHFLESTVALLLSVESDGRMLILGGPTGEGCVPFMRYSVGFLISVAFLQGVEFQGPMLIFGRTHVLESTMGLLLSVESDGQMLVLGGPTGEGRVTFMRYSVAFLQSVGFQGPMLIFGRTRGFHVDFLEDPWSVVRVTFRSLQCCVLNASVMFHNPCHFLESTVGLLLSVESDGRMLVLGGPTGERRSHVDFWQDPQSEARVTFRSLQCCVLNTSVMFHVPCHFLESTVALLLSVESDLRMLILGGPTANAGFPKRHGQFELALGMPPLCPSQTPWSIDGDVAGHEVAYQLVTRNTQAARRHVEITALTVPTFWGSGHCPEPLVILRKGSTVAC

SEQ ID NO: 182219 - protein, 303 aa, Zea Mays
MPQGKSKKNVVKEKAKKIKKNAESRAKVHENTDQIEINIREGVSIWITKAAVQKCFEFPPGTDKKLPIDPTTKTFDSLYRVLSVSEKKINVKKKKMKENMKEKQVEEEKIEMNMEEKKQNLVEDEGSQQEESEEEDGEDGEIGEEEGEDGAIGDAKVGGDGDKESAKRGGIKVAVRRNVLTPLNINLMLQNINNDEILKLLVKRNEDTDGTEPNLDIDLIVRCFFAVSSVAEFGKDKKKLISGCTTVLMVVFLDHLVENPLDPLTIPRINLYTSDFIADLIMVPKDSPGPEKKRRKTQDEKED

SEQ ID NO: 182220 - protein, 490 aa, Zea Mays
MPPLCPSQTPWSIDGDVAGHEVAYQLVTRNTQAARRHVEITALTVPTFWGSGHCPEPLVILRKGSTVACYGYPRSHSSSMKRATNWPGKIWRRGDRMDGRQERAKKSWRLGEKMVALGAMGTEVRMVAAVENEATATSRLIVVVRGHGAEHLPEKSRLIRLKKGTASPILMSKVTWCRSAGVKKKANMPQGKSKKNVVKEKAKKIKKNAESRAKVHENTDQIEINIREGVSIWITKAAVQKCFEFPPGTDKKLPIDPTTKTFDSLYRVLSVSEKKINVKKKKMKENMKEKQVEEEKIEMNMEEKKQNLVEDEGSQQEESEEEDGEDGEIGEEEGEDGAIGDAKVGGDGDKESAKRGGIKVAVRRNVLTPLNINLMLQNINNDEILKLLVKRNEDTDGTEPNLDIDLIVRCFFAVSSVAEFGKDKKKLISGCTTVLMVVFLDHLVENPLDPLTIPRINLYTSDFIADLIMVPKDSPGPEKKRRKTQDEKED

SEQ ID NO: 182221 - protein, 394 aa, Zea Mays
MFHVPCHFLESTVVLLLSVESDVDFGRTHGRRACHFHEDPRAEPRVTFMRYSVGFLIRVAFGYIELCSSNLCWVSGFHVDFWEDPRSEARVTFRSLQRCVLNASVMFHVPCHFLESTVALLLSVESDGRMLILGGPTGEGCVPFMRYSVGFLISVAFLQGVEFQGPMLIFGRTHVLESTMGLLLSVESDGQMLVLGGPTGEGRVTFMRYSVAFLQSVGFQGPMLIFGRTRGFHVDFLEDPWSVVRVTFRSLQCCVLNASVMFHNPCHFLESTVGLLLSVESDGRMLVLGGPTGERRSHVDFWQDPQSEARVTFRSLQCCVLNTSVMFHVPCHFLESTVALLLSVESDLRMLILGGPTGEGRVTFMRYSVGLLLSVVFGTMLLRSFKVLSFRVPC

SEQ ID NO: 182222 - protein, 331 aa, Zea Mays
MKKKTSNVIKNLATLNFKNSEDTCYHEDSEMVPSPGRASPVVASVQSHKNFVDHADLEIVPSHENSVDLHSVYMAHVLERSRQSIVVDILDYNIPESTFADCLLPTGHMHTDVFYLQCQLLSKDWKDKVILSWKATQELIHQDIGVKELDKELTAEIFIPIIHAGHWSLVILSTAKQETYILDSYPRHSGVAKDVLTQLQKYLDNKHNFDMSNYTDHVPPVQHQKNNYDCGFHVLLYIEEFMKEKMYKINKKMVLKFRKQLCMNLLYHPLNRINLVEFRKKLGITLKRKLPGILDLTIEGERSESEAAVIIEIENRDDKTLEDEHISVEKE

SEQ ID NO: 182223 - protein, 346 aa, Zea Mays
MRYSVGFLIRVAFGYIELCSSNLCWVSGFHVDFWEDPRSEARVTFRSLQRCVLNASVMFHVPCHFLESTVALLLSVESDGRMLILGGPTGEGCVPFMRYSVGFLISVAFLQGVEFQGPMLIFGRTHVLESTMGLLLSVESDGQMLVLGGPTGEGRVTFMRYSVAFLQSVGFQGPMLIFGRTRGFHVDFLEDPWSVVRVTFRSLQCCVLNASVMFHNPCHFLESTVGLLLSVESDGRMLVLGGPTGERRSHVDFWQDPQSEARVTFRSLQCCVLNTSVMFHVPCHFLESTVALLLSVESDLRMLILGGPTGEGRVTFMRYSVGLLLSVVFGTMLLRSFKVLSFRVPC

SEQ ID NO: 182224 - protein, 670 aa, Zea Mays
MDTPTRVLPPAGQIRSINVTPGRLTDGLLPLPMMNMGPDLSRVWSWFVVPCRLDACRHTTAKQLFEEMPSLSSLLSGSNTASAELPLIPCKLCNGVVIERVSKQPETTSRKFYRCRAKKTDGFVSGDRRLELLMIALNDHGKAVESLTNSIREMKKKLSNLELVMEELDNVKNLMKAAMVEIEENKKSTAAALKLMENELQKLKGSTKVKPRNMAQCFLLLALIGCVMFHVPCHFLESTVVLLLSVESDVDFGRTHGRRACHFHEDPRAEPRVTFMRYSVGFLIRVAFGYIELCSSNLCWVSGFHVDFWEDPRSEARVTFRSLQRCVLNASVMFHVPCHFLESTVALLLSVESDGRMLILGGPTGEGCVPFMRYSVGFLISVAFLQGVEFQGPMLIFGRTHVLESTMGLLLSVESDGQMLVLGGPTGEGRVTFMRYSVAFLQSVGFQGPMLIFGRTRGFHVDFLEDPWSVVRVTFRSLQCCVLNASVMFHNPCHFLESTVGLLLSVESDGRMLVLGGPTGERRSHVDFWQDPQSEARVTFRSLQCCVLNTSVMFHVPCHFLESTVALLLSVESDLRMLILGGPTANAGFPKRHGQFELALGMPPLCPSQTPWSIDGDVAGHEVAYQLVTRNTQAARRHVEITALTVPTFWGSGHCPEPLVILRKGSTVAC

SEQ ID NO: 182225 - protein, 685 aa, Zea Mays
MGLLLSVESDGQMLVLGGPTGEGRVTFMRYSVAFLQSVGFQGPMLIFGRTRGFHVDFLEDPWSVVRVTFRSLQCCVLNASVMFHNPCHFLESTVGLLLSVESDGRMLVLGGPTGERRSHVDFWQDPQSEARVTFRSLQCCVLNTSVMFHVPCHFLESTVALLLSVESDLRMLILGGPTANAGFPKRHGQFELALGMPPLCPSQTPWSIDGDVAGHEVAYQLVTRNTQAARRHVEITALTVPTFWGSGHCPEPLVILRKGSTVACYGYPRSHSSSMKRATNWPGKIWRRGDRMDGRQERAKKSWRLGEKMVALGAMGTEVRMVAAVENEATATSRLIVVVRGHGAEHLPEKSRLIRLKKGTASPILMSKVTWCRSAGVKKKANMPQGKSKKNVVKEKAKKIKKNAESRAKVHENTDQIEINIREGVSIWITKAAVQKCFEFPPGTDKKLPIDPTTKTFDSLYRVLSVSEKKINVKKKKMKENMKEKQVEEEKIEMNMEEKKQNLVEDEGSQQEESEEEDGEDGEIGEEEGEDGAIGDAKVGGDGDKESAKRGGIKVAVRRNVLTPLNINLMLQNINNDEILKLLVKRNEDTDGTEPNLDIDLIVRCFFAVSSVAEFGKDKKKLISGCTTVLMVVFLDHLVENPLDPLTIPRINLYTSDFIADLIMVPKDSPGPEKKRRKTQDEKED

SEQ ID NO: 182226 - protein, 326 aa, Zea Mays
MIALNDHGKAVESLTNSIREMKKKLSNLELVMEELDNVKNLMKAAMVEIEENKKSTAAALKLMENELQKLKGSTKVKPRNMAQCFLLLALIGCVMFHVPCHFLESTVVLLLSVESDVDFGRTHGRRACHFHEDPRAEPRVTFMRYSVGFLIRVAFGYIELCSSNLCWVSGFHVDFWEDPRSEARVTFRSLQRCVLNASVMFHVPCHFLESTVALLLSVESDGRMLILGGPTGEGCVPFMRYSVGFLISVAFLQGVEFQGPMLIFGRTHVLESTMGLLLSVESDGQMLVLGGPTGEGRVTFMRYSVAFLQSVGFQGPMLIFGRTRGP

SEQ ID NO: 182227 - protein, 544 aa, Zea Mays
MVVFLDHLVENPLDPLTIPRINLYTSDFIADLIMVPKDSPGPEKKRRKFKNSEDTCYHEDSEMVPSPGRASPVVASVQSHKNFVDHADLEIVPSHENSVDLHSVYMAHVLERSRQSIVVDILDYNIPESTFADCLLPTGHMHTDVFYLQCQLLSKDWKDKVILSWKATQELIHQDIGVKELDKELTAEVMNKVDLIFIPIIHAGHWSLVILSTAKQETYILDSYPRHSGVAKDVLTQLQKYLDNKHNFDMSNYTDHVPPVQHQKNNYDCGFHVLLYIEEFMKEKMYKINKKMVLKFRKQLCMNLLYHPLNRINLVEFRKKLGITLKRKLPGILDLTIEGERSESEAAVIIEIENRDDKTLEDEHISVEKEKLRKHKFTSDKINDEICKHILNYNERELLSVGQTTMTGGQLEKYVNEGDNGDKILRAFITCFTCDEKFNQGNITTVIPPHEVSEEGELSKVDAAQLVEEIKAVLKGTNVARVRKDTESTKDPKVKVFRNMRRTFIFFPFYKNEELFVFHVDTKRLPIIDALFCKMSSLSFEDRS

SEQ ID NO: 182228 - protein, 772 aa, Zea Mays
MLPETSFQMLKQVDPLLTSMALQSQMEHNDTEQCDNDQSLRSSHRCVNIEKPVFVFPTDVVNESETGNLQKDPPAPTSVFHQPCMPQSRSYVPPQEDTIDAVGLGTRSSERIPIVEGNMSVGSVLASDGCDAPLQGSITEPFSQQDKHDHTATVEPKSCKQKSPSLSHCADGDGANDGGSSNQSSKVSIHEGLSSHATVTSGFDRISDVLPTDASGPEHLPECITAQDTNMISQLDSRKAHLSALQQDRGEKVTQDLEDISANIGLVEKDHVHGDLTLQSASVLLSISCNGANQGSKSETNLQPGIVATEDRMALEEQNADKSHLEFSDTNMANQALHDDCSVMKNNAVHGGLTAQTAAVSQNCNVTLHDKTSEANCFSEPENEKNIQKNNCHTYVPGSSQDRGGESAKETSNELKSKDASPEIFVHFEDQYIIDTLEGLSQQDLCLKCGKGGQLLECSRCFLAVHSSCLGSSATFEGTNLFYCPICSYKKAIEACKKANKTYCEARKNLAALLSKTQVTKQVQPGDAHENEVNNLAHQVKEPNQQRRKQKINAIVLQNNNEIQVKDSEKRRQAVDEEGRKEASNDNSSHETGSSSQIRCDSPLNQDVEADQDGNLTASNQPGGSDESEATSSDDSGRPSSSWQSSRYWRCTRHNKKGLQDKEPAVSSKSKEDQQMPTSPAKRKSANPQKHYSNPVARARRRRKLWWTAEEEAMLKDGMAKFSPHNDGQISWTQILQYGRGVFNIARLPCDLRVKWRNMQMKERRAVSYTHI

SEQ ID NO: 182229 - protein, 803 aa, Zea Mays
MREVGSPGDLEKDLLPHFSQDIQEYLCTEKFMLPETSFQMLKQVDPLLTSMALQSQMEHNDTEQCDNDQSLRSSHRCVNIEKPVFVFPTDVVNESETGNLQKDPPAPTSVFHQPCMPQSRSYVPPQEDTIDAVGLGTRSSERIPIVEGNMSVGSVLASDGCDAPLQGSITEPFSQQDKHDHTATVEPKSCKQKSPSLSHCADGDGANDGGSSNQSSKVSIHEGLSSHATVTSGFDRISDVLPTDASGPEHLPECITAQDTNMISQLDSRKAHLSALQQDRGEKVTQDLEDISANIGLVEKDHVHGDLTLQSASVLLSISCNGANQGSKSETNLQPGIVATEDRMALEEQNADKSHLEFSDTNMANQALHDDCSVMKNNAVHGGLTAQTAAVSQNCNVTLHDKTSEANCFSEPENEKNIQKNNCHTYVPGSSQDRGGESAKETSNELKSKDASPEIFVHFEDQYIIDTLEGLSQQDLCLKCGKGGQLLECSRCFLAVHSSCLGSSATFEGTNLFYCPICSYKKAIEACKKANKTYCEARKNLAALLSKTQVTKQVQPGDAHENEVNNLAHQVKEPNQQRRKQKINAIVLQNNNEIQVKDSEKRRQAVDEEGRKEASNDNSSHETGSSSQIRCDSPLNQDVEADQDGNLTASNQPGGSDESEATSSDDSGRPSSSWQSSRYWRCTRHNKKGLQDKEPAVSSKSKEDQQMPTSPAKRKSANPQKHYSNPVARARRRRKLWWTAEEEAMLKDGMAKFSPHNDGQISWTQILQYGRGVFNIARLPCDLRVKWRNMQMKERRAVSYTHI

SEQ ID NO: 182230 - protein, 882 aa, Zea Mays
MPPGSASAAAIATRFATHWIADALAGDEYIDFSVLKVLVGASSKPLAGAPEFTRERVALRCIQEVSSVIAAGGDAADTAGVLRVDGAQSCQNVLFQLMREVGSPGDLEKDLLPHFSQDIQEYLCTEKFMLPETSFQMHNDTEQCDNDQSLRSSHRCVNIEKPVFVFPTDVVNESETGNLQKDPPAPTSVFHQPCMPQSRSYVPPQEDTIDAVGLGTRSSERIPIVEGNMSVGSVLASDGCDAPLQGSITEPFSQQDKHDHTATVEPKSCKQKSPSLSHCADGDGANDGGSSNQSSKVSIHEGLSSHATVTSGFDRISDVLPTDASGPEHLPECITAQDTNMISQLDSRKAHLSALQQDRGEKVTQDLEDISANIGLVEKDHVHGDLTLQSASVLLSISCNGANQGSKSETNLQPGIVATEDRMALEEQNADKSHLEFSDTNMANQALHDDCSVMKNNAVHGGLTAQTAAVSQNCNVTLHDKTSEANCFSEPENEKNIQKNNCHTYVPGSSQDRGGESAKETSNELKSKDASPEIFVHFEDQYIIDTLEGLSQQDLCLKCGKGGQLLECSRCFLAVHSSCLGSSATFEGTNLFYCPICSYKKAIEACKKANKTYCEARKNLAALLSKTQVTKQVQPGDAHENEVNNLAHQVKEPNQQRRKQKINAIVLQNNNEIQVKDSEKRRQAVDEEGRKEASNDNSSHETGSSSQIRCDSPLNQDVEADQDGNLTASNQPGGSDESEATSSDDSGRPSSSWQSSRYWRCTRHNKKGLQDKEPAVSSKSKEDQQMPTSPAKRKSANPQKHYSNPVARARRRRKLWWTAEEEAMLKDGMAKFSPHNDGQISWTQILQYGRGVFNIARLPCDLRVKWRNMQMKERRAVSYTHI

SEQ ID NO: 182231 - protein, 684 aa, Zea Mays
MPPGSASAAAIATRFATHWIADALAGDEYIDFSVLKVLVGASSKPLAGAPEFTRERVALRCIQEVSSVIAAGGDAADTAGVLRVDGAQSCQNVLFQLMREVGSPGDLEKDLLPHFSQDIQEYLCTEKFMLPETSFQMLKQVDPLLTSMALQSQMEHNDTEQCDNDQSLRSSHRCVNIEKPVFVFPTDVVNESETGNLQKDPPAPTSVFHQPCMPQSRSYVPPQEDTIDAVGLGTRSSERIPIVEGNMSVGSVLASDGCDAPLQGSITEPFSQQDKHDHTATVEPKSCKQKSPSLSHCADGDGANDGGSSNQSSKVSIHEGLSSHATVTSGFDRISDVLPTDASGPEHLPECITAQDTNMISQLDSRKAHLSALQQDRGEKVTQDLEDISANIGLVEKDHVHGDLTLQSASVLLSISCNGANQGSKSETNLQPGIVATEDRMALEEQNADKSHLEFSDTNMANQALHDDCSVMKNNAVHGGLTAQTAAVSQNCNVTLHDKTSEANCFSEPENEKNIQKNNCHTYVPGSSQDRGGESAKETSNELKSKDASPEIFVHFEDQYIIDTLEGLSQQDLCLKCGKGGQLLECSRCFLAVHSSCLGSSATFEGTNLFYCPICSYKKAIEACKKANKTYCEARKNLAALLSKTQVTKQVQPGDAHENEVNNLAHQVKEPNQQRRKQKINAIE

SEQ ID NO: 182232 - protein, 66 aa, Zea Mays
MYQEIYTTRNFFPVAWKFWRIGGFAFHLSVKTSRKIYVQRNLHYQKLLSSWHPRIPCVQHLIQPSR

SEQ ID NO: 182233 - protein, 104 aa, Zea Mays
MEYCQQQWVGSSGELEKDLLPPLSQDIQEYICTKKFTLPETSFQLLGSFGELEDLLSTFQSRHPGKYMYKEIYTTRNFFPVGTPESPASSTSSNHPGNGYFFSL

SEQ ID NO: 182234 - protein, 77 aa, Zea Mays
MPPPSASASRLATHWIADALADDESLDFSVLKGWKLRRIGEGFASTFKSRHPGIYMYQEIYTTRNFFPVGPQCIRVA

SEQ ID NO: 182235 - protein, 106 aa, Zea Mays
MPPPSASASRLATHWIADALADDESLDFSVLKGWKLRRIGEGFASTFKSRHPGIYMYQEIYTTRNFFPVAWKFWRIGGFAFHLSVKTSRKIYVQRNLHYQKLLSSW

SEQ ID NO: 182236 - protein, 177 aa, Zea Mays
MPPPSASASRLATHWIADALADDESLDFSVLKALLGDSSKSLAGAPEATRERVALRCIQEVSSVIASGGDAAAPAGVPRVDGAWSCEDVLFRLIRDVGSSGELEKDLLPPLSQDIQEYICTKKFTLPETSFQLLGSFGELEDLLSTFQSRHPGKYMYKEIYTTRNFFPVGPQCIRVA

SEQ ID NO: 182237 - protein, 120 aa, Zea Mays
MPPPSASASRLATHWIADALADDESLDFSVLKGWKLRRIGEGFASTFKSRHPGIYMYQEIYTTRNFFPVAWKFWRIGGFAFHLSVKTSRKIYVQRNLHYQKLLSSWASVYQGCMRFSVAG

SEQ ID NO: 182238 - protein, 237 aa, Zea Mays
MPPPSASASRLATHWIADALADDESLDFSVLKALLGDSSKSLAGAPEATRERVALRCIQEVSSVIASGGDAAAPAGVPRVDGAWSCEDVLFRLIRDVGSSGELEKDLLPPLSQDIQEYICTKKFTLPETSFQLLGSFGELEDLLSTFQSRHPGKYMYKEIYTTRNFFPVEFQRRLSPAPCSPVSPRRLSPASRSSAPSRCIVAGARSQLPTGLQAPPNPLRPAPHPTIPVMVISFLS

SEQ ID NO: 182239 - protein, 90 aa, Zea Mays
MFWNWKHFIHGILPAAVGWKLRRIGEGFASTFKSRHPGIYMYQEIYTTRNFFPVAWKFWRIGGFAFHLSVKTSRKIYVQRNLHYQKLLSS

SEQ ID NO: 182240 - protein, 1086 aa, Zea Mays
MAPRVFDHLFARIQKEKELRIDETLRFTCKCSFLEIYNEQILDLLNPNSVNLQIREDSRKGVHVESLTEHEISNAREALQQLIEGAANRKVAATNMNHASSRSHSVFTCLIKSKWESKGINYHRFSRLNLVDLAGSERQKSSGAKGERLKEATNINKSLSTLGLVITNLIAVSNKKSQHVPYRDSKLTFLLQDSLGGNSKTTIIANISPSSCCAAETLSTLKFAQRAKYIRNNAIINEDASGDVLSMRLLQIQKLKLLRLATYTILPVPRVQRKDCDAALVAAFKREQEKEAAQLKAMIDANQIAEQLEAQKTEEVRSFKMRLKFCEERIKILEQVASGKLSVEAHLLQEKENLVKELEVLQCQLDRNPEITKFAMENLQLKEDLRRLQSFVDEDEREMMHEQIIVLQDRLLEALDWKLMHEKGPVTKALSLFEEPPSDEEKEFLRLQFIILSLQAIQNEREIELLRKKLTFCLEAKENLERHVNELTTELELTKKHDNTDKESKPAQLQDQGEADLHNLSDAQMEFKTLVDAIASASQREAEAHETVIGLAKDNEELRMQLKVLIEDNKRLIELYQHAFVNVEANQDGNPVNEDLLNAQPAATSDLHAHNSSNVEEEPKIVDEKCTNEDNFSRVTSVELCLQLEEMDEENEGLMGLHEKTMQERDVFKRKILEQSDSEAVKDILLGEKDAEMSEAAENPEVKHVHDSIIVALKDVLQIVRSKLELVQDKVVSTQDAVKYFKLLEMASGKATELYSRIELQYLGAQRLQEDITVLKSVLSESQEKIIAFEGKYFLPAASCWNMVLKTKSPAESRLDASFESMNQKKERFNHLQTRKNELSAARRRARESETELRSKIDGLKVKLGAYGAQRKEEEKVLFAIDNLDTSTAPMHKPKNYGKATAPLKSDEDWMKLRCELQKAREQFFMVQKEIKNINKCDYIDCEIAVLEAEIEDSWFSMLESDIERFVLDSTFTEIWEGRAKDMEASLVEYQDCVFQVSLKEEEIKMCNESLQYQARDRESDELQSKLNQAMRELGELLQDRRCLTDCSLDEPMLPVVEKVATDLEAVRIYVDEAKQLLLVDNQANQ

SEQ ID NO: 182241 - protein, 1168 aa, Zea Mays
MMHLDGVDDELGDGDCAPSTARFELQEDPSFWKDNNVQVVIRIRPLSGSEISLQGQKRCVRQDSSKGQCLAWTGNPESRFTFDLVADEHVSQEDMFKVAGVPMVENCIAGYNSCMFAYGQEKELRIDETLRFTCKCSFLEIYNEQILDLLNPNSVNLQIREDSRKGVHVESLTEHEISNAREALQQLIEGAANRKVAATNMNHASSRSHSVFTCLIKSKWESKGINYHRFSRLNLVDLAGSERQKSSGAKGERLKEATNINKSLSTLGLVITNLIAVSNKKSQHVPYRDSKLTFLLQDSLGGNSKTTIIANISPSSCCAAETLSTLKFAQRAKYIRNNAIINEDASGDVLSMRLLQIQKLKRKDCDAALVAAFKREQEKEAAQLKAMIDANQIAEQLEAQKTEEVRSFKMRLKFCEERIKILEQVASGKLSVEAHLLQEKENLVKELEVLQCQLDRNPEITKFAMENLQLKEDLRRLQSFVDEDEREMMHEQIIVLQDRLLEALDWKLMHEKGPVTKALSLFEEPPSDEEKEFLRLQAIQNEREIELLRKKLTFCLEAKENLERHVNELTTELELTKKHDNTDKESKPAQLQDQGEADLHNLSDAQMEFKTLVDAIASASQREAEAHETVIGLAKDNEELRMQLKVLIEDNKRLIELYQHAFVNVEANQDGNPVNEDLLNAQPAATSDLHAHNSSNVEEEPKIVDEKCTNEDNFSRVTSVELCLQLEEMDEENEGLMGLHEKTMQERDVFKRKILEQSDSEAVKDILLGEKDAEMSEAAENPEVKHVHDSIIVALKDVLQIVRSKLELVQDKVVSTQDAVKYFKLLEMASGKATELYSRIELQYLGAQRLQEDITVLKSVLSESQEKIIAFEGKYFLPAASCWNMVLKTKSPAESRLDASFESMNQKKERFNHLQTRKNELSAARRRARESETELRSKIDGLKVKLGAYGAQRKEEEKVLFAIDNLDTSTAPMHKPKNYGKATAPLKSDEDWMKLRCELQKAREQFFMVQKEIKNINKCDYIDCEIAVLEAEIEDSWFSMLESDIERFVLDSTFTEIWEGRAKDMEASLVEYQDCVFQVSLKEEEIKMCNESLQYQARDRESDELQSKLNQAMRELGELLQDRRCLTDCSLDEPMLPVVEKVATDLEAVRIYVDEAKQLLLVDNQANQ

SEQ ID NO: 182242 - protein, 460 aa, Zea Mays
MDYVVARMQLQQAAVPPPVHSIADHRPPPVSQRTRGSATMQRQRREALEQEVAELKQQLSNEQTVHQILERALQPSSSMALANIPAFIPTKAKELLAELLLVEEEIARLEDQIKRMKKSAATQQQQQQQTEHCKSMFFISQAMDGEAYLSTVVNNKRHSLASSSDGHAVLEKKIAQHELPITKKSPTVIAKRRARDQQQPPNKLSERILKCLVCIFMRLLRSSRASESAAGNLGGFRMDMGLVNVAAAAAAKEKERGQQDHYGIFGIQDSMVRDIGPYKNLVRFTTSAGSGSGSGSGSLDLHLLSRGFSASPLVSKLREMLEALQQVDVRSLNHHQRLAFWLNIYNTCIMHGILQHGLPSNSDKLLALKNKATINVSGQTFNALVIENFILRQPSSVKQELWQCDVDVEEEQAVREVYGLKTSEPNILFALCCGIRSSPAIVFLWIWTRQSLSTCRHRWW

SEQ ID NO: 182243 - protein, 81 aa, Zea Mays
MPERERERERERERERERERERERERDLNHLWVDYLSIISNEYAYLIIARTDPMHVVGCTDGKKMHNKYIFFLGRRLGVYE

SEQ ID NO: 182244 - protein, 368 aa, Zea Mays
MWIMKIFNVTLSDGTVSEGTLRVSEAAIQISRCRVSEYLSLHTCYDLLPDSGKVIALDINLPVKQSFHILHEQGIPVAPLWDSFRGQFVGLLSPLDFILILRELETHGSNLTEEQLETHTISAWKEAKRQTNGRNDGQWRPQQHLVHATPYESLRDIAVKLLQNGISTVPVIYSSSSDGSFPQLLHLASLSGILKCICRYFKNSTGNLPILNQPVCSIPLGSWVPKIGDLNSRPLAMLRPNASLSSALNMLVQAGVSSIPIVDDNDSLLDTYSRSDITALAKDKVYTHVRLDEMTIHQALQLGQDANTPFGFFNGQRCQMCLRSDPLLKVMERLANPGVRRVFIVEAGSKRVEGIISLSDIFKFLLSL

SEQ ID NO: 182245 - protein, 237 aa, Zea Mays
MFSHGADSAHDAGAVGVSSGGATVPTRFVWPYGGKRVFVSGSFTRWSEHLPMSPIEGCPTVFQAICSLSPGIHEYKFFVDGEWRHDERQPTISGEFGIVNTLYLTREYNQINTLSSPSTPGSRMNMDVDNENFQRTVTLSDGTVSEGTLRVSEAAIQISRCRVSEYLSLHTCYDLLPDSGKVIALDINLPVKQSFHILHEQGIPVAPLWDSFRGQFVGLLSPLDFILILREKLMART

SEQ ID NO: 182246 - protein, 290 aa, Zea Mays
MFSHGADSAHDAGAVGVSSGGATVPTRFVWPYGGKRVFVSGSFTRWSEHLPMSPIEGCPTVFQAICSLSPGIHEYKFFVDGEWRHDERQPTISGEFGIVNTLYLTREYNQINTLSSPSTPGSRMNMDVDNENFQRTVTLSDGTVSEGTLRVSEAAIQISRCRVSEYLSLHTCYDLLPDSGKVIALDINLPVKQSFHILHEQGIPVAPLWDSFRGQFVGLLSPLDFILILRELETHGSNLTEEQLETHTISAWKEAKRQTNGRNDGQWRPQQHLVHVFVDTSKTQLVICLF

SEQ ID NO: 182247 - protein, 143 aa, Zea Mays
MSDDSGDQSGNSTRLFSAIRSFWNQLSAKLKKARRGLPVKILFFLIGFYCATAFATVIGQTGDWDILSAGLAVAIVEVIGALMYRASFAFLGRIGNMITVFNYWKAGLTLGLFLDSFKYEVDEFLESCNPFNFQINIFTGFCW

SEQ ID NO: 182248 - protein, 77 aa, Zea Mays
MCLSADLRNQTCLLAITCCLLSLQAMPVGEIRFIESLTHQPASKLLQMGPTTTNNSDPHWPTYKATTELFERDSTGC

SEQ ID NO: 182249 - protein, 334 aa, Zea Mays
MEVAGRGIGLWKPPARGRGGGGRRRWGLEEAAVGGGMEEAAVGLENEDRGSILCFCKCLCVNPICSSLAAATGVHRKAGRRNTHAKTRGRSDTQDQEKTRGPLRFAAPHPHLPLLLEPSAVAFDMGDPPALKRPKLEKGDNDSTYCPRSASNGAGANGPPPRDDVEEDDISEEAVIALIAHRERDVERCKLKLLHYQSLLDAAEMKLEEAHSRLARFRDRKPPPTRSEPKLPTPPIQREPKPSPPPIRRDLKPSPQPPEKKAPSPAPQPSASPQLVIPGTNNRPAPRPQPMPGLKKAAAPSSSSSRAPLERSRKEEKPPKRKIGTFYRFPPPSE

SEQ ID NO: 182250 - protein, 669 aa, Zea Mays
MEVAGRGIGLWKPPARGRGGGGRRRWGLEEAAVGGGMEEAAVGLENEDRGSILCFCKCLCVNPICSSLAAATGVHRKAGRRNTHAKTRGRSDTQDQEKTRGPLRFAAPHPHLPLLLEPSAVAFDMGDPPALKRPKLEKGDNDSTYCPRSASNGAGANGPPPRDDVEEDDISEEAVIALIAHRERDVERCKLKLLHYQSLLDAAEMKLEEAHSRLARFRDRKPPPTRSEPKLPTPPIQREPKPSPPPIRRDLKPSPQPPEKKAPSPAPQPSASPQLVIPGTNNRPAPRPQPMPGLKKAAAPSSSSSRAPLERSRKEEKPPKRKIEQKEHRNLIPSVRKSSATVLKFQGGNLVSSQHRRKLRCLELCPANDQLVVTSALDGLVTLWQVETRGPSLSFRGKTDFFSPKHRWPEDIAWHPAGETIFAVYTADNGDSQVSMTNLISGQRKVTFLPEKPHTKGIINNISFMPWSDACFVTGGSDHAVILWEDKDDSWKPKRVHKDFHSAAVMGVAGLQQKRTILSVGCDKRIIGFDLSAGRTEFKNLLDSKCMSVLANPCDFNLYMVQTGDPGRQLRLFDVRLRQTEVHAFGWKQESSESQSALINQSWSPDGWYVSSGSADPVIHIFDIRHHGQNPCQSVEAHQKRVFKAVWHQTLPYLTSISSDLNIGIHKYS

SEQ ID NO: 182251 - protein, 554 aa, Zea Mays
MEVAGRGIGLWKPPARGRGGGGRRRWGLEEAAVGGGMEEAAVGLENEDRGSILCFCKCLCVNPICSSLAAATGVHRKAGRRNTHAKTRGRSDTQDQEKTRGPLRFAAPHPHLPLLLEPSAVAFDMGDPPALKRPKLEKGDNDSTYCPRSASNGAGANGPPPRDDVEEDDISEEAVIALIAHRERDVERCKLKLLHYQSLLDAAEMKLEEAHSRLARFRDRKPPPTRSEPKLPTPPIQREPKPSPPPIRRDLKPSPQPPEKKAPSPAPQPSASPQLVIPGTNNRPAPRPQPMPGLKKAAAPSSSSSRAPLERSRKEEKPPKRKIEQKEHRNLIPSVRKSSATVLKFQGGNLVSSQHRRKLRCLELCPANDQLVVTSALDGLVTLWQVETRGFAIPLFSTCNESASQGRGEGGPLEASRCCSCCCTRSCPRRAGGAQAIVEDLPSIGDLKRMWVRVKKLCGGITSKAPVGIALVLGPVPLAVKLVHDDQLHLPQLQIEFCTAAAESDAFTQLVDKAPAEYVWLMAKLVQSLQVVQSSTSWSESKEDFTLSLSVWAW

SEQ ID NO: 182252 - protein, 353 aa, Zea Mays
MEVAGRGIGLWKPPARGRGGGGRRRWGLEEAAVGGGMEEAAVGLENEDRGSILCFCKCLCVNPICSSLAAATGVHRKAGRRNTHAKTRGRSDTQDQEKTRGPLRFAAPHPHLPLLLEPSAVAFDMGDPPALKRPKLEKGDNDSTYCPRSASNGAGANGPPPRDDVEEDDISEEAVIALIAHRERDVERCKLKLLHYQSLVRSRPLLASPFRLGVDDRVAILVGLPMVAAAGRRGDEAGRGTLAARQVPRSQAAANPVGAQATDAADPEGTQAIPAANPEGSQAIAAATREEGSIARAAAVGEPAACHPRDQQPTGPAPSAHAWLEESRCPVIVFITGAAGTVKERGEAAQEKD

SEQ ID NO: 182253 - protein, 57 aa, Zea Mays
MQWHLAAVTDRQHRSRLNALQPCTFVSCCHRVLSTLVLVEAYKSGELQETLEKAMCS

SEQ ID NO: 182254 - protein, 76 aa, Zea Mays
MAPERGSAVPKFGEWDEKDPSTGEGFTDIFNKVREEKQSGDAPVITSGNAGGGYSRSNQGRKYESSACSCFSWFRN

SEQ ID NO: 182255 - protein, 69 aa, Zea Mays
MKVKQADELENILAKKFLRFLSMRAEAFQVLRRKPVQVSNLTLITLSSVLCTKHELPVRHRDTSLWTAG

SEQ ID NO: 182256 - protein, 405 aa, Zea Mays
MGQETEVVQSVSDLPVQDPPGEEFSAADLAWVKYATSEHHRDDVALIPYDRMEAFIAGESNNPECPTRFHIERGRKRERGSLREYRSDEYLLYRMYWCSFGPENYGEGGTILPSRKYRLNTRNRAARPQSMRGCTCHFTIKRLYARPSLLLIIYHERRHVNKSGFICHGPLDRDAIGPGARKMPYIGSEIQQQTMSLIYLGVPEENILQTHIEGIQRYCSKDAKVDNLASQYVQKLGMIIKRSTHELDLDDQASIRMWVDRNRKSVFFYQDSTEADAFILGIQTQWQLQQMMRFGHQSLLASHSSFGVSKLKYPLHTLLAFDSRQHALPVAWVITRSVTKKDTLKWMSTLTDRIHSIDSTWGIGGFIIDDPASELGPISSLLPLFQGGVRLPSSVLHVAHQKNLA

SEQ ID NO: 182257 - protein, 101 aa, Zea Mays
MMHRQPEHVMMFLLAEMGTSGSLHGHLRLVIKARFAPKNFEAILRRHIIKLSNLIVSMPSFLFEPYNHVSIEMLQLTTSSRVQRMLCDSIAHDYSRGHQMN

SEQ ID NO: 182258 - protein, 718 aa, Zea Mays
MQPSPTTSQLILLPVSLGSALPQPREMVALHLHAKQPTPRLLPVPPSHARTRTPTAAAVNVSHAAPPPDVVLDCKRLDGLMKSGRLGDALDLFDRMPRKNVVAWTTAISGCTRNGRPEAAATMFADMLESGVAPNDFACNAALAACAAAGALGLGEQVHSLAVRAGFAADAWIGSCLIELYSRCGSLRAAEEVFRRMEAPDVVGYTSLVSALCRNGELARAVDVLCQMTRQGLQPNEHTMTSMLAECPRGIGEQIHGYMLKVMGSQSVYASTALIDFYSRYGDFGTAKTVFENLESKNVVSWCSMMQLCIRDGRLDDALRVFSEMISEGVQPNEFAFSIALSACGSVCLGRQIHCSAIKRDLMTDIRVSNALLSMYGRSGFVSELEAVLGKIENPDLVSWTAAISANFQNGFSEKAVALLLQMHSEGFTPNDYAFSSGLSSCADLALLHQGRQLHCLALKLGCDFKVCTGNALINMYSKCGRIGSARLAFDVMDTHDVMSWNSLIHGLAQHGDANLALETFSEMCSSDWRPDDSTFLSVLVGCNHAGLVKEGETFFRQMTDRYGLTPTPSHYACMIDMLGRNGRFAEALRMIENMPFEPDVLIWKTLLASCKLHRNLDIGKLAADKLMELSERDSASYVLMSNLYAMHEEWRDAERVRRRMDEIGVKKDAGWSWIEVKNEVEAARFVHQKFRFSSGTEGVTDSIYSCPGCGAGVIFVE

SEQ ID NO: 182259 - protein, 893 aa, Zea Mays
MPLDPDSSSPPPPHRDWFFPPAPPFLASSRSRTPSAPFPSTYRSSKPYSAYPLADRRPPPTPRSRSRSPHPPPEQQQKTPTPPTPTSAPRRRDPRYAGVRREDARTAASEQAAAPMAAPVHGRKPAASAIAPRWSGVLSVAVILLCLASLLRRNFSLHDQVYLLQEQLAVATAKLQSCTVDSSLNTSIINLFYQDAANSTTQSRSLKNLSLLISLSVLYAPLLILKYVDLVSKIRRSRDSEQVPINKRFAYRVDIFLSLHPYAKPLVLLVATLLLIALGGLALYGVTDDSLSDCLWLSWTFVADSGNHANAVGLGPKLVSVSISIGGMLVFAMMLGLVTDSISEKFDSLRKGRSEVIEQSHTLILGWSDKLGSLLNQIAIANESLRGGTIVVMAERDKEEMEADIAKMEFDMKGTAVICRSGSPLILADLKKVSVSKARAIVVLAEEGNADQSDARALRTVLSLTGVKEGLSGHIVVELSDLDNEVLVKLVGGDLVETVVAHDVIGRLMIQCARQPGLAQIWEDILGFENCEFYIKRWPKLDGMRFEDVLISFPEAVPCGIKVASYGGKIILNPDDCYVLQEGDEVIVIAEDDDTYAPAPLPKVRRGYLPKDFVVPKSPERILFCGWRRDIEDMIMVLDAFLAPGSELWMFNDVPEVDRERKLIDGGLDFSRLDNITLVHREGNAVIRRHLESLPLESFDSILILADESVEDSAIQADSRSLATLLLIRDIQAKRLPCKESLISHVPRGTFSEGSWIGEMQQASDKSVIISEILDPRTKNLLSVSKISDYVLSNELVSMALAMVAEDRQINNVLEELFAEQGNEMQIRPSDMYLREEEELNFFEVILRARQRKEIVIGYRLEAAERAIINPIDKVSRRRWSPKDVFVVISEKE

SEQ ID NO: 182260 - protein, 755 aa, Zea Mays
MHTSMDIIPTDSSWGFHDKNVGVTPKSYLLLGPKNSMQPSPTTSQLILLPVSLGSALPQPREMVALHLHAKQPTPRLLPVPPSHARTRTPTAAAVNVSHAAPPPDVVLDCKRLDGLMKSGRLGDALDLFDRMPRKNVVAWTTAISGCTRNGRPEAAATMFADMLESGVAPNDFACNAALAACAAAGALGLGEQVHSLAVRAGFAADAWIGSCLIELYSRCGSLRAAEEVFRRMEAPDVVGYTSLVSALCRNGELARAVDVLCQMTRQGLQPNEHTMTSMLAECPRGIGEQIHGYMLKVMGSQSVYASTALIDFYSRYGDFGTAKTVFENLESKNVVSWCSMMQLCIRDGRLDDALRVFSEMISEGVQPNEFAFSIALSACGSVCLGRQIHCSAIKRDLMTDIRVSNALLSMYGRSGFVSELEAVLGKIENPDLVSWTAAISANFQNGFSEKAVALLLQMHSEGFTPNDYAFSSGLSSCADLALLHQGRQLHCLALKLGCDFKVCTGNALINMYSKCGRIGSARLAFDVMDTHDVMSWNSLIHGLAQHGDANLALETFSEMCSSDWRPDDSTFLSVLVGCNHAGLVKEGETFFRQMTDRYGLTPTPSHYACMIDMLGRNGRFAEALRMIENMPFEPDVLIWKTLLASCKLHRNLDIGKLAADKLMELSERDSASYVLMSNLYAMHEEWRDAERVRRRMDEIGVKKDAGWSWIEVKNEVNTFVAGDMSHPDSTSIYQMLAELLVVMQDTDLDVHMQI

SEQ ID NO: 182261 - protein, 381 aa, Zea Mays
MPLDPDSSSPPPPHRDWFFPPAPPFLASSRSRTPSAPFPSTYRSSKPYSAYPLADRRPPPTPRSRSRSPHPPPEQQQKTPTPPTPTSAPRRRDPRYAGVRREDARTAASEQAAAPMAAPVHGRKPAASAIAPRWSGVLSVAVILLCLASLLRRNFSLHDQVYLLQEQLAVATAKLQSCTVDSSLNTSIINLFYQDAANSTTQSRSLKNLSLLISLSVLYAPLLILKYVDLVSKIRRSRDSEQVPINKRFAYRVDIFLSLHPYAKPLVLLVATLLLIALGGLALYGVTDDSLSDCLWLSWTFVADSGNHANAVGLGPKLVSVSISIGGMLVFAMMLGLVTDSISEKFDSLRKGRSEVIEQSHTLILGWSDKLLERWDHCSDG

SEQ ID NO: 182262 - protein, 586 aa, Zea Mays
MPLDPDSSSPPPPHRDWFFPPAPPFLASSRSRTPSAPFPSTYRSSKPYSAYPLADRRPPPTPRSRSRSPHPPPEQQQKTPTPPTPTSAPRRRDPRYAGVRREDARTAASEQAAAPMAAPVHGRKPAASAIAPRWSGVLSVAVILLCLASLLRRNFSLHDQVYLLQEQLAVATAKLQSCTVDSSLNTSIINLFYQDAANSTTQSRSLKNLSLLISLSVLYAPLLILKYVDLVSKIRRSRDSEQVPINKRFAYRVDIFLSLHPYAKPLVLLVATLLLIALGGLALYGVTDDSLSDCLWLSWTFVADSGNHANAVGLGPKLVSVSISIGGMLVFAMMLGLVTDSISEKFDSLRKGRSEVIEQSHTLILGWSDKLGSLLNQIAIANESLRGGTIVVMAERDKEEMEADIAKMEFDMKGTAVICRSGSPLILADLKKVSVSKARAIVVLAEEGNADQIWEDILGFENCEFYIKRWPKLDGMRFEDVLISFPEAVPCGIKVASYGGKIILNPDDCYVLQEGDEVIVIAEDDDTYAPAPLPKVKEAVYIDIVHPERKPQKILLCGWRRDIDDMIAVSSYFEAPNFFSLLNCAG

SEQ ID NO: 182263 - protein, 198 aa, Zea Mays
MEVQFILSTGKPFCDEYFRRPQISKEADVMNQILKSNCTVRMRSYIETGCRVHCQNISNINQLSSCENGLKDHIKKVKTLLEELECLVENVYGITLTASLSALEVSDSQCLDSMLSTDRCSVEQEDRSADRLDRDVSFATVMVMVRNALKADYTMQEKIVCALSLKTPSSELEGYCLMWNLRPYIDDDVMRLAWKMCP

SEQ ID NO: 182264 - protein, 157 aa, Zea Mays
MEVQFILSTGKPFCDEYFRRPQISKEADVMNQILKSNCTVRMRSYIETGCRVHCQNISNINQLSSCENGLKDHIKKVKTLLEELECLVENVYGITLTASLSALEVSDSQCLDSMLSTDRCSVEEDRSADRLDRDVSFATVMVMVRNALKADYTMQVN

SEQ ID NO: 182265 - protein, 268 aa, Zea Mays
MCAAQLLCPAADTSAALLCSTSSEGEIPAMLVVQLPPPEVAGEDESNSRGVFVEFMTKVAQFNELVESGERLLGRFREELEYFRRPQISKEADVMNQILKSNCTVRMRSYIETGCRVHCQNISNINQLSSCENGLKDHIKKVKTLLEELECLVENVYGITLTASLSALEVSDSQCLDSMLSTDRCSVEGVCTQQEDRSADRLDRDVSFATVMVMVRNALKADYTMQEKIVCALSLKTPSSELEGYCLMWNLRPYIDDDVMRLAWKMCP

SEQ ID NO: 182266 - protein, 159 aa, Zea Mays
MLVVQLPPPEVAGEDESNSRGVFVEFMTKVAQFNELVESGERLLGRFREELEYFRRPQISKEADVMNQILKSNCTVRMRSYIETGCRVHCQNISNINQLSSCENGLKDHIKKVKTLLEELECLVENVYGITLTASLSALEVSDSQCLDSMLSTDRCSVE

SEQ ID NO: 182267 - protein, 262 aa, Zea Mays
MCAAQLLCPAADTSAALLCSTSSEGEIPAMLVVQLPPPEVAGEDESNSRGVFVEFMTKVAQFNELVESGERLLGRFREELEYFRRPQISKEADVMNQILKSNCTVRMRSYIETGCRVHCQNISNINQLSSCENGLKDHIKKVKTLLEELECLVENVYGITLTASLSALEVSDSQCLDSMLSTDRCSVEEDRSADRLDRDVSFATVMVMVRNALKADYTMQEKIVCALSLKTPSSELEGYCLMWNLRPYIDDDVMRLAWKMCP

SEQ ID NO: 182268 - protein, 260 aa, Zea Mays
MCAAQLLCPAADTSAALLCSTSSEGEIPAMLVVQLPPPEVAGEDESNSRGVFVEFMTKVAQFNELVESGERLLGRFREELEYFRRPQISKEADVMNQILKSNCTVRMRSYIETGCRVHCQNISNINQLSSCENGLKDHIKKVKTLLEELECLVENVYGITLTASLSALEVSDSQCLDSMLSTDRCSVEEDRSADRLDRDVSFATVMVMVRNALKADYTMQIVCALSLKTPSSELEGYCLMWNLRPYIDDDVMRLAWKMCP

SEQ ID NO: 182269 - protein, 144 aa, Zea Mays
MCAAQLLCPAADTSAALLCSTSSEGEIPAMLVVQLPPPEVAGEDESNSRGVFVEFMTKVAQFNELVESGERLLGRFREELEYFRRPQISKEADVMNQILKSNCTVRMRSYIETGCRVHCQNISNINQLSSCENGLKDHIKKDLA

SEQ ID NO: 182270 - protein, 105 aa, Zea Mays
MLVVQLPPPEVAGEDESNSRGVFVEFMTKVAQFNELVESGERLLGRFREELEYFRRPQISKEADVMNQILKSNCTVRMRSYIETGCRVHCQNISNINHELMRKWT

SEQ ID NO: 182271 - protein, 79 aa, Zea Mays
MEVQFILSTGKPFCDEYFRRPQISKEADVMNQILKSNCTVRMRSYIETGCRVHCQNISNINQLSSCENGLKDHIKKDLA

SEQ ID NO: 182272 - protein, 237 aa, Zea Mays
MLVVQLPPPEVAGEDESNSRGVFVEFMTKVAQFNELVESGERLLGRFREELEYFRRPQISKEADVMNQILKSNCTVRMRSYIETGCRVHCQNISNINQLSSCENGLKDHIKKVKTLLEELECLVENVYGITLTASLSALEVSDSQCLDSMLSTDRCSVEGVCTQQEDRSADRLDRDVSFATVMVMVRNALKADYTMQIVCALSLKTPSSELEGYCLMWNLRPYIDDDVMRLAWKMCP

SEQ ID NO: 182273 - protein, 239 aa, Zea Mays
MLVVQLPPPEVAGEDESNSRGVFVEFMTKVAQFNELVESGERLLGRFREELEYFRRPQISKEADVMNQILKSNCTVRMRSYIETGCRVHCQNISNINQLSSCENGLKDHIKKVKTLLEELECLVENVYGITLTASLSALEVSDSQCLDSMLSTDRCSVEGVCTQQEDRSADRLDRDVSFATVMVMVRNALKADYTMQEKIVCALSLKTPSSELEGYCLMWNLRPYIDDDVMRLAWKMCP

SEQ ID NO: 182274 - protein, 103 aa, Zea Mays
MEVQFILSTGKPFCDGIMYLSTGQFSVIVMTEAHNNLIAEYFRRPQISKEADVMNQILKSNCTVRMRSYIETGCRVHCQNISNINQLSSCENGLKDHIKKDLA

SEQ ID NO: 182275 - protein, 665 aa, Zea Mays
MACRATLLPLFLFLLVAPEPALATSGTIVFTTLGRSRYAFDVFALTIAPLSAASAELRLTDGASVNYNGNFAPSSSGPPSLLFVSERNGSLNLYLTPVPTSASARRRDALEEEEEDSAPPTPLLPWDPIALKDRPSLTPDGAHLVYVSTAEPAGAPRRSWAAVYSTSLAPGRATRRLTPRGVADFSPAVSPSGVWTAAASPGPRGWAGEVEDLRTDIYVFRTSDGSRRALAVPDGGWPTWADDTTVFFHRRDADGWYGVYRARLTFTDDDVASVVDRITPPGFHAFTPAASPGAPGLVAVATRRPGSDYRHIEVIDLSGGGGGANNRSAYYEVTRPVAPRAHHFNPFISPDGERVGYHRCRGSGNGDSPLLLESIKGPAPDTFSLFRIDGSFPSFSHDGKRIAFVGLPGLYVVNSDGSGGRRRVFSGNAFPTTWDWKRKGVIYTSVGPDFASESTEVDVVAVSLGDGDGDDPSVSIKKLTVGGENNAFPSPSPDGKWVVFRSGRSGHKNLYIMDAEDGEWIAFASDRHNPGGGSFAIYMVHPNGTGLRRVVHSADGGRTNHPWFSPDSKTLVFTSDYAAVSAEPISNPHHYQPYGEIFTVNIDGSGIRRLTHNSFEDGTPSWTPYHLKAEDVGETLQASGTCAFEDCHWLNIAARPDGLMCGKHA

SEQ ID NO: 182276 - protein, 188 aa, Zea Mays
MARSPTIGGQRAGRREAAARPDGGAGGAVVRAGGRRAARGVDGGAEQAVGGAVHGGSRRGAAGVGGDARGGAVRAGQLPADGGLRGAPGHGAPGRGRPHQPPLLLPGGHPRGGVPGVRRPRRVPRPLVRPPVGAGHVRGARPRRRRLAHGLARRGHARQEAGGAGAHQRRRGGEQAPRGRHRRAGGGY

SEQ ID NO: 182277 - protein, 92 aa, Zea Mays
MKRSAASTVPLALVLIAVATTAAAADMTGASNYLVEAQAKAAMLYNYRNVMSGFSARLTPPELEAVKKQPQVSRVLPSATLSLMSSKFDGVS

SEQ ID NO: 182278 - protein, 314 aa, Zea Mays
MVEWEFKSKEDGKMHACGHDAHVAMLLGAARLLQSRRDDLKGTVKLVFQPAEEGHAGAYHVLKEGVLDNVQAIFGVHVDTALPVGLVGSRPGPFLAGSARFTATITGKGGHAAGPQHVVDPIVAASSAVLSLQQLVARETDPLQGAVVSVTFIKGGGGAFNVIPESVTMGGTLRSMTNDGMSYLVKRIREVIQGQAAVSRCAATVDLMEEKMRPYPATVNDEAMYSHAKAVAESMLGEASVMLCPQFMAAEDFGFYAQRIPAAFFSVGVRDEATGKVHHVHSPHLDIDEAALPVGAALHAAVAMEYLNKHAPCK

SEQ ID NO: 182279 - protein, 188 aa, Zea Mays
MASVGLARVSGVARPLMRLVTMSRMPILQQLHLEEQLLRRTSDNWCIINDGTAPATIVMGVSGRVSELVNIQLVLRDKVPIVRRFSGGGTVIVDQGTVFVTFICNKNVVAGLQPFPRDIMSWSGQLYGKVFDRFGEFHLRENGKKPHRFLVPHEGVHTFAISFHRWGHCCPGRTLLSSAHGSTSNSFR

SEQ ID NO: 182280 - protein, 253 aa, Zea Mays
MRLVTMSRMPILQQLHLEEQLLRRTSDNWCIINDGTAPATIVMGVSGRVSELVNIQLVLRDKVPIVRRFSGGGTVIVDQGTVFVTFICNKNVVAGLQPFPRDIMSWSGQLYGKVFDRFGEFHLRENDYAFSHRKFGGNAQSITKNRWVHHTSFLWDYDVKNMDYLKIPKRAPEYRLARNHTDFLCRMKEYIPSRSVFTDGVIAALGEHFSVQPMDLQAILSGDEEFVPSTKLLSQQYLEEIVSSKESLEIIES

SEQ ID NO: 182281 - protein, 105 aa, Zea Mays
MYFSIWRLEREQQRETDVEENHRSNWLGLRLGIWQTGCVSTKIQNSLDQKLQLPIVVKGLVLRTLDKVSCCYKGSCRAFSTIAIVEGVNQIVDVETILSTFGSKL

SEQ ID NO: 182282 - protein, 102 aa, Zea Mays
MADRLDVLLYLGPFVDSLNISPHDSVQTLVKFLGCVSTKIQNSLDQKLQLPIVVKGLVLRTLDKVSCCYKGSCRAFSTIAIVEGVNQIVDVETILSTFGSKL

SEQ ID NO: 182283 - protein, 94 aa, Zea Mays
MYFSIWRLEREQQRETDVEENHRSNWLGLRLGIWQTGCVSTKIQNSLDQKLQLPIVVKGLVLRTLDKVSCCYKVLCIPGECLINLGADLLVFFK

SEQ ID NO: 182284 - protein, 213 aa, Zea Mays
MAGSSGGAASSSSSRGVPENRFYNPPHVRRQQQQQGQRPLRPASPSPSPRPVRQKPPPPAAAVAASADVDIRVDSDDSSSTTSSKPSVASTAATAAAGEVNVAVAEAEAGNLERFLASTTPSVTAQFLPMSSLRMRRGGDAMDSRPYFCLGDLWESFREWSAYGAGVPLVLNGSDSVIQYYVPYLSAIQLFADPSRPASRNSYFSRLLKASWG

SEQ ID NO: 182285 - protein, 274 aa, Zea Mays
MRRGGDAMDSRPYFCLGDLWESFREWSAYGAGVPLVLNGSDSVIQYYVPYLSAIQLFADPSRPASRNSESSIENDVERLRVSSSLEGKHRLENGGIRSDDGEGDASSSFPIFQYMERDPPYGREPLTDKVSTLAHRFPALKTFKSCDLLPSSWMSVAWYPIYRIPTGPTLKDLDACFLTFHCLATPCKDCDPPTPACPGFGGINRGTTAAGKLSLPIFGLAPYKLRASIWTSDKTQERDLVTSLMQEADSWLRRIQVDHPDFRFFVSHFSTTWR

SEQ ID NO: 182286 - protein, 319 aa, Zea Mays
MEAAAAAVLHRTVEANGISMHVAESGPDGDGAPAVVFLHGFPELWYSWRHQMAHLAARGYRCVAPDLRGYGGTAAPPDVASYSAFHVVGDVVALLDALGIHNKVFVVGHDWGAIIAWYLCLFRPDRVAALVNTSAAAVTPIDYFHRTYGPTYYICRFQEPGVAEKEFSPANAGYLMKRILCNRFTSSAAGDDKRPPADAAEEEPLPPWLTEEDVGHFASEFERTGFTGPINYYRNMDRNWELAAPWADAKVRVPTRFIVGDGDLTYHYPGIQDYIHKGGFEADVPGLESVVVIPGAGHFVQQEKADEVSQHIYDFISKF

SEQ ID NO: 182287 - protein, 144 aa, Zea Mays
MKRILCNRFTSSAAGDDKRPPADAAEEEPLPPWLTEEDVGHFASEFERTGFTGPINYYRNMDRNWELAAPWADAKVRVPTRFIVGDGDLTYHYPGIQDYIHKGGFEADVPGLESVVVIPGAGHFVQQEKADEVSQHIYDFISKF

SEQ ID NO: 182288 - protein, 427 aa, Zea Mays
MILGGVLFFLKRERITLLVACLYSMYCARCYVGWLGLLLGLNLSFFSSDILVQFLRDNADNKKFNGSSRYSERSSGRQGNIFEEFQPSANSTYQARYARASDRDPGDPSTSGPEKELTSEDEVARLLNCTDHYSALGFRRYENIDVSSLKREYKKKAMLVHPDKNMGNDKAADAFKKLQNAYEILLDSLKRKTYDDELRREDLLNYFRQSVSQKNGRNSTFQHGFSPSEGVDEGPYGLSRRIACKKCSDFHLWIYTGRAKSQARWCQDCKEFHQAKDGDGWVEQSFQPVLFGMLQKPDLPHAYVCAESYIFDVTEWFNCQGMRCPANTHKATFHVNANMAKQSSGKASTSTQRAGKAPSGVNMDGGGLNEEEFFEWFQNAVNSGMFETTFGAQGDPTSPGNGSNAKSSGSSSSNNNSRKKKKGKKQW

SEQ ID NO: 182289 - protein, 690 aa, Zea Mays
MARKGNQSKSGPNHASPKWKNTTDGDALSTPERGAADSENPSSHVQGRSKGPEGSSEKKGRGSKRNSTNNGISSSGKKQQMDTGCDINSSEEKEIPVRGTKNRRGSQKPSRRGFGRSFFIEQTTSSGLAGNVLEKTRCIACMAASIIRASMIYLVEEGKRFIEKRMPTINTYMAFVNKGHAYVLSKIAYVYPIVRAWMLNAGRVMLLLFTVWLDCNVRGFDSLLRLGTNSLLAVLWCSTLSTFAMIGIKKMLIFMAIAASAFAFIGLGFAILLISVLAVVILWFYGSFWTTTCVMILGGVLFFLKRERITLLVACLYSMYCARCYVGWLGLLLGLNLSFFSSDILVQFLRDNADNKKFNGSSRYSERSSGRQGNIFEEFQPSANSTYQARYARASDRDPGDPSTSGPEKELTSEDEVARLLNCTDHYSALGFRRYENIDVSSLKREYKKKAMLVHPDKNMGNDKAADAFKKLQNAYENGRNSTFQHGFSPSEGVDEGPYGLSRRIACKKCSDFHLWIYTGRAKSQARWCQDCKEFHQAKDGDGWVEQSFQPVLFGMLQKPDLPHAYVCAESYIFDVTEWFNCQGMRCPANTHKATFHVNANMAKQSSGKASTSTQRAGKAPSGVNMDGGGLNEEEFFEWFQNAVNSGMFETTFGAQGDPTSPGNGSNAKSSGSSSSNNNSRKKKKGKKQW

SEQ ID NO: 182290 - protein, 690 aa, Zea Mays
MARKGNQSKSGPNHASPKWKNTTDGDALSTPERGAADSENPSSHVQGRSKGPEGSSEKKGRGSKRNSTNNGISSSGKKQQMDTGCDINSSEEKEIPVRGNVLEKTRCIACMAASIIRASMIYLVEEGKRFIEKRMPTINTYMAFVNKGHAYVLSKIAYVYPIVRAWMLNAGRVMLLLFTVWLDCNVRGFDSLLRLGTNSLLAVLWCSTLSTFAMIGIKKMLIFMAIAASAFAFIGLGFAILLISVLAVVILWFYGSFWTTTCVMILGGVLFFLKRERITLLVACLYSMYCARCYVGWLGLLLGLNLSFFSSDILVQFLRDNADNKKFNGSSRYSERSSGRQGNIFEEFQPSANSTYQARYARASDRDPGDPSTSGPEKELTSEDEVARLLNCTDHYSALGFRRYENIDVSSLKREYKKKAMLVHPDKNMGNDKAADAFKKLQNAYEILLDSLKRKTYDDELRREDLLNYFRQSVSQKNGRNSTFQHGFSPSEGVDEGPYGLSRRIACKKCSDFHLWIYTGRAKSQARWCQDCKEFHQAKDGDGWVEQSFQPVLFGMLQKPDLPHAYVCAESYIFDVTEWFNCQGMRCPANTHKATFHVNANMAKQSSGKASTSTQRAGKAPSGVNMDGGGLNEEEFFEWFQNAVNSGMFETTFGAQGDPTSPGNGSNAKSSGSSSSNNNSRKKKKGKKQW

SEQ ID NO: 182291 - protein, 580 aa, Zea Mays
MEAARFGTQSSHLYGGGLDLNRREKRVFGWDLNDWSWDSQRFVATPVQQQAANGSGLNSSPSSSEEAVEEVARNGGFRGDTDKRKRVIDDDETEDQCTVLHGGRSLSLKIGGAAGGVGAMENSDVNEDNERNGKKVRVQGGSSSGPACQVEDCGADLAAEKDYHRRHKVCEKHAKASTAVVGNTVQRFCQQCSRFHLLHEFDEGRRSCRRRLAGHNRRRRKTRPDTAIGGTASIEDKVSNYLLLSLIGICANMNSDNAQNANGQELLSTLLKNLGSVAKSLEPKELCKFLEAYQSLQNGLNAGTSGIANGAEEAAGPSNSKLPSVNDSHYGQASSSVVPVQSKATTVVTPEPASCKLKDFDLNDTCIDMEGFEDGQEGSPTPAFKTADSPNCASWMQQDSTQSPPQTSGNSDSTSTQSLSSSNGDTQCRTDKIVFKLFDKVPSDLPPVLRSQILGWLSSSPSDIESHISPGCIILTVYVRLVESAWQELSENMSLLLGKLLNSSTDDFWASGLVFVMVRHHLAFMLNGQIMLDRPLAPSSHHYCKILCVRPVAAPYSATINFRVEGFNLLSTSSRTLHIP

SEQ ID NO: 182292 - protein, 222 aa, Zea Mays
MALYALALFYAACRDLLRPYNPVPKFIMIKSVVFLTYWQGVLVFLAAKSRFIKNADKAADLQNFVLCVEMLIAAVGHLFAFPYKEYTGPNARPSRGFRESLLHALKFNDFYHDTVHQFAPTYNEYVLYNHNEGDSAQTKYPSGSTATSGQGVELAGITVAASNSPVSSSVSSNQADQEETMTTPIKDKVDPPGGLYDLTELLDIDLSSYPAKLPGTTDVRKQ

SEQ ID NO: 182293 - protein, 421 aa, Zea Mays
MRMLTMSWSFMQYSCDLLRCVQLSSLRFSSESIWIFFTLVSLCFCLQALFMCIAHFIILTPKSCAFLQVYAVMSFLSLILPNNAIYFNSIREIYDAWVIYNFLSLCLAWVGGPGAVVVSLSGRTLKPSWILMTCCYPAIPLDGRFIRRCKQGCLQFVILKPILVVITFILYAKGKYKDGNFSVNQSYLYITIIYTISYSMALYALALFYAACRDLLRPYNPVPKFIMIKSVVFLTYWQGVLVFLAAKSRFIKNADKAADLQNFVLCVEMLIAAVGHLFAFPYKEYTGPNARPSRGFRESLLHALKFNDFYHDTVHQFAPTYNEYVLYNHNEGDSAQTKYPSGSTATSGQGVELAGITVAASNSPVSSSVSSNQADQEETMTTPIKDKVDPPGGLYDLTELLDIDLSSYPAKLPGTTDVRKQ

SEQ ID NO: 182294 - protein, 290 aa, Zea Mays
MTCCYPAIPLDGRFIRRCKQGCLQFVILKPILVVITFILYAKGKYKDGNFSVNQSYLYITIIYTISYSMALYALALFYAACRDLLRPYNPVPKFIMIKSVVFLTYWQGVLVFLAAKSRFIKNADKAADLQNFVLCVEMLIAAVGHLFAFPYKEYTGPNARPSRGFRESLLHALKFNDFYHDTVHQFAPTYNEYVLYNHNEGDSAQTKYPSGSTATSGQGVELAGITVAASNSPVSSSVSSNQADQEETMTTPIKDKVDPPGGLYDLTELLDIDLSSYPAKLPGTTDVRKQ

SEQ ID NO: 182295 - protein, 409 aa, Zea Mays
MESSLAWPLCSSSSPNPAALHSSRVVALLPPTSLLTSAALSRSPPSLAFFEAQIPIVGPLLLLLNRSFQNSLAELVEVMEGMGVPSPPTVGTPSASPCRITSPVDDTNASLGQEPECALTYIRQDDPDTFIISGNFHPRHQIDWDSIEVEERWNEEGRQDVTSERGLYIQLGLHNEDERVFKQREDDSSAHCAGNNREEFHDEASTAMPCSDFVLDGTRTIYDMNNPVMEPGSFLDLPLVKIQIWLLQGWLGWVSGATRPLMRLVTLSNMPILQQLHLEEQLLRRTSDNWCVINDGMAPATILMGRKIQSCIGLLVPHVELLIWFCVMAGLQESLGACRHTAGPLGPSADCEEVQWRWHVIVDWGTVVVTFICNKNAVAGLQIYGKKFDRFGEFHLRENGKKPQISCAA

SEQ ID NO: 182296 - protein, 837 aa, Zea Mays
MESSLAWPLCSSSSPNPAALHSSRVVALLPPTSLLTSAALSRSPPSLAFFEAQIPIVGPLLLLLNRSFQNSLAELVEVMEGMGVPSPPTVGTPSASPCRITSPVDDTNASLGQEPECALTYIRQDDPDTFIISGNFHPRHQIDWDSIEVEERWNEEGRQDVTSERGLYIQLGLHNEDERVFKQREDDSSAHCAGNNREEFHDEASTAMPCSDFVLDGTRTIYDMNNPVMEPGSLYASMEQFRLAIRQYAINKEFELGIEATNKTRFRGYCKGPDCPWSIHARSEMKGSPTIQVIVLNDEHTCTSSGRRKTTTPTGAWVAARALPLLMKKPHMGAKELQSMLQDTFGCTITYDTIWHGKEKALKQLFGSWEESFQLLWSWREAVIQKSPDSIIELDVKMDEGRPFFSRFFCALGPCITGFKEGCRPYLSVDSTALNGRWNGHLCCAIGVDGQNWMYPVAYGFFEAETTENWTWFFQQLRKAVGDLPLLALCSDACKGLKNAMNTVFPQAEKRECFRHLMQNYVKQFVGSEYMYPAARAYRREVFDHYFSNVQEIPKVSSWLYEHHDSLWYRSGFNPAIKCDYVTNNIAEVFNNWIKDWKDLPVCDLADKIRKEIMELFHRRREIGQRLQGRILPSVVHILHVRTRGLGHLTVKKADNYIAEVRDNNNVHSKHIVNAQLRQCSCNEWQHTGKPCHHALRLITTQQFRDVRMEDFVDDYYSVDKFMKAYSRVVEPIGDKSFWPTVPFAKEVCASIGKRGVGRQRKNMIKGCLEGGSGKKPNENENVKTKKMIRGKFKCPNCGELGHRKASYKCPLNGTKKRKRRARKNVTKGWFPKDVEA

SEQ ID NO: 182297 - protein, 511 aa, Zea Mays
MKKPHMGAKELQSMLQDTFGCTITYDTIWHGKEKALKQLFGSWEESFQLLWSWREAVIQKSPDSIIELDVKMDEGRPFFSRFFCALGPCITGFKEGCRPYLSVDSTALNGRWNGHLCCAIGVDGQNWMYPVAYGFFEAETTENWTWFFQQLRKAVGDLPLLALCSDACKGLKNAMNTVFPQAEKRECFRHLMQNYVKQFVGSEYMYPAARAYRREVFDHYFSNVQEIPKVSSWLYEHHDSLWYRSGFNPAIKCDYVTNNIAEVFNNWIKDWKDLPVCDLADKIRKEIMELFHRRREIGQRLQGRILPSVVHILHVRTRGLGHLTVKKADNYIAEVRDNNNVHSKHIVNAQLRQCSCNEWQHTGKPCHHALRLITTQQFRDVRMEDFVDDYYSVDKFMKAYSRVVEPIGDKSFWPTVPFAKEVCASIGKRGVGRQRKNMIKGCLEGGSGKKPNENENVKTKKMIRGKFKCPNCGELGHRKASYKCPLNGTKKRKRRARKNVTKGWFPKDVEA

SEQ ID NO: 182298 - protein, 162 aa, Zea Mays
MFPANDDHPSHDVARGQRFVKEVYETLRASPQWNETALIITYDEHGGFYDHVPTPVVGVPQPDGIVGPDPYYFKFERLGVRVPTFLISPWIDKGTVIHKPNGPQDTSQYEHSSIPATVKKLFNLHSNFLTKRDAWAGTFENYFKIRRTPRTDCPAATAVLRQ

SEQ ID NO: 182299 - protein, 65 aa, Zea Mays
MIFHSNTAYHPNVPSRNHCRHTRLRRDYQLRVRRIQRASPDSCAGSSQAPSRVQPSDSGRSAEER

SEQ ID NO: 182300 - protein, 479 aa, Zea Mays
MGARCSKLSVCWWPPRFKSPMLENGAAEDDGSGVPVFAEYSLAELRVATDGFATDRIVSEHGEKAPNVVYRGTLFSSGRTVAIKRFGRSAWPDSRQFLEEARAVGQLRSRRLANLIGCCYESGERLLVAEFMPHETLAKHLFHWETNPLSWAMRTRAAFYVAQALEYCSSKGRALYHDLHAYRVVFDAEGNPRLSCFGLMKNSRDGKSYSTNLAFTPPEYLKTGRVSPESVVYSFGTVLLDLLSGKHIPPSHALDLIRGKNFLVLMDSCLEGHVSSSDGTDLMRLASRCLQYEARDRPNLKTVTPSHTLLGIQHDNKNSDRISLSAIGKAFARADLNEVHEILLHDGYDEDDTANAELSLQSWNDDVSESFVVKRHADNAFRSKDYSTAIECYSRFIDSGAGVAPTMLGRRCFAYVVAGNPQEGLEDAKRAEVIASDWPMGHYLQALALHNLGREAESQEALKNGTALEAAMNSRARTV

SEQ ID NO: 182301 - protein, 199 aa, Zea Mays
MEVGSGSGYVITSLAIMLRQLGSGAQYLATDINQHAAETTQATLEAHGVHADVIVTDIMSGLDKRLAGMVDVAVVNPPYVPTPVEEVGCRGIASSWAGGLNGRQVIDRILPAVREMLSERGWLYMVALEDNDPSDICHLMSEMGYASRVILKRCTEEESLYVLKFWRDPHAVTSVSPKSSGSESWFSQLHFKSLWHKGS

SEQ ID NO: 182302 - protein, 113 aa, Zea Mays
MRLRSRAIFPLVRTTATTTSAASSSPAVLSIGHALRERRLFTGDDVAAYAAISGDRNPVHLDDAVARELSGFQRGRVVHGMLVASLFPSIIAGTWRCVREPDAQVCGAGVRRG

SEQ ID NO: 182303 - protein, 326 aa, Zea Mays
MSASGGGLLSLERDACVAWCVQVPRQGSHSSGARRRRGRLRAVAAGDGDAGGGDKAGAGDGAHLGVHAALRHGGGAGVHLLHQAEQRDGPSPGPALRAPAGVGVRAVGGGHDRHGGGLRQGAGAVPAARHGRGARDQHPWARGHRHGVRHRGAGRGGGGGAAAPAVGGRRAAVDVGAVACAAVRADGRGRRVRAGGPAGVLLRAGPRRHAQPGHRPLPQRHWRRELPEQPGDHGGGPRQLPRRARRLVRQGPQPQQAGPLLLAAGVHQRRQPGILRAGRHQVLVQADRQGRQGRRRGRVRRVAAAVRGGHETNHASAARPCVLLLL

SEQ ID NO: 182304 - protein, 133 aa, Zea Mays
MLLIRKRIPVCARIVQLTLEIAASISDDWRLLHLFANGKNRQPRSAREEEERRLPKQQQTVLSENRQIIKWKKPPSRVLKISFAIWVGGVANDFAAFGCKLQSGLRTTWELGRCASLCLRTWCPTMSDLCYVS

SEQ ID NO: 182305 - protein, 168 aa, Zea Mays
MAKDGGPDWNGLFKWSIAHGDGTNPPRALSEEDRKWFMEAMQANTIDVVKRMKEITRVMRTPQDVLQSQGVTPENIEDMLDELHEHVESIDMANDLHSIGGLDPLLGYLKNSNAGIRAKAAEVVSTVVQNNPKSQQLVIESNGLEPLLINFKSDPSTNARTKALGAIS

SEQ ID NO: 182306 - protein, 400 aa, Zea Mays
MFSKSGGKDGSRLSGCSSRASSASMPPSVKTECEILQSANVKIFTFNNLKAATRNFRPDSVLGEGGFGSVYKGWVDENTLSPCRPGTGIAVAVKRLNHEGLQGHREWWAEVNYLGQFCHPNLVKLIGYCLEDEHRLLVYEFMPRGSLENHLFRRGSYFQPLSWNLRMKVALGAAKGLAYLHSGEAKVIYRDFKTSNILLDTDYSAKLSDFGLAKDGPVGEKSHVSTRVMGTYGYAAPEYLSTGHLTAKSDIYSFGVVLLEVLSGRRAIDKNRPQGEHNLVEWARPYLTHKRKIFRILDTRLEGQYNLDGAQAIAALSLECLSYEAKMRPTMDAVVTILEELQDSGEAEKRQGPKAGTKQAPAAAAASASKSSRKLRRRTLGGTKETTVGPNPKPLLARSR

SEQ ID NO: 182307 - protein, 424 aa, Zea Mays
MVFSSVPVYLDPPNWSQHHHQPQQQQQHAQHGQLPSGGNGGGGGGMDTHAHHHHHQLPPVPPPPSGALMAPRPDMSAMVPAASGGGGPTSGGTAIRPGSMTERAKLAKIPQPEPGLKCPRCESTNTKFCYFNNYSLSQPRHFCKTCRRYWTRGGALRNVPVGGGCRRNKRTKSSKSNSSSAAASASGGAGGTSSSTSSTATGGSSSAGAIMPSHQGQLQPFLASLHHPLAGGGGGGDHYSTGASRLGFPGLSSLDPMDYHQFGAGAGAGASSAAIGLEQWRLPHIQQFPFLSGRPDPVQPTMSSIYPFDLEGHGGDAPGFPGGHMLGASKVPGSAGLITQLASVKMEDNPASAAMASSSPREFLSLPGNLQFWGGGGNNNGGASGNNGGGAGNGGGGGGGGAVAPGSSWVDLSGFNSSSSGNVL

SEQ ID NO: 182308 - protein, 125 aa, Zea Mays
MLKFGELQSKRLHRFLTFKMDDKFKEIVVDQVGDRATSYEDFTNSLPENDCRYAIYDFDFVTAEDVQKSRIFYILWSPSSAKVKSKMLYASSNQKFKSGLNGIQVELQATDASEISLDEIKDRAR

SEQ ID NO: 182309 - protein, 204 aa, Zea Mays
MTSLTEYYVSLQKIYQAKAEFDCLALEHHVKEILKQIGRDPDSISRAYIKTFCKNSRKLRICRYRSFKEEFSSPIVSEIQRYFSDEDCSYAMNFYILLRAVDRLAANYSRLPGIFDSEIDEDIPRLKTVAASVLSEMGLNGASLSQDLVTEMCRFGGAEIHPVAAFIGGVASQEVIKLVTKQFVPLGGTFIFNGIDLKSQVLVL

SEQ ID NO: 182310 - protein, 105 aa, Zea Mays
MNFYILLRAVDRLAANYSRLPGIFDRLKTVAASVLSEMGLNGASLSQDLVTEMCRFGGAEIHPVAAFIGGVASQEVIKLVTKQFVPLGGTFIFNGIDLKSQVLVL

SEQ ID NO: 182311 - protein, 407 aa, Zea Mays
MTLILFLNLLPESSLLKLDDICRKADIVLVAARSYGLTGLVRVSVKEHCVIESKPDHFLDDLRLHNPWTELKQFAKSIDINDKDPVVHKHTPYIVVLVRLAEKWADAHDGNMPSTRQEKKEFKDLIRAHMLNVDEENYKEAVDSSYKVSVTPGISNEIHQIIDDDSAEVNSSSEDFWILVAALKEFISKEGNGELPLEGTIPDMTSLTEYYVSLQKIYQAKAEFDCLALEHHVKEILKQIGRDPDSISRAYIKTFCKNSRKLRICRYRSFKEEFSSPIVSEIQRYFSDEDCSYAMNFYILLRAVDRLAANYSRLPGIFDSEIDEDIPRLKTVAASVLSEMGLNGASLSQDLVTEMCRFGGAEIHPVAAFIGGVASQEVIKLVTKQFVPLGGTFIFNGIDLKSQVLVL

SEQ ID NO: 182312 - protein, 395 aa, Zea Mays
MIFPFSGSYVSTTLAGSHNKSILGRFTYLFIVLQEHCVIESKPDHFLDDLRLHNPWTELKQFAKSIDINDKDPVVHKHTPYIVVLVRLAEKWADAHDGNMPSTRQEKKEFKDLIRAHMLNVDEENYKEAVDSSYKVSVTPGISNEIHQIIDDDSAEVNSSSEDFWILVAALKEFISKEGNGELPLEGTIPDMTSLTEYYVSLQKIYQAKAEFDCLALEHHVKEILKQIGRDPDSISRAYIKTFCKNSRKLRICRYRSFKEEFSSPIVSEIQRYFSDEDCSYAMNFYILLRAVDRLAANYSRLPGIFDSEIDEDIPRLKTVAASVLSEMGLNGASLSQDLVTEMCRFGGAEIHPVAAFIGGVASQEVIKLVTKQFVPLGGTFIFNGIDLKSQVLVL

SEQ ID NO: 182313 - protein, 417 aa, Zea Mays
MRPWSIFAWIGLCVCSIWMTLILFLNLLPESSLLKLDDICRKADIVLVAARSYGLTGLVRVSVKEHCVIESKPDHFLDDLRLHNPWTELKQFAKSIDINDKDPVVHKHTPYIVVLVRLAEKWADAHDGNMPSTRQEKKEFKDLIRAHMLNVDEENYKEAVDSSYKVSVTPGISNEIHQIIDDDSAEVNSSSEDFWILVAALKEFISKEGNGELPLEGTIPDMTSLTEYYVSLQKIYQAKAEFDCLALEHHVKEILKQIGRDPDSISRAYIKTFCKNSRKLRICRYRSFKEEFSSPIVSEIQRYFSDEDCSYAMNFYILLRAVDRLAANYSRLPGIFDRLKTVAASVLSEMGLNGASLSQDLVTEMCRFGGAEIHPVAAFIGGVASQEVIKLVTKQFVPLGGTFIFNGIDLKSQVLVL

SEQ ID NO: 182314 - protein, 196 aa, Zea Mays
MTSLTEYYVSLQKIYQAKAEFDCLALEHHVKEILKQIGRDPDSISRAYIKTFCKNSRKLRICRYRSFKEEFSSPIVSEIQRYFSDEDCSYAMNFYILLRAVDRLAANYSRLPGIFDRLKTVAASVLSEMGLNGASLSQDLVTEMCRFGGAEIHPVAAFIGGVASQEVIKLVTKQFVPLGGTFIFNGIDLKSQVLVL

SEQ ID NO: 182315 - protein, 98 aa, Zea Mays
MTLILFLNLLPESSLLKLDDICRKADIVLVAARSYGLTGLVRVSVKVLFSLEHAGELRVIILRGKKVPSGPRKQSAREGSRREEGDKKKKEKNKNKRN

SEQ ID NO: 182316 - protein, 140 aa, Zea Mays
MAAAAAVVAEPKTKYDRQLRIWGDQGQTALEKASICLLNCGPTGTEALKNLVLGGIGSVTAVDGSKVEASDLGNNFMLDEGCLGQPRAKSICSFLQELNDAVKAKFVEEFPTHLIDTNPSFFSQFTVVIATQIYGVLTVI

SEQ ID NO: 182317 - protein, 221 aa, Zea Mays
MAAAAAVVAEPKTKYDRQLRIWGDQGQTALEKASICLLNCGPTGTEALKNLVLGGIGSVTAVDGSKVEASDLGNNFMLDEGCLGQPRAKSICSFLQELNDAVKAKFVEEFPTHLIDTNPSFFSQFTVVIATQLPESSLLKLDDICRKADIVLVAARSYGLTGLVRVSVKVLFSLEHAGELRVIILRGKKVPSGPRKQSAREGSRREEGDKKKKEKNKNKRN

SEQ ID NO: 182318 - protein, 126 aa, Zea Mays
MGILLVYDVTDESSFNNIRNWIRNIEQHASDNVNKILVGNKADMDESKRAVPTSKGQALADEYGIKFFETSAKTNLNVEQVFFSIARDIKQRLSETDSKPEDRTIKIKAEGEADAAEAQKSACCGS

SEQ ID NO: 182319 - protein, 83 aa, Zea Mays
MPMQTALELSSMETHAFAVCTTESLTKLLQETYISACNHGIWIKTNFSTSPGSSRYQTRKHCTVYINPGSPLHEHWYEYDGCY

SEQ ID NO: 182320 - protein, 232 aa, Zea Mays
MASVEGKRETVLVTGASGFIGSTLVGLLLDRGYNVHASVLNPDDKAETEHLVALGAGAGEGRLRVFPGDLLDGAALMAAARGCSGVFHLATPCTVYPVSDPQGQMVVPAVEGTLNVLRAAKEARTVRRVVVTSSSSAIIPSPAWPAGEPRDERCWADVDYCKKNEVSRRRFSGRPPAPASFFCTFSMPGRPWGPHHASCYLFLCIIIAWTYRPTSTWMATRLRGAWFLGTNI

SEQ ID NO: 182321 - protein, 265 aa, Zea Mays
MAGETVLVTGASGFIGSTLVRLLLGRGYNVHAGVLNPDDGAETEHLLAMAAGAGAGEGRLRIFRGDLLDDAARGCSGVFHLASPCTVDPVSDPQVWYPVSKTLAEKAAWRFAEENGLDVVVVNPMSVLGQIIPPTINSSMSVLLRLLQGCTEEYKDIWMGVVHVEDVALAHLLVFENPSASGRHICAESISHLSDFAAKLAELYPNNKVPKFPKDTQPGLVRAEAGVASKKLVELGLQFSPLEKIIRDAVESLKTKGFKFRNWIA

SEQ ID NO: 182322 - protein, 230 aa, Zea Mays
MAGRSDKKPASSAPPRKGGYPHGSVYGSSSEPRKQDACTFSPSVSSKDSLHKVVTLTPVQPQKPVDSRGSHCNAGSDSGEAPFDICMSGNKCAVKLKPSIFETNRERKQRDRECSKDVRPLQLRPGMVLLKRFIKPNDQDKDESQSSLDKGLPVVSFSIGETAEFMFGDVRDEEKISKVDLESGDVLIFGGESRLIFHGVNNTKPKTAPKWLTDETSLRPGRLNLTFRQY

SEQ ID NO: 182323 - protein, 79 aa, Zea Mays
MTFKRRNGGRNKHGRGHVKYIRCSNCAKCCPKDKAIKRFLVRNIVEQAAVRDVQEACVHDGSSLCLMCNPCAHCPGPLS

SEQ ID NO: 182324 - protein, 281 aa, Zea Mays
MSGLYSQGFSPARNLSPQIRSNPDVDSQYLAELLAEHQKLGPFMQVLPICNKLLSQEIMRVSSIVHNHGFGDHDRHRFRSPSPMSSPNPRANLPGNGFSPWSGLQERLGFPQRTSMDWQGAPPSPSTQVVKKILRLEVPVDSYPNFNFVGRILGPRGNSLKRVEASTGCRVFIRGNGSIKDPGKEDKLRGKPGYEHLSDPLHILIEAEFPASIIDARLRHAQEIIEELLKPVDESHDFYKRQQLRELALLNSTLREDSPHPGSVSPFSNGDTHLIEVFHDG

SEQ ID NO: 182325 - protein, 310 aa, Zea Mays
MKVRELGIGATCVRREAMVEADADQDDEEDDSDHELELSRRRRRRRRSSALFSVLEAMRDRDEVRGSDDTDSDTERDLERGRRERMERQRERLRQIERVSARGRERTESLILINSNNEAIILQGTFGSDDNQEDSSNTSSGVSLGDYFLGPALDTLLQRLAESDLSRSGTPPAKKEAVAALPTVNIEEALGCSVCLEDFEMGGEAKQMPCQHKFHSHCILPWLELHSSCPICRFQLPTEETKNNPCESASTAGTVNGGGDNAAASGSDTESTNHNEDDHSDSPIFSALSTLFSDPFSSDDDESVPHSYEN

SEQ ID NO: 182326 - protein, 607 aa, Zea Mays
MATPTALSTSLPYLPPRRVISFPSAAAVSLPVTSRPARLRDSRLAAAATSASEVLESTNGAVPTAAKDGAWRGYGREYFPLAAVVGQDAIKTALLLGAIDREIGGIAISGKRGTAKTVMARGLHAMLPPIEVVVGSIANADPNSPDEWEDGLADQIQYDSDGNVKSEIVKTPFVQIPLGVTEDRLIGSVDVEASVRSGTTVFQPGLLAEAHRGVLYVDEINLLDDGISNLLLNVLTEGVNIVEREGISFRHPCKPLLIATYNPEEGSVREHLLDRIAINLSADLPMSFDDRVEAVDIATRFQESSKEVFKMVEEKTETAKTQIIFAREYLKDVTISTEQLKYLVMEAIRGGCQGHRAELYAARVAKCLAAMEGREKVFVDDLKKAVELVILPRSILSDNPQDQQQEQPPPPPPPPPPENQDSSEDQDEEDEDQEDDEEENEQQDQQIPEEFIFDAEGGLVDDKLLFFAQQAQRRRGKAGRAKNVIFSEDRGRYIKPMLPKGPVRRLAVDATLRAAAPYQKLRREKERDKTRKVFVEKTDMRAKRMARKAGALVIFVVDASGSMALNRMQNAKGAALKLLAESYTSRDQLCALASLSGFNYSFSWRLC

SEQ ID NO: 182327 - protein, 503 aa, Zea Mays
MATPTALSTSLPYLPPRRVISFPSAAAVSLPVTSRPARLRDSRLAAAATSASEVLESTNGAVPTAAKDGAWRGYGREYFPLAAVVGQDAIKTALLLGAIDREIGGIAISGKRGTAKTVMARGLHAMLPPIEVVVGSIANADPNSPDEWEDGLADQIQYDSDGNVKSEIVKTPFVQIPLGVTEDRLIGSVDVEASVRSGTTVFQPGLLAEAHRGVLYVDEINLLDDGISNLLLNVLTEGVNIVEREGISFRHPCKPLLIATYNPEEGSVREHLLDRIAINLSADLPMSFDDRVEAVDIATRFQESSKEVFKMVEEKTETAKTQIIFAREYLKDVTISTEQLKYLVMEAIRGGCQGHRAELYAARVAKCLAAMEGREKVFVDDLKKAVELVILPRSILSDNPQDQQQEQPPPPPPPPPPENQDSSEDQDEEDEDQEDDEEENEQQDQQIPEEFIFDAEGGLVDDKLLFFAQQAQRRRGKAGRAKNVIFSEDRGRYIKPMLPKVPC

SEQ ID NO: 182328 - protein, 309 aa, Zea Mays
MQCIEGSIPVSSSTRIAVVTGGNKGIGLEVCRQLAAASTSGLAVVVVLTARDEARGAAAVGKLRGLGLSNVFFHQLDITDAPSIARLADFLKSRFGKLDILVNNAGFVGLEYIQDRIDGTSTTSEEFCGMDMDKRLELLLKWCLRETCDAGKECMRINYHGTKQVTRALLPLLLASDSGRIVNVSSVLGQLRFFGSEALKRELDDVAGAFVADLEAGAVEARGWWPAGFSPAYMVSKAALNAYSRVLARRHPALRVNCVHPGFVRTDMTVNFGMLTPEEGGSRVVAVALLPDGGPTGAYFQERQQAPFV

SEQ ID NO: 182329 - protein, 171 aa, Zea Mays
MGGASSSIFVFLLFPPWPALPPPPPKPPPRQLRPDRAASSPSPSAGAPSGSCPTAGRSCPPRRCRRPSSGVSIGGNGDDASGGVIGRVEGPRRWNGLGARLSHPASPNTSGGGGKAGSKRASGSCDLGRGSPENGSAESHRKEIIGFLPLTMLSSFYNYHCVYELWVQLGL

SEQ ID NO: 182330 - protein, 284 aa, Zea Mays
MGNCCAAPSTEGSGKTRPKKQKENPYNVAYNRGAAAPPPPPARPGLVVLRDPTGRDLGAEYELGGELGRGEFGVTYLCTEPATGARYACKSISKRKLRTPVDVEDVRREVDIMRHMPPHPNIVSLRAAYEDRDAVHLVMELCEGGELFDRIVARGHYTERAAAAVMRTIVEVVQKCHRHGVMHRDLKPENFLYASKDSSPLKAIDFGLSVFFRPGERFTEIVGSPYYMAPEVLKRNYGPEVDVWSAGVILYILLCGVPPFWAGSSAGNHTICGRFQKRTMAQSI

SEQ ID NO: 182331 - protein, 391 aa, Zea Mays
MGNCCAAPSTEGSGKTRPKKQKENPYNVAYNRGAAAPPPPPARPGLVVLRDPTGRDLGAEYELGGELGRGEFGVTYLCTEPATGARYACKSISKRKLRTPVDVEDVRREVDIMRHMPPHPNIVSLRAAYEDRDAVHLVMELCEGGELFDRIVARGHYTERAAAAVMRTIVEHPWLHDSKNTPDVSLGDTVRARLQQFAAMNKLKKKALRVIAEHLSAEEVADIKQMFDKMDVNKNGKLTFEEFKAGLRKLGNQMHDSDLQILMDAADVDRNGTLDYEEFVTVSVHVRKIGNDEHIQKAFAYFDRNKSGYIEIEELREALADELDGSDEDIIGGIIRDVDTDKDGKIGYDEFAAMMKAGTDWRKASRQYSRQRFSNLSLKLQKDGSLGADTR

SEQ ID NO: 182332 - protein, 182 aa, Zea Mays
MSGVQAMPAAVGVAGLRGSGLVSSSSTGLFAGDCKRKARRPACSAWALRQSRIGSRSRSKRGLGIVCNLAGQYEDSFDDVQRAVRTVLTQLYELNPPSYRCFVAVNKPTDGKHFLRALGKERQELAERVMVTRLHLYGKWIKKCDHAKTYEKISDENLALMRERLMETVIWPTDDSSTEKIG

SEQ ID NO: 182333 - protein, 191 aa, Zea Mays
MSGVQAMPAAVGVAGLRGSGLVSSSSTGLFAGDCKRKARRPACSAWALRQSRIGSRSRSKRGLGIVCNLAGQYEDSFDDVQRQLMNYFTYKAVRTVLTQLYELNPPSYRCFVAVNKPTDGKHFLRALGKERQELAERVMVTRLHLYGKWIKKCDHAKTYEKISDENLALMRERLMETVIWPTDDSSTEKIG

SEQ ID NO: 182334 - protein, 139 aa, Zea Mays
MSGVQAMPAAVGVAGLRGSGLVSSSSTGLFAGDCKRKARRPACSAWALRQSRIGSRSRSKRGLGIVCNLAGQYEDSFDDVQRQLMNYFTYKAVRTVLTQLYELNPPSYRWFYNFVAVNKPTDGKHFLRALGKLALLLIT

SEQ ID NO: 182335 - protein, 236 aa, Zea Mays
MAERGGERGGERGGFGRGFGRGGRGDRGGRRGGRRGPRQEEEKWVPVTKLGRLVKENKITKIEEIYLHSLPVKEHQIVETLVPGLKDEVMKITPVQKQTRAGQRTRFKAFVVVGDGDGHVGLGVKCAKEVATAIRGAIILAKLSVVPVRRGYWGNKIGQPHTVPCKVTGKCGSVTVRMVPAPRGSGIVAARVPKKVLQFAGIEDVFTSSRGSTKTLGNFVKMSIQSHVQVIWFGLV

SEQ ID NO: 182336 - protein, 216 aa, Zea Mays
MAAMGMKKGVLMLALGLAMAVTSSAVVYKVGDASGWTILGNVNYTDWTSKQNFRVGDTIEFTYPPGIHNVLEVNKADYHSCTNSTPIATHTSGDDKIVIKSPGHRFFICGVPGHCAAGQKLSIRVLKTRSSDAPSPAPAARSASAASPSPSGSTSTDPSGAGASASPPASSTDSTPDATTTTAPAPDANGAGVSAGHRAVVAAMALAAAASMAMLY

SEQ ID NO: 182337 - protein, 221 aa, Zea Mays
MLAPPSSIPFHSIPVLAHLAPPSASAHPPRIVMAMATQASAATRHLVAAAASAWAPSAKPRQLSSQLALPPSSSRAPAPLRATAGEAVTEEAPKGFVAPQLDPSTPSPIFGGSTGGLLRKAQVFEMPTGGAAIMREGPNLLKLARKEQCLALGTRLRSKYKITYQFYRVFPNGEVQYLHPKDGVYPEKVNPGREGVGQNFRSIGKNVNPIDVKFTGKSTFD

SEQ ID NO: 182338 - protein, 111 aa, Zea Mays
MSSMMNALSNWLVNPRRNPLARLHMHTVSSRLRKYGLRYDDLYDPYFDLDIKEALGRLPREVVDARIQRLKRAMDLSMKHQYLPEDLQAQQVPFRGYLSDMLALELLSSSC

SEQ ID NO: 182339 - protein, 195 aa, Zea Mays
MYPQVHHFAVEESSATPRYGVRGFPAILLVNETTMVRYRGSKDLNSLVDFYKETTGLDPVAYIDVVVQQESTASLSSVAPWDRSPLEMAKDEPPYLLVAVLFIILKAAARLVPAAMSHLRAFLAVRVQNLNLGIRRGSSQVLERALNALDVRRLCSKLGLSNRATDLRKGASNARAWASSFASVSLGEPSSSRQA

SEQ ID NO: 182340 - protein, 227 aa, Zea Mays
MLHGVLFRANFDRYLKLSALCTLRYITLLLKNLLRHQDHYIASYCSLFSRYGVRGFPAILLVNETTMVRYRGSKDLNSLVDFYKETTGLDPVAYIDVVVQQESTASLSSVAPWDRSPLEMAKDEPPYLLVAVLFIILKAAARLVPAAMSHLRAFLAVRVQNLNLGIRRGSSQVLERALNALDVRRLCSKLGLSNRATDLRKGASNARAWASSFASVSLGEPSSSRQA

SEQ ID NO: 182341 - protein, 296 aa, Zea Mays
MRCAAAALAVALIAVVAGATAPGSPAAGTCARRGALPFLDAVGSRCPFVRIEPSPPLEVRGEAVDTELNLRRRGASYSILFYAAWCPFSSKFRPIFETVSTMYPQVHHFAVEESSATPRYGVRGFPAILLVNETTMVRYRGSKDLNSLVDFYKETTGLDPVAYIDVVVQQESTASLSSVAPWDRSPLEMAKDEPPYLLVAVLFIILKAAARLVPAAMSHLRAFLAVRVQNLNLGIRRGSSQVLERALNALDVRRLCSKLGLSNRATDLRKGASNARAWASSFASVSLGEPSSSRQA

SEQ ID NO: 182342 - protein, 115 aa, Zea Mays
MCDLLWSDPDDRCGWGISPRGAGYTFGQDISEQFNHTNSLRLIARAHQLVMEGFNWAHEQKVVTIFSAPNYCYRCGNMASILEVDDCREHTFIQFEPAPRRGEPDVTRRTPDYFL

SEQ ID NO: 182343 - protein, 379 aa, Zea Mays
MGALSRPEEVLALVKLRVAAGQIKRQIPPEEHWAFAYSMLQKVSRSFALVIQQLGPELRNAVCIFYLVLRALDTVEDDTSIPTEVKVPILQEFYRHIYNRDWHYSCGTNHYKMLMDKFRHVSTAFLELGEGYQKAIEEVTRRMGAGMAKFICKEVETVDDYDEYCHYVAGLVGYGLSRLFYAAGTEDLALDSLSNSMGLFLQKTNIIRDYLEDINEIPKSRMFWPREIWSKYADKLEDFKYEENSKKAVQCLNNMVTDALIHAEECLQYMSALKDPAIFRFCAIPQIMAIGTCALCYNNVHVFRGVVKMRRGLTARIIDETNSMTDVYTAFYEFSSLIESKIDDSDPNAALTQRRVDSIKQTCKSSGLVKQRLQQIRKY

SEQ ID NO: 182344 - protein, 228 aa, Zea Mays
MGQQSLIYAFVARGTVVLAEYTEFTGNFTTIASQCLMKLPASNNKFTYNCDGHTFNYLVEDGFTYCVVAVESVGQQIPIAFMDRVKEDFTKRYGGGKAATAAANSLNREFRLKLKEHMQYCVDHPEEVSKLAKVKAQVSEVKGVMMENIEKVLDRGEKIELLVDKTENLRSQTARNKCEEKDVVAEHENQAHRPGNNHRTYSDHYPLCLPWFQMPLSTARTLGLAIWL

SEQ ID NO: 182345 - protein, 209 aa, Zea Mays
MSATAESGGDLSAARRRWDLTNKGAESTPILKDAVEISTDEESDGVVTCHPNGNTDGCEETISGSHDDDSPEGQETSSIKEPDVEGDTQEDKRVNQDSLKLIDEESAPPKSPAKSATASSRSERPKRVVPRPFSLSNQRSLFGVNGGVANPLANKDKSGDKSSISPASMTKKSTQMALRKTLQPEKVFHPLEEDSCSVTSSYPFSVCYC

SEQ ID NO: 182346 - protein, 206 aa, Zea Mays
MSATAESGGDLSAARRRWDLTNKGAESTPILKDAVEISTDEESDGVVTCHPNGNTDGCEETISGSHDDDSPEGQETSSIKEPDVEGDTQEDKRVNQDSLKLIDEESAPPKSPAKSATASSRSERPKRVVPRPFSLSNQRSLFGVNGGVANPLANKDKSGDKSSISPASMTKKMALRKTLQPEKVFHPLEEDSCSVTSSYPFSVCYC

SEQ ID NO: 182347 - protein, 196 aa, Zea Mays
MSATAESGGDLSAARRRWDLTNKGAESTPILKDAVEISTDEESDGVVTCHPNGNTDGCEETISGSHDDDSPEGQETSSIKEPDVEGDTQEDKRVNQDSLKLIDEESAPPKSPAKSATASSRSERPKRVVPRPFSLSNQRSLFGVNGGVANPLANKDKSGDKSSISPASMTKKSTQMALRKTLQPEKNYNINKSWQN

SEQ ID NO: 182348 - protein, 78 aa, Zea Mays
MFRSSGNYLFQCPSKASFNNQYTWACVEPGHLATKNDPLLNTIEGTDHTIILMLVRTMIMVSWMNHCVLDFFGFVFCY

SEQ ID NO: 182349 - protein, 137 aa, Zea Mays
MMRETNACTHGCESTGKRTTRRARGQEGSSWHRCRCSPRERPMAWAGAKHGRRGGCFSRWLQLRQLCRSTVRSAPEMESLATDDVVALSPRAIRFEEMVDSSAAGDVGEELWFDEEGDAALRATTDECEAHHDCDPR

SEQ ID NO: 182350 - protein, 188 aa, Zea Mays
MMNALQNPIMDQSHQESPASRREQNTINNPMAAHRLPSARERVAVCGVRERGAGDIERVALVEVQVDPEGGVRADDGRARRRRAPGTRAWTRGGRRGRGRRARARPARSWRGSRRGCGAPARGPPRSCPGTRTPSGPAPHATRAAGPPRPRRTLARGRRRRPRPPPPLPPPRRRRAPHRRPRPRRPPA

SEQ ID NO: 182351 - protein, 61 aa, Zea Mays
MYECVCGLRKWLTKFRYRMKWKMMLIAMFFLLHFSKVEVRGRLWSMEAEHAFQRWWICYLR

SEQ ID NO: 182352 - protein, 293 aa, Zea Mays
MAGQPPPQGPEDDFFDQFFSMTAGGSYPGATAGGGRAPGDQPFSLALSLDAAAAEASGSGKHADGGKADREAIQLPGLFPPAFGGGVQPPHLRATPPTQVFHAQQPKQGGAAVGPQPPAPRPKVRARRGQATDPHSIAERLRRERIAERMRALQELVPNTNKTDRAAMLDEILDYVKFLRLQVKVLSMSRLGGAGAVAQLVADIPLSVKGEASDSGSKQQIWEKWSTDGTERQVAKLMEEDIGAAMQFLQSKALCMMPISLAMAIYDTQHSQDGQPALTYQSKRKIEMPASIH

SEQ ID NO: 182353 - protein, 148 aa, Zea Mays
MAGQPPPQGPEDDFFDQFFSMTAGGSYPGATAGGGRAPGDQPFSLALSLDAAAAEASGSGKHADGGKADREAIQLPGLFPPAFGGGVQPPHLRATPPTQVFHAQQPKQGGAAVGPQPPAPRPKVRARRGQATDPHSIAERQFFEPCLI

SEQ ID NO: 182354 - protein, 282 aa, Zea Mays
MRDTKTKGIWIWGTPVEMDVDGSKVSVLYLDTEGFESVGKSNVYDDRIFALATVLSSVLIYNLPETVREADISRLSFAVEIAEEFYGSLQGQDVAFEPAKLLWLIQRDFLQGKSVQQMVNEALQRVPNDNGDRYINEVNQIRDSLAVMGNHSTAFSLPQPHLQRTKLCDMEDKELEPLYVKRREQLKQLVSSIVKPKIVQGRTLNGKDFVSFLQQVYREKMDSLNLPVPVDELQKLHEMTNGEARILFDKQHFGKHHAAQSALKLEDEIKEDVLCRCTETSF

SEQ ID NO: 182355 - protein, 237 aa, Zea Mays
MVKLEFSLISSTLANIMLLSRPSSLKMRLKRNFLLANEYQSSKLCEARFSECEDKMDHLQVLKLPSMAKFNAGFTHCNQSFVKDCVGPAKESYERRMSKMLAKSRALFIKEYNNKLFNWLATFSLVMVVIGRFVIKFFLLEIVAWVMFIFLETYTRMFWSAESLYYNPAWHIIVSSWEMIVYSPILDLDRWAIPIVIMLSLGVLYWRCFGRRRKRVKGSLLPLYKNSYKNSSRPRSD

SEQ ID NO: 182356 - protein, 312 aa, Zea Mays
MRDTKTKGIWIWGTPVEMDVDGSKVSVLYLDTEGFESVGKSNVYDDRIFALATVLSSVLIYNLPETVREADISRLSFAVEIAEEFYGRLQGQDVAFEPAKLLWLIQRDFLQGKSVQQMVNEALQRVPNDNGDRYINEVNQIRDSLAVMGNHSTAFSLPQPHLQRTKLCDMEDKELEPLYVKRREQLKQLVSSIVKPKIVQGRTLNGKDFVSFLQQILEALNKGEIPSTGSLVEIFNKAILDRCLKVYREKMDSLNLPVPVDELQKLHEMTNGEARILFDKQHFGKHHAAQSALKLEDEIKEDVLCRCTETSF

SEQ ID NO: 182357 - protein, 566 aa, Zea Mays
MECSIVLRMFLFDEYFWCFLRNRFPIVEPDHRHTKLRLSEQGLEAIRRIETPIAVVGVIGPYRSGKSFLLNQLLSLSCDKGFGVGHMRDTKTKGIWIWGTPVEMDVDGSKVSVLYLDTEGFESVGKSNVYDDRIFALATVLSSVLIYNLPETVREADISRLSFAVEIAEEFYGSLQGQDVAFEPAKLLWLIQRDFLQGKSVQQMVNEALQRVPNDNGDRYINEVNQIRDSLAVMGNHSTAFSLPQPHLQRTKLCDMEDKELEPLYVKRREQLKQLVSSIVKPKIVQGRTLNGKDFVSFLQQVYREKMDSLNLPVPVDELQKLHEMTNGEARILFDKQHFGKHHAAQSALKLEDEIKEVYRNFLLANEYQSSKLCEARFSECEDKMDHLQVLKLPSMAKFNAGFTHCNQSFVKDCVGPAKESYERRMSKMLAKSRALFIKEYNNKLFNWLATFSLVMVVIGRFVIKFFLLEIVAWVMFIFLETYTRMFWSAESLYYNPAWHIIVSSWEMIVYSPILDLDRWAIPIVIMLSLGVLYWRCFGRRRKRVKGSLLPLYKNSYKNSSRPRSD

SEQ ID NO: 182358 - protein, 614 aa, Zea Mays
MECSIVLRMFLFDEYFWCFLRNRFPIVEPDHRHTKLRLSEQGLEAIRRIETPIAVVGVIGPYRSGKSFLLNQLLSLSCDKGFGVGHMRDTKTKGIWIWGTPVEMDVDGSKVSVLYLDTEGFESVGKSNVYDDRIFALATVLSSVLIYNLPETVREADISRLSFAVEIAEEFYGSLQGQDVAFEPAKLLWLIQRDFLQGKSVQQMVNEALQRVPNDNGDRYINEVNQIRDSLAVMGNHSTAFSLPQPHLQRTKLCDMEDKELEPLYVKRREQLKQLVSSIVKPKIVQGRTLNGKDFVSFLQQILEALNKGEIPSTGSLVEIFNKAILDRCLKVYREKMDSLNLPVPVDELQKLHEMTNGEARILFDKQHFGKHHAAQSALKLEDEIKEVYRNFLLANEYQSSKLCEARFSECEDKMDHLQVLKLPSMAKFNAGFTHCNQSFVKDCVGPAKESYERRMSKMLAKSRALFIKEYNNKLFNWLATFSLVMVVIGRFVIKFFLLEIVAWVMFIFLETYTRMFWSAESLYYNPAWHIIVSSWEMIVYSPILDLDRWAIPIVIMLSLGVLYWRCFGRRRKRDGTKHLLIEEATLPVLLDGHVLMLPCLWISNCFLVDEERQ

SEQ ID NO: 182359 - protein, 612 aa, Zea Mays
MWRGRCAPGISVAALALLAVAAAAGAAAGDPDPDDLERAFPIVEPDHRHTKLRLSEQGLEAIRRIETPIAVVGVIGPYRSGKSFLLNQLLSLSCDKGFGVGHMRDTKTKGIWIWGTPVEMDVDGSKVSVLYLDTEGFESVGKSNVYDDRIFALATVLSSVLIYNLPETVREADISRLSFAVEIAEEFYGRVKGQDVAFEPAKLLWLIQRDFLQGKSVQQMVNEALQRVPNDNGDRYINEVNQIRDSLAVMGNHSTAFSLPQPHLQRTKLCDMEDKELEPLYVKRREQLKQLVSSIVKPKIVQGRTLNGKDFVSFLQQILEALNKGEIPSTGSLVEIFNKAILDRCLKVYREKMDSLNLPVPVDELQKLHEMTNGEARILFDKQHFGKHHAAQSALKLEDEIKEVYRNFLLANEYQSSKLCEARFSECEDKMDHLQVLKLPSMAKFNAGFTHCNQSFVKDCVGPAKESYERRMSKMLAKSRALFIKEYNNKLFNWLATFSLVMVVIGRFVIKFFLLEIVAWVMFIFLETYTRMFWSAESLYYNPAWHIIVSSWEMIVYSPILDLDRWAIPIVIMLSLGVLYWRCFGRRRKRVKGSLLPLYKNSYKNSSRPRSD

SEQ ID NO: 182360 - protein, 148 aa, Zea Mays
MMDSALRRFFVWASLRDDEGLYLASDSDEQLLIYIPFMQVVKLHSVLFKGPEEEGPKTVKLFSNKEHMGFSNVNDYPPMDTLELSSDHLIENKPLPLKYVKFQNVRSLTVFIEDNQSGSDVSKIQKVALYGTTVDTTNMKDLRKTEEH

SEQ ID NO: 182361 - protein, 193 aa, Zea Mays
MDAASIAAAAAAVATPPPGPAVTVQVPRGQVDLIDFIDWTGVECLNQDSSHSIVNALKQSLRDDEGLYLASDSDEQLLIYIPFMQVVKLHSVLFKGPEEEGPKTVKLFSNKEHMGFSNVNDYPPMDTLELSSDHLIENKPLPLKYVKFQNVRSLTVFIEDNQSGSDVSKIQKCGHDKYEGSEKDRRALRPFKG

SEQ ID NO: 182362 - protein, 81 aa, Zea Mays
MGFSNVNDYPPMDTLELSSDHLIENKPLPLKYVKFQNVRSLTVFIEDNQSGSDVSKIQKVALYGTTVDTTNMKDLRKTEEH

SEQ ID NO: 182363 - protein, 791 aa, Zea Mays
MGVPAFYRWLADRYPLTVSDAEEEEPVELEPGAFVPVDLRRPNPNGLEFDNLYLDMNGIIHPCFHPEGRPAPTTYDEVFKSIFDYIDHLFGLIRPRKLLYMAIDGVAPRAKMNQQRSRRFRAAKDAADAAAEEERLRKEFEAEGRTLAQKEKSEAIDSNVITPGTEFMFVLSTALQYYIQLRLNHTLGWQSVKIILSDSNVPGEGEHKIMSYIRLQRNLPGFDPNTRHCLYGLDADLIMLALATHEVHFSILREVISMPGQHEKCFLCGQVGHLAAECRGPSQPDNSVELPPIHKKKYQFLNIWVLREYLAKDLEIIDAPFKINFERLIDDFVFMCFFVGNDFLPHMPTLEIREGAINLLMSIYRSEFTSMGGYLTDVGEVILDRVEHFIQSVAVNEEQIFQKRARIQQARENNEEKHKMQRENSEEDQYVDKVKLGEPGYRERYYADKFKEEAESKPIVQVRRDVVQKYVEGLCWVMRYYYQGVCSWQWFYPYHYAPFASDLKGLAELEITFFLGQPFKPFDQLMGTLPAASSNALPKYYGDLMSDPDSPLKSFYPKDFEIDMNGKRFAWQGVAKLPFIDERRLLAETRKLEDTLTEEEKFRNRTMLDIIYVRDTHPLITQIIFLYQNYYHLSRTDPYVIPIEPAASGGMNGFLCLSERNWYSVTVTSPVKGFNGIAQNRVLNAAYLNPQYHKHIPEPPAGVIIPAKILKPSDFKPFPVLWHQDNSRRQVRERPQVSGALSGSLLGEAAHRLVKNSLQIRSGNAAGLLYMPYRGAPYGPGNRPRPAGPLG

SEQ ID NO: 182364 - protein, 344 aa, Zea Mays
MLPHQRLDRRFSVCDPVSLGGRPSDFDRNFPFMGSPDDHCIEEDTSNEAYFPPFPYGYGASAPMEENDHQTNTSRYCLVASKQMVGIFLTVWVRSEIRNDVRNLKVSCVGRGLMGYLGNKGSISISMSLHHTTFCFVCCHLTSGEKEGDELRRNSDVMEILRKTRFPQVRGAADVKSPETILEHDRIIWLGDLNYRIALSYCSAKALVEMHNWKQLLEKDQLRIERRCGRVFHGWKEGRIYFPPTYKYSFNSDRYSGVRPKEKRRTPAWCDRILWYGNGLSQLSYVRGESRFSDHRPVYSIFMAEVESARHRRRNMGYSSSRIEVEELLPYPYSSGEMKFYWFG

SEQ ID NO: 182365 - protein, 83 aa, Zea Mays
MTRRGTEVNINHNIVCGTFKLTLQFTEDYPNKPPTVRFVSRMFHPNIYADGSICLDILQNQWSPIYDVAAILTSIQKAESSCI

SEQ ID NO: 182366 - protein, 267 aa, Zea Mays
MLSSAHHVEMNPSDAGFQDRYVVQEIIKEMAKNRPIDAKGRRAFKVLVLNEVDKLSREAQHSLRRTMEKYSSSCRLILCCNSSSKVTEAVRSRCLNVRVNAPSEDQIVQVLEFIGKKENLILPAGFAARIAAQSNRNLRRAILFFETCKVQQYPFTSNQVAPPLDWEQYVSEIATDILTEQSPKRLFDVRQKFYELLVNCIPPESILKKLLAELLRKLDADLKYEICRWAAHYEHKMRLGSKAIFHLEAFVAKFMSIYKEFLVATFG

SEQ ID NO: 182367 - protein, 220 aa, Zea Mays
MFGAGAEKVKLENKTWKIDTGTRTLEIELAMLSSAHHVEMNPSDAGFQDRYVVQEIIKEMAKNRPIDAKGRRAFKVLVLNEVDKLSREAQHSLRRTMEKYSSSCRLILCCNSSSKVTEAVRSRCLNVRVNAPSEDQIVQVLEFIGKKENLILPAGFAARIAAQSNRNLRRAILFFETCKVQQYPFTSNQVAPPLDWEQYVSEIATDILTEQSPKSFFRRD

SEQ ID NO: 182368 - protein, 411 aa, Zea Mays
MGNTCVGPSITMNGFFQSVSTALWKTPQDSDLFDRIVRRGHYTERKAAELARVIVGVVEACHSMGVMHRDLKPENFLFADHSEEAALKTIDFGLSIFFRPGQIFTDVVGSPYYVAPEVLKKRYGPEADVWSAGVIIYILLCGVPPFWAENEQGIFEEVLHGRLDFESEPWPSISDGAKDLVRRMLVRDPRKRLTAHEVLRHPWVQVGGVAPDRPLDSAVLSRMKQFSAMNKLKKMALRVIAENLSEDEIAGLREMFKMIDADNSGQITFEELKVGLEKVGANLQESEIYALMQAADVDNNGTIDYGEFIAATLHLNKVEREDHLFAAFQYFDKDGSGYITADELQVACEEFGLGDVQLEDLIGEVDQDNDGRIDYNEFVAMMQKPTVGVLPKKADLQNSFSIGFREALRMA

SEQ ID NO: 182369 - protein, 86 aa, Zea Mays
MKETVEENTSTTERVFQDRQYQVDAAIVRIMKTRKVLSHTLLITELYQQLKFPVKPADIKKRIESLIDREYLERDRSNPQIYNYLA

SEQ ID NO: 182370 - protein, 614 aa, Zea Mays
MLIIRGIALLLDVKYVKNVANICSVWDMGLQLFRKHLSLSTEIEHKTVTGLLRLIESERLGEAIDRTLLSHLLKMLTALGMYSESFEKPFLECTSEFYATEGVRYMQQSDIPDYLKHVESRLQEEHERCILYLEANTRKPLIATTEKQLLERHTSAIIEKGFTMLMDANRINDLSRMYNLFQRVNAVELLKLALSSYIRATGQGIIMDEEKDRELVPFLLDFKASLDKILEESFAKNEAFSNTIKDSFEHLINLRQNRPAELIAKFLDEKLRAGNKGTSEEELEGILDKVLVLFRFIQGKDVFEAFYKKDLAKRLLLGKSASIDAEKSMITKLKTECGSQFTNKLEGMFKDIELSKEINDSFRQSSQARTKLPSGIEMSVHVLTTGYWPTYPPMDVKLPHELNVYQDIFKEFYLSKYSGRRLMWQNSLGHCVLKADFPKGKKELAVSLFQSVVLMLFNDAQKLSFIDIKDSTGIEDKELRRTLQSLACGKVRVLQKIPKGRDVEDKDEFVFNEDFSAPLYRIKVNAIQMKETVEENTSTTERVFQDRQYQVDAAIVRIMKTRKVLSHTLLITELYQQLKFPVKPADIKKRIESLIDREYLERDRSNPQIYNYLA

SEQ ID NO: 182371 - protein, 227 aa, Zea Mays
MDGNARSTAASQKKSIVPDDDLVELLWHNGSVVAQPQGHHRPAPPSDRDCPGTSGLTAEETAAWFPDTLDDSLEKDLYTQLWYSTIADAAPQHEGMFPGPTSQPSPPPPVASSGVESSWAGDICSTFCGSNQVPRTPAGIRGKDAALQPEVPSGAGAHDGTSSSGGSGSNYGGSGLPSDSVHVHKRKGMCRDESDSRSERRRDRIKEKMRALQELIPHCNKTRRLST

SEQ ID NO: 182372 - protein, 234 aa, Zea Mays
MLGRRRRVRRSPSSRTTTSWSCSGTTEASWRSPRGTTGRRRPPTATARAPAALLPRRPPRGSRTPSTTRWRRTCTRSSGTARSPTPPRNTRACSRALPRSLRRRRPLRAAASSRAGPATSARPSAAATRCPGRRQGSGGRTRHCSRRCRAVPARTTAHRHPVGPEATMGDPGCPVTASMSTRGRGCVETSQIVGVRCLLLFYITCILNELLENRVEIEMLEWNRIDEEIAGCRV

SEQ ID NO: 182373 - protein, 239 aa, Zea Mays
MDGNARSTAASQKKSIVPDDDLVELLWHNGSVVAQPQGHHRPAPPSDRDCPGTSGLTAEETAAWFPDTLDDSLEKDLYTQLWYSTIADAAPQHEGMFPGPTSQPSPPPPVASSGVESSWAGDICSTFCGSNQVPRTPAGIRGKDAALQPEVPSGAGAHDGTSSSGGSGSNYGGSGLPSDSVHVHKRKGMCRDESDSRSEDAECEEARRPNPGGGMGGNAGLVQLKSIISQRGRYWLLLM

SEQ ID NO: 182374 - protein, 237 aa, Zea Mays
MDGNARSTAASQKKSIVPDDDLVELLWHNGSVVAQPQGHHRPAPPSDRDCPGTSGLTAEETAAWFPDTLDDSLEKDLYTQLWYSTIADAAPQHEGMFPGPTSQPSPPPPVASSGVESSWAGDICSTFCGSNQVPRTPAGIRGKDAALQPEVPSGAGAHDGTSSSGGSGSNYGGSGLPSDSVHVHKRKGMCRDESDSRSEDAECEEARRPNPGGGMGGNAGLVQLKSIISQRGVIGCC

SEQ ID NO: 182375 - protein, 400 aa, Zea Mays
MDGNARSTAASQKKSIVPDDDLVELLWHNGSVVAQPQGHHRPAPPSDRDCPGTSGLTAEETAAWFPDTLDDSLEKDLYTQLWYSTIADAAPQHEGMFPGPTSQPSPPPPVASSGVESSWAGDICSTFCGSNQVPRTPAGIRGKDAALQPEVPSGAGAHDGTSSSGGSGSNYGGSGLPSDSVHVHKRKGMCRDESDSRSEDAECEEARRPNPGGGMGGNAGLVQLKSIISQRGDRIKEKMRALQELIPHCNKTDKASILDETIEYLKSLQMQVQIMWMTSGMVPMVFPGAHQYMPPMALGMNSGCIPAAQGLSQMRRLPYMNHPMPNHIPLNSSPAMNPMNPLNTVNQFQNGHLREVPRPGPHVYGHQIAQAEEHNRILEVAASTVIPTSKAGQPPTFDGV

SEQ ID NO: 182376 - protein, 59 aa, Zea Mays
MVQEKLAILGHKMRLLRSLPHFPALPLEPPHPLLLPLGPHRVGAGGARARATCPPDCGG

SEQ ID NO: 182377 - protein, 855 aa, Zea Mays
MRLARSGLKLPPRPFCSTTFSATAAVTDVSSADRLLAVLRGCVSAPHLPLGLQIHARAVVSGALSDHNHLALHTRLLGMYVLARRFRDAVAVFSALPRAAAASSLPWNWLIRGFTAAGQHHLAVLFYVKMWSHPAAPSPDAHTLPYVVKSCAALGAMSLGRLVHRTARAIGLANDVYVGSALVKMYADAGLLGNARDAFDGIPERDCVLWNVMMDGCIKAGDVDGAVRLFRNMRASGCEPNFATLACFLSVCATDADLLSGAQLHSLAVKCGLEPEVAVANTLLAMYAKCQCLDDAWRLFELMPQDDLVTWNGMISGCVQNGLFVEAFGLFYDMQRSGARPDSITLVSLLPALTDLNGLKQGKEVHGYIVRNCVNMDVFLVSALVDIYFKCRDVRMAQNLYDAARAIDVVIGSTMISGYVLNGMSEEALQMFRYLLEQCIKPNAVTIASVLPGCASMAALPLGQQIHGYVLRNAYERKCYVESALMDMYAKCGRLDLSHYIFLKMSQKDEVTWNSMISSFSQNGKPQEALDLFRQMCMEGIKYNNITISAALSACASLPAIYYGKEIHGVTIKGPIKADIFAESALIDMYAKCGNLELALRVFEFMPDKNEVSWNSIISAYGAHGLVKESVSLLHGMQEEGYKPDHVTFLALISACAHAGLVEEGVQLFQCMTKKYLIAPRMEHFACMVDLYSRSGKLDKAIQFIADMPFKPDAGIWGALLHACRVHRNVELADIASQELFKLDPANSGYYVLMSNINAVAGRWDGVSKVRRLMKDNKILKIPGYSWVDVNNSSHLFVASDKSHPESEDIYTSLKTLLQELREEGYVPRPDLCHPMHPDNNTQVEFKKFWQYDLS

SEQ ID NO: 182378 - protein, 847 aa, Zea Mays
MRLARSGLKLPPRPFCSTTFSATAAVTDVSSADRLLAVLRGCVSAPHLPLGLQIHARAVVSGALSDHNHLALHTRLLGMYVLARRFRDAVAVFSALPRAAAASSLPWNWLIRGFTAAGQHHLAVLFYVKMWSHPAAPSPDAHTLPYVVKSCAALGAMSLGRLVHRTARAIGLANDVYVGSALVKMYADAGLLGNARDAFDGIPERDCVLWNVMMDGCIKAGDVDGAVRLFRNMRASGCEPNFATLACFLSVCATDADLLSGAQLHSLAVKCGLEPEVAVANTLLAMYAKCQCLDDAWRLFELMPQDDLVTWNGMISGCVQNGLFVEAFGLFYDMQRSGARPDSITLVSLLPALTDLNGLKQGKEVHGYIVRNCVNMDVFLVSALVDIYFKCRDVRMAQNLYDAARAIDVVIGSTMISGYVLNGMSEEALQMFRYLLEQCIKPNAVTIASVLPGCASMAALPLGQQIHGYVLRNAYERKCYVESALMDMYAKCGRLDLSHYIFLKMSQKDEVTWNSMISSFSQNGKPQEALDLFRQMCMEGIKYNNITISAALSACASLPAIYYGKEIHGVTIKGPIKADIFAESALIDMYAKCGNLELALRVFEFMPDKNEVSWNSIISAYGAHGLVKESVSLLHGMQEEGYKPDHVTFLALISACAHAGLVEEGVQLFQCMTKKYLIAPRMEHFACMVDLYSRSGKLDKAIQFIADMPFKPDAGIWGALLHACRVHRNVELADIASQELFKLDPANSGYYVLMSNINAVAGRWDGVSKVRRLMKDNKILKIPGYSWVDVNNSSHLFVASDKSHPESEDIYTSLKTLLQELREEGYVPRPDLCHPMHPDNNTQVLAI

SEQ ID NO: 182379 - protein, 299 aa, Zea Mays
MGTLLISKIREEYPDRMMLTFSVFPSPKVSDTVVEPYNATLSVHQLVENADECMVLDNEALYDICFRTLKLSTPSFGDLNHLISATMSGVTCCLRFPGQLNSDLRKLAVNLIPFPRLHFFMVGFAPLTSRGSQQYRALTVPELTQQMWDAKNMMCAADPRHGRYLTASAMFRGKMSTKEVDEQMLNVQNKNSSYFVEWIPNNVKSSVCDIPPRGLKMAGTFVGNSTSIQEMFRRVSEQFTAMFRRKAFLHWYTGEGMDEMEFTEAESNMNDLVAEYQQYQDATADEEYEDEEEEENVAE

SEQ ID NO: 182380 - protein, 357 aa, Zea Mays
MDTVSEAAMAAAMASLGAAAVVHRNTEPHAQAAIVRAAKSRRLPFVSSVPFFSPSSAPTLNGFAGSDYALVTERGDSLSRLVGVAVAADAVSRDVVDLITVKDVERIRSYPKLGKPSLGVDGKFVVAASIGTREDGKGRLERLVKAGANAIVIDSSQGNSIYQLDMIKFAKKMYPEVDFIGGNAVTIAQAQNLIQAGADGLRVGMGSGSICTTQEVCAVGRGQATSVYKVSSYANDHNVPVIADGGISNSGHIVKALSLGASTVMMGSFLAGSYEAPGTYEYKDGRRVKKYRDMGSLEAMTKGSDVKYLGDTFKLKVAHGVVGAVADKGSVLRFIPYTMQAVGQGLAQILCGQLMIF

SEQ ID NO: 182381 - protein, 947 aa, Zea Mays
MAKVPDLGSDFAQKLLRDLRRRRERLGFDSTAAAPRARDAYSNAQKPPQVQKPQQQAAPRPRVATRSEAQTSVRQGSSSSSIARPGTPRRHDAPAIADSHATVPLQGGRGGKQTAPAANAGGVDVQMALALALSNSGKLQNVHLVARQGGSGGSAFFGEPCRMASQARRLLAPGAHVGKVAIGVQNLNDILVAYSSGGAAGARRGSVEIGKQLLRGAMDLEESLNMLMMLQDATDYMEMGSSGNDGKVLLLEGTESWKRSAPRSTSSASARLVEIVDDDSGTEQADDAKSSSDTFMQIVPHGMSQSYRRNHISPSQLAGAATNCKSNASSGEKDGSKVRMPGLIAKLMGLENLPSAKTAAERKETERFVKPEAVPRKSTAATVMAGTLPIRIIASERMPSRGQLKNFQTREWNISLTKSEEPVLSSRFSHLKVDKQTRQTMRQMLSKQEGTERRASVNQVADEKIVHQDTKLAEDSNQQKTTVSAGRKMSFLQRFRKTGKNKPATEEKVTVEENKQKLGKKQTTSTKQRDSEVKPRKTREKFNKENLANPGNKTLGNNGKTAKTDQTRRQAQSKPSDKQVMEKKVQSYRRMQSETAIQNLEQKRPLKPEPAHSNTKEKLQSVTPTEPQNGEGTKVDDTRSQKPSDNTPGDDGVCEQSAAEMEDSGTKALPYQSEKELTEETIDPITAAQATPESIAETNDDSTVSEAIQTPETFPEEEQQQQMKEVNDESTNGLDHLMNPSNPNDLRNHNMDVVSCDSFTENQLLLAEMLLKDPYLLETTKAITGFHVPASAAQVNTGKWLDEGNRVLSDIGREVIRRKGKRMEAMVDVSATRAANLKLRTLDDLVRELDSDIQSLHVPRKIQQRGDDHSTAENLRMVLRYDMESTHSDANSVWDFGWNRAWDLPVEKNEVVRDLEKNILGGIITDVARELIDVSMRQRHGPWVLCL

SEQ ID NO: 182382 - protein, 947 aa, Zea Mays
MAKVPDLGSDFAQKLLRDLRRRRERLGFDSTAAAPRARDAYSNAQKPPQVQKPQQQAAPRPRVATRSEAQTSHRQGSSSSSIARPGTPRRHDAPAIADSHATVPLQGGRGGKQTAPAANAGGVDVQMALALALSNSGKLQNVHLVARQGGSGGSAFFGEPCRMASQARRLLAPGAHVGKVAIGVQNLNDILVAYSSGGAAGARRGSVEIGKQLLRGAMDLEESLNMLMMLQDATDYMEMGSSGNDGKVLLLEGTESWKRSAPRSTSSASARLVEIVDDDSGTEQADDAKSSSDTFMQIVPHGMSQSYRRNHISPSQLAGAATNCKSNASSGEKDGSKVRMPGLIAKLMGLENLPSAKTAAERKETERFVKPEAVPRKSTAATVMAGTLPIRIIASERMPSRGQLKNFQTREWNISLTKSEEPVLSSRFSHLKVDKQTRQTMRQMLSKQEGTERRASVNQVADEKIVHQDTKLAEDSNQQKTTVSAGRKMSFLQRFRKTGKNKPATEEKVTVEENKQKLGKKQTTSTKQRDSEVKPRKTREKFNKENLANPGNKTLGNNGKTAKTDQTRRQAQSKPSDKQVMEKKVQSYRRMQSETAIQNLEQKRPLKPEPAHSNTKEKLQSVTPTEPQNGEGTKVDDTRSQKPSDNTPGDDGVCEQSAAEMEDSGTKALPYQSEKELTEETIDPITAAQATPESIAETNDDSTVSEAIQTPETFPEEEQQQQMKEVNDESTNGLDHLMNPSNPNDLRNHNMDVVSCDSFTENQLLLAEMLLKDPYLLETTKAITGFHVPASAAQVNTGKWLDEGNRVLSDIGREVIRRKGKRMEAMVDVSATRAANLKLRTLDDLVRELDSDIQSLHVPRKIQQRGDDHSTAENLRMVLRYDMESTHSDANSVWDFGWNRAWDLPVEKNEVVRDLEKNILGGIITDVARELIDVSMRQRHGPWVLCL

SEQ ID NO: 182383 - protein, 814 aa, Zea Mays
MAKVPDLGSDFAQKLLRDLRRRRERLGFDSTAAAPRARDAYSNAQKPPQVQKPQQQAAPRPRVATRSEAQTSVIHRQGSSSSSIARPGTPRRHDAPAIADSHATVPLQGGRGGKQTAPAANAGGVDVQMALALALSNSGKLQNVHLVARQGGSGGSAFFGEPCRMASQARRLLAPGAHVGKVAIGVQNLNDILVAYSSGGAAGARRGSVEIGKQLLRGAMDLEESLNMLMMLQDATDYMEMGSSGNDGKVLLLEGTESWKRSAPRSTSSASARLVEIVDDDSGTEQADDAKSSSDTFMQIVPHGMSQSYRRNHISPSQLAGAATNCKSNASSGEKDGSKVRMPGLIAKLMGLENLPSAKTAAERKETERFVKPEAVPRKSTAATVMAGTLPIRIIASERMPSRGQLKNFQTREWNISLTKSEEPVLSSRFSHLKVDKQTRQTMRQMLSKQEGTERRASVNQVADEKIVHQDTKLAEDSNQQKTTVSAGRKMSFLQRFRKTGKNKPATEEKVTVEENKQKLGKKQTTSTKQRDSEVKPRKTREKFNKENLANPGNKTLGNNGKTAKTDQTRRQAQSKPSDKQVMEKKVQSYRRMQSETAIQNLEQKRPLKPEPAHSNTKEKLQSVTPTEPQNGEGTKVDDTRSQKPSDNTPGDDGVCEQSAAEMEDSGTKALPYQSEKELTEETIDPITAAQATPESIAETNDDSTVSEAIQTPETFPEEEQQQQMKEVNDESTNGLDHLMNPSNPNDLRNHNMDVVSCDSFTENQLLLAEMLLKDPYLLETTKAITGFHVPASAAQKERQANGGDGGCQRDTCR

SEQ ID NO: 182384 - protein, 53 aa, Zea Mays
MEEPSLSTIMEDRFSDRGSQISSSQQSQSPSDHHSQAISPCRTVVPASLHAKT

SEQ ID NO: 182385 - protein, 183 aa, Zea Mays
MLSSYAPVISSAKAFHEQLSVAEITSSAFEPASMMVKCDPRHGKYMACCLMYRGDVVPKDVNAAVATIKTKRTIQFVDWCPTGFKCGINYQAPTVVPGADLAKVQRAVCMISNSTSVVEVFSRINSKFDLMYAKRAFVHWYVGEGMEEGEFSEAREDLAALEKDYEEVAAEGGSDDGDEEEEY

SEQ ID NO: 182386 - protein, 351 aa, Zea Mays
MRCALARTASSSTLSSSSVARRMPLTISPVATTQGFLVFNAVGGGTGSGLGSLLLERLSVEYGKKSKLGFTVYPSPQVSTSVVEPYNSVLSTHSLLEHTDVSILLDNEAIYDICRRSLDIERPNYSNLNRLVSQVISSLTASLRFDGALNVDVNEFQTNLVPYPRIHFMLSSYAPVISSAKAFHEQLSVAEITSSAFEPASMMVKCDPRHGKYMACCLMYRGDVVPKDVNAAVATIKTKRTIQFVDWCPTGFKCGINYQAPTVVPGADLAKVQRAVCMISNSTSVVEVFSRINSKFDLMYAKRAFVHWYVGEGMEEGEFSEAREDLAALEKDYEEVAAEGGSDDGDEEEEY

SEQ ID NO: 182387 - protein, 419 aa, Zea Mays
MRECISVHIGQAGIQVGNACWELYCLEHGIQPDGQVPGDKTAGHHDDAFSTFFSQTGAGKHVPRAIFVDLEPTVIDEVRTGTYRQLFHPEQLISGKEDAANNFARGHYTIGKEIVDLCLDRIRKLADNCTGLQGFLVFNAVGGGTGSGLGSLLLERLSVEYGKKSKLGFTVYPSPQVSTSVVEPYNSVLSTHSLLEHTDVSILLDNEAIYDICRRSLDIERPNYSNLNRLVSQVISSLTASLRFDGALNVDVNEFQTNLVPYPRIHFMLSSYAPVISSAKAFHEQLSVAEITSSAFEPASMMVKCDPRHGKYMACCLMYRGDVVPKDVNAAVATIKTKRTIQFVDWCPTGFKCGINYQAPTVVPGADLAKRAFVHWYVGEGMEEGEFSEAREDLAALEKDYEEVAAEGGSDDGDEEEEY

SEQ ID NO: 182388 - protein, 99 aa, Zea Mays
MPVSLLTGKSPRLLTSASGTLQKLRSTSVCEWAYEQEKRMGGAALVSLSGGKVTKDWETAQHVLGERESRARSDGKPTILSMFACPSACLWFFAATSFG

SEQ ID NO: 182389 - protein, 222 aa, Zea Mays
MATDRPHSPFPHLQPPACLHDSLDLLPYEVKPDQQERHALEQEEVEVDTLLRQQAAGGRGQEQHRQRELLLVYPVVLLLLLLLRRRGGGGQRDEVAGDLGRAGARARLLGHYPLQVRDDEGEGPRRRQHVQQGHEGRDVAHHPVRELRLRHEHRRREDDAEEREGVQGQYELPEQEEEEDQVAFLPERHLQPSQIKANRKLLLQVCKVSYVHNNGKKYNRGS

SEQ ID NO: 182390 - protein, 301 aa, Zea Mays
MAATMDGAADGSSGVPVQQQHHGGLFYPPVISSSLAPFCYALGGGQGGLATSAADGGEEFYAGLSSMPLKSDGSLCIMEALRRSEQERHGVAVSSVSPKLEDFLGASASTAMALSLDSPSFYYGGAHGHGGYLQPLQCSMVPVSLGDDVYGGCHAQMVDEQSAAAMAASWFSARGGGGCYDVNGAGAIEPSQGHPHALDLSMSSGTGSQSSSVTVKKRGGGGGGGGGGQKRPTVHRKSIDTFGQRTSQYRGVTSISRRHHQHGRWQARIGRVSGNKDLYLGTFRAPLARRRRRRRRTTWRP

SEQ ID NO: 182391 - protein, 423 aa, Zea Mays
MAATMDGAADGSSGVPVQQQHHGGLFYPPVISSSLAPFCYALGGGQGGLATSAADGGEEFYAGLSSMPLKSDGSLCIMEALRRSEQERHGVAVSSVSPKLEDFLGASASTAMALSLDSPSFYYGGAHGHGGYLQPLQCSMVPVSLGDDVYGGCHAQMVDEQSAAAMAASWFSARGGGGCYDVNGAGAIEPSQGHPHALDLSMSSGTGSQSSSVTVKKRGGGGGGGGGGQKRPTVHRKSIDTFGQRTSQYRGVTRYPSYSPRSRTGRTPRPSLSRTSRSLAACVVSTVLKAGIGGRGGMRRTSGTTAAGRKARPGKAGKVEDYREQLEEMKNMTRQEYVAHLRRKSSGFSRGASIYRGVTRHHQHGRWQARIGRVSGNKDLYLGTFRAPLVGLIFQLRFWLMQKLCQTPLFQMTSPVKCFSKMN

SEQ ID NO: 182392 - protein, 295 aa, Zea Mays
MGRTGSTSSPPKARSGSTPASGTWSWLGRWSSSLLATRTVASSSSSYLRLKRIFVADGIALKVIGAQKVSVTHPHSIGLLSNGSLLASNNDLSQIWPLSYSTCAPLLQVGIVGSVVIVVHQTSVSGGHVKTFLRSHDTIELLSDKYKVHISNRLISEFLFSSISPRLIKLEKILKTWFSKRNQENSSVHFIEAKVTSIPLVKFRLEFERDVTEDDPIWEDVPEWKTRPMVQRVPVDIIARVEDDDRLKAISVKKVRRQFPVVDTTTWGSLTSNISFTKFLSFILPPEPLSLDVKW

SEQ ID NO: 182393 - protein, 471 aa, Zea Mays
MAVSLAPALLFAICTYATWKEIAFAAPNREIRVRYGRDRHQRTLAVVSGAVLAGGALAYARSSQSRRRRRRPEASRSSGAGALAANGDGFSRNGAGGGLAAADQRRSGLKSLHFLAAILLKKIGPSGTRYLLCLVLTLIVLVFTAAFIISSPAPLAMTPLQRFRGLRDPSVTLYADDGGELHTTSSVRALFHLFLPPCRNHGTERKDKGSDEVVLKAMGRAINKIVMVVELIKVLLKTLVLANITGDLIVDCVRMSAPNGWGQNLLVGMHSMNNALARRGSPEQLDFYRTRLGSQGLMSCFIDGEPGHHGVHMAGPNHLADKRSNKYSIIFNNREKESLVVFIDSEDEITFSLHLNEGSANKFAHVDAINTPLALQPCCFLKERLLMQQEMSDTTRQHQTVRENRGCFFNATDEKELLNAIFKPAVEYPHADNLAGKETRQRLSTRMSLFNVAEATVTRSWKKTRGSSTLQ

SEQ ID NO: 182394 - protein, 439 aa, Zea Mays
MAWRYLKTSMLGAAAASSNDDDDLVAAAAAVVIQELGRKRRWGGSVPGHRTYRRDRLAAHRQLHMDYFVDRPLYNNEMFRRRFRMRPELFHDIVRKIAAKKKYFQLSRDAAGVLSFSPDHKCAVGIKMLAYGGPADSMDEYLKMGESTVLETLKEFALAVVDVFGDEFLRPPTSAEIERILKRNEERGFPGMIGSIDCMHWEWANCPTALAGMYLGHKGKPTMILEAVATEDLRIWHANFGFPGSHNDINVLHRSNVFDDLANGIAPPVEFNVNGNTYSLGYYLADGIYPDWATLVKSISGPITNMEKIFAEQQEACRKEVERSFGVLQAKWKILYNPSRLWKPEVLNTIMRACVILHNMIIEDERDADLPNIHTSEWPRAANPTIIQDRDIPCIEEFVDAQAVIQDKETNHQLQKDLMEHMWNLYGTKSGPFVPKPIA

SEQ ID NO: 182395 - protein, 254 aa, Zea Mays
MVSDLELVERLQEVLRSSDLNTTTTAALRRRLEEDFGADLSHKKAFIREQVDLFLAEVAAKAEPEEPKEEEELEDAPVPKAEEAEEGEGVEEEGEGEEGGEEEEEEEEEEVDSSSARKKQRGNDGKKRGGGFTKLCSLSPALQEFVGASELARTEVVKKLWAYIRENNLQDQNNRRKILPDERLKKIFNVNSIDMFQMNKALTKHIWPLNSEGPVSPDRSTPKEKPQKKDRNEEAKGWLFRSWIWSSCAPSTFG

SEQ ID NO: 182396 - protein, 69 aa, Zea Mays
MCMDGAVPVKRVWLGIAARLGLRRKTVTPKKIVDDREEAHSTQVYHDMHIPRVQLEPLESSACEDEEST

SEQ ID NO: 182397 - protein, 121 aa, Zea Mays
MVMAGLFGMVVLPALPAILAPNRRESCSPNLRWRRLHCRWRCRVCDGVCRWEGMVCSGSGQVVSLSLPSYRLTGTLSTAIGGPLVPAYAEPELQSVPRGGPSDHRSPCASAGARPELQRLH

SEQ ID NO: 182398 - protein, 487 aa, Zea Mays
MALRAVELRRFLLRRIGGGEAALPPLAWRGRPASTSAPADDELAGKSAYEVLGVGETSSSAEIKASFHRLAKETHPDVAAAAGSRRFLQILAAYEILSDSQRRAHYDSYLRSQRRVVGKHPRPSQFVYPSGSGSGIVVPRESNVVEWLKWYRLTIDDIVTKKRVATGSGYFERLESELYTAIHAAYYGPDVDSMDVLPDCFEAEERSAYETSELLHLVSGRDLFGIVTVTDSVKELSDVCREKLVPSGCRSSEFTHVVSRNANKNSISMNPVDMNKQEMRYENDVPSSDSFKDIELQICGKLVATATRSPNCDCIDKSDLEEDHIHVYLVPNANISDLTHGKLLLGTITGLATTGEEGSCCVYDGHNIKTHIIMKHRTLMVKHMHWYQVGDTVSPCECRCSRARLPPSRYWLFEPRCYMHDTGGWYIETYGRDKKGRTIPSQRQWDGSNEHSEKSLDLEDAGRRRWNVTSLLQWSLSHLRQLFKKSC

SEQ ID NO: 182399 - protein, 381 aa, Zea Mays
MALRAVELRRFLLRRIGGGEAALPPLAWRGRPASTSAPADDELAGKSAYEVLGVGETSSSAEIKASFHRLAKETHPDVAAAAGSRRFLQILAAYEILSDSQRRAHYDSYLRSQRRVVGKHPRPSQFVYPSGSGSGIVVPRESNVVEWLKWYRLTIDDIVTKKRVATGSGYFERLESELYTAIHAAYYGPDVDSMDVLPDCFEAEERSAYETSELLHLVSGRDLFGIVTVTDSVKELSDVCREKLVPSGCRSSEFTHVVSRNANKNSISMNPVDMNKQEMRYENDVPSSDSFKDIELQICGKLVATATRSPNCDCIDKSDLEEDHIHVYLVPNANISDLTHGKLLLGTITGLATTGEEGSCCVYDGHNIKTHIIMKHRTLMV

SEQ ID NO: 182400 - protein, 329 aa, Zea Mays
MQAAAAVVVRHPRLFPPSPGRSAQHRRAPSTVRMALREDGPSVAIVGATGAVGQEFLRVITDRDFPYRGLRLLASERSAGKRLAFEDREYTVQDLAAPGAFDGVDIALFSAGGSVSRKYGPAAVASGAVVVDNSSAFRMEPEVPLVIPEVNPEAMANVRLGQGAIVANPNCSTIICLMAATPLHRHAKVLRMVVSTYQAASGAGAAAMEELKLQTQEVLEGKAPTCNIFKQQYAFNIFSHNAPVLENGYNEEEMKMVKETRKIWNDKEVKVTATCIRVPVMRAHAESVNLQFEKPLDEDTAREILRAAPGVTIIDDRASNRFPTPLETK

SEQ ID NO: 182401 - protein, 195 aa, Zea Mays
MNWATKVLRMVVSTYQAASGAGAAAMEELKLQTQEVLEGKAPTCNIFKQQYAFNIFSHNAPVLENGYNEEEMKMVKETRKIWNDKEVKVTATCIRVPVMRAHAESVNLQFEKPLDEDTAREILRAAPGVTIIDDRASNRFPTPLEVSDKDDVAVGRIRQDLSLDGNRGLDIFVCGDQIRKGAALNAVQIAEMLLK

SEQ ID NO: 182402 - protein, 192 aa, Zea Mays
MLETVLRVGTLGEDDTGEESPKNLKIPSRKPSIVCENCLYSLEGNGRMRAFHIMDPKGVLDTLLIFHEKRQGSELAQSFKHYSVCTKSASSDRISTVLGRWEGHSVTKRSGVYGATLAEADTAVVLKMGSNGQLIQANCWKGPPNLNRDFKNRSGAKGRRISYMQPVWSSRCLFYFFFLCTGGSHGEAESTS

SEQ ID NO: 182403 - protein, 196 aa, Zea Mays
MLETVLRVGTLGEDDTGEESPKNLKIPSRKPSIRQGSELAQSFKHYSVCTKSASSDRISTVLGRWEGHSVTKRSGVYGATLAEADTAVVLKMGSNGQLIQDTLSTKIGTGTTTTVNWTGSANENLLQFDGGYEITLLPGGMYMGYPSDISKSISQLDSFHLEFCWMESPGKRQRLVRTYDAAGLAVSSTYFFETKV

SEQ ID NO: 182404 - protein, 268 aa, Zea Mays
MGGIQDQRDEHIHCGQISAGFFPEEKAFALRYQTAGMLETVLRVGTLGEDDTGEESPKNLKIPSRKPSIVCENCLYSLEGNGRMRAFHIMDPKGVLDTLLIFHEKRQGSELAQSFKHYSVCTKSASSDRISTVLGRWEGHSVTKRSGVYGATLAEADTAVVLKMGSNGQLIQDTLSTKIGTGTTTTVNWTGSANENLLQFDGGYEITLLPGGMYMGYPSDISKSISQLDSFHLEFCWMESPGKRQRLVRTYDAAGLAVSSTYFFETKV

SEQ ID NO: 182405 - protein, 151 aa, Zea Mays
MLETVLRVGTLGEDDTGEESPKNLKIPSRKPSIVCENCLYSLEGNGRMRAFHIMDPKGVLDTLLIFHEKRQGSELAQSFKHYSVCTKSASSDRISTVLGRWEGHSVTKRSGVYGATLAEADTAVVLKMGSNGQLIQAVLAIRAEVRRRKAW

SEQ ID NO: 182406 - protein, 223 aa, Zea Mays
MAAAMDVDEAGGEERRPSEKELFRAAESGDAAAFASLAPADLSLRNEDGRSLLHVAAAAGHPQVVLALAQCGGDAAASVLNAQDEEGWAPIHSAASSGNSQIVDILLERGRLNIAEKLIAHGANVNKKDKFGCTPLHRAASTGNAELCEFLIEEGAEVDAVDKTGQTPLTHAVICENKGAALLLIRHGADVDVEDKEGYTALGRASNSFRPVLIDAARAMLEG

SEQ ID NO: 182407 - protein, 413 aa, Zea Mays
MPPLAFLRRYLPARLLARACDGGVRGSPGVARDEEAGGSGGLSGRSAGAPSGECYACTQPGVPAFHSTACDQVHSPDWDADAGSSLVPVQAQQQAQPAAAAAQHAARWLFGPVLDPRSKRVQRWNRWILLGRAAALALDPLFFYALSIGRAGRPCLYLDAGLAAAVTALRTCADVAHLAHVLLQFRLAYVSRESLVVGCGKLVWDARAIAAHYARSVKGLCFDLFVILPIPQVIFWLVIPKLIREERVRLIMTILLLMFIFQFLPKVYHSIHIMRKMQKVTGYIFGSIWWGFGLNLFAYFIASHIAGGCWYVLAIQRIASCLQEECKKNNSCDLISLACSKEICFHPPWSSNVNGFACDTNMTSFSQRNVSTCLSGKGSFAYGIYLGALPVISSNSLAVKILYPIFWGLMTLR

SEQ ID NO: 182408 - protein, 332 aa, Zea Mays
MYFFMLHIHKLVQFLELLGSTFGNDLAPTSNGIEVIFSIINVLSGLMLFTLLIGNIQVFLHAVLARKRKMQLRFRDMEWWMRRRQLPSRLRQRVRKYERERWAAVTGDEEMEMIKDLPEGLRRDIKRYLCLELVKQVPLFHGMDDLILDNICDRLRPLVFSSGEKVIREGDPVQRMVFILQGKLRSTQPLTKGVVATCMLGAGNFLGDELLSWCLRRPFVDRLPASSATFECVEAAQAFCLDAPDLRFITEHFRYKFANEKLRRTARYYSSNWRTWAAVNIQLAWRRYRARASTDLAAMAAPPLAGGPDDGDRRLRHYAAMFMSLRPHDHLE

SEQ ID NO: 182409 - protein, 435 aa, Zea Mays
MVGIWFKSICLFHCFSCGCWYVLAIQRIASCLQEECKKNNSCDLISLACSKEICFHPPWSSNVNGFACDTNMTSFSQRNVSTCLSGKGSFAYGIYLGALPVISSNSLAVKILYPIFWGLMTLSTFGNDLAPTSNGIEVIFSIINVLSGLMLFTLLIGNIQVFLHAVLARKRKMQLRFRDMEWWMRRRQLPSRLRQRVRKYERERWAAVTGDEEMEMIKDLPEGLRRDIKRYLCLELVKQVPLFHGMDDLILDNICDRLRPLVFSSGEKVIREGDPVQRMVFILQGKLRSTQPLTKGVVATCMLGAGNFLGDELLSWCLRRPFVDRLPASSATFECVEAAQAFCLDAPDLRFITEHFRYKFANEKLRRTARYYSSNWRTWAAVNIQLAWRRYRARASTDLAAMAAPPLAGGPDDGDRRLRHYAAMFMSLRPHDHLE

SEQ ID NO: 182410 - protein, 399 aa, Zea Mays
MTILLLMFIFQFLPKVYHSIHIMRKMQKVTGYIFGSIWWGFGLNLFAYFIASHIAGGCWYVLAIQRIASCLQEECKKNNSCDLISLACSKEICFHPPWSSNVNGFACDTNMTSFSQRNVSTCLSGKGSFAYGIYLGALPVISSNSLAVKILYPIFWGLMTLSTFGNDLAPTSNGIEVIFSIINVLSGLMLFTLLIGNIQVFLHAVLARKRKMQLRFRDMEWWMRRRQLPSRLRQRVRKYERERWAAVTGDEEMEMIKDLPEGLRRDIKRYLCLELVKQVPLFHGMDDLILDNICDRLRPLVFSSGEKVIREGDPVQRMVFILQGKLRSTQPLTKGVVATCMLGAGNFLGVLPRRAGPAVHHRALPLQVRQREAQAHGAVLLVQLADVGRRQHPARVAQV

SEQ ID NO: 182411 - protein, 722 aa, Zea Mays
MPPLAFLRRYLPARNRVSVIDPELRLSVCFPEQRLLARACDGGVRGSPGVARDEEAGGSGGLSGRSAGAPSGECYACTQPGVPAFHSTACDQVHSPDWDADAGSSLVPVQAQQQAQPAAAAAQHAARWLFGPVLDPRSKRVQRWNRWILLGRAAALALDPLFFYALSIGRAGRPCLYLDAGLAAAVTALRTCADVAHLAHVLLQFRLAYVSRESLVVGCGKLVWDARAIAAHYARSVKGLCFDLFVILPIPQVIFWLVIPKLIREERVRLIMTILLLMFIFQFLPKVYHSIHIMRKMQKVTGYIFGSIWWGFGLNLFAYFIASHIAGGCWYVLAIQRIASCLQEECKKNNSCDLISLACSKEICFHPPWSSNVNGFACDTNMTSFSQRNVSTCLSGKGSFAYGIYLGALPVISSNSLAVKILYPIFWGLMTLSTFGNDLAPTSNGIEVFLHAVLARKRKMQLRFRDMEWWMRRRQLPSRLRQRVRKYERERWAAVTGDEEMEMIKDLPEGLRRDIKRYLCLELVKQVPLFHGMDDLILDNICDRLRPLVFSSGEKVIREGDPVQRMVFILQGKLRSTQPLTKGVVATCMLGAGNFLGDELLSWCLRRPFVDRLPASSATFECVEAAQAFCLDAPDLRFITEHFRYKFANEKLRRTARYYSSNWRTWAAVNIQLAWRRYRARASTDLAAMAAPPLAGGPDDGDRRLRHYAAMFMSLRPHDHLE

SEQ ID NO: 182412 - protein, 711 aa, Zea Mays
MPPLAFLRRYLPARNRVSVIDPELRLSVCFPEQRLLARACDGGVRGSPGVARDEEAGGSGGLSGRSAGAPSGECYACTQPGVPAFHSTACDQVHSPDWDADAGSSLVPVQAQQQAQPAAAAAQHAARWLFGPVLDPRSKRVQRWNRWILLGRAAALALDPLFFYALSIGRAGRPCLYLDAGLAAAVTALRTCADVAHLAHVLLQFRLAYVSRESLVVGCGKLVWDARAIAAHYARSVKGLCFDLFVILPIPQVYHSIHIMRKMQKVTGYIFGSIWWGFGLNLFAYFIASHIAGGCWYVLAIQRIASCLQEECKKNNSCDLISLACSKEICFHPPWSSNVNGFACDTNMTSFSQRNVSTCLSGKGSFAYGIYLGALPVISSNSLAVKILYPIFWGLMTLSTFGNDLAPTSNGIEVIFSIINVLSGLMLFTLLIGNIQVFLHAVLARKRKMQLRFRDMEWWMRRRQLPSRLRQRVRKYERERWAAVTGDEEMEMIKDLPEGLRRDIKRYLCLELVKQVPLFHGMDDLILDNICDRLRPLVFSSGEKVIREGDPVQRMVFILQGKLRSTQPLTKGVVATCMLGAGNFLGDELLSWCLRRPFVDRLPASSATFECVEAAQAFCLDAPDLRFITEHFRYKFANEKLRRTARYYSSNWRTWAAVNIQLAWRRYRARASTDLAAMAAPPLAGGPDDGDRRLRHYAAMFMSLRPHDHLE

SEQ ID NO: 182413 - protein, 399 aa, Zea Mays
MPPLAFLRRYLPARNRVSVIDPELRLSVCFPEQRLLARACDGGVRGSPGVARDEEAGGSGGLSGRSAGAPSGECYACTQPGVPAFHSTACDQVHSPDWDADAGSSLVPVQAQQQAQPAAAAAQHAARWLFGPVLDPRSKRVQRWNRWILLGRAAALALDPLFFYALSIGRAGRPCLYLDAGLAAAVTALRTCADVAHLAHVLLQFRLAYVSRESLVVGCGKLVWDARAIAAHYARSVKGLCFDLFVILPIPQVYHSIHIMRKMQKVTGYIFGSIWWGFGLNLFAYFIASHIAGGCWYVLAIQRIASCLQEECKKNNSCDLISLACSKEICFHPPWSSNVNGFACDTNMTSFSQRNVSTCLSGKGSFAYGIYLGALPVISSNSLAVKILYPIFWGLMTLR

SEQ ID NO: 182414 - protein, 421 aa, Zea Mays
MGKNMRIKTAPKANRVPLLGDGETSRALSDLEEGSDVQPANVGFCRVIKLAKHDAGKLVLATAALLVASLSNLLVPKYGGKIIDIVSRDVRRPEDKAQALEDVKGTILYIVTIVLVGSVCTALRAWLFNSASERVVARLRKDLFSHLINQEIAFFDVTRTGELLSRLSEDTQIIKNAATTNLSEALRNVTTTAIGLGFMFSTSWKLTFAVRRFGRFLRELSHQTQAAAAVASSIAEESFGAIRTVRSFAQEYHEISRYGEKVEETLKLGLKQAKVVGLFSGGLNAASTMSVVIVVIYGANLTINGYMTTGSLTSFILYSLTVGSSVSALSGLYTTVMKASGASRRVFQLLDRVSSMTNSGDKCPINEKDGEVELDDVWFAYPSRPSHMILKGITLKLAPGSKVALVGPSGGEEEGEGQGGL

SEQ ID NO: 182415 - protein, 467 aa, Zea Mays
MDPPPATRAASRRRDRRRRLRQRQRAAAATKTKVGAAVLAVEPQSAAVTTPVASIGPAATPASRGRKRRRPRRRRGRNAGAAGVSDEPPAASPVPVPDAPQASCNLEAMASRLSDNVLQTMTEKIMRSDKTSKRNFQHGNEALKDSVAEGAACSSLARREHSTRENGASRSKILKRSNVKSPVDSCTEQGTDMDYHKMKSADLLGNLEEVYQERTCLGYCSSQKLEEYWENENVSSLNSSSLQAGKKRKKRRGRKKHNRRKKANLQDSPASTAADNSGLVTFSENCTSALKLEEQRKKQDQNKTSMTNLLLINNAKRSEPFDVNLEGAIEKSCELAKNSFDNTLENRYELAKNSFDNTLENRYELAKSNSDYINMVRNGLQEQDLACLSNSHNVNYLKPSHLAEEYTEKLKHVFSLGKSLRPPKKKLLILDLNGLLVDINEDYHNAHMADAKYSEGLTAMIFSTFVL

SEQ ID NO: 182416 - protein, 450 aa, Zea Mays
MFSTSWKLTLLALVIVPVISVAVRRFGRFLRELSHQTQAAAAVASSIAEESFGAIRTVRSFAQEYHEISRYGEKVEETLKLGLKQAKVVGLFSGGLNAASTMSVVIVVIYGANLTINGYMTTGSLTSFILYSLTVGSSVSALSGLYTTVMKASGASRRVFQLLDRVSSMTNSGDKCPINEKDGEVELDDVWFAYPSRPSHMILKGITLKLAPGSKVALVGPSGGGKTTIANLIERFYDPLKGRILLNGVPLVEISHQYLHSKVSIVSQEPTLFNCTIEENIAYGLEGTTNFADVESAAKMANAHNFICGFPDQYKTVVGERGIRLSGGQKQRIAIARALLMNPRVLLLDEATSALDAESEYLVQDAMDSLMKGRTVLVIAHRLSTVKSADTVAVISDGLIVESGTHDELLDRDGIYTALVKRQLQGPKFEATSSISEASEIEAEPSSNGQ

SEQ ID NO: 182417 - protein, 162 aa, Zea Mays
MAFDFTPRATPPHRVGTLPVFVSSRWCSSLPRGLLPPHGVDLDRRRLKPPRLATATPPAVWIRSWGGRPATARSNGGADLAVFEQFERTIQSVARYVSIHNGLSIVYAWSQGVNHGNAKLHVLLSLFSHLIPNFHFAKISMFIYLFDRPSNAYLVPFGCFKD

SEQ ID NO: 182418 - protein, 166 aa, Zea Mays
MAFDFTPRATPPHRVGTLPVFVSSRWCSSLPRGLLPPHGVDLDRRRLKPPRLATATPPAVWIRSWGGRPATARSNGGADLAVFEQFERTIQSVARYVSIHNGLSIVYAWSQGVNHAIIRHNQPEVWAFCLGNGYAGLKDALGSNDSRLQSSKLYFTCMSPAGMLLQ

SEQ ID NO: 182419 - protein, 89 aa, Zea Mays
MFCSKQPDATEEFDDAGHSKSAKELMQDYFVGELDSDPTPEIPEMEVFRKEQDTGFARKLMDDVVQYWSIPAAVIGISAVVAILYARRK

SEQ ID NO: 182420 - protein, 151 aa, Zea Mays
MAGRDKRRRAAPLEGDEQQLRRRLEEAALLLRRIKGLVRWIVEEVAAGRSPSIVLHRACSYDIPVGTDVLSLLHKDYHTSRLNVLLRVLFVVQQLLQQNKHCSKRDIYYMYPSIFVEVAVVDRAINDICILFKCSRHNLNVVPVVKGYELS

SEQ ID NO: 182421 - protein, 185 aa, Zea Mays
MLLSPFLLTLRQSKMLLVLPTTYLWLRRRQVFFFLHLIISALCTICFSSPFAVFQRLANDKFCERNRCIVITGRGYPDIPTRSNWHMMQTCCVSLIYGGLEFSHLILKNIAFQTAAYFVCHLKIGGKLKAFLLGAIYTGKPQNGGQSWKQCCKRVSSLRLSCFQLLLSPIPGAGGLNGCKVFVGT

SEQ ID NO: 182422 - protein, 321 aa, Zea Mays
MAGRDKRRRAAPLEGDEQQLRRRLEEAALLLRRIKGLVRWIVEEVAAGRSPSIVLHRACSYDIPVGTDVLSLLHKDYHTSRLNVLLRVLFVVQQLLQQNKHCSKRDIYYMYPSIFVEVAVVDRAINDICILFKCSRHNLNVVPVVKGLVMGWIRFMEGEKKVYCITSVNAAFSIPVDIEAIKDVVSVAHYILVVEKETVFQRLANDKFCERNRCIVITQLAHDANLLRVPDIRWLGVFTSDFEEYCLPDCCLLRLSPEDRRKAEGILARCYLHREAPEWRSELEAMLQKGVKFEIEALSANSISFLSHEYIPQKIKQGMHL

SEQ ID NO: 182423 - protein, 168 aa, Zea Mays
MYPSIFVEVAVVDRAINDICILFKCSRHNLNVVPVVKGLVMGWIRFMEGEKKVYCITSVNAAFSIPVDIEAIKDVVSVAHYILVVEKETVFQRLANDKFCERNRCIVITGRGYPDIPTRRFLRYLVELLHLPAYCLVDSDPYGFDILATYKFGSLIHRLKLQVTNPWT

SEQ ID NO: 182424 - protein, 293 aa, Zea Mays
MAGRDKRRRAAPLEGDEQQLRRRLEEAALLLRRIKGLVRWIVEEVAAGRSPSIVLHRYRNYCSSADSASPSPCACSYDIPVGTDVLSLLHKDYHTSRLNVLLRVLFVVQQLLQQNKHCSKRDIYYMYPSIFVEVAVVDRAINDICILFKCSRHNLNVVPVVKGLVMGWIRFMEGEKKVYCITSVNAAFSIPVDIEAIKDVVSVAHYILVVEKETVFQRLANDKFCERNRCIVITGRGYPDIPTRRFLRYLVELLHLPAYCLVDSDPYGFDILATYKFGSLIHRLKLQVTNPWT

SEQ ID NO: 182425 - protein, 920 aa, Zea Mays
MSSPSNNRGTCSRSSSARSKHSARVVAQTPVDAQLHADFEGSQRHFDYSSSVGAANRPSASTSTVSTYLQNMQRGRYIQPFGCLLAVHPDTFALLAYSENAPEMLDLTPHAVPTIDQRDALTIGADVRTLFRSQSSVALHKAATFGEVNLLNPILVHARTSGKPFYAILHRIDVGLVIDLEPFNPADVPVTAAGALKSYKLAAKAISRLQSLPSGNLSLLCDVLVREVSELTGYDRVMAYKFHEDEHGEVISECRRSDLEPYLGLHYPATDIPQASRFLFMKNKMRMICDFSATPVLIIQDGSLAQPVSLCGSTLRASHGCHAQYMANMGSVASLVMSVTINDDEEEDGDTDSDQQPKGRKLWGLVVCHHTSPRFVPFPLRYACEFLLQVFGIQLSKEVELAAQAKERHILRTQTLLCDMLLRDALVGIFTQSPNVMDLVKCDGAALYYQNQVLVLGSTPSESEIKSIATWLQENHDGSTGLSTDSLVEAGYPGAAALREVVCGMVAIKISSKNFIFWFRSHTTKEIKWSGAKHEPFDADDNGRKMHPRSSFKAFLEVVKWRSVPWEDVEMDAIHSLQLILRDSLQGEDANRNNIRSIVKAPSDDMKKLQGLLELRTVTNEMVRLIETATAPVLAVDIAGNINGWNKKAAELTGLPVMEAIGRPLIDLVVADSVEVVKQILDSALQGIEEQNLEIKLKTFHEQECCGPVILMINSCCSRDLSEKVIGVCFVAQDLTRQKMIMDKYTRIQGDYVAIIKNPSELIPPIFMINDLGSCLEWNKAMQKITGMKREDAINKLLIGEVFTLHDYGCRVKDHATLTKLSILMNAVISGQDPEKLLFGFFGTGGKYIESLLTVNKRTNAEGKITGALCFLHVASPELQHALEVQKMSEQAATNSFKELTYIRQELRNPLNGPAEKDFT

SEQ ID NO: 182426 - protein, 54 aa, Zea Mays
MDRLSTSLKFQHLQLPQGRNMKNLSTITDPFGFTFLSSSCRRGPCKTMAGSRII

SEQ ID NO: 182427 - protein, 557 aa, Zea Mays
MGRSRGVLSSGDDDTGHRSKRRRVSSGGDATDSISASIGGAGEGGGKKALYHCNYCNKDISGKIRIKCSKCPDFDLCVECFSVGAEVTPHRSNHPYKVMDNLSFPLICPDWNADEEILLLEGIEMYGLGNWLEVAEHVGTKSKLQCIDHYTSAYMNSPCYPLPDMSHVNGKNRKELLAMAKVQGESKKGTLLLPGELTPKVESQFSPSRVKVEDALGEGPAGRSPSHMAVGANKKASNVGHIKDGATVSKVEDVHVDRSVGVKKPRYSADEGPSLTELSGYNAKRHEFDPEYDNDAEQALAEMEFKETDSETDRELKLRVLRIYLSRLDERKRRKEFILERNLLFPNPLEKDLTSEDRELYHRYKVFMRFLSKEEHEALVRSVIEERKIRRRIQELQECRSAGCRTLAEAKIHIEQKRKKEYELNAQKAKDSSQLNANNKSVQKMNRPMKIESDGNLDPKKGGAGLDSPKTTGPTSVKQWDDWDIVGLPGAELLSASEKLLCCQNRLLPSHYLRMQEVLMQEIFKGSVLKKEDAHVLFKEFHAVSFLWGSLWETLEV

SEQ ID NO: 182428 - protein, 448 aa, Zea Mays
MDEVKILKQIADGDPDDSKCVVKLLDHFKHSGPNGNHVCMVFEFLGDNLLTLIKYTDYRGIPLPMVKEICRHVLIGLDYLHRTLSIIHTDLKPENILLVSTIDPTKDPRKSGVPLVPPSMRTDEPPPKVPAQSGNGGLTKNQKKKIRKKAKRAVAATSEGSSAVASADTDGSDDRGDLGTTNEGSPRQDGAKKRVTRDRRGSKGAKKMMAMKADLKCKLVDFGNACWTYKQFTNDIQTRQYRCPEVILGSKYSTSADMWSFACICFELATGDVLFDPHSGDNFDRDEDHLALMMELLGMMPRKIALGGRYSRDFFNRYGDLRHIRRLRFWPLNKVLMEKYEFTEINANGMADFLVPILDFVPEKRPTAAQLLQHPWLDVGPLRQQPKTRPESARSPGDGVSEKQKKEKEEREAMAVELGNIAIDGASSRMANDPQSSTNKTTATSSKK

SEQ ID NO: 182429 - protein, 399 aa, Zea Mays
MDYLIQQKLSGVDRTLDGGRRGAGEYDRIRASILDEAAIVFSTLSFSGSSIFSRMTRAFDVVIIDEAAQAVEPATLIPLIHGCRQIFLVGDPVQLPATVISQTAQKLGYGTSLFKRFQAAGFPVQMLKIQYRMHPEISTFPSKEFYEGVLQDGEGLSRKRPWHSYSCFGPFCFFDVDGIESQPSGSGSWVNQDEVEFITLLYHQLALRYPELKSSPEVGVISPYRHQVKLLKDSFRSTFGDQSRELIDVSTVDGFQGREKEIVIFSCVRCNKEQKIGFVSDFRRMNVAITRAKSAVLVVGSASTLKQDKHWNNLVESAKERNCLFKVPKPLTAFFAEDNLKTMKVERRPPPELNARVLEEINQEVVRQELMNVDDAADHADAGDDDDADMDADDGGGDD

SEQ ID NO: 182430 - protein, 623 aa, Zea Mays
MREFTAMHSVASLPFKDLILSATEAHKDGDDQSRAWNVPEPLMDYLKVNLNDSQLEAVNAGLSRRSFVLIQGPPGTGKTQTILGLLSAVLHSAPARMQIKGGFDVLKHGPELDIDGKRAHWIKASPWLLGANPRDLIMPVDGDDGFYPTGNELKPEIVSSNRKYRAHVLVCAPSNSALDEIVLRVLKTGIRDENNNTYNPKIVRIGVKALHSVKAVSMDYLIQQKLSGVDRTLDGGRRGAGEYDRIRASILDEAAIVFSTLSFSGSSIFSRMTRAFDVVIIDEAAQAVEPATLIPLIHGCRQIFLVGDPVQLPATVISQTAQKLGYGTSLFKRFQAAGFPVQMLKIQYRMHPEISTFPSKEFYEGVLQDGEGLSRKRPWHSYSCFGPFCFFDVDGIESQPSGSGSWVNQDEVEFITLLYHQLALRYPELKSSPEVGVISPYRHQVKLLKDSFRSTFGDQSRELIDVSTVDGFQGREKEIVIFSCVRCNKEQKIGFVSDFRRMNVAITRAKSAVLKGRPGVVVVGSASTLKQDKHWNNLVESAKERNCLFKVPKPLTAFFAEDNLKTMKVERRPPPELNARVLEEINQEVVRQELMNVDDAADHADAGDDDDADMDADDGGGDD

SEQ ID NO: 182431 - protein, 466 aa, Zea Mays
MAVEKSSSGTSTPSTTSTMDRFQKIVLSWDYLRLIAESKGGKQAKVLQHVKNTYVSVAEYLGVFEPLLFEEVKAQIIQGRSNDEEESGMDWRRGAVGSCTESEGFHKLSVAVEDNFQDNVSENDLLLISKEKFEEGSTPNAYAFALVEQRGGGIHISLRTFVAGEIQNLNVAKPVKSTRLQHFASIIASQNSLLWILKVCSLSTIMREFTAMHSVASLPFKDLILSATEAHKDGDDQSRAWNVPEPLMDYLKVNLNDSQLEAVNAGLSRRSFVLIQGPPGTGKTQTILGLLSAVLHSAPARMQIKGGFDVLKHGPELDIDGKRAHWIKASPWLLGANPRDLIMPVDGDDGFYPTGNELKPEIVSSNRKYRAHVLVCAPSNSALDEIVLRVLKTGIRDENNNTYNPKIVRIGVKALHSVKAVSMDYLIQQKLSGVDRTLDGGRRGAGEYDRIRASILDEAAIDDPCF

SEQ ID NO: 182432 - protein, 345 aa, Zea Mays
MTRAFDVVIIDEAAQAVEPATLIPLIHGCRQIFLVGDPVQLPATVISQTAQKLGYGTSLFKRFQAAGFPVQMLKIQYRMHPEISTFPSKEFYEGVLQDGEGLSRKRPWHSYSCFGPFCFFDVDGIESQPSGSGSWVNQDEVEFITLLYHQLALRYPELKSSPEVGVISPYRHQVKLLKDSFRSTFGDQSRELIDVSTVDGFQGREKEIVIFSCVRCNKEQKIGFVSDFRRMNVAITRAKSAVLVVGSASTLKQDKHWNNLVESAKERNCLFKVPKPLTAFFAEDNLKTMKVERRPPPELNARVLEEINQEVVRQELMNVDDAADHADAGDDDDADMDADDGGGDD

SEQ ID NO: 182433 - protein, 520 aa, Zea Mays
MQIKGGFDVLKHGPELDIDGKRAHWIKASPWLLGANPRDLIMPVDGDDGFYPTGNELKPEIVSSNRKYRAHVLVCAPSNSALDEIVLRVLKTGIRDENNNTYNPKIVRIGVKALHSVKAVSMDYLIQQKLSGVDRTLDGGRRGAGEYDRIRASILDEAAIVFSTLSFSGSSIFSRMTRAFDVVIIDEAAQAVEPATLIPLIHGCRQIFLVGDPVQLPATVISQTAQKLGYGTSLFKRFQAAGFPVQMLKIQYRMHPEISTFPSKEFYEGVLQDGEGLSRKRPWHSYSCFGPFCFFDVDGIESQPSGSGSWVNQDEVEFITLLYHQLALRYPELKSSPEVGVISPYRHQVKLLKDSFRSTFGDQSRELIDVSTVDGFQGREKEIVIFSCVRCNKEQKIGFVSDFRRMNVAITRAKSAVLVVGSASTLKQDKHWNNLVESAKERNCLFKVPKPLTAFFAEDNLKTMKVERRPPPELNARVLEEINQEVVRQELMNVDDAADHADAGDDDDADMDADDGGGDD

SEQ ID NO: 182434 - protein, 417 aa, Zea Mays
MDYLIQQKLSGVDRTLDGGRRGAGEYDRIRASILDEAAIVHLLINYKCSLIIPITVFSLPSKICRMTRAFDVVIIDEAAQAVEPATLIPLIHGCRQIFLVGDPVQLPATVISQTAQKLGYGTSLFKRFQAAGFPVQMLKIQYRMHPEISTFPSKEFYEGVLQDGEGLSRKRPWHSYSCFGPFCFFDVDGIESQPSGSGSWVNQDEVEFITLLYHQLALRYPELKSSPEVGVISPYRHQVKLLKDSFRSTFGDQSRELIDVSTVDGFQGREKEIVIFSCVRCNKEQKIGFVSDFRRMNVAITRAKSAVLKGRPGVVVVGSASTLKQDKHWNNLVESAKERNCLFKVPKPLTAFFAEDNLKTMKVERRPPPELNARVLEEINQEVVRQELMNVDDAADHADAGDDDDADMDADDGGGDD

SEQ ID NO: 182435 - protein, 616 aa, Zea Mays
MREFTAMHSVASLPFKDLILSATEAHKDGDDQSRAWNVPEPLMDYLKVNLNDSQLEAVNAGLSRRSFVLIQGPPGTGKTQTILGLLSAVLHSAPARMQIKGGFDVLKHGPELDIDGKRAHWIKASPWLLGANPRDLIMPVDGDDGFYPTGNELKPEIVSSNRKYRAHVLVCAPSNSALDEIVLRVLKTGIRDENNNTYNPKIVRIGVKALHSVKAVSMDYLIQQKLSGVDRTLDGGRRGAGEYDRIRASILDEAAIVFSTLSFSGSSIFSRMTRAFDVVIIDEAAQAVEPATLIPLIHGCRQIFLVGDPVQLPATVISQTAQKLGYGTSLFKRFQAAGFPVQMLKIQYRMHPEISTFPSKEFYEGVLQDGEGLSRKRPWHSYSCFGPFCFFDVDGIESQPSGSGSWVNQDEVEFITLLYHQLALRYPELKSSPEVGVISPYRHQVKLLKDSFRSTFGDQSRELIDVSTVDGFQGREKEIVIFSCVRCNKEQKIGFVSDFRRMNVAITRAKSAVLVVGSASTLKQDKHWNNLVESAKERNCLFKVPKPLTAFFAEDNLKTMKVERRPPPELNARVLEEINQEVVRQELMNVDDAADHADAGDDDDADMDADDGGGDD

SEQ ID NO: 182436 - protein, 392 aa, Zea Mays
MAVEKSSSGTSTPSTTSTMDRFQKIVLSWDYLRLIAESKGGKQAKVLQHVKNTYVSVAEYLGVFEPLLFEEVKAQIIQGRSNDEEESGMDWRRGAVGSCTESEGFHKLSVAVEDNFQDNVSENDLLLISKEKFEEGSTPNAYAFALVEQRGGGIHISLRTFVAGEIQNLNVAKPVKSTRLQHFASIIASQNSLLWILKVCSLSTIMREFTAMHSVASLPFKDLILSATEAHKDGDDQSRAWNVPEPLMDYLKVNLNDSQLEAVNAGLSRRSFVLIQGPPGTGKTQTILGLLSAVLHSAPARMQIKGGFDVLKHGPELDIDGKRAHWIKASPWLLGANPRDLIMPVDGDDGFYPTGNELVLFYIGILAKIYPGSWTIYPLHGKEKNLYRNPKS

SEQ ID NO: 182437 - protein, 275 aa, Zea Mays
MTRAFDVVIIDEAAQAVEPATLIPLIHGCRQIFLVGDPVQLPATVISQTAQKLGYGTSLFKRFQAAGFPVQMLKIQYRMHPEISTFPSKEFYEGVLQDGEGLSRKRPWHSYSCFGPFCFFDVDGIESQPSGSGSWVNQDEVEFITLLYHQLALRYPELKSSPEVGVISPYRHQVKLLKDSFRSTFGDQSRELIDVSTVDGFQGREKEIVIFSCVRCNKEQKIGFVSDFRRMNVAITRAKSAVLVVGSASTLKQDKHWNNLVESAKERNCLFKRIT

SEQ ID NO: 182438 - protein, 429 aa, Zea Mays
MAVEKSSSGTSTPSTTSTMDRFQKIVLSWDYLRLIAESKGGKQAKVLQHVKNTYVSVAEYLGVFEPLLFEEVKAQIIQGRSNDEEESGMDWRRGAVGSCTESEGFHKLSVAVEDNFQDNVSENDLLLISKEKFEEGSTPNAYAFALVEQRGGGIHISLRTFVAGEIQNLNVAKPVKSTRLQHFASIIASQNSLLWILKVCSLSTIMREFTAMHSVASLPFKDLILSATEAHKDGDDQSRAWNVPEPLMDYLKVNLNDSQLEAVNAGLSRRSFVLIQGPPGTGKTQTILGLLSAVLHSAPARMQIKGGFDVLKHGPELDIDGKRAHWIKASPWLLGANPRDLIMPVDGDDGFYPTGNELKPEIVSSNRKYRAHVLVCAPSNSALDEIVLRVLKTGIRDENNNTYNPKIVRIGVKALHSVKAVSMDYLIAH
